United States Patent Application Publication US 2006/0134663 A1 - sequence listing, part 85

SEQ ID NO: 240288 - DNA, 1518 bp, Homo Sapiens
ttggcgactcttcatcacgtatttgggcttagatcttctggtgcctccctcggcgtgctacccataaggtaaaacagaaaggggctcatactcatcttatgggagagaatcaaacttacagggttgccaccagcagagtctccttggaggtgacatggatatgggcaacccaggaaccctttcgcccaccaaacctggttcccagtactatcagtattctagcaataatccccgaaggaggcctcttcacagtagtgccatggaggtacagacaaagaaagttcgaaaagttcctccaggtttgccatcttcagtctatgctccatcagcaagcactgccgactacaatagggactcgccaggctatccttcctccaaaccagcaaccagcactttccctagctccttcttcatgcaagatggccatcacagcagtgacccttggagctcctccagtgggatgaatcagcctggctatgcaggaatgttgggcaactcttctcatattccacagtccagcagctactgtagcctgcatccacatgaacgtttgagctatccatcacactcctcagcagacatcaattccagtcttcctccgatgtccactttccatcgtagtggtacaaaccattacagcacctcttcctgtacgcctcctgccaacgggacagacagtataatggcaaatagaggaagcggggcagccggcagctcccagactggagatgctctggggaaagcacttgcttcgatctattctccagatcacactaacaacagcttttcatcaaacccttcaactcctgttggctctcctccatctctctcagcaggcacagctgtttggtctagaaatggaggacaggcctcatcgtctcctaattatgaaggacccttacactctttgcaaagccgaattgaagatcgtttagaaagactggatgatgctattcatgttctccggaaccatgcagtgggcccatccacagctatgcctggtggtcatggggacatgcatggaatcattggaccttctcataatggagccatgggtggtctgggctcagggtatggaaccggccttctttcagccaacagacattcactcatggtggggacccatcgtgaagatggcgtggccctgagaggcagccattctcttctgccaaaccaggttccggttccacagcttcctgtccagtctgcgacttcccctgacctgaacccaccccaggacccttacagaggcatgccaccaggactacaggggcagagtgtctcctctggcagctctgagatcaaatccgatgacgagggtgatgagaacctgcaagacacgaaatcttcggaggacaagaaattagatgacgacaagaaggatatcaaatcaattactagcaataatgacgatgaggacctgacaccagagcagaagcagagcgtgagaaggagcggaggatggccaacaatgcccgagagcgtctgcgggtccgtgacatcaacgaggctttcaaa

SEQ ID NO: 240289 - DNA, 876 bp, Homo Sapiens
tgggggtaaaatctggttcctggacctgtcggttcaatttctccaggagtagggccagggagtcctttaccaactcctcacctccactcccccaccaccaacccaggactctgcatactctacaatactacttacagcagtgctttaaggattacattctgtggactgagtcttccttcattgagaggctcaaggtacttccaacagcccagggcaagctttatcaagacgatttgaaggttaatccagctaatgtctcccacttggtttcccctttcacctggcagggacccggtgggcaccttaaggcacctcagtggtccacttcttccctctttccctttcagatccgaaatgtgggcacagggctgtgtgcagacacaaagcacggggccttgggctccccactaaggctagagggctgcgtccgaggccgtggggaggctgcctggaacaacatgcaggtattcaccttcacctggagagaggacatccggcctggagacccccagcacaccaagaagttctgctttgatgccatttcccacaccagccctgtcacgctgtacgactgccacagcatgaagggcaaccagctgtggaaataccgcaaagacaagaccctgtaccaccctgtcagtggcagctgcatggactgcagtgaaagtgaccataggatcttcatgaacacctgcaacccatcctctctcacccagcagtggctgtttgaacacaccaactcaacagtcttggaaaaattcaataggaactgagccctcatgtccccttggcaggccccccagggtctggcactcactgcagacttcctctttcaagggaggcagggcccctgtgggcactaggtgtaaaagtgct

SEQ ID NO: 240290 - DNA, 1320 bp, Homo Sapiens
  misc_feature (93)..(101): n is a, c, g, or t
ctttgtacaaaaaagttggctgcttaagacttcaaaaagagattccttaaagtgaaataattttttgcaaaggggtttcctcgatttggagcnnnnnnnnncttccaccgtcatttctaactcttaaaaccaactcagttccatcatggtgatgttcaagaagatcaagtcttttgaggtggtctttaacgaccctgaaaaggtgtacggcagtggcgagaaggtggctggccgggtgatagtggaggtgtgtgaagttactcgtgtcaaagccgttaggatcctggcttgcggagtggctaaagtgctttggatgcagggatcccagcagtgcaaacagacttcggagtacctgcgctatgaagacacgcttcttctggaagaccagccaacaggtaagcggcccaattcattgttggagggtgaaagctgattagagaagagaattgaatacacaaaacctgtacgaaatgttttaagttgctcagtttgagtggtttgaattacgtgttgttgcttccttttttctgttttaatttgcagacattctcctccccccccaaaaaaaagggtgatttgtacaattttttatggtgctgtgtcctaaaggggatcctgaggggcgttgcctcgggtagttaaagtcttatgtgtgcataagttgcttattctttgtctacttcctatttgagatgttagtagagaactgtcctgggtgaatctttcagtattgcagggcttggcaacttgctgcccgacaaaatacatcagaatttctctttaagaacaatatgggatggattaaaaaatatatatatgggatgaaattgggggtacttcaataccttgcatgccacccaagcattccttatcacacagatgcattttaagtgtaacagcaagcctaatggctactcgattttctttcccttcaggtgagaatgagatggtgatcatgagacctggaaacaaatatgagtacaagttcggctttgagcttcctcaggggtaaatatcagctaaatgcatctttgaacttttctgtctaaaatatcttgccctcctttgatcacttactgttcttggagagcgttttaaaattttcattttcttgacacaggcctctgggaacatccttcaaaggaaaatatgggtgtgtagactactgggtgaaggcttttcttgaccgcccgagccagccaactcaagagacaaagaaaaactttgaagtagtggatctggtggatgtcaatacccctgatttaatggcacctgtgtctgctaaaaagaaaagaaagtttcctgcatgttcattcctga

SEQ ID NO: 240291 - DNA, 1505 bp, Homo Sapiens
ctttgtacaaaaaagttggctggcccttctgatggcttagatgcctcctctccaggaaatagctttgtagggctccgtgttgtagccaagtggtcatccaatggctacttttactctgggaaaatcacacgagatgtcggagctgggaagtataaattgctctttgatgatgggtacgaatgtgatgtgttgggcaaagacattctgttatgtgaccccatcccgctggacactgaagtgacggccctctcggaggatgagtatttcagtgcaggagtggtgaaaggacataggaaggagtctggggaactgtactacagcattgaaaaagaaggccaaagaaagtggtataagcgaatggctgtcatcctgtccttggagcaaggaaacagactgagagagcagtatgggcttggcccctatgaagcagtaacacctcttacaaaggcagcagatatcagcttagacaatttggtggaagggaagcggaaacggcgcagtaacgtcagctccccagccacccctactgcctccagtagcagcagcacaacccctacccgaaagatcacagaaagtcctcgtgcctccatgggagttctctcaggcaaaagaaaacttatcacttctgaagaggaacggtcccctgccaagcgaggtcgcaagtctgccacagtaaaacctggtgcagtaggggcaggagagtttgtgagcccctgtgagagtggagacaacaccggtgaaccctctgccctggaagagcagagagggcctttgcctctcaacaagaccttgtttctgggctacgcatttctccttaccatggccacaaccagtgacaagttggccagccgctccaaactgccagatggtcctacaggaagcagtgaagaagaggaggaatttttggaaattcctcctttcaacaagcagtatacagaatcccagcttcgagcaggagctggctatatccttgaagatttcaatgaagcccagtgtaacacagcttaccagtgtcttctaattgcggatcagcattgtcgaacccggaagtacttcctgtgccttgccagtgggattccttgtgtgtctcatgtctgggtccatgatagttgccatgccaaccagctccagaactaccgtaattatctgttgccagctgggtacagccttgaggagcaaagaattctggactggcaaccccgtgaaaatcctttccagaatctgaaggtactcttggtatcagaccaacagcagaacttcctggagctctggtctgagatcctcatgactggtggtgcagcctctgtgaagcagcaccattcaagtgcccataacaaagatattgctttatgggtatttgatgtggtggtgacgggacccctcatgcccagcctcggtgctgaagtgtgctgaagcattgcagctgcctgtggtgtcacaagagtgggtgatccagtgcctcattgttggggagagattggattcaagcagcatccaaaatataa

SEQ ID NO: 240292 - DNA, 1143 bp, Homo Sapiens
ttggctatcctaccccaccccgaattggatgcgtatgctaagaaggtcgcaaacaacccactgactataaaaatcttccccaacagtgtgaaggttccccagcggaaacacgttcgtcgtactgtgaacggcctcgacacatcagcccagcgctacagcccctacccgacacaggctgccaccaaggcaggcctgcttgccattgtcaaagtgccagccaaaagcatactcaaggactttgaggcacccgagcccggttgctccctgaggccatcatgaaccccccagtggcaccctatgctactgtggcacccagcactttagcccacccccaggcccaggctctggcccgccagcaggccctgcagcatgcacagaccctggcccatgcccctccccagacgctgcagcaccctcagggtatcccgccaccccaggcactgtcccaccctcagagcctccagcagcctcagggcctgggccaccctcagcccatggcccaaacccagggcttggtccaccctcaggccctggctcaccagggtctccagcacccccacaatcccttgctgcatggaggccggaagatgccagactcagatgcccccccgaatgtgaccgtgtctacctcaactatccccctttcaatggcggccactctgcagcacagccagcctccggacctgagtagcatcgtgcaccagatcaaccagttttgccagacgagggcaggcatcagcactacctcagtgtgtgagggccagatcgccaaccccagccccattagtcgcagtctgctcatcaatgcaagcacccgggtgtcgacccacagcgtccccacaccaatgccttcatgtgtggtcaatcccatggagcacacccacgcggccaccgccgcgttgcctgctgcaggtcctgtcaacctgcccacaggcatctctcgcgtccccactggctaccctagcgacctcaagccagtcacctggaaccagcaccagctggcccacctacagcagatgtgcagcgaggctagtgggacgccagcccctggcctgacaggcaagcatgcggcagacgcgagttggcaggcctggctttgtggcaaggcccctgcctacccgcagaactctgcctggcgcagtc

SEQ ID NO: 240293 - DNA, 1390 bp, Homo Sapiens
ttcccaagaaagtccattccatctttgaaagatcaccagcaagacagcagagtaacttcactcacagagtttatactctaaagattgaacaattaattaaaattaaaaggtactaactgctatcataggaaaaataaaagatgctataggagcacacagcaagggcaactaatctaggttagggttacagagaaagtttccctaaacaagtaatatttaagttgtattataaagaatagtaggagttacctggtcaaaatacagaaactgcaaatgtcaaagcattaccagtaaaaagtttcaaactgaggatgaatatggtagcataaagaactgagggagtggtatggccgaggcagagaatgaagtgaaaaagtagcacaaagatgaggcagcttacgaagcaccttataagatccatgttaaagagtttggactttctcctaaggacaattactaaagaattttaaccagggagatgaaataatccgtttgcaattttgaaaaatatttccagtctggagaataaaagagaagtaagattggaggcaataaaaccagttagaaagttgtcaggataatctgggtgaaagatgaaagctgccttgagtagagcggtggtaattgggatggaaagtagtgaattattatttgtgacatttaagagccagagtgattggcttggtgagggttaaacagggaggaatcaagtatgattcccaggcttctggcttgggcatctgagaagatggtagtacaactaacctaaatggggaaaaaggtgagaaagagttgcttacagcagttttggatatgttgagtttaacaaacatgaaaagcatgtctaaagagacaaaaatccaaggcctagaaaaatgaatgaattctgccatttaggcctcacagagggacccattagtaggagtggatcatgattattttatgacaataggatttcactgtaagaaaaactgagctttgaaggaacatggcagctgccttctgtagagaaagcagacagagacatgaacctccatctgtgcatatacttgcttggcattaagtgaattatgagaacacaagggtgatggcaaagtcagagacgtggattagcaaacagcttttctgccttctggtctgaagagttttctgaaattcattgacgacaaccctgatgctgagaaaatcttatgttaaggcttccaaaatattactggtagtaaaaagctgcaagtgaaagctaatgtttaaggacagtaaatacctaatggtcacaaattcctagccaggctacacccagcaccaataggaaaccctggatccactcagataaggctctagatggattagcaactttactcaactactactcagttcaaatgatcaccaa

SEQ ID NO: 240294 - DNA, 1701 bp, Homo Sapiens
aaacccagaggaactcgggtgaagttaaataaataaggaccagccctctcgagcccctcccagagttattgcatttctcctctcaaggagcatggagtcccaatgggatgtgaagagcctcacctcccgtggcctttcagcagctgggagaggtcgtaatggggctctgaaggtagctcagcgcactgttcgtggagtggacagggatggagacggggaagttgaacacggtggtggtggaggtgcctcggtcgagcacagccatggcggggctcccagcctctgccgaacagtgcggagccagcacctgggactcaaactgcagcagctggcccatgaagctgaagttgggagagatgatgcttcgcctctgcttcacaaactcaaaggcctcgtccagcttgactcgattagtcctcataaggtaagcaaggcagatggtggctgaccgggaaatgcctgcctggcagtggacaaacacccttcctccagcattcttgatggagtctggaaaaccaaaggagcggctggttacttgagagttcaggagaaccaccccaagcccaggtacagtgtatctgagaaaggtcatgtgtgtcttgtctagaaatggtcaacatcaccacatgccatcacatggatactgttcatggaggcaacgtgggcactgtgcaaaggatggcacaggatttaaactcagactggggatttccacttagcagatagatctcagaccagtcaattcaactttgtgagccccactttgcaaatctgtaaagtgggacatcgaatcaaattcatattttacaggaatgttgcccacaccagactgatactgaatgtgtggaagaaggctcagaaaacttcaagctcttgccacagaggttgggcttagtggctaaaatgagaagagaaaggcagaaaagccccaggcatccattccatttactatgaagtcaatggcctcgttgaaccaggagctgatgtctgccttgtggttgtcctccacagggatgctcttgtactggtagtgaccctcaaaatggttgggacaattggctgagacgttgatcaaggcagttatgcccaaggcatccagcatgtccttgcgggaagcgtgatacgcactgcccaggtacagaaagggcaggatttccaccgggccaccctgaaatccagaaatatccaacattcatcaagcttgctcaaagccaaggccagtgcccatacccacaaaaactttctgctggaaaagtcaatttcagataccgagtgaactcagttctgttgctggaggataaataaatagggaactaagcccatttgcctgggcaggaccagcaagttcatttccgtagagcctacaattggagactcggctccgtcagaccacttaactgtggaataatcatatccctgtgtcccctccgttataaataatgctgcaggtcactttctatattctccctggcactactcttccatgcctttgccagttcttacttcttccctgtggcagggacacctactaacctgatcgtagagtggggtactgcaggaactgcacccagattccgcgctgtcagggacgctagtactcaggggaaggctgagccccatgggggtcgactgtttgctgcacagctccgggcaggaagccgaaaacgcttcgtatcctcctgggaatacaaagacatccaa

SEQ ID NO: 240295 - DNA, 1120 bp, Homo Sapiens
  misc_feature (72)..(80): n is a, c, g, or t
  misc_feature (411)..(420): n is a, c, g, or t
  misc_feature (980)..(1000): n is a, c, g, or t
  misc_feature (1014)..(1023): n is a, c, g, or t
gtgttgaaatttgtctttattcacgagatcattagaggctaagtcatggcaacacgtgtagttcaattcaannnnnnnnngtgtaaaattttgttgagctgcatccatctgcatatgtaacactaatttggtaacagcttctttatactaagccagaattaatttgtcctcatggttttgttttaaatgtgtgagctgtattatatcacatttgaacaagtaatatagagaatataaatttagtttagagaaagaaaagtacaggcacactaaaaatgaattagaatctggcagctgacactgattaacaggttgagcaaattcaactagacctaaatctctgtaaacaattttgaaagacagaattctaactaaaaacatcttcaacaacataataaacctacgagattnnnnnnnnnngttggtttacccatcatcaatcaatactaggttaaattagaaaattgtgaacacatcatacaaaaagtaaaattactaaactatcctcagacttcatctgattaaaacaagacttctgggtatttgaaagcaccaaattattgatgaaaaatatctattctgaacagatccttgatcttatatacatattactactaagtaaaacctaatacagctttgatttctgaaatatttgtgaatgtctgtcactgcactcaaaaatcaagaaattatttcatctgtctaaattttgaggaaaatatttgctattttaattgaatgccagtagtgtgtgaattcatgtagtgtggcaaaccacccatttctttagtattctgctatttttataaaataagccagaatttgtggagacatttgtaaacaaaaaatctttcctaaaagttagacatcagaaaatagcgatattaatgttacgttatatacacagtttgctaaaccctaccataatctgtaaagtttttgtgtacaacaatcttagattaccgaaaacaaaataaaannnnnnnnnnnnnnnnnnnnncagacagagtctcnnnnnnnnnnggtaaataagaaatctaaaatttatgtttttaattttacaaaaataaaaaatacatctattataagagaacagcttgagccgggcatgctggtttat

SEQ ID NO: 240296 - DNA, 1491 bp, Homo Sapiens
ggcagcatcaatgacatagccaataaagcttgagtaccacttcatgcctcggatcttcacgttgtacttggcaatattctgatccatcctaccaacgccacccacttctcgtgatacagcttcaccagtgatggctggtggacctgagtccgcgttttagctgctccagagtgacgactggtcagcctcactggctctatgcccacagcattggagcaaatgttgaccacgctgctatcgtgccagcggcacacgatgatctcctcactctcatcgactttgtaatcaaatgaacccctcttcattttttttcagttctttggggtcttttaggggacatcgctcagtcctgtactcacgaacagttcctgtggctttcaccccctttttcctcaaaatggacatcagtttaacacttgtgaaaaccttgtcaaaaaatatgtgatatggcagaaaaccacgctcctgaagcgcatccacaaattttattaccatactgcctcctagatccaagctcctgtctggcttggtaaacagtgtgccctgtgagggctcaaaccacaccaagtagcctctgctggttgtcccacaccaaatcttgtagccaagtcgcacaggcttccccctgtgcagctgcttggacccccggtgcccaaagtactcacacatagactcgccaaagctgtagaactcttccaagggtgcatgcttctggaaattgcagttcatccggatgatgagaggtctgaccttggcaaacctatcacttgcatcaagttcgttgttatctgcaaaatgtaagtatgagaagattagttcaaatctgtcccttctaattgcatcagccacaagatgatgatgtgaatcgggagaggtttcccagaacatccttctccttggataagagatgtacccacttaaaatcaaaatgcccaaaacacacttcaattcctgagccgtaagactcaaattgacatttttctgccaagcataacgattggtttcattaacaatgaaattaattgttccttcatcaaaaaacaactcaaaaaggcccacgggactcagctcttggcttttcagatcctcaatatgaggatctgatgcagtccaactgccaaagtctggacgaatatctcttttggtccaaatgcgctgaggtttcacaactgctttctgcctcttcttggctggctgcagctccaggtcgtcattatcctccccggtgccagagtcctcacacaggactgaagcatgcagcacactgccaggtaggtgagcacctcgctggctgtcttcatcccctgagtcctcatcagtgaattcccccgcagcattgtcgggaggtgcaatgaaaatctcttccctgttgttgttggactcttcctcctccatagcattcagaacctcaagcagctttgcagacttcacctttgagtggatacctctcccagcaatgacatctctgttatgacaggaaacagaatccaa

SEQ ID NO: 240297 - DNA, 947 bp, Homo Sapiens
aacaactatttgtagatggatttgaagaacatgtcttgatgggatgcttgatgcttgtgcttttctgagtttctctcctgctttggacaattggaactggctcctcagagcccaaacgttgtgccccagctccttcaagggcagcacccagagagacagggttgtgggatggagacatcgaggctgcacactcctgcaggggccctgctggccacccccctgcaagtggcacctctccccacctgtgaggtcacacacaccacacagatgcctctggagcagtggtctggacaggtccaccccaccccacccgttcgtgtctcaggagtgtcccgcgggcaggaaggctgaggccggtgaactctcatgtgcctgcctgtgctttttctccaggtggggcacgtagccagttcaggtgggaggtcgcctgtccctcgtggggcagtttctgggatctgaaccgtgggtgagcacacaggctgaggaaatggatgtgggcagtttggatgagggccagggttccaggagagaccaccagcctggctaccctcggggacgggaagagagaagccacagatcgggggtccttcttacgtgggggtgggatctgttaacatttcatgttctacaagtgtctggagccctccaggaatcactgtatctatgtccgcctgtggttcttggtgtccgcggtgccagaggtttccagtttacagccctctcaaggcatgcccgcctctcacgcattcctgttctgcaaatgctcctgggtgttctgctggagccgtggggagtcagtctcgaggacctcaggggacagccgaagctcctcatgacctaaccctaactgaggagggtgtggggctgggcagccgccagctcctctcagccgggaggtctgcggcctgagcgcccctaacttcatgtgggttcttaccggcagtggg

SEQ ID NO: 240298 - DNA, 1129 bp, Homo Sapiens
  misc_feature (453)..(462): n is a, c, g, or t
  misc_feature (858)..(868): n is a, c, g, or t
  misc_feature (996)..(1023): n is a, c, g, or t
ctttgtacaaaaaagttgggtattttatgtgctgagttcccgtttcactgggtatgaactgtgaaatggactgaatcctggccactttatgagtttgtttggttttataaggcatttcaatgtacattctataaatacaagcactccatttgcaaacagatcttaagctaatattttctttcccattcatcttgccctccccctcctcccgccagctttaaagttcagtggagaagccagatggcaattcagacaaaggtatactcttcctgcttcatgggtggtggcacgggaatagatagcccttagccctttccctcccagtcccagctgagccctcagaccacttgcttcccacataacaatgtcgcctccatttccgaggaacatccttgcgtagagaatgaaatatgctgcaatcatttctgcatccttactcctcacccccaaagnnnnnnnnnnggcctagcagggaagcagcatgcaggcttcacagcttaatgccaaggacagcgagtgaggctgggagcttctcttgggcctgctgggtctgtcagctctcggaatagggacagtccttactggtgccccaaggtgggacttggagaatattttgcttggcatatgtttggtctgaatggtgtagttgctggttccctagagaggaaaaggtggcaggcccagctttgctgggaaatggctcttaatttccagttgaaaccctagtagaatttgtgaatgaaaacctcaaggttgagcccctctgccaagcagcagaactagtagaaggggatgccggggcaaagccctcatttgccaagcaaggaggagagaatgtacgtgggctttgtggccgtnnnnnnnnnnngccctggctttttcaggttattgcccccctatggaatcctttgcagaatggtactcaattaatggtttaaaacaacacatttataaatgactctgtgccggatgtccctcaatcagtttgggtttgcnnnnnnnnnnnnnnnnnnnnnnnnnnnnggtatcctgtaccttgcagtgggggggaagatagtattttaatatttgtacaaaagttaatttaattttaattgttttttgtatataaatgcctttttaaataatt

SEQ ID NO: 240299 - DNA, 1114 bp, Homo Sapiens
  misc_feature (131)..(158): n is a, c, g, or t
  misc_feature (690)..(699): n is a, c, g, or t
gccttcataaaaacttttttttaattatttaaatagatgcagttatatacatagaacaattaaaattaaattaaactttgtacaaatattaaaatactatcttcatgcccactgcaatgtacaggataccnnnnnnnnnnnnnnnnnnnnnnnnnnnngcaaacccaaactgattgagtgacatcctgcacagagtcaattatgaatgtgttgttttaaaccattatatgagtaccattctgcaaaggattccatagtggtgcgataacctgaagaagccagggcagggtgtggggactgccacacagcccacgtacatctctcctccttgcttggcaactgagtgctttgcccctgcatccccttctactagctctgctgcttggcagaggggctcaaccttgaggttttcattcacaattctactagggtttcaactggaaattaagagccatttcccagcaaagctgggcctgccaccttttcctctctagggaaccagcaactacaccattcagaccaaacatatgccaagcaaaatattctccaagtcccaccttggggcaccagtaaggactgtccctattccgagagctgacagacccagcaggcccaagagaagctcccagcctcactcgctgtccttggcattaagctgtgaagcctgcatgctgcttccctgctaggccnnnnnnnnnnctttgggggtgaggagtaaggatgcagaaatgattgcagcatatttcattctctacgcaaggatgttcctcggaaatggaggcgacattgttatgtgggaagcaagtggtctgagggctcagctgggactgggagggaaagggctaagggctatctattcccgtgccaccacccatgaagcaggaagagtatacctttgtctgaattgccatctggcttctccactgaactttaaagctggcgggaggagggggagggcaagatgaatgggaaagaaaatattagcttaagatctgtttgcaaatggagtgcttgtatttatagaatgtacattgaaatgccttataaaaccaaacaaactcataaagtggccaggattcagtcgatttcacagttcatacccagtgaaacccaa

SEQ ID NO: 240300 - DNA, 1131 bp, Homo Sapiens
cagcttacactgtggatgtgaacacagctgtacacatacacaaaattttattgtaatttatactaaaaaccaatctccctacagctcctcgggggacagctcgccggttttctcatttgctccgttctgggactcggacaaacggggcacaaggcctctttctgctgatacaggtgggtcccaagtctgcatttcctgtctggactcagcatcaccaagggttacatgatagtcttgaaggaatgttgctcagaatttcaggcgactggtctggaggagagaagggggcaagtgcttaccttgaacccgtgcaggtggacagatgtgtggtggaggcatttgagggttacctcagaccacatgctgacccacgcagggccaaagtcgctcattgtgtggaggcattttgcggtggaaacacacctggatgcagggagaagggctggggcctggctcatgcatcagagggtctctctggtaagccttcttcctccgtgggactctggagggtctggaggctgtggcctctctcctggtctctggtcaggtggccagctgggaggacagctgcagtcaggccagcaggagagggactgtgactgtgcaggtgagaagggtggtcagtcttcaccctcaagaccaactcagaaggcagccatttcaaagcgtctcaggcagcccaagcttgctggccagtccacaagcttggccagtcatcttcactgtcatggttgccctggggcaatgcccgtagcagtcaagagacaaacccaaaagggaactaggtactccacaaaataaggcttttctggggtccatttttgaatgggagtgaaggaaccagaattgggtagcacaggtgaaagtcagaggctgaaggggagggcaataggagcctcctaatagcaatggggctcctctgatggctgccattgctttgaggtcaccctgacagtcttgctgaacctttcttcgattttgagcttagcaagctcctactggaccttctctccttcactggggctcagcttgcaggggttctagaaatatctccacagatcgctcttcctccctgggcctcagtttcctcatctgcacagtgaggcctattaagccaggtgttctgacttt

SEQ ID NO: 240301 - DNA, 1214 bp, Homo Sapiens
  misc_feature (376)..(384): n is a, c, g, or t
aactttgtacaaaaaagttggctctgcctttttactatacagcataccacgccacagggttagaaccaacgaagaaaataaaatgagggtgcccagcttataagaatggtgttagggggatgagcatgctgtttatgaacggaaatcatgatttcccttgtagaaagtgaggctcagattaaattttagaatattttctaaatgtctttttcacaatcatgtactgggaaggcaatttcatactaaactgattaaataatacatttataatctacaactgtttgcacttacagctttttttgtaaatataaactataatttattgtctattttatatctgttttgctgtaacattgaaggaaagaccagacttttnnnnnnnnngagtttatttagaaagtatcatagtgtaaacaaacaaattgtaccactttgattttcttggaatacaagactcgtgatgcaaagctgaagttgtgtgtacaagactcttgacagttgtgcttctctaggaggttgggtttttttaaaaaaagaattatctgtgaaccatacgtgattaataaagatttcctttaaggcagaggctggtcgagatgctgctgttatcttctgcctcagacagacagtataagtggtcttgtttctaagattcctaccaccagttactttgggccaagtatccacatccccttgcgtatgggaggtgggtgaagagtgttggatgcaaagtggttattatgggaagtagctcgatggtaaaaggacaaacacctatctatcttagagcttaagcctgtatgtgcttattcccaagggagatagaggtgtttaatcacaaggacagcatgagttagaggacactggcatcaacagctgccacagccgtgcacaccagggccagagcagcccactgacatctgtctttggtcttgagatcaaatgcatcccattcttcatacattagaaggtcgacctccttgaagcagaccaagtatagcaagcctctaaaaggactactgagaaacagaatcagaaactctagaactctagttagggcccttcagcagggctgcagagcctccctggatacccaggcctgggaaagcctgtctggtcttgtcaccccaggtgacaaatacaactggaatctttcaatgagttaatgccaacttttttgtacaaagttggccattataaaaaagccattgctc

SEQ ID NO: 240302 - DNA, 953 bp, Homo Sapiens
ggctccgttcagacgcggcagctgtgacccacctgcctcctccgcagagcaatggcggtgtctgccgggtccgcgcggacctcgcccagctcagataaagtacagaaagacaaggctgaactgatctcagggcccaggcaggacagccgaatagggaaactcttgggttttgagtggacagatttgtccagttggcggaggctggtgaccctgctgaatcgaccaacggaccctgcaagcttagctgtctttcgttttctttttgggttcttgatggtgctagacattccccaggagcgggggctcagctctctggaccggaaataccttgatgggctggatgtgtgccgcttccccttgctggatgccctacgcccactgccacttgactggatgtatcttgtctacaccatcatgtttctgggtgaggggaactgtgggaaatattgactggcctgccagaaacacagaaatagaagcatgctggtgaatggtcaaagtctttggcaccttatttcacttctgctgtgatcaatttcatgctgttgacctgtgtgtcacttaagctgtgatcccataattctttttaaaatattaaaataacatttaattttcatttagttttatgtgattatacaatgcttgatttttcttaattccaaccatatcctggtccagggaaactgggcctgtggtgatctcttgacctcttaatcctctccctacaaatcccaggggcactgggcatgatgctgggcctgtgctaccggataagctgtgtgttattcctgctgccatactggtatgtgtttctcctggacaagacatcatggaacaaccactcctatctgtatgggttgttggcctttcagctaacattcatggatgcaaaccactactggtctgtggacggtctgctgaatgcccataggagaatgcccacgtgccccttt

SEQ ID NO: 240303 - DNA, 1055 bp, Homo Sapiens
ttgggtgaacgatgagaatgtgcagcaggtgctagaggagcttcgagggtactgcacggatgtgtctgcggactttgcacaggctgccatctttgccataggtggcattgccaggacttacacagatcaatgtgttcagattttaacagagttgctgggtcttcgacaagagcacattaccacagtggtggtgcagactttccgagacctggtttggttgtgtcctcagtgtactgaagctgtatgtcaggccctgcccggctgtgaagagaacattcaagatagtgaggggaagcaagcacttatttggctacttggtgtccatggggaaagaattcctaatgctccttatgtgttagaggactttgttgagaatgtgaagtcggaaacatttccagctgttaagatggagctgctcactgctttgctgcgccttttcctctcccgacctgctgagtgccaggacatgctaggacgtttgttgtattactgcatagaggaagaaaaagatatggctgtacgggaccgaggtctcttctattatcgcctcctcttagttggcattgatgaagttaagcggattctgtgtagccctaaatctgaccctactcttggacttttggaggatccggcagaaagacctgtgaatagctgggcctcagacttcaacacactggtgccagtgtatggcaaagcccactgggcaactatctctaaatgccagggggcagagcgttgtgacccagagcttcctaaaacttcatcctttgccgcatcaggacccttgattcctgaagagaacaaggagagggtacaagaactccctgattctggagccctcatgctagtccccaatcgccagcttactgctgattattttgagaaaacttggcttagccttaaagttgctcatcagcaagtgttgccttggccggggagaattccatcctgacacccctccagatggctctttcaagtagtgaacatccagaccatcgcaatgagtagggctgggtctcggccatggaaagcatacctcagtgctcaggatgata

SEQ ID NO: 240304 - DNA, 1493 bp, Homo Sapiens
ggttctactttacacatttcatgagccagcagtggacttgagttacaatgtgtaggttccttgtggttatagctgcagaagaagccatcaaattcttgaggacttgacatctctcggaaagaagcaaactagtagactgatgagctggattgcttagattgataacatttacaaataggagtccagttgacatgctattaatgttgaaataaccatgcctgtactggtcagtgagttcggtcagctggttggaataccagttccagagctttaggcgacacatttgaattgagttatcattgtagagagtcatggctccatcagctatggttatcttctttggtctgaatgcctatcagtccttaccagctgtagcagccactgcttggtaaaactttgccacgaagtctggctcactgaactccagctgtctgacaaattcattgcgctcctgctcagcccagcctcgaaaccactgatcccaaagatgtagctggcactcaaagatagaaggtggtcggtctgccccagacacactaagctgctccagactatccagcagtggttgtaatttttctggcactgccttagctaccaggtcctctaggaaacgttcacgctggggacctgaccaattggcaaaccagtgaagaatacacttcatctcctgggaggtgatgtaagacatcagaggaggggaagggttagtattgtgtggtactgagggtaagagagatgggaaggatagtggcattgaagaggatgactccagtggcatcctgaaacataaaagcactgttatatgctctccaggtagagcaacgaaaatacaactttcaagcaacaagacatcttaccacactcaattagcatctacagagaaaattactttttatgaattcaaagacccaaaataataagagtcctttatttagattattatccaactaccttagaaaaatcaccaaaaataacttcatttcctatttgcctgcctttttcaaacccattcttccccacccactgtcttcctccatctttcttataaagaacctaaaaataaccaatatatttcttgttcattctcttcctcttacttctatgccaggttgggtaaagaaaaaaacaatgattaatgttggtccattacatcttctccaaaatgaaaatgcacacattttaaaatctagtacgtgcagctggtcaaggctgatgctaattgttttgcagctatcaacagtgggggaagaaagaaaaaacatttatgatgaaagagccttcaatgtgcatataagcctctgaaatatgccaacaactccataacatccgttacctccttacatttcctgtaaagcaccaggaaaagttaaaaagcagagtaaggaccttgctcaaaataaggtaacgcatgaaagaaccagaagcccgggtgtttgagacgttcttaaaaaagagtccagttggtttgttggtttagagatctaacaagccaa

SEQ ID NO: 240305 - DNA, 924 bp, Homo Sapiens
ttggcttgccgatagtggtgacggcggcaacatgtctgtggctttcgcggccccgaggcagcgaggcaagggggagatcactcccgctgcgattcagaagatgttggatgacaataaccatcttattcagtgtataatggactctcagaataaaggaaagacctcagagtgttctcagtatcagcagatgttgcacacaaacttggtataccttgctacaatagcagattctaatcaaaatatgcagtctcttttaccagcaccacccacacagaatatgcctatgggtcctggagggatgaatcagagcggccctcccccacctccacgctctcacaacatgccttcagatggaatggtaggtgggggtcctcctgcaccgcacatgcagaaccagatgaacggccagatgcctgggcctaaccatatgcctatgcagggacctggacccaatcaactcaatatgacaaacagttccatgaatatgccttcaagtagccatggatccatgggaggttacaaccattctgtgccatcatcacagagcatgccagtacagaatcagatgacaatgagtcagggacaaccaatgggaaactatggtcccagaccaaatatgagtatgcagccaaaccaaggtccaatgatgcatcagcagcctccttctcagcaatacaatatgccacagggaggcggacagcattaccaaggacagcagccacctatgggaatgatgggtcaagttaaccaaggcaatcatatgatgggtcagagacagattcctccctatagacctcctcaacagggcccaccacagcagtactcagccaggaagactattacggggaccaatacagtcatggtggacaaggtcctccagaaaggcatgaaccagcaatattaccctgatggtcataatgatta

SEQ ID NO: 240306 - DNA, 1606 bp, Homo Sapiens
aaaataatacagctgggataatctgcctttgctttccatatggatgctccaattcatcagtatggggacactcatgaatcacagagctatgttctgataattctgggtctgcaagaggatctgggagtaaataacaatcaattttcttaaagatatgctagaaagtagttagtacttccaatttctcatccaaatcccaaaaagggccagccctgagaagcttacctgaaatatttctttcttctctcatggaagtccataaaagccacccctcctccttatcctttcaactgggcaactatagagtgagggagattctaattgtattaggcacttttcctcactagttagatgttgacttttcctctaaaactccattttcagattccccctcacaaccagcagaaagatgactaccttgcttgactatgtttgtatttaaaccttgggggaactaaaaatctattcaaatctcatggacaaccttattttcctcactgaacctccttccttagtttcctttgccttcaagtcattcctctcttctggaattaaccttcacttaccctgtgccaagacatcagacccaagcaagaggccctggcatcacctgtgccattcattttgcatacacagtctcacctgacatcctaccggactaatttaaattcttcaaaggaaagccttgcacttctcttccaaagacagccaagtcacattttattgaaatgctctcttaatttccatcacttctaaaactcagcaagtctaaactcttcaacttaggtcgtgtctcaagttactttttcactcaccaatcagaaagccgtacacttctctctactgaataacagagttggcggtgagggggtgcaaaaaatggaggactcttggaaaataagacataaaagaaaaattacagagtgttagtttggaacgacatgcattcaggacttatttcttaggacctgaggggtaatgcccatgcatacagcttttattccaagtcatctatgctacagatataggactaagaaagaaccaagtcaatcttcctccttcgatctcccttccaggacttcaacagtgctcctacgtttactgtcgtccaaaaccagggatgcaaaatacattcagttcaaagacttaatgcttcttagctcaacattaagtccaaaccccgagaatccactgataacaagtaagtaaagggatgtgctaattttttttaattgtagatgacattcacacacataattcccctgtacccaaatcagcattaattgtccttcttatataagtcccatgaatttgggatccctgatctcagtgagagcgttttgcttttccaatggggtctatataaacagttttctttcattgtgacagaatcctcagccggcaaataaaaacaaacttacatgatattgcaatactgagaccaccttagagcttaagacgatttttaagaaaaaaaatactggcacaaaatttaataaaataaattttaacacaacaacggttttggcccctccccactgaagtccatctttgcttcaaaactagagtgataggtaaatagttctcagccaacttttttgtacaa

SEQ ID NO: 240307 - DNA, 1390 bp, Homo Sapiens
ctctccgggactgaaggctacccccgacctgtaccccgcgctcccgctctcgcctctctctcaggcgaccctccactcctcagcgcccgcctccctgcatccataggggcttccctactgccccgacctgcattccccggggtaaagcgagctctggagatcgcatagagaaactgtagtgtcctgggtccgagcgacgcccgcttcccgcaaccgggagagccgattccggccgctgccctcggggggctccgcatacatctagtagcgccatgaccgcccagcacccagagatctgtccgctctcggaggaggaagtgaaagcgaaagccacagatcgaaggggagggaacaagactcttttccacatccccctgccttttccgagaaaaggacagttagtgcctggaccaggaccatcacactggggaccggcttctctgctctcccgttatgggggtcgggggaatgatgggtcaagggtcttccgaagaaagcgagaaaggaacaggcgccttcaaaagcccacttggcgatgggttacagtaagaggtacctccaggcccgggcatccgctggaaacaggggtgggtagggtcgtgtcatctaaaggcgcagcttcaaccagaagactagaagtcagccaggagctgggagtagtgtcacgcggggtgggggttcctatgagcatcactttacaaaaccaggagggacggaagtgcgagggggcagagtcttggaaacaggtcctgggccaactgcaacagaatatacccgccgcgtgtaggggaaggcggcgccagggagagggcgcagtctctgaatctttccacggggtccatcctagggcccctccaggttcaacggtctcctaacctgtagtcacccacccaagagcgtgccctttctgcccgcccttcctagcgttgctccctgcttggctgagcactgcggagtttcacgcctctaaaccccgcctcttcttgcaacctgtgttggcctcatctacccagcaactgtcgacgtcacacgacctgggcctccctgaatgggagatatttactaggcaatcccgcctactgttctgaggtttcccctccaggtgcagcttcagagccaggcgagccaggaaggaccagcgggcgaggtggtgagttgtgaggcgcgcccagtccctctgttcccgcctggcacttgctctggccgcgcccgccccatctgccacttcggagaggccacggctctgagctgcggccgctagtgccctgatgggccctgtggctggggtcttgcacattcttgggggtgggcctaaggggataggggaagtggaaagggcctcataggaattaaaaagcttaaggaaaaagtgatgcagttagggggtaaa

SEQ ID NO: 240308 - DNA, 1138 bp, Homo Sapiens
actttgtacaaaaaagttgggttttgggtgaccacattaatccctcactattctggtcgtgtgattgacatcctgggaggtgattttgacccccatgcctttgccagtgccatcttcttcatgtgcctcttctcctttggcagctcactgtctgcaggctgccgaggaggctgcttcacctacaccatgtctcgaatcaacttgcggatccgggagcagcttttctcctccctgctggccaggacctcggtttcttccaggagactaagacaggggagctgaactcacggctgagctcggataccaccctgatgagtaactggcttcctttaaatgccaatgtgctcttgcgaagcctggtgaaagtggtggggctgtatggcttcatgctcagcatatcgcctcgactcaccctcctttctctgctgcacatgcccttcacaatagcagcggagaaggtgtacaacacccgccatcaggaagtgcttcgggagatccaggatgcagtggccagggcggggcaggtggtgcgggaagccgttggagggctgcagaccgttcgcagttttggggccgaggagcatgaagtctgtcgctataaagaggcccttgaacaatgtcggcagctgtattggcggagagacctggaacgcgccttgtacctgctcgtaaggagggtgctgcacttgggtgtgcagatgctgatgctgagctgtgggctgcagcagatgcaggatggggagctcacccagggcagcctgctttcctttatgatctaccaggagagcgtggggagctatgtgcagaccctggtatacatatatggggatatgctcagcaacgtgggagctgcagagaaggttttctcctacatggaccgacagccaaatctgccttcacctggcacgcttgcccccaccactctgcagggggttgtgaaattccaagacgtctcctttgcatatcccaatcgccctgacaggcctgtgctcaaggggctgacgtttaccctacgtcctggtgaggtgacggcgctggtgggacccaatgggtctgggaagagcacagtggctgccctgctgcagaatctgtaccagcccacagggggacaggtgctgctggatgaaaagcccatctc

SEQ ID NO: 240309 - DNA, 1462 bp, Homo Sapiens
  misc_feature (189)..(197): n is a, c, g, or t
gaaagaaaatgtatttattcctttccccccaatagttccctcatttattaaaagaaaaaagaagactggatataatagcattctctaaaattatcgtttaaaatttcatttttctatcagatttaaattaactttattaaaattatattagccacagactaacagaatattcattatatattttacagnnnnnnnnngctgcatcttcaaactgatgctctcccaactgagctatttcagctgtctcacattcacatctttaatttagaaacatgtatctttagcaggttcttgcggattaaaacggtttctctgtgaagataaatggacctccagacctcacgggtaaagcctaactttgaaaatcttcactttgtgtgtggatgaatgatagcttaggtgctgtgaggtatctgagataaagcagagtgtccctgaggtgcactggccggcctccttccccacacttgtttggttgggttgatggggtctccctctccctgcacccttctgagggctctgtcctatttgctttgctctttctggccctgagctgcagctcctgggtctgtaagcctggggaagggccagtggccacgcccagcccctgaggctggtccaaggacagtgaggccctggagccccaggctgcccctcctgagtactcacccttgcggcaggcgtctacttgctctgcatgctgtagcagtgcacgtcctccttccccttggtggtgtagcctgggagaggctgcccatacttatccacacaccagcagaagccccgcttcctgcctttggaagggcgacactgtgggagagaaacagaagacagagaagtgaatgctcctgggtctggtgtcaggtcggtggccagggcgcatgatggtttgccagcgtgactctgctatgctgagaaagcacaacagaaatttcagctaaggcaacacaagagccacgcgtgcctaggcccgctgagtgtgcgcctgtgcatgcgtgtgggtgtaacttcctgctccaagaaagcgggggtgggggcagttttgtgtttctaggagtataaggtggacaccagcccttgtagaacctcttgactgacttctctgccaaatgtgggactgagaacatccccgctgcctgcgaatgtcacagctatgactttggagcccacatccagcctcacatgacaccttctcagtatgactttgttgaatgaatatgactttgacagaaaacgtgggtataaacgagcaatggcaatggaggaaagcttaggctttctgactgtggccactgctatgaatcctagtatatggtcaccctgaggccactgtggctcacttaggtctccaaaggccaattctgtagatagcatagtatcaattgtccaattagaaagccaattgaaatagtgccatcacataacacaaagcctatagccaacttttttgtacaaagttggc

SEQ ID NO: 240310 - DNA, 897 bp, Homo Sapiens
gagcttagagaggaaagctccactatggctcccaaaccaggaaaggagccatagcccaggcaggagggctgaggacctctggtggcggcccagggcttccagcatgtgccctaggggaagcaggggccagctggcaggagcagggggtgggcagaaagcacccggtggactcagggctggaggggaggaggcgatcttgcccaaggccctccaaccgcaggctccagggcccgctcaccttgctcctgctccttctgctgctgcttctccagctttcgctccttcatgctgcgcagcttggccttgccgatgcccccagcttggcggatggactctagcagagtggcccagccaccggaggggtcgaccacttccctgggagctccctggactggagccgggaggtggggaacagggcaaggaggaaaggctgctcaggcagggctggggaagcttactgtgtccaagagcctgctgggagggaagtcacctcccctcaaacgaggagccccgcgctggggaggccggacctttggagactgtgtggggcccgggcactgacttcggcaaccacctgagcgcgggcatcctgtgtgcagatactccctgcttcctctctagccctcaccctgcagagctggacccctgagctagccatgctctgacagtctcagttgcacacatgagccagcagaggggttttgtgccacttctggatgctagggttacactgggagatacagcagtgaagctgaaatgaaaaatgtgttgctgtagtttgttattagaccccttctttccattggtttaattaggaatggggaacccagagcctcacttgttcaggctccctctgccctagaagtgagaagtccagagctctacagtttgaaccaa

SEQ ID NO: 240311 - DNA, 2803 bp, Homo Sapiens
gacatgggggtcaggcaagctgacacccgctgtctgagcccatgttcctctcccacatcatcaggggcacagcgtgcacttggggtcccaagcctcccgagccgagccaccccagtcaccccctggctcctggcccatgtgctgtacctgtgtctgatgccctgggtccccactaagccaggccgggcctcccgcccacacccctcggccctgccttctggccatacaggttctaggtggtgttgaagagcagcaaggagctgacagagctgatgttgctgggaagacccccaagtccctcttctgcatcgtcctcgggctccggcttggtgctcacgcacacaggaaagtccttcagcttctcctgcagggcccgctcgtccagggggcggtgcttgctctggatcctgtggcgggggcgtctctgcaggccagggtcctgggcgcccgtgaagatggagccatattcctgcaggcgctctggagcagggtacttggcactggagaacaccttgatggccttcttgctgcccttgatcttctcaatcttggcctgggccaaggagaccttctctccaatggcctgcacctggctccggctctgctctacctgctgggagatcctgccatggagaagatcacagaggctgggctgctccccaccccctgcacacctcctgcttctaacagcagagctgccaggccaggccctcaggcaagggctctgaagtcagggtcacctgcttgccagggccgatcttggtgccatccagggggcctctacaaggataatctgacctgcagggtcgaggagttgacggtgctgagttccctgcactctcagtagggacaggccctatgctgccacctgtacatgctatctgaaggacagcctccagggcacacagaggatggtatttacacatgcacacatggctactgatggggcaagcacttcacaacccctcatgatcacgtgcagcagacaaagtggcctctgcagagggggaacggagaccggaggctgagactggcaaggctggacctgagtgtcgtcacctaaattcagacggggaactgcccctgcacatagtgaacggctcactgagcaaaccctgagtcccaaccaccgcctcagtgtggtctagctcctcacctgcttccatcctccctggtgcggggtgggcccagtgatatcggctgcctgctgttccccagatgtgccaagtgcattcttgtgtgcttgcgtctcatggaacgccatttccccagacatccctgtggctggctcctgatgcccgaggcccaagtgtctgatgctttaaggcacatcaccccactcatgcttttccatgttctttggccgcagcaaggccgctctcactgcaaagttaactctgatgcgtgtgtaacacgacatcctcctcccagtcgcccctgtagctcccctacctccaagagcccagcccttgcccacagggccacactccacatgcacagcagcctcagcactcaccgggcatgagcgagcctgtgtggtgcgcagggatgagaaggcagaggcgcgactggggttcatgaggaagggcaggaggagggtgtgggatggtggaggggtttgagaaggcagaggcgcgactggggttcatgaggaaagggagggggaggatgtgggatggtggaggggctgcagactctgggctagggaaagctgggatgtctctaaaggttggaatgaatggcctagaatccgacccaataagccaaagccacttccaccaacgttagaaggccttggcccccagagagccaatttcacaatccagaagtccccgtgccctaaagggtctgccctgattactcctggctcctttgtgtgcagggggctcaggcatggcagggctgggagtaccagcaggcactcaagcggcttaagtgttccatgacagactggtatgaaggtggccacaattcagaaagaaaaaagaagagcaccatctccttccagtgaggaagcggggccaccacccagcgtgtgctccatcttttctggctggggagaggccttcatctgctgtaaagggtcctccagcacaagctgtcttaattgaccctagttcccagggcagcctcgttctgccttgggtgctgacacgaccttcggtaggtgcataagctctgcattcgaggtccacaggggcagtgggagggaactgagactggggagggacaaaggctgctctgtcctggtgctcccacaaaggagaagggctgatcactcaaagttgcgaacaccaagctcaacaatgagccctggaaaatttctggaatggattattaaacagagagtctgtaagcacttagaaaaggccacggtgagtcccaggggccagcactgctcgaaatgtacagcatttctctttgtaacaggattattagcctgctgtgcccggggaaaacatgcaccacagcgcatctcgaatcagcaggattttgacggcttctaacaaaatcttgtagacaagatggagctatgggggttggaggagagaacatataggaaaaatcagagccaaatgaaccacagccccaaagggcacagttgaacaatggactgattccagccttgcacggagggatctggcagagtccatccagttcattcaacacctggttagaaaactggggccagcacacaggggaagggtaagctggtttcatgatcgaatcaaggctcagacaatttttaaaagccagagggtagactgcaatcaccaagatgaaccaacttttttgtacaaag

SEQ ID NO: 240312 - DNA, 1171 bp, Homo Sapiens
aacaatctcattttcctaagaaaaaaaatacatgttaatcataggaatatcacgaaaacagaccatttccagttttcactgtagtctgggatgtttttctcttcctgtttcctctgcgattggatttgtatatactacagctaggcattgttttccacagagaatttattcctattgggttcattggttctttaagtagagaactgtggatggaacaagtaaaatattttggaatcaacctatgtagtgatccacaaatgtaagctatatatacaaatcacaaaggcaacgtggaattatctattgctgacgtcataaagcatagtctctttgctgtaagcttcctgggttcaagatgtaatgataaattttattttgcatcagatcagtgatttcttgaaattttcatgtggttttgcattcttgcaaaatcgcaggcccattctgctcacagcacatcaggaatgacttccagttgggtggtgtgagggggagttttatttgaaaatgattccaaaacaggtgatggtatatgtcaggatcccgctggagccgtgtttggaatcctatatacaactcatcccagagtagaccattcttcaccacgtgtctgatgacatccacccggctatggatctgaaatagacatggaaccactagcaggggcaacccaggaagcagagtatggatccctcctgtccctgggaggagcagctgcccatgatggcagaggcacggagagccaaggagaagagtctctgggagcagatatcacaggctgaggagaaaaggaaagatgctaagtgcagcaggactcgaaagaaggaaaacaggaaatggattaagagcagggggagcatctgactgagagcacaaactgcagattcatgggttcaaatccagactctagctgtgtgatcttggtcaccgttctgtgccttggctttctcatctataaaatgaagacaataatagaacatgcctcataggattgttgtgaggatgtatataaaatacttaaagcctggcacatagtaagcactcaagaaatctttgctgttatcgtcattctaaaagccgagtgttcaagtctccacctgaacattcagaggcaaagcagagcctggaagctcacaacagactatagtttctggcctgtcatagaacccaa

SEQ ID NO: 240313 - DNA, 1353 bp, Homo Sapiens
caactttgtacaaaaaagttggggttaaagaaaaagttggtgaggtaacatacgtggagctcttaatggacgctgaaggaaagtcaaggggatgtgctgttgttgaattcaagatggaagagagcatgaaaaaagctgcggaagtcctaaacaagcatagtctgagcggaagaccactgaaagtcaaagaagatcctgatggtgaacatgccaggagagcaatgcaaaaggctggaagacttggaagcacagtatttgtagcaaatctggattataaagttggctggaagaaactgaaggaagtatttagtatggctggtgtggtggtccgagcagacattcttgaagataaagatggaaaaagtcgtggaataggcactgttacttttgaacagtccattgaagctgtgcaagctatatctatgttcaatggccagctgctatttgatagaccaatgcacgtcaagatggatgagagggccttaccaaaaggagatttcttccctcctgagcgtccacaacaacttccccatggccttggtggtattggcatggggttaggaccaggagggcaacccattgatgccaatcacctgaataaaggcatcggaatgggaaacataggtcccgcaggaatgggaatggaaggcataggatttggaataaataaaatgggaggaatggaggggccctttggtggtggtatggaaaacatgggtcgatttggatctgggatgaacatgggcaggataaatgaaatcctaagtaatgcactgaagagaggagagatcattgcaaagcagggaggaggtggaggtggaggaagcgtccctgggatcgagaggatgggtcctggcattgaccgcctcgggggtgccggcatggagcgcatgggcgcgggcctgggccacggcatggatcgcgtgggctccgagatcgagcgcatgggcctggtcatggaccgcatgggctccgtggagcgcatgggctccggcattgagcgcatgggcccgctgggcctcgaccacatggcctccagcattgagcgcatgggccagaccatggagcgcattggctctggcgtggagcgcatgggtgccggcatgggcttcggccttgagcgcatggccgctcccatcgaccgtgtgggccagaccattgagcgcatgggctctggcgtggagcgcatgggccctgccatcgagcgcatgggcctgagcatggagcgcatggtgcccgcagtatgggagctggcctggagcgcatgggccccgtgatggatcgcatggccaccggccctggagcgcatgggcgccaccatctggagccggatggggccttggagcgcatggg

SEQ ID NO: 240314 - DNA, 1446 bp, Homo Sapiens
  misc_feature (168)..(181): n is a, c, g, or t
  misc_feature (402)..(420): n is a, c, g, or t
  misc_feature (1364)..(1394): n is a, c, g, or t
aacatttataggccatgattccacagatgtggtgagtaaaccaacagccattccctaaataaaatacaagaatttccatcatgcatagtttacaggcttgagtaagaagcgagtctctttaggagccagatgcttaagaaatattcaacaaacaatgaaatcttggcnnnnnnnnnnnnnnacacaaatgtttggttatttagccacactagtgataaaacatattcatattctaactgcaagtggaataaacattgcaacaaaaatgcaacccaatcaaaatcattagtaataactattactccctcttagcagtaagaaccattattcttggatttcaaacattttattttctgtgcatagcttatagcactgtattataggaatcagagtgtataagcnnnnnnnnnnnnnnnnnnncttcttggagaccatttccattatttatgattaaatcaatgaaactatacaatttccacattaaatacaaattagtaaaagaattcctccaagtagtattgcatataagctacaactttaccccaactattttaatcactatgattcgagatttcctaggatttaacagcccaagattgggctgttactacctcagcaagaacaatcaccagtaaatacatgaactggggttatagctgaatttttagaaactctccagacaaaccacgtgttagaggaggtaagtagaaaaactaatgtttgagctgtgctattcctaccaggaactatatcaaatatgcaaagttcaaacattcttagtaaaataatatgaaaggatctatatatactgtaaatttagcaaaaacacttttatgtacagaagcctaaatatcttaggaggtttagaataccaatgaagagaattgttaattcttcaaggctggtttcttatgaggattaaaaaccagcccttagtctcagatgcattccacctagatgtgttcacgaactccatagaataagaaatataaaccatgaatacgtactcttaatttccattcttcaacttaatgttctatagtacttcagatttttaaatccagagtttggtgtacacttaggaaattatagtaagagtagattagagaagatttgcttgttttccttttgaagccatgtgaaggtttattaccctgtgtattttcatcactgaaaagttccccggtgactaataaaataaaagtgtcacaagctacatgatggatctcttcttttaatgttgcatagagtttcagtttggctagtgagggctaactagctcagccctagtttcattttattagagttgaccactaaaaactaaataaggaagttaccagtaaagctaattcccaatacaagcnnnnnnnnnnnnnnnnnnnnnnnnnnnnnnncattcacataataaaatatatccttaacacaaaataagggtataacatccaa

SEQ ID NO: 240315 - DNA, 1595 bp, Homo Sapiens
  misc_feature (300)..(388): n is a, c, g, or t
  misc_feature (1204)..(1217): n is a, c, g, or t
  misc_feature (1438)..(1456): n is a, c, g, or t
aaatatcttcaagcaaatgagagactttcatctgttagtccttcccaaattaaatgagttgggtagcaatttcaaatactatgttgacatgaatgtacaaatatacatttctacgtgttctttctattgtacgaatcaaaagactgcacgcaaaagaaatgggaaatacagaatacagaagacatgcaccttctatcttacatagtactggatatcaagtgaaaagagcagacactgatctaagtacattacatgtataaacatctaaattatcaatcctcccaacaattctgcatgacnnnnnnnnnnnnnnnnnnnnnnnnnnnnnnnnnnnnnnnnnnnnnnnnnnnnnnnnnnnnnnnnnnnnnnnnnnnnnnnnnnnnnnnnnagggccaagtaagggtgggggcaaaggccctttgaccccaggatccatgctctcccctctccagtacactgcctcacaagtacctagcaacttgcagggctaggaggggggaataagagaggacaaagtccaatacattctccaaattgctcagttcattctatacctgagagtcttgtgtcttttcacattttgctcttttctgaataggaagaaaaaaagcaaagataaaaaggatggtagtttagggtaaaccaaaaacacaaagcagtgtgcaaaagttcatgggagtccaaagagtataaataaaacttacccttacgaagtagaataaagataagcatttcataccaatacaaatcattttcatctttatgacagtcaggtaacatcaaaaaaaccttgctttcattctgatactttagctgtcaatccagtcaataccggttgttgttaagtctgtatacaagtaaagtataaatctagctattttactcaaaacatgcttttacctatttgattactcagagttactctgaaatcaataatgacagcagtttatacctatggaagatgttactgaacatcataatctaatatttacattagatgagattaagttaaattacaagtcacaaagagtttgtaagcaaacatttatagccatgattccacagatgtggtgagtaaaccaacagccattcctaaataaaatacaagaatttccatcatgcatagtttacaggcttggtaagaagcggtctctttaggggccagatgcttaagaaatattcaacaaacaatgaaatcttggcnnnnnnnnnnnnnnacacaaatgtttggttatttagccacactagtgataaaacatattcatattctaactgcaagtggaataaacattgcaacaaaaatgcaacccaatcaaaatcattagtaataactattactccctcttagcagtaagaaccattattcttggatttcaaacattttattttctgtgcatagcttatagcactgtattataggaatcagagtgtataagcnnnnnnnnnnnnnnnnnnncttcttggagaccatttccattatttatgattaaatcaatgaaactatacaatttccacattaaatacaaattagtagaagaattcctccaagtagtattgcatataagctacaactttaccccaactattttaaccaa

SEQ ID NO: 240316 - DNA, 1046 bp, Homo Sapiens
attattgtattggtttcatcattccatcctgtgcaatacggcattttgattgacgggcatgaaagaaaatctggccacacaggcacacagttagaaaagggaggaaagattttaacagcctgtgcagataatggtggatgctctttttagatactatgctaaaacttgacaaatggtagcttcctcaaggttagatggcagtgtaaaagtctgaaaccttatcaatgaacttttcatactcttacttggtttatcttgtactttgaacaaatcttttacccgtacatgatttcgtatcatttggaaaactgtggttcaccgacttttgcagatcttccaaacgttgagccatgtaattacacatcaaaaatgtcacacccattaattcacatgcacataacattactattgagttccccagaaaagtcttaaagtactgggaagctggcaggttacggcagtggatacaagttttctaaattttaatttttgctttaaaccttgaattttcaattgttttccctgaagtgacaggctcacttcatcatgtttgagaagacaggtagctgcctctcaactgaaacaactgcaccagtgcatggagataaccacctaactcaagaatgcagacatgtgcaccccctttctgtcacccagaatatcaaagagacgtgtgcccgaggagtgatatttaattatctttactgctgcatccaggacactcttaagtgaaactggtatgcacgctactgggagtgcagagcagggaagaatttaacagctattatttaggctgctgccttgactcctactgaggtgcccgcagttctacccactattgctccatcagtgcaaatgttcatactaaagcaagtaacaccttggtgttattagatgaaaacagtcttcggccgggcgcggtggctcacgcctgtaatccatcaaatactttatcttcaaagagcatttaaagagatttcatatattagatttgatttaaggaggcactactctggcattccagagtcagggcatctaaatgccaa

SEQ ID NO: 240317 - DNA, 943 bp, Homo Sapiens
aaaaacattttccagctataattattaaagatttagtatcacttaactaacatgggaaatgcccacactaaaatcagggcattgtatttctgaaacggaaacctttcgcaaagcctgtgcaggcagaggagctcacacacatccttgacgtggcactgtgtcttcaggggtgctgccctcttacagagagacagacctggaggccatggccgttttggtgagaaatgccagaaacagcttcagtttccacctactgcttcatatttataatcacagtaatctatttctcgttttgctatttctagagcaacaaattgtgtgatgcgaaattagtaccagaggaacaatgactccacttaacaaaaaaatagcaagggaactatgaaaaatggcacaactgcttaactttaatagttgaagtctttaggagacttcagtagttgaaatgacacagaaaaatcctcaaactaacatacctacatgaaactgagtttctcaaagtaacccacatttatggaaatagaagtttgtcttgcagaaacatcagctcattttgtaaggtgtatgtgatatttaaatttgtgatgcttgtgaataagggaatggggctttaggtctgaggaaaggggagcattcattcaaactggagggtattttgcatttttaaggctgctataaggtcacgaccttggtgagacttgacctgttttcgtatgtattgtgtactttctgttctaagccattgtgtgtgtctgtaactttctccaagattctctccaaatcttgcttctcttaatttctccagattgtgccaacctatttcccactactgatctttagtgttatatcaccactaggagactggggaatgtggtttgtgttcttagactcaacagatacctaccatatgccaagcattcttctaacagctagtgagagccaa

SEQ ID NO: 240318 - DNA, 1438 bp, Homo Sapiens
  misc_feature (499)..(510): n is a, c, g, or t
ttttgaagcacggctgctcactgcgcaagtcgccttctccgattctcctccatagccactgtctgtgtccgtgtcgctgccgctctgctccccactcgagtgagcgaaagtccgctggatgactggcacgcagtttttcccaggaccttccgaacctttggccggagagctgggtttttccttgaagtccatcactttgggagctgggtctgatggcttcctggaggtaccaccctgcagcagctccgagaccacccggtggaggtgggtgacaagctgcgaagacttcaggtcccgagtgttctcgtgcttggccagatactgaagcacctcccgggcacatgtctggaaacctgagcagaacatctcttgacctgtttcgacatttctccctgacagctcacctggggaaagaaaaatccgaaggaaaacgtttcagaaggcctgtggcgcacctggaaactatactccaaaaaaccaggtgctttagtttttgttnnnnnnnnnnnntgcatttactgatttgtgttcctaactccaaaagtagtatgctcagagaagaattacactgaaaagtataaataattaaaataatccatatactaacactcagataaaatatgatttttaatggttgcataatatcctatcatggaaatggaccataattaatatgagatgagctgtttcccctcttttggattgtataggtggtttgtgagttttccatgtaagcgaggcagcaaagaacattctgatgtatttataaacctaagagtcaatgcatacaacattgcaccgtggcaaaatgggcagaggctggatagttataaaatgaggaaaagaatgaagaaacaacaatcacctaaagtaaacttattttcaatgatttgtaaaagttgcagtcatgctgtgacctttaattaggccatttctatgtcttctccacatattctatccatgatcctcaagacattaggtatgaccatcttcctattttgaatgaggaaacaggcagaagcactagctgggtttttgcaattttcatcatacgagccttcgagaggaaggcagacaagcatgaaatgagggagtgggtagaataattctccccagtctgtacagtattatttggaagaagtgagactagaaggttagaaggttgactccgattatctggaagtcagtagaaacgaatgatgaaacttcagtggtttcgctagattgtgcaattcaccaagatacctagtggctattcagggaaccacatgaaatgcaggaaaaactcctgctgtatcctgccaggatcacaccacacaccaagtgacaaggaagcaaagaaacaggaaaatgctggggcatacccatgatttcttctccaatgaaagagggctaagaagaccaactgtaaaacacccacaatgcaaattatagccaa

SEQ ID NO: 240319 - DNA, 950 bp, Homo Sapiens
gccagcttctcacttactgtaagtttgagatgttcgggtagaagatccttcagctgggcgatgcactcgttaatcccggtcacgtctctttttctcgatgagccggtgcggcaatttgtaggtctccctgcaagacgcacggggaggcggtgggcgcttggggaaggagatgagaagcctatcctcccagccccgcagcaacagtccggcagaggagcagagtagcagagtagcacccagaaccatcgtctgccctttcttttccaagtcactcagaagaggcaccgagcccacaccctgcatcccctcgccaacctcaaagcgagaaaacttttcttggaaactcagcgcgcgcgaggggctgagcgcagggtccctaggggtgcacttgcttaccttgctgtcctcgctccgctttattccccgtcttgacttgtacacttggtacatgtgggcagggtacatcctgcaggaagagagaccaggaagggtcgtgactgcttgcgcacggctgcaggcgttctgccgggcaagaacctcccggtgcgcccggagctgctccaagttgagagtggcgcataacatggggctgcagttgaggcttgaagggccaaggagtgccaacttaccctggtaggtctccgtgctccagtcccggtgctttgggcaggcaggcggggggtggttgcgcgctggggatccgctccatggcgcggcgagccggggccactgcgcgctcctgtctgcactagcggagcgtctggatgaggactgccctggagagggcttcgggggtctctccgcagatgttcctctgagtctgagctctttgaaatcccctgggctgctggaatcttcggctttgagatgcagcttcagttgggggcgtgcatggcccggtgtccccgcggcctctggctccgactcagcgcacagactggcggtgccaa

SEQ ID NO: 240320 - DNA, 1623 bp, Homo Sapiens
  misc_feature (442)..(482): n is a, c, g, or t
  misc_feature (1571)..(1582): n is a, c, g, or t
agcagacttgggaaacttccccaaaacactaccgtgttatgccagtgcctgctacctccccatgttagcagaaagctcgtttgactgctctctttccccgaggtctggatgagtcacgtcgacaataaaaggcaaaaggggtggggtcctaacagctggttgggagctgagccctgggaaagccctcttttgaaaagtaccttttgatcaaagccacagacccagctcccaaactgaagagtgactcacagaccaagactttgaagcttttgaaaatccagctgatgtgtatcgaagggggctattctctgggtggggaaaagcccagacgtctgctacaatcccccccaagtctcctgatgtcaagcaatccttcgtgacttccctatgccaaaaggagctttaaagtcctataccaacacgcaggcacacatgtgcacgnnnnnnnnnnnnnnnnnnnnnnnnnnnnnnnnnnnnnnnnncctgaatctgctctccatgcctcagattatctcagtatacacaatgcaacaatcttgcagcattcacaaaaacttttttgttgctttttaggaagtagcgaggaaggaaagcaaagcagcaggatcccctagagagtttagtctttggtttctaagtttaaaggggggattggcttcagagcttggagcaagacagaagagtcgacggacggatgagctggcaagggagaagggagtctctggggcatgagcaagggagccgagatcttgtctgggttcatgaagctagagagggctgcggcagaggcgttgaggcctgggtatagcactggcactgaggtgggataccagcacttctccagcatgggcaggtaggcagtcgctgaaggtgggatcaggtagaagggcaggcagaaaggaggctggtgtgggtgtgggcccaggaacggggagctgatcaggtcactgctagtgaaatggccttcatcatccgaaagctgcatccggttcttttttgtggggggttcttcggactcttgcttaattgcgccgatcctttctcccatcgtgaacctgcgtccgtggtcacttttgaagcacggctgctcactgcgcaagtcgcccttctccgattctcctccatagccactgtctgtgtccgtgtcgctgccgctctgctccccactcgagtgagcgaaagtccgctggatgactggcacgcagtttttcccaggaccttccgaacctttggccggagagctgggtttttccttgaagtccatcactttgggagctgggtctgatggcttcctggaggtaccaccctgcagcagctccgagaccacccggtggaggtgggtgacaagctgcgaagacttcaggtcccgagtgttctcgtgcttggccagatactgaagcacctcccgggcacatgtctggaaacctgagcagaacatctcttgacctgtttcgacatttctccctgacagctcacctggggaaagaaaaatccgaaggaaaacgtttcagaaggcctgtggcgcacctggaaactatactccaaaaaaccaggtgctttagtttttgttnnnnnnnnnnnntgcatttactgatttgtgttcctaactccaaaagtagccaa

SEQ ID NO: 240321 - DNA, 1904 bp, Homo Sapiens
aaagacagactttacaggagagtgcacacttaagcactagtgtttaaattattttccataatgaaaaaaggacatttctcacattggagttatgtctgtacttctgtcacatgactcacatcacccaagaacatgctaagtctctgtaaattcagtttctattagaaaaaccacaggaatacacattactgtacatacacatgccctgatgcaagctaagataaacactgggatgtggcccttatcaaatcttagagttagcaggataggaagagttgatcttaaagattagaagggaaagaacacagaaacgacctacattccttgggaagggactctgtggttccttccctgaaggactcaattccacttgctccttacacttaactgtcactgatggtcctatcttttcttgaagatattttctatacaatattccctatagtgatccccaaagaaaattcataaatctgattaatggcagtaataactgtgggcatcttctgctaaagtcaccatcattgatgggtccttggtccccaaacctgtgtctcatttttcctttccaaccgtaccttcagttagccttcacaaagatgcaagctttaaaggagctaattagaaacaatgagaaggagaaaagttacaatcattgccttcatcgtgcaaaatcttgccctcaggaagatggaaaagatacaaatgcatgagcaactcaaggaaaaagccctttggaagggaagatgtgtgtgcccaactactatggtgtgtgaataggtgtggcaatttaggcagagtctctagttgcctttttccaaagcagccattaccaccctattacagtcccacgtttcacttagcatagttccttggccaaggatgggagaaaataacattgaaagatttactccatttccaggcctaagcattcaccagcatttgtcccctggtcttcagatttccagttacttgtggggctgcttttaatgaagtaacccattgagtgaataaaaatcaccattttggaggagataacattcccaaagctgagggtcagaatttcaaatggcttgtcatctctgatggtttaaatcgtggcccacaactaggagagtatgataaaagcagctcagtcttgagggcgttcattgatatcaaataaaattgtatcttcaaatgaatcatttctcagccatcataattacagcttagtccgtatgaactctcttatgtttaataagagctgagctcctgctgaaactcttctcacattcggtacattcataaggtttctctcccgtgtgaactctttgatgtgtgggctctgcgatgacgcacaaggtcggagttctgactgaagttcttcccacactcatcacacttgtagggcctctcccctgtgtggactcgatagtgtttgatgagatcagatctctcactgaagcctcggccacattcgttacattcataaggtttctcacccgtgtgggtcctctggtgctgagctaggtgagagctccggctgaagcttttcccacactcctcacactcatagggtttctcaccactgtgggtcctttggtgttggattaggtgagagagacggcagaaactttttccacactcattacatttgtgaggcttctctccagtgtgaattttctggtgtgtgatgagatgagagctccggctgaagcttttcccacaagcattgcattcatatggcttctctccagtgtgagttctctggtgctgaaccaagtgtgagatgcggctgaaattttccccacattcgttacagtggtatggcttctctcccgtgtgtgggttctctgatgtttaattagatctgacctttcaccaaagcttcgccaacactcattacactcataaggcttctccaa

SEQ ID NO: 240322 - DNA, 1288 bp, Homo Sapiens
ttggattataaatgtgacctaaaagatcttttataaatcaactatcattttaatattccttaaagtgaaattactgatagcaacaaaggtcggaagatgttggagaagatgggttggaagaaaggagagggcctggggaaggatggtggaggaatgaaaacgccgatccagcttcagcttcggcgaacacatgcaggcttggggacaggcaaaccatcctcatttgaagatgttcaccttctccaaaacaagaacaaaaaaaactgggacaaagcacgagagcggtttactgaaaacttcccagaaactaagactcaaaaagatgacccagggaccatgccttgggtaaaagggactttagagtgaaggctaatcatagaaaaaaaacctctagtttttttaaaaatagaatttggaaacttattttttctccccaaaagaatcagcagcacaggggaactatgtcacagtttacctcttcctgattcagaaatgtgtatggtttgcagcttttaaaaaccatttttttaaaactaataaatagtgactgaaccaatttatgcagtaaatagactaaagttcacagggcacggatgagtttatcaaacttcgttattttatcttgtcatttacaacatccatataagcaactagccatataagcaaaattcatagaactactaatgacttaagtgtacatctgttcttgtctccatatattcatgtaagatgcacaacaaaagaaacatcagaagtttataaaaataaatctgactatatgcatcctcatttattccctttagaacctaggtaaaaaatgttgcgaaaacatgggtagtggcgcatacattttgttatccttgaaatagcctaagtaatgttattgaagaactaatgaacaggtaacatattgtagaaaattagtctttcattgttttcttctgtgaagaatctgttgctatgtactgtatattcagcatttatatttggtttgtttcatagctaatgaggtatttagatatgaacaactgaatacatattgaaatagtgtgctggcttttgtagttttgataaagaccattgcaggcaatggaattgtgccagagaaatctgatttctagtacaaaaggaatacttagccagggcctcaagctcaagatacttattgaaaacatcctcaattgcaataaaaacattataacatgaaaaagagtgattttttgaaccggtgatttaaatgtattgatctgctttgaattttcaagcagccagaattttctagtttaaa

SEQ ID NO: 240323 - DNA, 686 bp, Homo Sapiens
  misc_feature (477)..(501): n is a, c, g, or t
aactttgtacaaaaaagttggcgttcacggacatggagcacaacagggtgctggaggcgctgctgccgctgaagggcctagaggagcgtgtggcagccgccgtggacctgatcatcaagagccaccagggcctggaccgccaggagctgagctttgcggcccggtccttctactacaagctgcgtgccgctgagcagtacacacccaaggccaagtaccatggcaacgtgatgctactgcgcgccaagacgggtggcgcctacggcgaggacctgggcgcggactacaacctctcccaggtatgcgacgggaaagtatccgtccacgtcatcgagggtgaccaccgcacgctgctggagggcagcggcctggagtccatcatcagcatcatccacagctccctggctgagccacgcgtgagcgtgcgggagggctaggcccgtgcccccgcctgccaccggaggtcactccaccatnnnnnnnnnnnnnnnnnnnnnnnnngccatgcaacgggattgaagggtcctgccggtgggaccctgtccggcccagtgccactgccctccgaggctgctagacgtaggtgttaggcatgtcgcacccacccgccgcctcccacggcacctcggggacaccagagctgctgacttggagactcctggtctgtgaagagccggtggtgcccg

SEQ ID NO: 240324 - DNA, 1844 bp, Homo Sapiens
  misc_feature (1577)..(1601): n is a, c, g, or t
ctttgtacaaaaaagttggcgagaggcgtgccctgagctggactactttgtggtcttctcctctgtgagctgcgggcgtggcaatgcgggacagagcaactacggctttgccaattccgccatggagcgtatctgtgagaaacgccggcacgaaggcctcccaggcctggccgtgcagtggggcgccatcggcgacgtgggcattttggtggagacgatgagcaccaacgacacgatcgtcagtggcacgctgccccagcgcatggcgtcctgcctggaggtgctggacctcttcctgaaccagccccacatggtcctgagcagctttgtgctggctgagaaggctgcggcctatagggacagggacagccagcgggacctggtggaggccgtggcacacattctgggcatccgcgacttggctgctgtcaacctggacagctcactggcggacctgggcctggactcgctcatgagcgtggaggtgcgccagacgctggagcgtgagctcaacctggtgctgtccgtgcgcgaggtgcggcaactcacgctccggaaactgcaggagctgtcctcaaaggcggatgaggccagcgagctggcatgccccacgcccaaggaggatggtctggcccagcagcagactcagctgaacctgcgctccctgctggtgaacccggagggccccaccctgatgcggctcaactccgtgcagagctcggagcggcccctgttcctggtgcacccaatcgagggctccaccaccgtgttccacagcctggcctcccggctcagcatccccacctatggcctgcagtgcacccgagctgcgccccttgacagcatccacagcctggctgcctactacatcgactgcatcaggcaggtgcagcccgagggcccctaccgcgtggccggctactcctacggggcctgcgtggcctttgaaatgtgctcccagctgcaggcccagcagagcccagcccccacccacaacagcctcttcctgttcgacggctcgcccacctacgtactggcctacacccagagctaccgggcaaagctgaccccaggctgtgaggctgaggctgagacggaggccatatgcttcttcgtgcagcagttcacggacatggagcacaacagggtgctggaggcgctgctgccgctgaagggcctagaggagcgtgtggcagccgccgtggacctgatcatcaagagccaccagggcctggaccgccaggagctgagctttgcggcccggtccttctactacaagctgcgtgccgctgagcagtacacacccaaggccaagtaccatggcaacgtgatgctactgcgcgccaagacgggtggcgcctacggcgaggacctgggcgcggactacaacctctcccaggtatgcgacgggaaagtatccgtccacgtcatcgagggtgaccaccgcacgctgctggagggcagcggcctggagtccatcatcagcatcatccacagctccctggctgagccacgcgtgagcgtgcgggagggctaggcccgtgcccccgcctgccaccggaggtcactccaccatnnnnnnnnnnnnnnnnnnnnnnnnngccatgcaacgggattgaagggtcctgccggtgggaccctgtccggcccagtgccactgccccccgaggctgctagatgtaggtgttaggcatgtcccacccacccgccgcctcccacggcacctcggggacaccagagctgccgacttggagactcctggtctgtgaagagccggtggtgcccgtgcccgcaggaaactgggctgggcctcgtgcgcccgtggggtctgcgcttggtctttc

SEQ ID NO: 240325 - DNA, 750 bp, Homo Sapiens
  misc_feature (538)..(562): n is a, c, g, or t
ctttgtacaaaaaagttggcaaagctgaccccttgctgtgaggctgaggctgagacggaggccatatgcttcttcgtgcagcagttcacggacatggagcacaacagggtgctggaggcgctgctgccgctgaagggcctagaggagcgtgtggcagccgccgtggacctgatcatcaagagccaccagggcctggaccgccaggagctgagctttgcggcccggtccttctactacaagctgcgtgccgctgagcagtacacacccaaggccaagtaccatggcaacgtgatgctactgcgcgccaagacgggtggcgcctacggcgaggacctgggcgcggactacaacctctcccaggtatgcgacgggaaagtatccgtccacgtcatcgagggtgaccaccgcacgctgctggagggcagcggcctggagtccatcatcagcatcatccacagctccctggctgagccacgcgtgagcgtgcgggagggctaggcccgtgcccccgcctgccaccggaggtcactccaccatnnnnnnnnnnnnnnnnnnnnnnnnngccatgcaacgggattgaagggtcctgccggtgggaccctgtccggcccagtgccactgccccccgaggctgctagatgtaagtgttaggcatgtccacccacccgccgactcccacggcacctcggggacaccagagctgccctacttggagactcctggtctgtgaagagcccggtggtgcctgtg

SEQ ID NO: 240326 - DNA, 1291 bp, Homo Sapiens
  misc_feature (769)..(887): n is a, c, g, or t
  misc_feature (904)..(976): n is a, c, g, or t
tcaattccccatagtagactgccatcttgatttctcagtggtagggtccatttgaaactcttcaagctgactgggtgtaaatgtttccaccaatgtctacttcattgtatggggcctttagaggattcagtttgaggttcatatttctgcagagaacaaaaagaatttaattttatacataaaaaatgaaaacagattattaagcaccatgatttatacccaaaatgtcaacatcttgcaagggtcatttgccaatagaccaaaagatgtatgtatgtattaacaatacagtccaagcagaaatcatacaagctcttgagtatcacaaatttggctcctctctagaataggttactacaaaatcacaagcgtaagtttcagcccctaagaactccaaaaatgtaggtaaatatttgggctccccaggtggatctgatgtttgggaacgagttatttaacacagccaacattgctcttacagtacagaattgtttcactttctagtcttacatctatttactttcaatccttctacaggaaagtttacattgcccacctgtaaggccactttctcattccttagtattaccatattatttcacattattatgtctttaatcaacactaagacaaaatgttaggaaaccataggcatcatttcaaattactactaattgtaccaatctattcaactaaaccaacactaatcattcctaaaatatatacttgataataaaaatgtatccggccaggcccggtggcttacacnnnnnnnnnnnnnnnnnnnnnnnnnnnnnnnnnnnnnnnnnnnnnnnnnnnnnnnnnnnnnnnnnnnnnnnnnnnnnnnnnnnnnnnnnnnnnnnnnnnnnnnnnnnnnnnnnnnnnnnaaattgcttgaacccannnnnnnnnnnnnnnnnnnnnnnnnnnnnnnnnnnnnnnnnnnnnnnnnnnnnnnnnnnnnnnnnnnnnnnnncaaaaaataaataaaatgtatccatactttccactagttagacttgaataccccataactaaacatggaaaatagcgtttcccatatctcaagtaacatacctttttcatcacttctgttcccaagtatgattacaataatcatcccaccaccataaagaaaacttatttaaaagttcaatatgaaaataggcagggcgcagtggctcacacctgtaattccaatacttttgggagtccaagctgggtgggtcacctgaagtcaggagttcgagacctgaccaacatggtgaaaccccagctctactaaaaccaa

SEQ ID NO: 240327 - DNA, 814 bp, Homo Sapiens
  misc_feature (266)..(277): n is a, c, g, or t
  misc_feature (665)..(684): n is a, c, g, or t
aaaatcagattctattattaccccattgagttgttttgaaaggtgtttcatgaaagcacaaacaaaacagtatttaaaccaaatgaccatctaagagcacaactttgtgaaaaacgtaaatcttcataaaccaagtaaaatgttttcgattacaccatttccaatttaccagctttattcatattcagtacactttaccactcggcaactacaaaggccaaagtattactaaaataaaactaaacatttaattaaacttccacttnnnnnnnnnnnncccaaactgagaaatttttaagtgttacaaattttattaaaaattaacatttcaagaggtcatacgcatacaaatcaaactgcaaaaaattccaggcataaaaactattatctgggttagtgtgccatctttcttctccaaatgtcaaaatgtccacaaaaaaagtctttagaaagtcaaatccactgtccatttgtgttgggtaagaaacctatgtcttcattcactgcatggaatccatgttaaaagaaccctgtcttggttgtatattatcacaggactcttgtattaatccatttttcctcaattccccatagtagactgccatcttgatttctcagtggtagggtccatttgaaactcttcaagctgactgggtgcttgatgnnnnnnnnnnnnnnnnnnnncgctgttggcatcttaatcttttaaacagaaaacatccacccaccttgaagatatcctaccatacacaaaactttcattttgtaacagctttcaactatgaaattgtaaagttgtatgcaaaacacccaa

SEQ ID NO: 240328 - DNA, 1373 bp, Homo Sapiens
  misc_feature (549)..(559): n is a, c, g, or t
  misc_feature (947)..(966): n is a, c, g, or t
  misc_feature (1232)..(1263): n is a, c, g, or t
taaaatggattacacacataatttcaaatttaaaaaattgtgaatactccaaggaccctaacccataaatccaacacttcttcctctaatagtaagacaataggagacattaatttaaatattcagatgaatattctatagcaagatgtatttatagtattaaaaagcttaagaaaccatttcaatcaacacaaaataattcagaagtatatgtgtatcactcatcctgaattttcgagcaacaagcagtttgtttcaagttcattaaaatcttgtggcagattaaaatcagattctattattacccattgagttgttttgaaaggtgtttcatgaaagcacaaacaaaacagtatttaaaccaaatgaccatctaagagcacaactttgtgaaaaacgtaaatcttcataaaccaagtaaaatgttttcgattacaccatttccaatttaccagctttattcatattcagtacactttaccactcggcaactacaaaggccaaagtattactaaaataaaactaaacatttaattaaacttccacttnnnnnnnnnnncccaaactgagaaatttttaagtgttacaaattttattaaaaattaacatttcaagaggtcatacgcatacaaatcaaactgcaaaaaattccaggcataaaaactattatctgggttagtgtgccatctttcttctccaaatgtcaaaatgtccacaaaaaaagtctttagaaagtcaaatccactgtccatttgtgttgggtaagaaacctatgtcttcattcactgcatggaatccatgttaaaagaaccctgtcttggttgtatattatcacaggactcttgtattaatccatttttcctcaattccccatagtagactgccatcttgatttctcagtggtagggtccatttgaaactcttcaagctgactgggtgcttgatgnnnnnnnnnnnnnnnnnnnncgctgttggcatcttaatcttttaaacaaaaaacatccacccaccttgaaaatatcctaccatacacaaaactttcattttgtaacagctttcaactatgaaattgtaaagttgtatgcaaaacacacacacaactccttgataagactgcacgccaaagtaacaaagtccttgtactaccacagatacatttgtatctataaaaaagtcccagtgaagagtcagatttttaatatttaacactaacatcattatactgtgtacannnnnnnnnnnnnnnnnnnnnnnnnnnnnnnnttcctggaaagctaaattacagaaacactgtggattctaaatctcaatgcagaaaactttccaagcttcttcaaagaaaactaattatagaaaagctcttaacgggattt

SEQ ID NO: 240329 - DNA, 925 bp, Homo Sapiens
  misc_feature (831)..(844): n is a, c, g, or t
ttggcttcagactcaggggctccaccaatgccatcccaaaacagggtcagacactgcccagcttccctccaggaggttcttgtctctgtgtaagggcttgtctccctcccagtttttcttttgctccacgtcattttgtcaggctggttataagccggaggcagctttaaccagcccccagggatgattgtgaaggaggcccctccccttgtgaggagggggcactcctctccagcccctggtaccacagtcctcacgatggtgcagtgatttctagccaggcgtcaagatgcgctgctttccctctcctgcctcatcccttgttggcagctccagttcaggccgtggagggacgtgatgctgggctgtgtttactaaacccacgggttttcagcctcttaagcccagctccgatctccaattagttgagagcgctgggttgactaacctctggtatctgagcacagacagagggtgctgtgggtctgctgggtggcagaaatggttccttccggcttggcgttctctcctggccactcttcctgctgcctctgactactcagccttgttttcggtgtgtaggccccagctgcccactggaactgccggctaatgcttgctctcccaagatctttaactcctcctggctgcacctgggtagggatggtggcatcgatgcccctctgtctgctgaaggacctgttgctgcttctgtcttttcacccctccttggctgatgacccagagccctctgatgatggcattctcctggcaagagaaaaagacttaactagacttctgaacttgaacagtttcaggttatattttaannnnnnnnnnnnnngtacaggttctgattctaatacatttcaacatgcttttgtccccctcgtgtcaatatttgttatagactaatcgccgggga

SEQ ID NO: 240330 - DNA, 1434 bp, Homo Sapiens
  misc_feature (793)..(840): n is a, c, g, or t
ttgggtgggaggatgttcttgggggtccagggatgtggactgcaggatataatctggtgggggctagcctcttaaaatggtgctgtgccacagcagcatgtttcttgggatgtgagtaggatccagtggaattccctttctggaagaacgcatttgcatggattccaggcagctccgtatactggactcagggcctgtgaaggctgacggcatcccctgtgggtgccagcatctgtgctgcgaatgtggaccactgcagttctttgacttttcttttcccagaaatgggattcccctcctgcttctgagccagtccaagacatgctggctgctttatttactgctccctttgtgcctcagttccctgttgaatagtgttctgtctttggtgctctacctgacatgtggttaactacttgcttttttggtcctttgttgtgcaggagttgagtgccaggctcacggttttttgattaccatagttttgtagtttttgaaattcagaagtgtgagacctccaactttttctttttcaagattattttggctgttgagtcaattatgattccatatgcattttagatggatttttctatttctggttgtgccattaggagtctgatagatactgcattgaatctgtagagtgctttgggtagtattgacatcttcccactattaagtcttccagtacatgaacacatgcattttcctgatgactaatgatgttgtaccttttcatatgcttattggctatttgtagatcttcctgggagaaatgtctatgcagacnnnnnnnnnnnnnnnnnnnnnnnnnnnnnnnnnnnnnnnnnnnnnnnngttgttgagttgtaggagttctttttgtattccttatactagtcccttatcggatatatgctttgcagatattttctcccaggtgggttgtcttcacttccttggtagtgtcttttaatacacaaagttttaaatttttatgaagtcaaatgtatctacatttttctttggttgctcatgcttttggtgttgcatctaagaatccactgccaaatccaaggtcatgaagatttactcctatgttttcttctaagaattttatagtttttgctattacataaggtctttgagccattaagatctttgacttaacttttgtatatgatgtaaagtcactgtcaaacatcattcttttgcatttggctgtccaggtatcccagcattatttgttgaaatgcctacacttctttatattcccttgactcctctaaccaaggcagttggacctttgctactaccactgccctgaaactgctgtcactgggttactgaggactgggtagcttagttgagtagataatcttttgttgtttcctccttgtaatatacaagccttggcttctgtgacatcatactctcctagatttccccctg

SEQ ID NO: 240331 - DNA, 1141 bp, Homo Sapiens
ttggtaatgggcccccactgtggatacctggcccttgtcacctctctgtcctgtggggccgactgggtttttattcctgaatgtccaccagatgacgactgggaggaacacctttgtcgccgactcagcgagacaaggacccgtggttctcgtctcaacatcatcattgtggctgagggtgcaattgacaagaatggaaaaccaatcacctcagaagacatcaagaatctggtggttaagcgtctgggatatgacacccgggttactgtcttggggcatgtgcagaggggtgggacgccatcagcctttgacagaattctgggcagcaggatgggtgtggaagcagtgatggcacttttggaggggaccccagataccccagcctgtgtagtgagcctctctggtaaccaggctgtgcgcctgcccctcatggaatgtgtccaggtgaccaaagatgtgaccaaggccatggatgagaagaaatttgacgaagccctgaagctgagaggccggagcttcatgaacaactgggaggtgtacaagcttctagctcatgtcagacccccggtatctaagagtggttcgcacacagtggctgtgatgaacgtgggggctccggctgcaggcatgaatgctgctgttcgctccactgtgaggattggccttatccagggcaaccgagtgctcgttgtccatgatggtttcgagggcctggccaaggggcagatagaggaagctggctggagctatgttgggggctggactggccaaggtggctctaaacttgggactaaaaggactctacccaagaagagctttgaacagatcagtgccaatataactaagtttaacattcagggccttgtcatcattgggggctttgaggcttacacagggggcctggaactgatggagggcaggaagcagtttgatgagctctgcatcccaattgtggtcattcctgctacagtctccaacaatgtccctggctcagacttcagcgttggggctgacacagcactcaatactatctgcacagcaatgttgaacatctggtgcaaaagatgaaaacaactgtgaaaggggcttggtgttaaggaatgaaaagtgcatgaggaactataccactgacttcattttc

SEQ ID NO: 240332 - DNA, 842 bp, Homo Sapiens
aactaaagggggaaatctcaacagacatttctagaagaaaaactgtcccagccctcccaccccaaataaaaatccaaatgtcacttaatttcactacccaagaagaggccacgacgcaacgcagcaggcaaaactctggcaatttcactatggatcatgtcagagacaaaggaacattcaaaacagtcatcagtatggtcggttgcgctgatcatttctgtagtcgtttctaggaatgaaaaataaagagccggactaaattctaattttctacgaagggggagcattagacacttcttcagggtactagtgattggcatcagctagacaatttctaaagaatgacaccatgcctcatttatttctgtactcctagaagatacttaaatgtctaatttaccagctttaagattcacaaagttcctagaagaagctttgcttcactctcttaaaaattttccacttaaaactccaaaccacaaatatttcagaagatcagaaactgtcccagttccagcactctaaataggagagtggcatagtggaatgagcaagcacttacatgtatgaattctggatctgccacttactatgtgaccttggaaaagttacactaaatgactgactctgtaaaatgggaagtatacctacttcataggaatgacagaaggactagaactaaagaatataagaacactttacagtattggccatacagtaagcagtgttcaatagatggtaattaggttactcataattactaatagctaaaaattatatagtgcttactctgggccagcaactagtacaacgtaatctaatacaagtctaaaaaggacgtc

SEQ ID NO: 240333 - DNA, 1990 bp, Homo Sapiens
  misc_feature (205)..(237): n is a, c, g, or t
  misc_feature (421)..(432): n is a, c, g, or t
  misc_feature (1741)..(1770): n is a, c, g, or t
cttgaatttgatctagtgaaatatatactcacaaagtgagggaattatatctagaaatctgtaatttttaattgtaccgctaaagcgctttaccttcttttgtacttcttgaaaatactggctgcattgcaacagaagacaaatatgattaatgtcatgcaattcataatatcttaaattgcattgctggattctttctcaattnnnnnnnnnnnnnnnnnnnnnnnnnnnnnnnnntgtttttcatgcatctgataacagtgacatagaaaggaaaaaatgaaacatagttcagaatacttaaaagtaagaataaatttcagccagccagacatgagctctattcaacaaacatgatatgatcagtatttaagttataggctaaaatgtctttaattttcagctttgttatcactatccnnnnnnnnnnnnaatttaaaggtatatattttaaacgtgtgtcgtctacctaagtaagataatagtctttgaactaggtactatgtttgctgtttgggtgatgggttcactagaagcctaaaccccagcattactcaatatatccatctatcaaacctacgtgtgtacccccctagatctataataaaagtaaattaaaataaattaaataccagtcaactatttggttgactttggttgtactgattaactggaaatgtgcctctgaagccacacagccagagcaactggctttttgtcatttctaatgaaaagccttgaaagatggttctattagataacgggccacactgaagctaactgtgcatctagatcacatcaaagcagtagaggtgagatgttagcacagctttggtttctgcagttctcacctcatgcttgtaagatgtttagctgtgtcaactttttgaattaatgtgggttcttagccttcatagaccctgtgtttcagccttattaggttttgtattttgagatctcaaattgtgaagctctaaaataaaacaaatctgtgtgtttaggtactagttccacaggtggtcttgccacagaagaacctttccatgaaagtcgaatacgaatacacagggctctctattgctgctatcaaaatggactaattccttttagcttacattttttacatcatgttaaggaatttgacgttttggatgctcagctggttggtagttttcatttcaatcttgattttctgcagacttaaatagttttgacaggtgaagctctgaggattaaatattgattttagccctctccaggtcaaatgttccatatttgacaacttataccaaaaacagcatccttcccctcaactatacactttaaaatggatgttattttggggatgaggataatatgcagcaaaaaattataggaattttagaaacaagtcaacaacgaaatataaaaatagaaaatttggtttaatttatctttacttctactttaaaatacttcttaataacagcataccgtctaaggaggagtaaaagaaacatcttacattggaatgtaaatgttagagctgtttcaaggcctctgggtaggtagggaaggaccattgaacatgtgtgtcttaataaaatgtagcttatgctctgtgagtgaggatgtaatttagtaggagaaaataattatatttttgctcattgtaatcaagatattgcattcacatatatagaaagtagtgaaactaagatggataaagaagggaagctaaagaaatgtagtgggaatgtgnnnnnnnnnnnnnnnnnnnnnnnnnnnnnncctttgatgaagaaagatgacataacatgtctgatgaatagagcccataaggattgcttaattttcagaaaacatattttttacaagattgtattcccatggtgaatcataactattccaattaaatctttaatacagtgctgagctggcctgatcctggaattgcatgttattattgcataattgaaatcaacaacagcagcagacattttgtttccaa

SEQ ID NO: 240334 - DNA, 1520 bp, Homo Sapiens
  misc_feature (404)..(412): n is a, c, g, or t
  misc_feature (667)..(693): n is a, c, g, or t
tttctcatattcagacgctgctttccgccaccgctcaagctcagctctcacttcttaagctcttcttgtaaagaagcaatgtcagtgtcccgctcagaggcaacctttgctgctgcttgatgaaggagcaaaatttcatctcgggcactaagcaattcatctctagtacttgtgatttcactgtccttctcctcccggagattctcagtatcgatgtgtaacctctgcaattgggctgcaaaagtatatccatcattttcttggcccattagaataaaagaataatccatacaggattgtagctaatgcataacctgggttgtcagagctgttgcttttgattaaagtgtataaacaatccacgtttgatgcagaaagcgtcaaaatacagatagcaaagaggnnnnnnnnnccaaagtgatcttcatctccccaacacacagaaaattacttctgatattccttctggattttttcctatgcatttataaacatgtaaaaacaaacattaaatagggagtgatcacaatatatgcagtgttccctatccttctgttgatgaaactctttcaacaaaaaaatagttatagtatatataacttatttgcccaaccctttatttttgacattttaggctgttcagtgtttaaacactatatacaatccnnnnnnnnnnnnnnnnnnnnnnnnnnnagggtgaatcctatgtgtagaattgcttggtcaaatggtaagcaataaaagcaataaacagttgacgcccttgattcgtttttctgttcaaatgtcaattctttaaagaggccttttctgatgactcatgtgaaaaacagctcactgtcattctctggctctttactctgctttattttcctttgaagtccttattggacatcatattatctattaatttgcttattgtttatcttttctactggactgtacacctcatgtgtgtagggcatttgttttgctcacagctgtcaggtattggggataccccaatatctaacacagtaaacaatcaagaattattggttgaattaatgagttaataaaattaatactgcctcattgaagggttatatagatttttaaaaatacctggttttgtgctcatgacccaaactggaaacaatttgtataaaatcaaacttggcgcagaacaagaaaattaatattggttaccatattataaggaaattgtagatttaaaaagttccaaaggaaaataattaattacaagaggatttagggatgggagaaagggaggttgctacataagtaaacattaagatattagactttctaagtttgtaggaaggactgagaggtaacaagtttggaatctgaaagggcacaatggccagagaagatgatcatgatttgttgatacagtcgtgaaatacacatgctggcaccagggggcactcaataatgcctgggcaagacaggttttaaaaaaaaggtagcactatgtcacagaacctttaggaaaaatccaacttttttgtacaaag

SEQ ID NO: 240335 - DNA, 1592 bp, Homo Sapiens
  misc_feature (228)..(282): n is a, c, g, or t
  misc_feature (462)..(496): n is a, c, g, or t
  misc_feature (1020)..(1061): n is a, c, g, or t
taaaccacaaggctgcacacggtgagatctggccactgcccagggagctgctgtcggaggaggagtgtggataaggggccagtgacctcgcaccccacaccaaattaggaacaggtagaatcccaaaggcaaggcccggccacttgtagctaccctgatccagtctcttgagcagcacagctagaggcctgtggcccccgactcccagccacactcagacctgagcannnnnnnnnnnnnnnnnnnnnnnnnnnnnnnnnnnnnnnnnnnnnnnnnnnnnnnaggacccggcgggaagagcccgtgctcagagctccgaacttcactttacattccagtcccgggttacactagcacaaaggacacaaggaatccgatttatttacaaaatattaaaaagtcagttaatcatctacacagtaccccccatcctgccattatttatacatgcactagtttggnnnnnnnnnnnnnnnnnnnnnnnnnnnnnnnnnnntgattaccgggtgggagtgagcatgttttaccctttgtcaacgagcccagctggcatggcttttctggagtgcgaggggccagtgtcctctccccggggggagactccagacacaaacgcggggcctgaggcgctgggaggcccctgtgcgagccggatggcggccagagaggacgtgtcagctcctcgtgggactgaagagcgcgaccaggcagagggtgggcggggagcctagggtcctacacaccaagcacagcgacgatcgtggcggggaggggtctgcacacctactggccgaaatgactttgtacatcgtggacccttgggactgggagaacggatggcagcagagtcttcgaaagcagaaaccgaggtggccgggggcacgggtcagtagctgagggtggagtcatcccactccagctgctgctgccgggttgcgttctgggggtcgccctgctccccctcctcctcctcgctgctctccgactcggcgctggtgatgtcatcctcttcttcgccgnnnnnnnnnnnnnnnnnnnnnnnnnnnnnnnnnnnnnnnnnnctgctgtgctggtcctcataggtctccatggggttgacggtgatggtcagggcagagtcgtcccagtccatctcgttctccttcccggtgtcctgatcccgcatggtccgccgatgtgcggcccggatccgaaatacccccaggataatcatgaacaccaggaagctgacgcacaccacgatcacaactgtcgcagtgctggggacgactgcgaacgggtgggggttggccaggttgtggcctgacaggtcaacaaaggagcggtgttccgggtgcacgaactgtggctgggcagccatgtggttggcgtgttccatggggttggccgtgtggattacattcacctccaccttaaattcgttgctgatgtagcggccattcagctctgagcagatgagcttaaacttccggtcaagcaaggacctggcatgccagttccgatagcgcagcaggtgcaaaacctcctcgtagctggccatggtgtccacgcctgtgaagttacggggcccagttcccaacttttttgtacaa

SEQ ID NO: 240336 - DNA, 835 bp, Homo Sapiens
tttcccggaacggagagttaagccagccagattgctcggaaaaactgggtcatgtgcaggtcgccacctttgggtcaggggagaaaaggcgaagtcaggcgtgcaacccagcatcgcccaactcacttctcactcaacacggtgttaccggtgctggcagctcagtggatggacatgcgggttagttcataccaagtcctgttagccttgcaatctacatggaagcgcaatgaagaaattaaaccgtttatgatcatgcacatggcctggagaaagggagagttgggggtgtctcacctgaagccaagaggtcccctgagggtccccacacctctggccactacctggtaaggtggcctaccctgttctcatcaccagggtgcatggtgacacttcctacgccaccagcctctccagccactgccttctcagctggctgggttccacatggctgttttctctacctggcacgccctggggaatgaacccacacaagcgaggcagggaggataaaagggaggcttaaaatactccctgcatggaacggcctatttcaaggatgctatggtgttaagtcccatccttcctgcctcctcctgaggattgctgagaagtgcagatgttacaacgaaaaccaaaacccagaaaatggcccttgacagatgacaacaaagagccagaaacaggttacactaaaccttgttcttaaactgaaaaggaaaagggacaaattttcagcaatgtgtctcattctggtacagaaatcaggcactgtaaatcatgactaggaattgaggtttctaagaaacggctatttgccaggcatggtggctca

SEQ ID NO: 240337 - DNA, 1702 bp, Homo Sapiens
  misc_feature (1492)..(1523): n is a, c, g, or t
ttggaaacagatatgaatcggcaccactactccctctatgtccacgggtgccggctgatcttcctcttccgtcaggatccttctgaggagaagaaatacagacctgcagagttccactggaagttgaatcaggtctgtgatgaggaatggcaccactacgtcctcaatgtagaattcccgagtgtgactctctatgtggatggcacgtcccacgagcccttctctgtgactgaggattacccgctccatccatccaagatagaaactcagctcgtggtgggggcttgctggcaaggtggcgacctgcacatgacccagtttttccgaggcaatctggctggcttaactctccgttccgggaaactcgcggataagaaggtgatcgactgtctgtatacctgcaaggaggggctggacctgcaggtcctcgaagacagtggcagaggcgtgcagatccaagcacaccccagccagttggtattgaccttggagggagaagacctcggggaattggataaggccatgcagcacatctcgtacctgaactcccggcagttccccacgcccggaattcgcagactcaaaatcaccagcacaatcaagtgttttaacgaggccacctgcatttcggtccccccggtagatggctacgtgatggttttacagcccgaggagcccaagatcagcctgagtggcgtccaccattttgcccgagcagcttctgaatttgaaagctcagaaggggtgttccttttccctgagcttcgcatcatcagcaccatcacgagagaagtggagcctgaaggggacggggctgaggaccccacagttcaagaatcactggtgtccgaggagatcgtgcacgacctggatacctgtgaggtcacggtggagggagaggagctgaaccacgagcaggagagcctggaggtggacatggcccgcctgcagcagaagggcattgaagtgagcagctctgaactgggcatgaccttcacaggcgtggacaccatggccagctacgaggaggttttgcacctgctgcgctatcggaactggcatgccaggtccttgcttgaccggaagtttaagctcatctgctcagagctgaatggccgctacatcagcaacgaatttaaggtggaggtgaatgtaatccacacggccaaccccatggaacacgccaaccacatggctgcccagccacagttcgtgcacccggaacaccgctcctttgttgacctgtcaggccacaacctggccaacccccacccgttcgcagtcgtccccagcactgcgacagttgtgatcgtggtgtgcgtcagcttcctggtgttcatgattatcctgggggtatttcggatccgggccgcacatcggcggaccatgcgggatcaggacaccgggaaggagaacgagatggactgggacgactctgccctgaccatcaccgtcaaccccatggagacctatgaggaccagcacagcagtnnnnnnnnnnnnnnnnnnnnnnnnnnnnnnnncagcgaggacggcgaataagaggatgacatcaccagcgccgagtccggagagcatcgaggaggaggagggggagcagggcgacctccagaacgcaacctggcagcagcagctggagtggggatgacttcacccttcacctactgaaccgtgcccccgggacacctcggtttctgctttc

SEQ ID NO: 240338 - DNA, 1687 bp, Homo Sapiens
  misc_feature (1546)..(1556): n is a, c, g, or t
ttggtttttattccatttgctttcaaatgactacactaagcctaataatacaagctccagtgttatacaataacccatcagtgattggggaatcaaacattttggtttaaaaaacatgattatttaaaactggaaactaaaaagaatcaaattgaattaaagctatataaacacagttaacccttgtaaatgagtaaacaaatttttacatgtaagattctctaattgtcatattttactttttaggattccctaatagtggactgtttatttgcagtgtatttgcttctcatgaactatttctcgtacaaatcattaaatagttcattggatgaggctgggtgacatttcccaggacagcatggtgaacattaccaggcatgctagctggcccgtgtaatcccaagacaaggaaaacattcgttttcctcatgggtcttccaagaaatgagctattttattgatgccattaaaaagcaagttgcgatggttttgtatagccaggagtttattgtgattaaacatcaaagaaacaggtagaaagcctgggtttctggctgctagcgttatagcatccatgacacagaactcattacggacattccacaacttccagggtgcacatggtaaaatctgaagcccagaattttctctcaagctgcgtggtttactggagagaaggagttggataagcacaggctcgggtattttggtagggactgtagcatgctcataaatccttgctgttgtcacagtacgctgaaaacccgtttgattctatacccaatcaagaatagacccttcacacaggaaatgtgaacaattgttatatatgaacactcaaatcttttactgtaacgaaaccaagaaacttgtttagaatgtgataggcagctaaaactgttatgcccactgtgctcaatttgaagcagaattcagtgaaaaattatttttccacattgaaacactttgcagacacaaatatctatgaaaagatgctttgtcagccactgtgcctttttttctgtgaagactcaacggatgtgtgtgtttgtatgtttgttaacagttacatatgtttgtatgagtgtatatatatatctgtgtgtgtgtatctctaacgtcagtgtataagtaagttgggtttatggtgggctttgactatgtcattaggtgggtacaaaacccaactgatgtggagaaaaattgatgtttgatgttgatagatatgcttatacctaatttttagtttttaaactattttaaaatatactatgattttatatgtatatttcctatagactctttaagacgtatttataatgtttctaatatgaaatcactaaactctagtacattatagcaggtgctttgtaatctggaatggagaagaggtaggggcatttggggattcctgtttacttgctgctgccacaccttttccgactgatctgtcctggtagtgtttattagcaaaagtcagtatcaccagctctttggcacctttctgtttctgcttgtgaattcataatgttttcaactaaannnnnnnnnnnactttctcagaattacctaaatgttttgtagagttttgactagtaatcaatcaaaattatataaagtcttctcagtaattaagaaatacatatgcaaattcttttgtgattgagtaaaagcagcttaaatt

SEQ ID NO: 240339 - DNA, 1681 bp, Homo Sapiens
ttggctcacctcctagagaccaggctgccatcatgctctggaagcttgtggagaatgtcaagtacgaagatatctatgaggaccggcacgatggtgtcccgagccacagctcgcggctctcccagctgggctcggtgtcccaaggaccctactcgagcgccccgccgctgtcccacaccccgtcgtcggacttccagccgccctacttcccacccccctaccagccgctcccctaccaccagagccaggacccctactcccacgtcaacgacccctactccctgaacccactgcaccagccccagcaacatccctgggggcaacggcagcggcaagaagtgggttcggaagccggctctctcctgccccagcctcgggccgccttgccccagctctcgggccttgacccccggagggactaccactcggtccgccggccggacgtgctgctgcattcggcgcaccacggcctggacgcgggcatgggtgacagcctctcgctgcacggcctcggccatcccggaatggaagacgtccagtcagttgaagatgccaataacagcggcatgaatctattggaccagtctgtcattaaaaaagttccagttcctcccaaatcggtgacttctctaatgatgaataaagacggcttcctgggaggcatgtctgtcaacaccggcgaggtgttttgctccgtcccaggccgtttgtctctgctcagttcaacttcgaagtacaaagtaactgtgggagaagttcagagacggctgtcgccccctgaatgcctcaatgcatctctcctcggcggagtcctcagaagagccaaatcgaaaaatggggggagatctttgcgagaaaggctagaaaaaatcggtttgaatttacccgcgggcaggcgcaaagcagcaaatgtcacgttactcacctccctggtggaaggagaagctgttcacttagctagggattttgggtacatttgcgaaacggagtttcccgccaaagccgtctctgagtatttgaaccggcagcacacagacccgagtgacctgcactcccgaaagaatatgctgttggccaccaagcaactttgtaaagaatttacggatctactggcgcaggaccggacaccgatagggaacagccgacccagccccatcctggagccggggatccagagctgcctcacgcacttcagcctcatcacgcacggcttcggcgccccggccatttgcgccgcgctcacggccctgcagaactatctcaccgaggcgctcaaaggcatggacaagatgttcttgaacaacaccaccactaacaggcacacgtctggggaaggcccagctttgcccgcatggtttatgagcttcttcaaagaggacttgggcttcctacacaatctataagggcaacgcgccccacgcgtgtgacgtgcgagagacgcgatggacgcgccttgctcttactgtgcaggtcctgagagcgtgtgggccacaggcgcccagtcgtgttgaggacatagaatcagccgctggaggggctgccgactgcgcgggcctttcccgctctcggtctcaccctaagggctaagcgaccgagaaagccccattctccagtagtaatggggcggcgcccggtgggctgcagtggggagggctcccagcgccgccagcggccacccggg

SEQ ID NO: 240340 - DNA, 725 bp, Homo Sapiens
  misc_feature (76)..(88): n is a, c, g, or t
  misc_feature (577)..(637): n is a, c, g, or t
ggtttgatataaagttatttcagatcttcagacttttgcccagatggaatcacaagcattacaaagttttttcttnnnnnnnnnnnnnggataggggcaagttgggaggggaccaacctagcagtagtggcatttgagaataaattaacaaaaaaatttagtattaccatttattgatgacaaacacttaagttttacttacattccatggggagaaaaattccagcgtaaacaatgaatggaagcagtacttaactcgcagggctaccaggctttccatacggaccacacgcagagcctcagtgcacacacttctgtgtacagtaacacaacatcaaaagcaacacagctgtatacagaaacgtaggtcattcttttcagccctaatggagatgtaattaacagtatcgagcactctggaaaatcactctgcaggtttatatggactacatggagatcatatcctgtagtgtagtgaaagctaagtcctcaagagccatatgtatagatacacaatgttttttaataatctttaaaacagagatcaaagttcatttaagtcctgtttgcattaacnnnnnnnnnnnnnnnnnnnnnnnnnnnnnnnnnnnnnnnnnnnnnnnnnnnnnnnnnnnnntgtccaatttatacaaccttgaataagtctcccacagttgtataaattggacaatttaggaatgatcatctaaagtttaaaattccaa

SEQ ID NO: 240341 - DNA, 1665 bp, Homo Sapiens
  misc_feature (498)..(558): n is a, c, g, or t
aaaataaagaaaggatatgggcaggttgggaggggcccacatagcagtaagggcattgagaataaattaacaaaaaaatttaggtattaccattgattgatgacaaacacttaagttttacttacattccatgaggagaaaattccagcgtaaacaatgaatggaagcagtacttactcgcagggctaccaggctttccatacggaccacacgcagagcctcagtgcacacacttctgtgtacagtaacacaacatcaaaagcaacacagctgtatacagaaacgtaggtcattcttttcagccctaatggagatgtaattaacagtatcgagcactctggaaaatcactctgcaggtttatatggactacatggagatcatatcctgtagtgtagtgaaagctaagtcctcaagagccatatgtatagatacacaatgttttttaataatctttaaaacagagatcaaagttcatttaagtcctgtttgcattaacnnnnnnnnnnnnnnnnnnnnnnnnnnnnnnnnnnnnnnnnnnnnnnnnnnnnnnnnnnnnntgtccaatttatacaactgtgggagacttattcaaggtttttgaaagtccaggactgtttcagctgaaccagagggcacacaatttgcatcactgaaactgtcctgggttagtcaatgaaataaaaatgtctaaccacatacacatggatatgatctttgtcggttagattattgataaagtcagtctcagacaagtttccaaactgtgctatttaactagatacaattgagaaattctcaaatgaaaattttatatagtgtcatatcaatcaaaagaaaataatgaaactaagaatacagatcactgttggaagagaaagcagtggtgatggtgtgggtactgcaggaggtggtggggccgtggcacactagaaaagttgggtcacgctgagtaggaagcatttgattttctctggtgcttttagctctggggccggtcaaaggcctctctctggcatggctgtccagggtttgtcccaatgtgtctgagtgagccagcttgagaaggggtcgtgccgtttcttctttcacacaggggaaaaaaaagaccaaacacggaggtgcccagggtgtggatctgctggtgtcccgggagaaccagctggctgggcagcccctcttccccacaggcagctgctattgcgtagggaccgccaggtcaccgagtggccatcacaacaaacccccgcacagtccagcccggccacagccgcctccttgtgtttctgttgtcttccctgctgctgcccacatcctttacccaccgtgtctctcggcccactggaggtatcagaaattccaaattttcaaagcagtttcagtattttcagtatatatgttgggattttataatggttcatggccagaaaaggttcagcacctcccacacctttaaggaagaaaaatgaaaatgacactagttttgaaatgtaagagaattaaagtactgttaaaaatgaaaagaaattggcaaacatcaggaagtacaatactaaaagccccagtttatgataacaaaagttttcccagggtatgccagtaagtaaaatacgcaaggagagtgtgtgtacttatctctgtggggggaaaggaagaaaatgagccaa

SEQ ID NO: 240342 - DNA, 1173 bp, Homo Sapiens
ttggcttcttcctctcccttttttccttcttccttcccctcctcgccgccaccgcccaggaccgccggccgggggacgagctcggagcagcagccagagtttattaaccacttaacctctcagaactgaacaaagacaacattgttcctggaacgccctctttttaaaaaagaaagcataacccctactgtagaactaaatgcactgtgcatgaaacttggaaaaaaaccaatgtataagcctgttgacccttactctcggatgcagtccacctataactacaacatgagaggaggtgcttatcccccgaggtacttttacccatttccagttccacctttactttatcaagtggaactttctgtgggaggacagcaatttaatggcaaaggaaagacaagacaggctgcgaaacacgatgctgctgccaaagcgttgaggatcctgcagaatgagcccctgccagagaggctggaggtgaatggaagagaatccgaagaagaaaatctcaataaatctgaaataagtcaagtgtttgagattgcacttaaacggaacttgcctgtgaatttcgagtctttccctctgaaacaggtggcccgggagagtggcccaccccacatgaagaactttgtgaccaaggtttcggttggggagtttgtgggggaaggtgaagggaaaagcaagaagatttcaaagaaaaatgccgccatagctgttcttgaggagctgaagaagttaccgcccctgcctgcagttgaacgagtaaagcctagaatcaaaaagaaaacaaaacccatagtcaagccacagacaagcccagaatatggccaggggatcaatccgattagccgactggcccagatccagcaggcaaaaaaggagaaggagccagagtacacgctcctcacagagcgaggcctcccgcgccgcagggagtttgtgatgcaggtgaaggttggaaaccacactgcagaaggaacgggcaccaacaagaaggtggccaagcgcaatgcagctgagaacatgctggagattctttggtttcaaagtctctgcaggcgcagctcaccaatctcgcactcaagtcagaggagaagacactcataaagaaaccaggggatggaagaaaagtaaccttttttgaacctggctctggggatgaaaatggga

SEQ ID NO: 240343 - DNA, 1881 bp, Homo Sapiens
  misc_feature (786)..(794): n is a, c, g, or t
  misc_feature (835)..(844): n is a, c, g, or t
  misc_feature (1763)..(1777): n is a, c, g, or t
cacaaaatggattttttattgtggtcatacatgtttctcagtgccacagaaaattgctatgtagggacaaaaaatttttggatgggctctgtaaagaaacatggtaggtttttcagaaatgagttgtgcaggaatgtggttaatgaaaagcagaaagggttaagggaagagaaaggaagccaaggagtgtggtatgtacatcaaatgattactttttaagcccctctaggctctgataaccctttccccaagtcagatcccaacaaaattcatcagtaactgaagtgattgtgctaacagatacataaagactaccggagaaaagtgggttgagatgggctcagacttattgttaggacaactctgggagtcttgtgtctgtgccaaccacgtatccgtgggctacctggagatgagttctaacaaccagcacagaacccaaagctgctctccaacacctttgtttagtagggaaaacctgtagtggggacaagagaggaagctgtgcccttcccccaaccaccgtttcatcttctgctcgctgaccttgatgtgacttgagagctctccttgcttcggctgtgcagtccagaagccagaacttcctctaggaaacttttcgtgttgtgcactgtggtgcctcccaggacaatcctcactccaggagtggtgcggttcaggttataaactgttagagcctcttcataggtggctcctccaattacaaacacaatgatatcctgaggtctgcaataatgaagaatgagatattatcacaggataagnnnnnnnnnggactgtgacttacatacacagagttttaatttctaaatcnnnnnnnnnnggtggaggaagcagaattaaagcagaatagaataaaaggtttaaaaaaagtttcaattatctgaaattggcaggaaacagagcaggaaatgctgaatagtgatttgctttctgtttatgagcggatgtcttataatttctgtgctgtggatttcagaatagcacaatagtgtttgctggaaccaaatgtagaaatattcttttatattcaagagggtgcagagtgccttaccatgacatgatatcaatacggcagaattttatgtttgtattaatactacacatctcctttcatgtataagcctttgtcaaatacttaatacagtgctattacaatggcctctgtacaaggacctcaaagcatttttgaaagaactagcatatttagatgtccccaaaacatggaaactagaaacatttagtattttgagtataaaaaaaagaatgggacacaaaaattaatggtgcttctaggaactctatcttttcttgaaatcttttttctgaatcctttgataaaccaagaaaaagaaaccatggaaaccaaaaaaaccatgagtgtagctgatactggacatgcgaacacagctcagtcactagcttcacttgggtagcactgtgttgttttactctgtttcctgtttcaatccgtatcaaaatggcttcataacaaaagtgaatgttcctattagctccttccttaaatatcaccaagaaggagatcaaattattttcaaaaccattactaggcaaataattttgttaaatcactcattggacactaaaactacatcaatcagaagcatccgttttgaatgttattgcacaaaactaaccagaaacatctttaatcaaggaatatacatgcttatgtataaatcatgaaaaaaaccccaaccctacatttccttcctgcttgnnnnnnnnnnnnnnnttctaaaataccctgaaagaattaactgagagagtatttgttcttgtgggacttcactgaaacagaatcagctattgtggctattttaaaatgttcagatccaa

SEQ ID NO: 240344 - DNA, 1369 bp, Homo Sapiens
  misc_feature (814)..(876): n is a, c, g, or t
ctctgttcaacaagcagaacaggataattcagacaacaacaccatctttgtgcaaggcctgggtgagaatgttacaattgagtctgtggctgattacttcaagcagattggtattattaaggtacttgtggagaggagtgggagctttctgtcagtgttgtaggcttgtggatttcacacattagtaaaagcaagtctttaatggttgccagcagtaaaaacaagtcttagtggttgttgccagcttaatttgttgaggaaagagccttagttactgttttctaaaagagaagttctatcttaacacaaaaagtataacttatcagagtaccctaaactcttgagatttgcactctatagtaacttttagttttatctttcaatattggagtgagagacagttttctttaatggaggtttacatgtgaggtaggaagaagtaactgggaagaggggagctgaagtttgggaattataaacctcatgttctagaggaagaagatggaaagggagtactgtagcctttaaaattgatgttacctcattttgctttcttcagacaaacaagaaaacgggacagcccatgattaatttgtacacagacagggaaactggcaagctgaagggagaggcaacggtctcttttgatgacccaccttcagctaaagcagctattgactggtttgatggtaaagaattctccggaaatcctatcaaggtctcatttgctactcgccgggcagactttaatcggggtggtggcaatggtcgtggaggccgagggcgaggaggacccatgggccgtggaggctannnnnnnnnnnnnnnnnnnnnnnnnnnnnnnnnnnnnnnnnnnnnnnnnnnnnnnnnnnnnnnaggacagcagcgagctggtgactggaagtgtcctaatcccacctgtgagaatatgaacttctcttggaggaatgaatgcaaccagtgtaaggcccctaaaccagatggcccaggagggggaccaggtggctctcacatggggggtaactacggggatgatcgtcgtggtggcagaggaggctatgatcgaggcggctaccggggccgcggcggggaccgtggaggcttccgagggggccggggtggtggggacagaggtggctttggccctggcaagatagattccaggggtgagcacagacaggatcgcagggagaggccgtattaattagcctggctctccaggttctggaacagctttttgtcctgtacccagtgttaccctcgttattttgtaaccttccaattccctgatcacccaagggtttttttgtgtcggactatgtaattgtaactatacctctgggtcccctttaaagtgaccactttagtt

SEQ ID NO: 240345 - DNA, 1301 bp, Homo Sapiens
ttggggaagaacgaccaaggaaaatgggttattttttttccagaggaaatagataacgtaaccttttaaagcaaaatctttataaactgtgtctgagaaattgcacacgtgtgtgtgacatgctcaaaggtcagacaaggggtggtcaggaagggatgtattttagtagccacttgtatctttttccaaaaacacctacccatgtttggggaatgttaaacaaaatcaaaaaacaaccttttgtagccgttggaagcttcatgtcctttcttctaacttgtcttctccagcggaagtgaccgtggtggcttcaataaatttggtggccctcgggaccaaggatcacgtcatgactccgaacaggataattcagacaacaacaccatctttgtgcaaggcctgggtgagaatgttacaattgagtctgtggctgattacttcaagcagattggtattattaagacaaacaagaaaacgggacagcccatgattaatttgtacacagacagggaaactggcaagctgaagggagaggcaacggtctcttttgatgacccaccttcagctaaagcagctattgactggtttgatggtaaagaattctccggaaatcctatcaaggtctcatttgctactcgccgggcagactttaatcggggtggtggcaatggtcgtggaggccgagggcgaggaggacccatgggccgtggaggctatggaggtggtggcagtggtggtggtggccgaggaggatttcccagtggaggtggtggcggtggaggacagcagcgagctggtgactggaagtgtcctaatccgtgagtgaaacttaatttttttcttagttctcttgcatgcgtgctctttgatatattggtactgaggtatgtgcgtgttttccaaagaagtaaatgtcaaggccacactgttggggtcagatttagccaaaagcttacctaggtaaggttgatgtaatgggaaaggtaatggattgggttcagtaatactgatttttgttcctgactctgagaagcaagccgttttgtctttctgaagcttcagtttcctcactgtatctctaaagtcaccgtagtttcttcctagttctaggtcttgcctattccccatcgctccagactgattgtcttcctttctccttagcacctgtgagaatatgaacttctcttggaggaatgaatgcaaccagtgtaaggcccctaaaaccagatggcccaggagggggaccaggtggctctcacatggggggtaactacggggatgatcgtcgtggtggcagatga

SEQ ID NO: 240346 - DNA, 1336 bp, Homo Sapiens
  misc_feature (441)..(449): n is a, c, g, or t
ggagttatgtcaaaataaaaatagttgtggttacaattagcacatgcaattcactgcaaaggtaaaaatacatggtatactctagacaagccttccaaatgaagttagagtagatggggtaaaacagcaagtgaacatgaaaggattgcacttagaagaaagtgggacatagctaggatataaaagaaacatacctaatgctagtcagtcactgcattgtcctactagcaaattgcacatttatttttagagtatattcaatacacatacatattgagactagagaattttcaaatatctacctttgaaatatccctttgtttctaacacatcacattatggtattaatgtaacagcacttaaaacctgtagttatcattcaaagcttgtgttcaagagataaaagaacatcattcagacaaagcctgtgttcaagaaatnnnnnnnnncatctatcactatcggccttaaatgcatctcatcacacgacccatcaactttaatgaaatgggtaatgaagttaaactaaccagtttgtacaaactattgactgagaaaaagcccttaaaaatttaggaacaaatgagcaacagaagagctcaccctgagctgccaccttttaatttttagtgcaatgtatatgagaatatcatgctaatgcacatactagtagcatgtatgatggaaaaaaataggttaatgcaaaagataatacgcttggctttgtaaagttttgttttgacttacatcatctgaattctgtttatcgagtctgaaaaggaactgctgccaaggaccagtccaaagaagaattaggctgtaagactgctagttcataccttctttgaaatcaatgacaatgtccaattttaggctaatcctaaaacacttgccattttatgactccatattcttttaatttacagaaaagtacaaattttttagaaagtaatcttatcagcacaatataatctaacaatacctgtaatagaaagctatcccagtaaatttttttgaacaattgaacttttgtcttatgcagcttataactttgttattttattcatctcaacaaaataaaactttattgaaacaaaagtgtatggtttaggaatatgctcttaataacaactgagcaaaattagaatgatgtggactataacagaatgaaggaagatctctcctgcttgatgtacttggtcaatatatgttagtaaacagaaatattttagggaattctatgattattctacttctacatttacatgtcatggttttaactagttaaatggggagaaaaaagccaacttttttgtacaaagttggctttttttag

SEQ ID NO: 240347 - DNA, 3407 bp, Homo Sapiens
  misc_feature (3022)..(3090): n is a, c, g, or t
  misc_feature (3158)..(3200): n is a, c, g, or t
tttatttttagagtatattcaatacacatacatattgagactagagaattttcaaatatctacctttgaaatatccctttgtttctaacacatcacattatggtattaatgtaacagcacttaaaacctgtagttatcattcaaagcttgtgttcaagagataaaagaacatcattcagacaaagcctgtgttcaagaaataaaaaaaacatctatcactatcggccttaaatgcatctcatcacacgacccatcaactttaatgaaatgggtaatgaagttaaactaaccagtttgtacaaactattgactgagaaaaagcccttaaaaatttaggaacaaatgagcaacagaagagctcaccctgagctgccaccttttaatttttaatgcaatgtatatgagaatatcatgctaatgcacatactagtagcatgtatgatggaaaaaaataggttaatgcaaaagataatacgcttggctttgtaaagttttgttttgacttacatcatctgaattctgtttatcgagtctgaaaaggaactgctgccaaggaccagtccaaagaagaattaggctgtaagactgctagttcataccttctttgaaatcaatgacaatgtccaattttaggctaatcctaaaacacttgccattttatgactccatattcttttaatttacagaaaagtacaaattttttagaaagtaatcttatcagcacaatataatctaacaatacctgtaatagaaagctatcccagtaaattttttttgaacaattgaacttttgtcttatgcagcttataactttgttattttattcatctcaacaaaataaaactttattgaaacaaaagtgtatggtttaggaatatgctcttaataacaactgagcaaaattagaatgatgtggactataacagaatgaaggaagatctctcctgcttgatgtacttggtcaatatatgttagtaaacagaaatattttagggaattctatgattattctacttctacatttacatgtcatggttttaactagttaaatgggtagaaaaaagacatctttaataattgatttctatttctcaaactagatgctctactttaaatatgagctttaatgaatgttttgtaacattttaaagttgtaacatttctaagtatactccactaacttcacaataagagctagggtcactggatgacttcatgtggtaaaatcccttatcaaggaataaggctgaaatttaaatgaacaattaggtagagaagaggtatgaacacagaacatgtgaatgaaatttgctttttttccttgctgctgttcccgagtgccgactgatccatagtaaaaaaggacaagattaaaattttaggttttaatggtacaaagtgtgaagttttatagttttctaataattattcagtattatccctttcagagatgagggtaggataccacagacatcagtaactgacaagttataatatcaacacatgtaacatttgggtcattattttataaccctaaagggagcaactgcaggtgcagaagcagtgagtgaactagttttgtccagacaaggttttctgatgtgctattactttaaacaccacttttggacactaaagatttaaagtgataaagccactaactaactttattagactagtttttacataaataaccagatttctttgcctacctaaagtacaatttacatgcatcaacacatagattattctaagacatgcttgggaaagtaattttgaatgtaaaaagttttataatttattttctccttagggcaggtgtacattacatattagtgctcaaatatatgttcatttccagaatgaatttttgcacagtaatcatatatccatttaatatgtataaagtgttcttggggatgggggtatattcactcactgtaccatgttttatacaggcttcaacatgcaaatttgtttatatcatggccttcaatgatcctccattctcattcctgtagattaagagttcatattgtatatctgaccctgaaatgtacaaacttcacactacaacattcttcatgacactatttgttatgaggaaagttgcagctaaatattagtcatgtgacttaaattttgagaaaatggaaaatgtaataggtataaatttcctgacacatacagcaagacaaatccagcccagcctttgatgatcaacttaaaagctggagatgtcattatcttgttgtgtaaatttgggtctatccctacctttacttctctgtgcctgattttcctcatctactttgaattcgtcattctattaatctacttttgcctaaagtgggaaactgaatatatcagaatgaaacatctatttttttcataaagaagatcatataatatgtgaaagaactttgaaaggatgaggcattatataaatgcaagaatataaaagataaacaggaagtctaatgtgaacaatattctgagagtaaaaagtgtaattatatttccattgtaaatgtataccaagttttcttagctttctattctccaataacctctagaaactattctaagcatgcctggtttctgtaacttaaatatggcataaaaacctgtttcctttgaattcacttgatagcagtagtcaatcactaataacgcttgctaatttcctcttactttctaagaaaacccctatatttagcatctgcttccatatcgcacgtggtggttaggggacagcataagtacactagcggctttagcactaaactcgaggcctgggtcacttctcccttgaagaaaaaaggttttaaaaattcctaaatcacaatgtagaactaagttccaccctacctcagaactgcagacattaaaataccatctctttattaagtgtctctacaataatgatatttgctaagaacaagatgtacattttttggggttctgttttgttttggcaaatattgcccaagttgtcttagtgtgcctcaaacatttactnnnnnnnnnnnnnnnnnnnnnnnnnnnnnnnnnnnnnnnnnnnnnnnnnnnnnnnnnnnnnnnnnnnnngctgaagatatatactgtataaagtgttcatctacccagtactctgaagtcttaagaaaagtcaatgnnnnnnnnnnnnnnnnnnnnnnnnnnnnnnnnnnnnnnnnnnncacacattagcaatttaagccttttaacatgccaattttttagatgctttattggttttttttcccctttactactacttcctgttttcccctttactactacaatttaagcctttaaaaatggcaattttttagatgcttgagatagtttgggggatccctagctcttatcatggcactctgttgagtttgtgaaatgcatcccaa

SEQ ID NO: 240348 - DNA, 1004 bp, Homo Sapiens
  misc_feature (149)..(149): n is a, c, g, or t
aattttaggctaatctaaaacactgccattttatgactccatattcttttaatttacagaaaagtacaaattttttagaaagtaatcttatcagcacaatataatctaacaatacctgtaatagaaagctatcccagtaaatttttttngaacaattgaacttttgtcttatgcagcttataactttgttattttattcatctcaacaaaataaaactttattgaaacaaaagtgtatggtttaggaatatgctcttaataacaactgagcaaaattagaatgatgtggactataacagaatgaaggaagatctctcctgcttgatgtacttggtcaatatatgttagtaaacagaaatattttagggaattctatgattattctacttctacatttacatgtcatggttttaactagttaaatgggtagaaaaaagacatctttaataattgatttctatttctcaaactagatgctctactttaaatatgagctttaatgaatgttttgtaacattttaaagttgtaacatttctaagtatactccactaacttcacaataagagctagggtcactggatgacttcatgtggtaaaatcccttatcaaggaataaggctgaaatttaaatgaacaattaggtagagaagaggtatgaacacagaacatgtgaatgaaatttgctttttttccttgctgctgttcccgagtgccgactgatccatagtaaaaaaggacaagattaaaattttaggttttaatggtacaaagtgtgaagttttatagttttctaataattattcagtattatccctttcagagatgagggtaggataccacagacatcagtaactgacaagttataatatcaacacatgtaacatttgggtcattattttataaccctaaagggagcaactgcaggtgcagaagcagtgagtgaactagttttgtccagccaacttttttgtacaaagttggcaattataaaaaagcattgctc

SEQ ID NO: 240349 - DNA, 1390 bp, Homo Sapiens
aaaaatttgaacaagtatttatttcttaaaatttacttaagggattagagctaatatataatagaacatttaatataacatttggagttatgtcaacataaaaatagctgtggttacaattagcacatgcaattcactgcaaaggtaaaaatacatgctatactctagacaagccttccaaatgaagttagagtagatggggtaaaacagcaagtgaacatgaaaggattgcacttagaagaaagtgggacatagctaggatataaaagaaacatacctaatgctagtcagtcactgcattgtcctactagcaaattgcacatttatttttagagtatattcaatacacatacatattgagactagagaattttcaaatatctacctttgaaatatccctttgtttctaacacatcacattatggtattaatgtaacagcacttaaaacctgtagttatcattcaaagcttgtgttcaagagataaaagaacatcattcagacaaagcctgtgttcaagaaataaaaaaaacatctatcactatcggccttaaatgcatctcatcacacgacccatcaactttaatgaaatgggtaatgaagttaaactaaccagtttgtacaaactattgactgagaaaaagcccttaaaaatttaggaacaaatgagcaacagaagagctcaccctgagctgccaccttttaatttttaatgcaatgtatatgagaatatcatgctaatgcacatactagtagcatgtatgatggaaaaaaataggttaatgcaaaagataatacgcttggctttgtaaagttttgttttgacttacatcatctgaattctgtttatcgagtctgaaaaggaactgctgccaaggaccagtccaaagaagaattaggctgtaagactgctagttcataccttctttgaaatcaatgacaatgtccaattttaggctaatcctaaaacacttgccattttatgactccatattcttttaatttacagaaaagtacaaattttttagaaagtaatcttatcagcacaatataatctaacaatacctgtaatagaaagctatcccagtaaattttttttgaacaattgaacttttgtcttatgcagcttataactttgttattttattcatctcaacaaaataaaactttattgaaacaaaagtgtatggtttaggaatatgctcttaataacaactgagcaaaattagaatgatgtggactataacagaatgaaggaagatctctcctgcttgatgtacttggtcaatatatgttagtaaacagaaatattttagggaattctatgattattctacttctacatttacatgtcatggttttaactagccaacttttttgtacaaagttgg

SEQ ID NO: 240350 - DNA, 1783 bp, Homo Sapiens
  misc_feature (341)..(379): n is a, c, g, or t
  misc_feature (777)..(797): n is a, c, g, or t
  misc_feature (1464)..(1489): n is a, c, g, or t
tgaagctgagaaaccatgaagctaactaggggctgtgcgacagcaggccacacactactcaactttttttgtaaaggccactaagtcaaggaactgagtcaggaaaagctgagttttgtttgcacggaatagcaatagtgcagcactcaagtcagtttgcagcccagagatgcactccttgcatttggcccattcaacccatttcttgttacacctcatgatgctcaaactggcaaaatttaccccctgccccaaatgttccctgctgggcaaagcagcctcccttcccgagagccacagctgcctgcgagcagccttggaggcttcacagtaaggctgannnnnnnnnnnnnnnnnnnnnnnnnnnnnnnnnnnnnnntttgagtacctgggctcaagcaatccttctgctgtggcctccaaagggctgagacttacttacaggcatgagccaccacacccaaccacggactgtgcttttaagagtcggtctccaggttccacctccatcccttgaacgtgggccctctgaactcagcagcaccttgtcctgcttgatgcctcctaaccctccccaaactccaaccatctgcattacatctactggccatcccagtaaccagagcctaagtacattttgaagaatatagtcgaggcctcacaccctggctaaggagtaagctggtttttgggctgtgcagagccacgtcctactaactgtgctttaacatcccctgcagagctaagtcttagccaccaaggacaagaccaagcaannnnnnnnnnnnnnnnnnnnnagtggcctatttaagacgaacctatcgatacccagagttcactggttcagttacttgctttcactagtttttagctttttaataaataagtagcaatgttctgggatgactcctggcagctgcgaaccctcattttagcaatagtctgcacagctccttcagcctgttggtctggctgaaatgcctctctccccactccggcttttgtctggcttgggccctcctggtcatcttgtcctaggcagcctgtggaggtctatgaaagccacacctccagccagctgatgctgcgcccgagtcacatggcaggcgccacaggcaaccccggtgctcacagggcatcagggagcacagcagcatctgccatggaggcggcttataagttagtgacatacagttatctcacttggtggcagtcacctttaggctaaagcatccaaatcccaggaagaaaatactcacgttagttgatggatgttggaaggcattggaggaaaacaccacagttaggactgttaatgacttacacactgttggtgagactcatctcgaacatgcgcaaacattgatcgtagtaacggtggtggtggttagtgccacattcaaataaaaatagttctatacaatatgttcatttggtcatgtgctatttacagattttacaaannnnnnnnnnnnnnnnnnnnnnnnnnttgcccttatgttctctataccaggccagcagaaacttgcataaaatgtacatcacagatgacaattagtgcctgtacattaagaatacaattcctatgactacctacacagcagagcaggagccttcttcccctcaagcagagtacaactaaagttctgagctaagaactggagagaaagttggacatgtctgttagtcccaggtaagccacttacgagaaaaataactgtcttgtctttaaaatgttttatttttttaaaactagatgacgtgccactgaaataggcaccaa

SEQ ID NO: 240351 - DNA, 1310 bp, Homo Sapiens
  misc_feature (139)..(157): n is a, c, g, or t
  misc_feature (502)..(612): n is a, c, g, or t
  misc_feature (672)..(704): n is a, c, g, or t
  misc_feature (970)..(990): n is a, c, g, or t
  misc_feature (1030)..(1050): n is a, c, g, or t
ttacaaaaagtgtctccaaatgcttgactagagaaaaacccctttcaatagagaagcatgtgcaacaattccacaaataatcgctatcccagggcaaggcacattgatatggaatttttgttttcgtgcaaattaaggnnnnnnnnnnnnnnnnnnncaacattgtttcggggagaaagatgaggagcaaagtgtcttcccaagaatttcagttacttgattgtataggacagtagtagaacccttctgaagggctgaaaaacatagtttaaaggcaagtgcctagagtagggattacaatattgtgtcttaatgcactctactttatcctacattaactatataaaaattagttactaacactagaacatgcagagactttctctgatcagcagggcttgccaaccagaacgtatatatatgtatagtataggaaaccttcttgaagtcgcatgggaagcaaaggggtgcttcgctgtttggtagaaaaatcacttgcacnnnnnnnnnnnnnnnnnnnnnnnnnnnnnnnnnnnnnnnnnnnnnnnnnnnnnnnnnnnnnnnnnnnnnnnnnnnnnnnnnnnnnnnnnnnnnnnnnnnnnnnnnnnnnnncctaacaagtacccttgatctgaatgggcaccagcatttgtgtcagtattggtttcatcnnnnnnnnnnnnnnnnnnnnnnnnnnnnnnnnntcccatagcccagttcagggatgcaaaggtctttaaaacttctggacaatctctggtacaatgaggtgtctgataactgataaatcctatgatgccagataggtgtaaaattttttagaattggcgtaatccattatagtgacttctagcttataaaattaacagataccatgatttcattttagtcatgtgctttgataacagaaaataattaattagcatttaatgtagttaacatattgtggtaaaagcaccattagatttgnnnnnnnnnnnnnnnnnnnnnaatttccttcagtttttaaagggatacaagtttaacaatnnnnnnnnnnnnnnnnnnnnntagctcccctttttcttgcaaggctgttttttaccccaataatttagagtcctggggtgaaaggactagaaaaacaaaaatagaattttcaacaatctctatcttacaaagatatttagctatccaatgaaattgcactttactcaattcaaaattcgattgttttgattgattcctgtcagtttctgtcaaaacagaccatcttccccatttccatgtgaatttttgtgtcattgttgaaattgttgaaaaaatgccaa

SEQ ID NO: 240352 - DNA, 1229 bp, Homo Sapiens
gagcatgaaaataaatctttattttcagttattacccaccaataagagaaagttaggttcacagttttagctcttgacacaaagtgaactaggaggcaaatttatatccatcagatacaactaatgcaccaactttttaagttcaggctatcttgaaagcttgcaacataccagatattgctatgttgtctctcacgacagcaatggatgacactgagaagttgtgttttgagtagcaggtgttttctatagtatgttgctggaaatcaagaggtttataaaacatggtacatgtttggaaatgagttagatacttgaaaagtctaaacacactgatttaggagtgcgtatgttgctgtctcaatgaacaatgggtcaatagttcatatggactaaattaatctctgggtagcacgtatgtgtgtaaatataaaattatattagacattagcaccagtgcagaacatgctcagcatcataagatccaaaacaccagcacaagtttatccatcattaaaaacaattacctccttcctaaaatgtcagaatagtaggtaactgagattaataaatcttatccaaaaagtaactcttataacataaaagtttcttttagaagtatatgtgagaaccaatcagctaaatagaaatgtttaagattgaagatgtccaatatttttaaaactggacattaccatatacaggtagaacatttctaaaaatgacgtgacaaacaattcttaaaaattttttaaaaattccttcactgtttatcaataaatgtggcagaataaaagacaatcctagaaaacttttttaattcatcattctatgtgtgttttaataagtggtgatgctcccattataggaatccattatttacctaattttctaatggaggaagagagaagagataattaccactttctgtggaatactcaacttacaaccaaataatagcaatctaggaaatttagaaacagtaaaggtttttggtttatatttcatgtatagtgctgctgttccaaccttacaaagtaaagctgtctgcttcccaaattccaaaaattaaaatactcccccacctcaccctaccaaccagcgccctttggtttttgttttagaacaaggaagggttaaatggtggctgattatggatgtaccattttgattttgggacctttcacacacagaaatcatagcaaatggccccaacttttttgtacaaa

SEQ ID NO: 240353 - DNA, 971 bp, Homo Sapiens
gtcaatcaaaagtagcattcagtatgcttaactttcattatcaaaaaagtgatctgctaagaagtgacaatcagattaaatccaagaagtccttggattttgtattttacaagaattcaactttcccaattaagtcattagtcattaagataagtacccttcccaaatgtgattcaacagcctggtttttagcaaataaaaaccccatataaaattcaatttaaaaattataaacacacaggggtgtgcacacaggtcagaaaccaggaaacacatgacaataaacatgatcctatttgattgtttttatgacttttaagaagtgagcatgaaaataaatctttattttcagttattacccaccaataagagaaagttaggttcacagttttagctcttgacacaaagtgaactaggaggcaaatttatatccatcagatacaactaatgcaccaactttttaagttcaggctatcttgaaagcttgcaacataccagatattgctatgttgtctctcacgacagcaatggatgacactgagaagttgtgttttgagtagcaggtgttttctatagtatgttgctggaaatcaagaggtttataaaacatggtacatgtttggaaatgagttagatacttgaaaagtctaaacacactgatttaggagtgcgtatgttgctgtctcaatgaacaatgggtcaatagttcatatggactaaattaatctctgggtagcacgtatgtgtgtaaatataaaattatattagacattagcaccagtgcagaacatgctcagcatcataagatccaaaacaccagcacaagtttatccatcattaaaaacaattacctccttcctaaaatgtcagaatagtaggtaactgagattaataaatcttatccaaaaagtaactcttataacataaaagtttcttttagaagtatatccaacttttttgtacaaagttgg

SEQ ID NO: 240354 - DNA, 1489 bp, Homo Sapiens
  misc_feature (1210)..(1220): n is a, c, g, or t
ttgtccccgacgattctttgacgacgaatcggaccccttcgaggtgctgaaggcagcagagaacaagaaaaaagaagccggcgggggcggcgttgggggccctggggccaagagcgcagctcaggccgcggcccagaccaactccaacgcggcaggcaaacagctgcgcaaggagtcccagaaagaccgcaagaacccgctgccccccagcgttggcgtggttgacaagaaagaggagacgcagccgcccgtggcgcttaagaaagaaggaataagacgagttggaagaagacctgatcaacaacttcagggtgaagggaaaataattgatagaagaccggaaaggcgaccacctcgtgaacgaagattcgaaaagccacttgaagaaaagggtgaaggaggcgaattttcagttgatagaccgattattgaccgacctattcgaggtcgtggtggtcttggaagaggtcgagggggccgtggacgtggaatgggccgaggagatggatttgattctcgtggcaaacgtgaatttgataggcatagtggaagtgatagatctggcctgaagcacgaggacaaacgtggaggtagcggatctcacaactggggaactgtcaaagacgaattaactgacttggatcaatcaaatgtgactgaggaaacacctgaaggtgaagaacatcatccagtggcagacactgaaaataaggagaatgaagttgaagaggtaaaagaggagggtccaaaagagatgactttggatgagtggaaggctattcaaaataaggaccgggcaaaagtagaatttaatatccgaaaaccaaatgaaggtgctgatgggcagtggaagaagggatttgttcttcataaatcaaagagtgaagaggctcatgctgaagattcggttatggaccatcatttccggaagccagcaaatgatataacgtctcagctggagatcaattttggagaccttggccgcccaggacgtggcggcaggggaggacgaggtggacgtgggcgtggtgggcgcccaaaccgtggcagcaggaccgacaagtcaagtgcttctgctcctgatgtggatgacccagaggcattcccagctctggcttaactggatgccataagacaaccctggttcctttgtgaacccttctgttcaaagcttttgcatgcttaaggattccaaacgactaagaaattnnnnnnnnnnngactgtcattcataccattcacacctaaagactgaattttatctgttttaaaaatgaacttctcccgctacacagaagtaacaaatatggtagtcagttttgtatttagaaatgtattggtagcaggggatgttttcataattttcagagattatgcattcttcatgaatacttttgtattgctgcttgcaaatatgcatttccaaacttgaaatataggtgtgaacagtgtgtaccagtttaaagctttcacttcatttgtgtttttt

SEQ ID NO: 240355 - DNA, 886 bp, Homo Sapiens
ttggatcttgtgggaagagctgaagcaggcgctcttggctcggcgcggcccgctgcaatccgtggaggaacgcgccgccgagccaccatcatgcctgggcacttacaggaaggcttcggctgcgtggtcaccaaccgattcgaccagttatttgacgacgaatcggaccccttcgaggtgctgaaggcagcagagaacaagaaaaaagaagccggcgggggcggcgttgggggccctggggccaagagcgcagctcaggccgcggcccagaccaactccaacgcggcaggcaaacagctgcgcaaggagtcccagaaagaccgcaagaacccgctgccccccagcgttggcgtggttgacaagaaagaggagacgcagccgcccgtggcgcttaagaaagaaggaataagacgagttggaagaagacctgatcaacaacttcagggtgaagggaaaataattgatagaagaccagaaaggcgaccacctcgtgaacgaagattcgaaaagccacttgaagaaaagggtgaaggaggcgaattttcagttgatagaccgattattgaccgacctattcgaggtcgtggtggtcttggaagaggtcgagggggccgtggacgtggaatgggccgaggagatggatttgattctcgtggcaaacgtgaatttgataggcatagtggaagtgatagatctttttttgtggcctgaagcacgaggacaaacgtggaggtagcggatctcacaactggggaactgtcaaagacgaattaactgacttggatcaatcaaatgtgactgaggaaacacctgaaggtgaagaacatcatccagtggcagacactgaaaataacgagaatgaagttgaagaggtaaagaggagggt

SEQ ID NO: 240356 - DNA, 1223 bp, Homo Sapiens
  misc_feature (114)..(125): n is a, c, g, or t
ttgggacaagtattactttttgggcaaaactactcattaagcaatttctctagtgtgtcggacacaaataggttctttatttttggcatgtatgcctttttattttcattcaannnnnnnnnnnnctcagacagacatagtagtaacgactagcattggaaaatacatatcactattcttggaatatttatggtcagtctactttttagtagaatatttttggatagcgttgacacgatagatcttattccatacttctttattattgataattttattttcattttttgctttcattattatacatattttggtggagaagaggttgggcttttttgaaagagacaaaaatttattataacactaaacactccttttttgacatattaaagcctttattccatctctcaagatatattataaaatttatttttttaatttaagatttctgaattattttatcttaaattgtgattttaaacgagctattatggtacggaactttttttaatgaggaatttcatgatgatttaggaattttctctcttggaaaaggcttcccctgtgatgaaaatgatgtgccagctaaaattgtgtgccatttaaaaactgaaaatattttaaaattatttgtctatattctaaattgagctttggatcaaactttaggccaggaccagctcatgcgttctcattcttccttttctcactctttctctcatcactcacctctgtattcattctgttgtttgggatagaaaaatcataaagagccaacccatctcataacgttgtggattgagagagacactacatgactccaagtatatgagaaaaggacagagctctaattgataactctgtaattcaaaaggaaaagagtatgcccaattctctctacatgacatattgagattttttttaatcaacttttaagataatgatgttctgttctaaactgttctgttttagtgaaggtagatttttataaaacaagcatggggattcttttctaaggtaatattaatgagaagggagaaaagtatctttaacagctcttagttgaagcctgtggtagcacattatgtttataattgcacatgtgcacataatctattatgatccaatgcagatacagctccaaaaaatattaaatgtatatatattttaaaatgcctgaggaaatacatttttcttaataaactgaagagtctcagtatggc

SEQ ID NO: 240357 - DNA, 1484 bp, Homo Sapiens
  misc_feature (289)..(308): n is a, c, g, or t
  misc_feature (476)..(521): n is a, c, g, or t
  misc_feature (683)..(710): n is a, c, g, or t
  misc_feature (1058)..(1069): n is a, c, g, or t
aaagttcagcaacctctgtccaagtatttacaacaatacttgagagttcctttacaaaacagaacacattttcttttcacgttaagcatactgggtatctgtgtctttcacaacaagcatttttaaaagaaaactcaatgcacaaatgggttaattagtataaaagtgctaagggctgtttgaaaagttaccactatagtatacagtcagttatatttgaggcatactacaacaaacttccagcttattgtggacaatattccagtagttgtttcaaaccattgtttgnnnnnnnnnnnnnnnnnnnntccaggagctgattagtgatgcagataagaactgccatcaatgtctctggccagtgagcaaattgaaaaccaactgaaagcaaatccaaatgaggaagattttaataaaggaatacccttctccatagcaggtgcaatgctgactgctcaaggcgtgcgtgcgcgcgnnnnnnnnnnnnnnnnnnnnnnnnnnnnnnnnnnnnnnnnnnnnnntctttccaattaaactgcaggtagaatgagattttgtgttattcaaaaaatttgtaagtgatcaaaagcactgctatggaatgcctgtttatctgcctttgttctggttaaaatctcataaaaatacattcaacaggaaaacataaattgtatgtgtataannnnnnnnnnnnnnnnnnnnnnnnnnnncacatgcacacaaatacttttgttttttgaagcataagatagttacataaatactcctataattgctaaagtttaaagaggcatcattttttttgagcttcaacaaaggtgctcgaataatatacaattaaaatgaagtagtttctattttgtagaatcagtatataataaggcacaagaatccccaaacagtctttttaaaaaaagtttcttcttaagctagagcttcaacaaaaactatgaacaaccaacaatataacagaacagagcaacaacaaacagtgaaatatagcccctggaaatgcctggtgttcgtcaccctctccctcctcttcctgtcacgttgtnnnnnnnnnnnngctccagtgctcacatcaagaaatgacttagatcttgttcatgtgctgactctgctaggaactggctgattgattggcttggaagaaaataaaagcagcaaaaagtgtaactgtatatatccttaataacccgctttagagaaatgccgctatcgcatttctctggcttcctcactgcctactgcagttgtgactgtatagaaaagaaacttgtggctttagacctgggatggctgtcaaagggttctgatgtgctcgtctggtagttctaaggtggttatggcagctgggtcgcaaggccttttttgtttcctgctcattcaggcctgagctttgcagcaaccagtgcagtcttcagagcaataggaaaaaaataacctctgggccactgaactgcttttatgttaccagccaa

SEQ ID NO: 240358 - DNA, 1526 bp, Homo Sapiens
  misc_feature (1115)..(1213): n is a, c, g, or t
ttggcaagaactttagtcagaagtcatcccttatatgccaccatagacttcttactggagagaaaccttacaagtgtaatgagtgtggcaagacctttagtcagaagtcaaaccttacatgccatcgtagacttcatactggagaaaaacaagtgtaatgaatgtggtgaggtttttaatcaacaagcacaccttgcaggtcatcatagaattcatactggggagaaaccttagaaatgtgaagcatgtgataaagtttacagtggcaaatcaagcctcagaagacaggagaattcatactggagagaaagcttataaatgtgaagaatgtcacaaagtttacagtcgcacatcaaaccgtgaaagacaggagaattcacactggagagaaaccataaaaatgtaagagtttgtgacaaggcttttgggcatgattcgcacctggcacaacatgctagaattcacactggagagaaaccttaccagtgtaatgggtgtggcaaagcctttagtaggcagtcaacacttgtttaccgtcaggcaatccatggtgtagggaaactttactaaggtaatgattgtcacaaagtcttcagtaatgctacaaccattgtgaatcactggagaatccataaggaagagagatcatactagggtaataaatgtggcagatttttcagacattgttcataccttgcagttcatcggtgaactcaacgctggagagaaaccttacaaatgtcatgactgtggcaaggtcttcagtcaagcttcatcctatgcaaaacataggagaattcatacaggagagaaacctcacatgtgtgatgatagtggcaaagccttcacttcacacctcatgagacatcagagaatgcatactggacagaaatcttacaaatgtcatcaatgtgccaaggtcttcagtctgagttcactccttgcagaatatgagaaaattcattttggaggtagttggtccatatgcaatgagtagagcaaaccatcaagcattaattgacattagggtcaattcagcattgacttgagtttgtattgacttaacattgagttcaagcattaattgacattagtgtttatgttaagaggattgnnnnnnnnnnnnnnnnnnnnnnnnnnnnnnnnnnnnnnnnnnnnnnnnnnnnnnnnnnnnnnnnnnnnnnnnnnnnnnnnnnnnnnnnnnnnnnnnnnngacgtgagccattttcccagcctgttttttgtttctttaaaaaaactgatagggatttttatggatatcatgttgaatctaaatcacattgggttattatataatcatttcacaatattaatttttccaagctatcaatatggggttgtagctcaatgtttttaatcattttgatcaatgtttgtagatttcaaggtacaaactttctgacctttgtacgtttatttctaagtatttctttaagttctccagccaaatggaaagtgttttaaaattttctttaaaaatggttattgtcaaagtatggaaattc

SEQ ID NO: 240359 - DNA, 1593 bp, Homo Sapiens
  misc_feature (342)..(369): n is a, c, g, or t
  misc_feature (503)..(519): n is a, c, g, or t
  misc_feature (1371)..(1400): n is a, c, g, or t
ttggcacagcctcatcattagcaactttatatacacagctttaaaaaatttgctttaaactgtttcagagcttcttccctaagccataaactgtctcacctaaacaagatagacctcaataaaagacataatatttctccacctggcagaaaagtaactgccaagtaagattaagaaataagttgagcatttctggagtatatttctcataattctgcagagacttccagtttattgcatatatgcagtaaagtgtatatattatgcagtttctctaagtggaaaaacttgacatgactttaatagtgttaaaacatgaaaatgctggtgagctgaggtagnnnnnnnnnnnnnnnnnnnnnnnnnnnntagcgttaaaatgcattttaggctcctaatgtcgttaatttgcacgttaaagacctctaatcgcatgcaagcattgacctaccacacctacatcccactgtgcctgcattattgaaattactactcactttaannnnnnnnnnnnnnnnnactgtttgataccaatcataatcagtctgatactagaatcatgattggttttgttctttagtactgtctagagctactattttgtttttattgctgtccgccacttgatagtcatacatctagtatgtgtttgtactatttagtattgcattcattggacgtactattcaacgaatttgtctccttactgttaccaagggtcttggaatttttatattttaaattaatcattcaatataagttatttataggtatagtacaattttaaaatatttagaatgctacaatcattggttcaaactattgattcatgggaaaatttaaattcataagaataatatgtatagggataagttgatatttaatgtattggcactttaacttgggcagacatgttttcttattggtttaaagaagtaataagtattttaatatttttactatgaaatgggatccaattttagaaatgaattgctacttttctctttagtgtgtacactttaagttttagatggaattatgaaatattcactttacgttattttgttacaataataagttttatatttcttattatcaagcaagagttgccacctggacagagtttacattgatactcaatatttttgatatgttaaagtgttattatacttgtaccattcaattggagattgtcataaattaaatatggtattttttactcagatttgatgagactgcaactagagaataaatattacattaaaattgctgctattttaaaacatagaatgtaactgtttgtattgtaaaagttgtgtgtcctcagtgaaaaatactgccttcagcttccaaagcaggcacctgaatgcnnnnnnnnnnnnnnnnnnnnnnnnnnnnnnaaatacatgccttcactagattgctgtgacctactaaacctcattttatttgcttggaacatttttggcttctctgtccacaccatagaaaaggacaaaggccttccagctctccttttctcttatttgttcccttctaaatacttgactctctgggggtgtgaaaagattcagctcataatttatactacta

SEQ ID NO: 240360 - DNA, 705 bp, Homo Sapiens
gcaaagcttacaaatttattagcagcttgtgcagtaagtttcttttaatgcgtctgtggcaatactagcaacaaattaataaaagcttaatttttatacaaatagttttattacaaatttgaattcttaagaaatacacatttaaagaaattacataaaaggccttagtagtcttagaaatgttttggagacttttagtgaaatgtcatttcaggcctagtggtccgaatctgccctcctgcggtccatgcgatgccctgctgaggtctgtgaacacagctcatgagaaaccacggaaatggcccgaatgtgcttacgtgtgaaaatactgatactgtgattcaacagagctgtttttcaagccaggatgcagaatgaggaatactaatgaaatgacggcctttaaggttgttgcttttgaagtcaagtcattcagtttgtgattagtgtttaaaaccctgaaaatatttaatacagaataaaaacaataagctcaaagtacatgtttcactataatagacaccatattcatgaacctgggtttggttttggcaacacataatttttggtttagaagtgaacaatgaaaacggatgtttcacattcaatatcctagtctttaaaaacctatgttaaaggacagcacagtctttcaaaggaagaaaactatgtaagctttattttaacttccactgttaaaaccaa

SEQ ID NO: 240361 - DNA, 792 bp, Homo Sapiens
  misc_feature (651)..(664): n is a, c, g, or t
atacaaatagttttattacaaatttgaattcttaagaaatacacatttaaagaaattacataaaaggccttagtagtcttagaaatgttttggagacttttagtgaaatgtcatttcaggcctagtggtccgaatctgccctcctgcggtccatgcgatgccctgctgaggtctgtgaacacagctcatgagaaaccacggaaatggcccgaatgtgcttacgtgtgaaaatactgatactgtgattcaacagagctgtttttcaagccaggatgcagaatgaggaatactaatgaaatgacggcctttaaggttgttgcttttgaagtcaagtcattcagtttgtgattagtgtttaaaaccctgaaaatatttaatacagaataaaaacaataagctcaaagtacatgtttcactataatagacaccatattcatgaacctgggtttggttttggcaacacataatttttggtttagaagtgaacaatgaaaacggatgtttcacattcaatatcctagtctttaaaaacctatgttaaaggacagcacagtctttcaaaggaagaaaactatgtaagctttattttaacagtggaagttaaactaaaccttgatctgcctaattgctgacatctatataaattactannnnnnnnnnnnnnttaatttttgactatttttggaccatctttattccacaggaaaattgtgatttctgcaaaagcagctgcaaagtaccacacatagcagaaagacagaaatttatactggggggttggaagatatccaa

SEQ ID NO: 240362 - DNA, 923 bp, Homo Sapiens
ttaaaaatatgcttcatgcactgtactggatttttttaagatgtaaattttaatacattatttcttttttgaacttgaacgggaaccagaatgggatgatccagatgatgacctgtggcgtctgtaagacataatggagagagtaggcattctagtaagctagagctaaatctcagcattcattcttaagactgtgaaagtatacaaaattcagtaccatgatgctagcaaaaaaattaaaaattgagataggaacttacacacataaaattatctgatgtttagactttggatatgagcccagttatcatataaatacaataaaaaattctctacaatttcaaaagaatctcatttcaaaatatagccacctctcaattatttaagatatcaaagaaaagccttgcaaaaatgtgtaaaattacagaaaatgtacaacaaaagcatataaacttggtaatggaagtgtgactaaaccaatccctgtgacacggtgtagaaagtgtaagaagtctattatgtaaaaaagatacagcaaggcttctgtgtatgagaaaatatactcataaataagttttggaaatctaggtcacacaagatgattgtacaatttgctatagggttatattcatgcagctagtatgaataagtcaatatcaacctgggtaaagtagtggtgttccgtaggggttggccctgggctcagggttgtttagtgttttcaccaatcacctggcttatggaatagagaacatgttcattaagtttagatgacaacaaactagggggattatatgtggctaagataaaaatttgcagaagtggtaagaaagcaacagaatgaattccactcaaaaacagagtaattttttttacaaagaaacaaatgcagagaaacaagactgtgggaaatcttaacccaa

SEQ ID NO: 240363 - DNA, 1135 bp, Homo Sapiens
  misc_feature (187)..(216): n is a, c, g, or t
  misc_feature (487)..(496): n is a, c, g, or t
  misc_feature (500)..(777): n is a, c, g, or t
  misc_feature (960)..(992): n is a, c, g, or t
gaagtcaagtgtaagaggctgatctgtgtcagtcattcacaagagaccactgcgcttttttgtggattttgtatgggggaggggtggagaacccagtttttttcaacaggtactgatctaggccgttgccattattatgaatcaaattttgctttctttgacaatggtaacgtatcttccttatctnnnnnnnnnnnnnnnnnnnnnnnnnnnnnnggataatctaccagacccacgaggcctccctgttaagaaataaggattatttaaagaacagaaaataaaacatataaaaacactggtgttttctggctggagaaagaaaatagatcctaccaacatagtaacggtggttatttctgggtggtgggactgtgttaaacttcaattcattatgtttacatattttctaaatttcctgtaataaacatgcatacttttttacaataagggaaaactttgagttaattagaattaaagcaaaaannnnnnnnnnccannnnnnnnnnnnnnnnnnnnnnnnnnnnnnnnnnnnnnnnnnnnnnnnnnnnnnnnnnnnnnnnnnnnnnnnnnnnnnnnnnnnnnnnnnnnnnnnnnnnnnnnnnnnnnnnnnnnnnnnnnnnnnnnnnnnnnnnnnnnnnnnnnnnnnnnnnnnnnnnnnnnnnnnnnnnnnnnnnnnnnnnnnnnnnnnnnnnnnnnnnnnnnnnnnnnnnnnnnnnnnnnnnnnnnnnnnnnnnnnnnnnnnnnnnnnnnnnnnnnnnnnnnnnnnnnnnnnnnaaactaaagcaaaaaaatttaagtagtttataatcctagcaaattacccaggagttagaaaatgaatgaaaaatgtttgtttcaagacttaatagcatcttaaaatttttttaaacataaagtctaaaatagtataaaaatgaggctgagcatggtggcccgtgcctgtaattccagcacttnnnnnnnnnnnnnnnnnnnnnnnnnnnnnnnnncttgttcatttcttatatgaaatgttagtgatagtagatgtttaattttcttaacaaaccttaactggcaaagtaaagttagaagtatccagatatttagattatcatttccccacaaaggctttatggtgggtattagccaa

SEQ ID NO: 240364 - DNA, 1265 bp, Homo Sapiens
  misc_feature (231)..(260): n is a, c, g, or t
  misc_feature (876)..(887): n is a, c, g, or t
  misc_feature (956)..(990): n is a, c, g, or t
ttggtgaaaacaaacctttctggacggcagagcccaagtttcaagctttccctgtccagtggaacgaagactaacctcaccagccagtcatctacaacaaatctgcctggttctccgggatcacctggatccccaggatctccaggctctcctggatccgtacctaaaaatacatctcagacggcagctattactacaaagggaggcctcgtgggtctggtagattatccnnnnnnnnnnnnnnnnnnnnnnnnnnnnnnagataaggaagatacgttaccattgtcaaagaaagcaaaatttgattcataataatggcaacggcctaggatcagtacctgttgaaaaaaactggttctccacccctcccccatacaaaatccacaacaaagcgcagtggtctcttgtgaatgactgacacagatcagcctcttacacttgacttctgctcatcaagtgccaattcaatggagcagggggaggggatatcatatatttaggggaaagacttaagcctttgagctctccagcttggaccacacattgcccttttctcagggaaggaaatggaaacaaaaagccaacagggcaggggttttgtaagtggaactctggattgactggtcagttgctacaatcagaatatgctttcttggaccatgtttgagactcagaagaatgggcctttctgccataattcttcatagtcaagaatgccagcagtttctttgtataaagagacctgccttttaaaatcatacattctgaacattttagtcaagctacaacaggtttggaaaacctctgtgggggaggggcgagtataaagttttcctcttttttaactgttccctttgcccttcaaactgcagatannnnnnnnnnnnaagtggggacttctccctacttgattaaagattgagtggaattctagatgtggtcatttgtgtcataannnnnnnnnnnnnnnnnnnnnnnnnnnnnnnnnnncctcccctgagtgtatgcttagttgttgagtatatatatttgggaccattaaaactttttttgatgtaatataacctaacgttgtgctggtacctgttttaccatgtgtaatttttgttctacatcacagttcttaatttgtttagagttttatgaaagatggtatagtttttattgacaaaagcaaagtaatcttacaactatgtgcatacaaaagcaatactattttgtgactaaatattttatattaaaatttacatcagcaaaataacaaa

SEQ ID NO: 240365 - DNA, 1336 bp, Homo Sapiens
taactccagcaaaatgtgggtacgttactaacacaagatggaacttgagatttcctgaagcgcagtgttaaaatgcctcgagggcgtgtgccacatttccctgctgacgtaaaacacctggccagcaggaccggcttccggcaaagacccgcgcaaaccatgtcttgctgtttgacttacttaggaatgaggatgaccctgtattcctgggttagtcaaggtcagcttgccagagacggaggagggcgggggggccgtgaccctctagactgggaggaccaccaggagaggcactgggggctgcggccgggtgggcagatgccgccgtggctccatccatcagcacccagtcctttgcttcactgtgctctggccaagcgcgtgcgacttcctgtcacaccttaggcctgagcgcttattaagaaaacagtatgaaaaatgacaaacactcctgtccacagtctgagaatcccaagtgtctcaacacggtaccagaagtaccacctgggagcagcactggctatcttgggtcagggacacacaagcttgaacgtggcctcttagaggagctcgatgtcagatatgtaaacactggcacaagaaaatccagacactaagcattcaccgtgtcaattctgagacaggaaacaccgcccagagtgaggagcctgcgcagcccggggcccaggaggagaggccttcactcgcatgtcagtgtctcatctgggaccacagctgtgatgttctgctgtgcaatatgggtcacctttcgaaaaggccaaacaaaaggtgggctttcctgtgtccagcgactgccatgttttaggtaaagactttagtaaaggtggaggtaaaatcacttggtaaaacgttgagagtatttcttttctcgaatcaaaaacgctgacatgcaagtgggttccgcctctcccgcagtggggggccgagtgctgaacctacaaagccagtctgctccctgccagcttcgctgcccctcatggagggttgcatgaggacagatttaaattaaaaacaaaacactctacgtatcaaagaaatgtgtcaaaataatctcaaacaattaaaatataatatatatttataattccgggccctcaaaagcaatcatggtagttaagaaccaagttttgagtcattaggatagaggccaactttaaacatctccagtgagatggaattaggaaactggcattagaaccccacacagttacttgacaatcacctttaaaacgttaagttctttcggacacgcaggaatcaggctagatcatccctcgggatgctgtggagtggctccaacttttttgtacaaagt

SEQ ID NO: 240366 - DNA, 1313 bp, Homo Sapiens
  misc_feature (239)..(249): n is a, c, g, or t
  misc_feature (844)..(881): n is a, c, g, or t
  misc_feature (1153)..(1164): n is a, c, g, or t
ttggatgctattatgcatagaaagatgactagtcctcacttcaggctcttttcatcaaaaattccacaccctcaggtaccatctgtggtggctctctgcaagttttaaaactgcctctgctgagctctcatcattttggtggtttctgtgttagatctcgttagtctgcattccacagcttctcagttgccatttgatttcccaacttgtccggaagtgtttccagaatactgatcacnnnnnnnnnnngaggcatctgacaaagtcacaaagtctcagactagaaataattacccagtatgatcatggcatccaagaccagagtctcagaactcattaagaaacagtttacttggaatggagaatacccatctgtaatacaggtcctgtcatttcattcatctcaaattattttgaattcttcccaaatggctgctggatttaggtggtaataggggctgtgggccataaatctgaagccttgagaaccttgggtctggagagccatgaagagggaaggaaaagagggcaagtcctgaacctaaccaatgacctgatggattgctcgaccaagacacagaagtgaagtctgtgtctgtgcacttcccacagactggagtttttggtgctgaatagagccagttgctaaaaaattgggggtttggtgaagaaatctgattgttgtgtgtattcaatgtgtgattttaaaaataaacagcaacaacaataaaaaccctgactggctgttttttccctgtattctttacaactattttttgaccctctgaaaattattatacttcacctaaatggaagactgctgtgtttgtggaaattttgtaannnnnnnnnnnnnnnnnnnnnnnnnnnnnnnnnnnnnngcctgcagaatcgttgagagactaataaggcttaatatttaattgatttgtttaatatgttatataaatgtaaaagagtgtataaactgtagagatagcattggcaagacattgtacagatgcaaccttttacacaacatcattgtgtaatttgtaaagattcacgtgtagttctttattatagtgattttgggctttgtacccactgaatgccattttttgtgtttttaaattattttctttatcttgttacaaaaactgagatgtggggnnnnnnnnnnnncagttcacttatcattagaatgtctgaacttttatgtaacatttttgtgtgcatctctcaatgctaacaccacatgtttgcctatgacaagtttatagagtgaaaggtatcttctgggttgaaatattcacaaattggtgaatgtcatc

SEQ ID NO: 240367 - DNA, 730 bp, Homo Sapiens
  misc_feature (507)..(517): n is a, c, g, or t
gtacagggcagatccagataatttatactggtcagaggacatagatttacggggtgcgaatatatggctgcaaaaggaaatccacaggagacaatacatacagaactgtcttctcctcttaatgaagacaaaagccaggtgttaaaaagaatccatttattgggttttaaactagttacacaactgaaatcagtttggcactactttatacagggattacgcctgtgtatgccgacacttaaatactgtaccaggaccactgctgtgcttaggtctgtattcagtcattcagcatgtagatactaaaaatatactgtagtgttcctttaaggaagactgtacagggtgtgttgcaagatgacattcaccaatttgtgaattatttcaacccagaagatacctttcactttataaaattgtcataggcaaacatgtggtgttagcattgagagatgcacacaaaaatgttacataaaagttcagacattctaatgataagtgaactgnnnnnnnnnnnccccacatctcagtttttgtaacaagataaagaaaataatttaaaaacacaaaaaatggcattcagtgggtacaaagcccaaaatcactataataaagaactacatgtgaatctttacaaattacacaatgatgttgtgtaaaaggttgcatctgtacaatgtcttgccaatgctatctctacagtttatacactctggtacatttataccaa

SEQ ID NO: 240368 - DNA, 2399 bp, Homo Sapiens
  misc_feature (637)..(646): n is a, c, g, or t
  misc_feature (785)..(800): n is a, c, g, or t
  misc_feature (1362)..(1395): n is a, c, g, or t
  misc_feature (1470)..(1479): n is a, c, g, or t
  misc_feature (1664)..(1720): n is a, c, g, or t
  misc_feature (1759)..(1802): n is a, c, g, or t
gaaataatttgttttataaacattcctgagttttcaaccatacattctttttacaatacgacaaacaaaacaatgaaagatattcaaaacaaggttccaaggttggcccaacttgattgtttgggtacttgtttttttagtaactctgtaacttttttaaaggaagcttttaatgaagatacaccactgagtcttgctttaagaccaaaaatatccaaacatagtatcacattatatatatctcataagaaaagctattctatcaggtaacaaaaatgaagcttccccctcacctagcagttcatctggaatgcatcttgaaaagatcaatggcctgttggactcaaagaagccatccccaaaaaaattgtataaaaagatttattgaaatttatccaagacaaacagacataaaactcaaagtttggctcttctgaggggcaggagaaaaactggtgcagatgttcttttatacagatgaaacatgggttcagaaattacacgtcacttctaaagcaaccagaagagggacacgaaagcaaacctgtacattcactaggaatttgcagtcatttcagatttccactaggtaagaaaatacaattttgcgttagtttttccgtgctcgggtgtatgnnnnnnnnnncccagccgacatgcagcaacgtctccagcgcttaggtccgtaaaaatgttctaagcacagaagtacatgtggaagaattctctcatcattttttgtaaaacaaagcgttctaatattttacagaacaagataggacagnnnnnnnnnnnnnnnnaaagaagttgaagtttgaaggtgtgtttcttctaattttaattaccaaatccattttccttgtaacttaacacaacaagcctgcggttttcagctctctggctcataagctcaagagtaacatcagagtcctctttgtagagcgaagcccaccaccatctgtgaagggggaaaagggatgagagatggggaatgtccccagaccagtgccaaaatacgcctttaggttgctatttacaaaccagggcgttggatgcctctagcaggcctgagaaaagcaggtatcatcatgtgaaccaaagcaaaagatatggctggtgctcagcccctcctgggcattgagtaaccaaactgagaccagccacagccttccaaccaacccaagagacttgggaaataccaggaaacgtaagagaactccaaaccatcctctttgagagtcaggaacaaatgctcacttagtgtgtacttagctatcgcatttacagggacaaaaaccggacacaaagaaaaagtaggggaaaaaaataaagagtggcagtaaaaatagtattttattccannnnnnnnnnnnnnnnnnnnnnnnnnnnnnnnnngtacactcttcccctctcgttcccacagcaacgttacaatcagaaaaaaataagtttcagggggcaggattggannnnnnnnnnagaggggatatgggtaaaaacagtcaaatcacaataggaatttttcaaaataggttattccacttagtcatcatcttctccctcatcttcaggttctcgttttcgcttctgacccctttcttcttcaccaagctcttcttcatcttcctcgtcatctacctctccatcgttataaccttcttcannnnnnnnnnnnnnnnnnnnnnnnnnnnnnnnnnnnnnnnnnnnnnnnnnnnnnnnntcctcctcgtcttccactacctgagcatcttcatcatannnnnnnnnnnnnnnnnnnnnnnnnnnnnnnnnnnnnnnnnnnncgtagccctcagcatccgagtcaggggcctccttgtcgtcccggtcatagccgtcgagatatgtgagttgcgggaggagcttgaacacattttctcggtagtcgttcaggttggttacctcgcaattgaaaaggtctaagctcttgaggttttctaactttttcagtggctctattgtgctgaggtctttaattttgttgccacttaaatttagatgcgtgaggttcggacacaattctgccaatacttccaggccccctgagactctgttatcgcttagttcaagcttcttaagtttgtttaactttggtaagtttgcgattgaggtgaggcctacgttgattgtacttaagaattccagttcttcaaattcatctgtgaggccttcgagtttgccttcattcgaccgactgttgtccaggacaagttctttcacatcagagggcgtcctgttccgcagctctaaatgaatccgtctgcccatctccatctctcgcgctctctctctgcagaggctcccgcgccggcggaattcaatcaataaaccccgaacccacggctttttaaggaaatgacaaccccaacttttttgtacaa

SEQ ID NO: 240369 - DNA, 2216 bp, Homo Sapiens
ttggagcagcctcagttgcatccggatgttagaactgaatgtgagtctggcaccacttcctgggaaagtgatgatgaggagcaaggacccaccgttcctgcagacaatggtcccattccgtctctagtgggagatgatacattagagaaaggaactggccaagctcttgacagtcatcccactatgaaggatcctgtaaatgtgacccccagttccacacctgaatcctcaccgactgattgcctgcagaacagagcatttgatgacgaattagggcttggtggctcatgccctcctatgagggaaagtgatactagacaagaaaacttgaaaaccaaggctctcgtttctaacagttctttgcattggatacccatcccatcgaatgatgaggtagtgaaacagcccaaaccagaatccagagaacacataccatctgttgagccccaggttggagaggagtgggagaaagctgctcccacccctcctgcattgcctggggatttgacagctgaggagggtctagatcctcttgacagccttacttcactctggactgtgccatctcgaggaggcagtgacagcaatggcagttactgtcaacaggtggacattgaaaagctgaaaatcaacggagactctgaagcactgagtcctcacggtgagtccacggatacagcctctgactttgaaggtcacctcacggaggacagcagtgaggctgacactagagaagctgcagtgacaaagggatcttcggtggacaaggatgagaaacccaattggaaccaatctgccccactgtccaaggtgaatggtgacatgcgtctggttacaaggacagatgggatggttgctcctcagagctgggtgtctcgagtatgtgcggtccgccaaaagatcccagattccctactgctggccagtactgagtaccagccaagagccgtgtgcctgtccatgcctgggtcctcagtggaggccactaacccacttgtgatgcagttgctgcagggtagcttgcccctagagaaggttcttccaccagcccacgatgacagcatgtcagaatccccacaagtaccacttacaaaagaccagagccatggctcgctacgcatgggatctttacatggtcttggaaaaaacagtggcatggttgatggaagcagccccagttctttaagggctttgaaggagcctcttctgccagatagctgtgaaacaggcactggtcttgccaggattgaggccacccaggctcctggagcaccccaaaagaattgcaaggcagtcccaagttttgactccctccatccagtgacaaatcccattacatcctctaggaaactggaagaaatggattccaaagagcagttctcttcctttagttgtgaagatcagaaggaagtccgtgctatgtcacaggacagtaattcaaatgctgctccaggaaagagcccaggagatcttactacctcgagaacacctcgtttctcatctccaaatgtgatctcctttggtccagagcagacaggtcgggccctgggtgatcagagcaatgttacaggccaagggaagaagctttttggctctgggaatgtggctgcaacccttcagcgccccaggcctgcggacccgatgcctcttcctgctgagatccctccagtttttcccagtgggaagttgggaccaagcacaaactccatgtctggtggggtacagactccaagggaagactgggctccaaagccacatgcctttgttggcagcgtcaagaatgagaagacttttgtggggggtcctcttaaggcaaatgccgagaacaggaaagctactgggcatagtcccctggaactggtgggtcacttggaagggatgccctttgtcatggacttgcccttctggaaattaccccgagagccagggaaggggctcagtgagcctctggagccttcttctctcccctcccaactcagcatcaagcaggcattttatgggaagctttctaaactccaactgagttccaccagctttaattattcctctagctctcccacctttcccaaaggccttgctggaagtgtggtgcagctgagccacaaagcaaactttggtgcgagccacagtgcatcactttccttgcaaatgttcactgacagcagcacggtggaaagcatctcgctccagtgtgcgtgcagcctgaaagccatgat

SEQ ID NO: 240370 - DNA, 1561 bp, Homo Sapiens
ttggcgcacaaacattgtatgaaacattggcaagctacactcataacattgaagctgtcagttgtgatgaagcgctggtagacattaccgaaatccttgcagagaccaaacttactcctgatgaatttgcaaatgctgttcgtatggaaatcaaagaccagacgaaatgtgctgcctctgttggaattggttctaatattctcctggctagaatggcaactagaaaagcaaaaccagatgggcagtaccacctaaaaccagaagaagtagatgattttatcagaggccagctagtgaccaatctaccaggagttggacattcaatggaatctaagttggcatctttgggaattaaaacttgtggagacttgcagtatatgaccatggcaaaactccaaaaagaatttggtcccaaaacaggtcagatgctttataggttctgccgtggcttggatgatagaccagttcgaactgaaaaggaaagaaaatctgtttcagctgagatcaactatggaataaggtttactcagccaaaagaggcagaagcttttcttctgagtctttcagaagaaattcaaagaagactagaagccactggcatgaagggtaaacgtctaactctcaaaatcatggtacgaaagcctggggctcctgtagaaactgcaaaatttggaggccatggaatttgtgataacattgccaggactgtaactcttgaccaggcaacagataatgcaaaaataattggaaaggcgatgctaaacatgtttcatacaatgaaactaaatatatcagatatgagaggggttgggattcacgtgaatcagttggttccaactaatctgaacccttccacatgtcccagtcgcccatcagttcagtcaagccactttcctagtgggtcatactctgtccgtgatgtcttccaagttcagaaagctaagaaatccaccgaagaggagcacaaagaagtatttcgggctgctgtggatctggaaatatcatctgcttctagaacttgcactttcttgccaccttttcctgcacatctgccgaccagtcctgatactaacaaggctgagtcttcagggaaatggaatggtctacatactcctgtcagtgtgcagtcgagacttaacctgagtatagaggtcccgtcaccttcccagctggatcagtctgttttagaagcacttccacctgatctccgggaacaagtagagcaagtctgtgctgtccagcaagcagagtcacatggcgacaaaaagaaagaaccagtaaatggctgtaatacaggaattttgccacaaccagttgggacagtcttgttgcaaataccagaacctcaagaatcgaacagtgacgcaggaataaatttaatagcccttccagcattttcacaggtggaccctgaggtatttgctgcccttcctgctgaacttcagagggagctgaaagcagcgtatgatcaaagacaaaggcagggcgagaacagcactcaccagcagtcagccagcgcatctgtgccaagatcctttacttcatctaaaggcagcagtga

SEQ ID NO: 240371 - DNA, 954 bp, Homo Sapiens
  misc_feature (138)..(167): n is a, c, g, or t
ttgggtcataatggaccagtccatgtgatttcagtatatacaactccaccagacccctccaacccatataacaccccacccctgttcgcttcctgtatggtgatatcatatgtaacatttactcctgtttctgctgannnnnnnnnnnnnnnnnnnnnnnnnnnnnnacatcagctgtaatcattcctgtgctgtgttttttattacccttggtaggtattagacttgcacttttttaaaaaaaggtttctgcatcgtggaagcatttgacccagagtggaacgcgtggcctatgcaggtggattccttcaggtctttcctttggttctttgagcatctttgctttcattcgtctcccgtctttggttctccagttcaaattattgcaaagtaaaggatctttgagtaggttcggtctgaaaggtgtggcctttatatttgatccacacacgttggtcttttaaccgtgctgagcagaaaacaaaacaggttaagaagagccgggtggcagctgacagaggaagccgctcaaataccttcacaataaatagtggcaatatatatatagtttaagaaggctctccatttggcatcgtttaatttatatgttatgttctaagcacagctctcttctcctattttcatcctgcaagcaactcaaaatatttaaaaataaagtttacattgtagttattttcaaatctttgcttgataagtattaagaaatattggacttgctgccgtaatttaaagctctgttgattttgtttccgtttggatttttgggggaggggagcactgtgtttatgctggaatatgaagtctgagaccttccggtgctgggaacacacaagagttgttgaaagttgacaagcagactgcgcatgtctctgatgctttgtatcattcttgagcaatcgctcggtccgtggacaataaacagttttatcaaag

SEQ ID NO: 240372 - DNA, 2309 bp, Homo Sapiens
  misc_feature (153)..(186): n is a, c, g, or t
  misc_feature (2003)..(2079): n is a, c, g, or t
  misc_feature (2129)..(2165): n is a, c, g, or t
tagaaatggcttattccaatacttctcctggaccagacacatgcagtttattacatgattggcttaaaggtctcattgataccttaactttcctgaggagcaatgaataaaaagataccttaatctacgcgaagtcaatgaatgcaatttttnnnnnnnnnnnnnnnnnnnnnnnnnnnnnnnnnntacaaaaatgtgttgcgtgagacctatcgccaaaacaactacagtttgattttttttgaaacaattaaatactatatatgctggtaagagtctgtgaaactctaaatgaccaatccagtgagcctacaatagtgacaagccccctccacacatggctttgagagtaaaggttcaatgtaaaagattatctaatcagagcatgaggctggttttgagttggaatatcttcagttaacagaattaaactgaaaaacataattttttccttcatttttctccagcatttttgcaggtcagacatggtaacatgtgctgaaaaaaaacatttacgtttaatttgggggaaatgggctaatggtgcttttcagaaattaaatttttacatttgctgacattttatggtaatttagctgcaaaaatgtaatacggaataatatatgaaactgagttgtggagggaatcctgtcaaaaatgaaagtgaatatattctgagtttgtccgagatctgctatagctcttctctagataagaacgacctgacaacataagctgctttactctttaactcttaccaaagtgctactgcatgtgtgtaaaacaaataatcaatatatatataagaaaactcaaaaacaagttgttttaaataagtccagctgtttttgctgcctgcagccaaagatttgcctaatttgaatgcttaaatttataaaataaaaatcaaacactgttctgaagtcctgctttcaaatactcttcagagttgacctgaaatcgtttcaacgaattttaagaggtacgttaaataaccaccagatcatttggagcacacatgtgtcaaaatcagcagttagtatttatgagttgtacaacaactgcattctgaccaaatcctccaataaaaatagtgccataaaatttacagcgacattggatacctttgaattgtagccacggacagtagtgacatgaatctttcctgtcacactggtgcacaggtaaaagcccatataccccatagggtagggtctcagcctggtgaaagcaacacaaagatgttgttgagtgagcagcacaggacagggggtctcgcacaggtgggaccatgttttcccacttgtctccactgaggcacacagaggcaaattgactcctcgaggcctgcttctggtgggcccttaaattgctataatcgtaacccctaaattcattgatttggttcctatgtaaatgtggctcccctacacagtttactttggctgtgttctgttacacagcatctgtgaaattatcagatgaccttggggtgagcaaatccctgggcagaaatcaaatcctctccaaagatgtaattattggcacctgcctcaaccctctggaactagattgaccttctctgttttaaggaggaagttagatatgagacccttgttgagcctggcagaaaattccatacttctgatccttggagtgaccctcagtgtctaaaaatcctattaaaaacgttgctgcgtgagctactcacttgtttgattaacatgaaagggagtttaatgtaaacaatacttctggataaccaagcgatcacattactcattctttttttctagccttcttcaatgtgatacatttaactttggctactatcaagaacaaaagaaaatgtagtacttgatatttttcttaatataagtacatttaaataattaaaaaattatcaacacataaatgtctgaacatcaagatacataaatatctggggattccttgtgggaatacagtagttaaaaatgacccaaagctgtagctgtttctcnnnnnnnnnnnnnnnnnnnnnnnnnnnnnnnnnnnnnnnnnnnnnnnnnnnnnnnnnnnnnnnnnnnnnnnnnnnnngaatcatatttctttccatggtcaaagcaagaaagaagcaagctcaattnnnnnnnnnnnnnnnnnnnnnnnnnnnnnnnnnnnnncacccaaatgcaaatacgcattttgcaattgataaggtgcggaaaaattaaaaataagaattagatgccaaacagggcgagttgcatccctcctctccccccaccccaaccaaaattccacactctttggaataaacaacccaa

SEQ ID NO: 240373 - DNA, 2188 bp, Homo Sapiens
  misc_feature (318)..(331): n is a, c, g, or t
  misc_feature (371)..(390): n is a, c, g, or t
  misc_feature (405)..(645): n is a, c, g, or t
  misc_feature (1287)..(1295): n is a, c, g, or t
  misc_feature (1926)..(1935): n is a, c, g, or t
ttggcaacataatgtgtggtttgacttttaattgttcttttgatagatgtatgggcttatttatcttggtatgtgctatatgctcaggaatgaatttactgaatcatagggtagactttaaatttagttttggtaggtattgcagttttcaaaaaatatcgattccacgaataatccccaaaacaatgcatgaaagttccagttgtttcacacacctgtccagctctttctgattatagtcatccagcagacagtgtgcatttacctgatgtgtaatgatttcgagtacttttcgatgtgcttattggctatttggannnnnnnnnnnnnngagggcacctgttgaaacatttcatccatttatgatttcnnnnnnnnnnnnnnnnnnnngaaacggactcttgnnnnnnnnnnnnnnnnnnnnnnnnnnnnnnnnnnnnnnnnnnnnnnnnnnnnnnnnnnnnnnnnnnnnnnnnnnnnnnnnnnnnnnnnnnnnnnnnnnnnnnnnnnnnnnnnnnnnnnnnnnnnnnnnnnnnnnnnnnnnnnnnnnnnnnnnnnnnnnnnnnnnnnnnnnnnnnnnnnnnnnnnnnnnnnnnnnnnnnnnnnnnnnnnnnnnnnnnnnnnnnnnnnnnnnnnnnnnnnnnnatgagccacgacgcccagccacaagttctcaattcttaagagacatggcgataattcatgctgaagaggaactctacaaacctgaaagatgcaacagtgcttttaccaccacctccaacttttgtatacataaaaataaattatactaatgtgaaaccctggaaatgtatgaaatgagacaaagcgtttatatggttgccacacttgattgtaggtaagagaattaatgctgccaaaactcctacaagtgtgaagaatgtggcaaaacttttgagtgcttacaccttatttcacaggaaagcttttatccttgagaaaaatcgtacagatataaagaatatggaaatgccattaacgcccactcacatctcaacagaaggttcatagttaataaaagcaataaaagtgcaattactgtcaaaaaatctttcagaaaatataagcctttaaagaagaatatttattctgaaatcagctattacaaatataagggggggttgtagtacctttacttgtatcacagatcttgttgcacacattgtgtactagaggaaaacctgaagcagttgctccagctttattcaacatcatggaatttatattggagaagagtcctgcaaatataatgaatttggaaagacnnnnnnnnncaaaatctatagcttagaaaacatcagagagtttatactaaagtatatttttgcagatgtaaatatgaaaaaaatatttaattcaaaattgattttacgtaaatatgagaatttacactagaataaggcactgacacttcagacattacactaaatcagagtattgagtataaaaatgaatccacaactaaagctgtttttgtatataactttaaaagggagattttctgaagcattgtaatttcattgaaagtgtacttgtttcttgaaaaaatttttgaacagtgaataatgatgtaatacaactttcaaatttctttacgctgttattttattcctattgtggtcacatgtgaaagcatgtgatcaattgttgctgcatcagggatattacagattcttttttattgggtattatgaccttttctataaaagaataaggacattaaaatgtaagatgcatgataaaaatgtaagtggagaggctctttgtagttaacttatattaagtaatgtataaggtgggggttctcatttgtataatcctagcctatgacttaatgttgatgttttgctttgtcttttggatggcctaacctacattaacatgttggcagaccattttaaaacnnnnnnnnnncaaaaattataatgaattactttattaataaagatttttaaaaagtgggggttcagagtaatagttttctacattatagtgagaaaaattacagttaaaagtattaaatgagaatattattttactaattgtacttttatgtaatcgaatgcagtatatttaaaaattgttagatgatgtgtgaacttaatttcattttttataccatgttaagactattctgcgtttaatgaagcattattatgccactaac

SEQ ID NO: 240374 - DNA, 1534 bp, Homo Sapiens
gaagacactctcccttttcaattctattactggtcacctcagtcaactttcccggggaaagagaatgcatgggaaaagctcttgtccttattattgaactggagaaactgaggcttaaaagtgccgagtgaccaagttcccttagagggcagtgagaacaaggcctgccttactctgttccctttccccagggactcttggttttcagaagcccctctggaatgtcctacctggcctaaccccataccagcagtgcagacaaggaggcactcctactacagtgggtccagcccatggagagactcacttcctgccccaacacctcttcccctagaccctgagggccaggacaatgtcttagtgccttccaacttggcagagtgaggccccatgagacagagagaaagggggaagagggaaatacctttatccaaataaatacccatccaaaattatttgtgataggtgaaaaatggccacaagctctttgtggttcccctcatcaagacatgtagtctgtttctcatcccttgaatctgggtaaagccttgtgatttgctctgaccaaaagaacttagcagaagtgacactgtcctagtcccagttccaggccaagaactcaagaagtctttcagcttctactctcactctctttggaatcctgaagccatcatgtgaataagcctgagctagcctgctggagaggccacatggaggagaaccaagcaattccagccaacagcctgtcacctgccaggcaagtgagtaagggctatcctagaccatccaggcccagctgaggtaacagctgaccttagctccatgagggatcccaggtgtgagcagcagaactgccctgttgagcccagcccaaattgccaacccataggattgtgggaaaatacagggtttgtttctagctgccaagtttggggatggtttgttacacagcaaaagctaactggtacacaattctgcatttctctcttggtaatgggatcccagttttattgcaggaggcagtgtgccagtctcagtagatggaacacgattggtctattcagccatgacaattctgttccctgctgtcttagctttgtttgcagctagaggtgcaatggtagctggctcgggccaagggcatctaagtgaagatatgcagagggagagagcaggaaacagacttctgacgaggttttactttctgatagaaggtgacgggtccagctagtttggcccttcctcttcctccacccctccttccttgaacgcagacatgattcttggggatacagcagccatcttgggaccatgaagtaacgagcactgagattaaggcaaaaggatccaagacgtgacccctaccttcgtggagttgttgaaccaataccattagccacccatctccagaatccatgctatgtggaaaaacaatcttctgtttgtttaaaccactgcaatcaaggttttcctttccttgcagctgaatgtagtccatataagaggttacccaacttttttgtacaaagttggc

SEQ ID NO: 240375 - DNA, 902 bp, Homo Sapiens
  misc_feature (476)..(531): n is a, c, g, or t
tgatacaaaaaagttggcaaggcatctacccgcctgaagcagctcaagcggcagctggaggaggccgaagaggaggcccagcgggccaacgcctcccgccggaaactgcagcgcgagctggaggacgccactgagacggccgatgccatgaaccgcgaagtcagctccctaaagaacaagctcaggcgcggggacctgccgtttgtcgtgccccgccgaatggcccggaaaggcgccggggatggctccgacgaagaggtagatggcaaagcggatggggctgaggccaaacctgccgaataagcctcttctcctgcagcctgagatggatggacagacagacaccacagcctccccttcccagaccccgcagcacgcctctccccaccttcttgggactgctgtgaacatgcctcctcctgccctccgccccgtccccccatcccgtttccctccaggtgttgttgagggcattnnnnnnnnnnnnnnnnnnnnnnnnnnnnnnnnnnnnnnnnnnnnnnnnnnnnnnnnaaagagacagggcccgggcccaggcagagagcgaccagcaggctcctcagccctctcttgccaaaaagcacaagatgttgaggcgagcagggcaggcccccggggaggggccagagttttctatgaatctatttttcttcagactgaggccttttggtagtcggagcccccgcagtcgtcagcctccctgacgtctgccaccagcgcccccactcctcctcctttctttgctgtttgcaatcacacgtggtgacctcacacacctctgccccttgggcctcccactcccatggctctgggcggtccagaaggagcaggccctgggcctccacctctgtgcagggcacagaaggctggggtggggggaggag

SEQ ID NO: 240376 - DNA, 1449 bp, Homo Sapiens
  misc_feature (401)..(415): n is a, c, g, or t
tttgtagatggactaaagttcttggcagttgatttaaaagcattaaagttgccaacgccaaatgtggactcatgagggaaagaagttccaactttattttcttttgtttggcttttccattgtgtaggttttgtaggtggagcagcaggtttagggactaaacctttataaacacttggaccagttccattcttaactggctgtgacggaagatttcctactactgggaatccagatagctgtaagtcttttgtattacctttcttaatgaccagcatccttggagctctagatttaggattcggaggatattctgcataaataaagcatgaccaagagtcactcacaatttcaagttttagtatagaataaaaccaccaaaagaacagtatattccaaannnnnnnnnnnnnnnaactaacagctgcctcctgggtaaaataactaaactaaaaaagtacaaactatattccaattgaacaagtaaagctaaaacattatcccacagaatataggaagaattgggcaatgtcaagtaatacagataaattctgctacacagtggctcagaatgttaaaaccaagacaaattatattttaacatgccttgcattaactataaaaaattgcaaacatcaacctaatgactcttaagatttagaatataaaatacatttctattttcccttccccatttgaagagaattaaaatttcaattttttcattctttttactccacttacaaagttattaccaataagcaagaaattacattccttttatttctaaatacttcagttatgactgagaattctatttcacaatatcaattcattcatgtatttattgaccatttatctacattcaaagcattatatgaatgcagccaaccaactcaatcctgatttctgaagataaatactacgaataattgctaaaggcagacttttctcaagactactgcagttgccaaaaatacctattattcctataatttaatcaatgtgtgtgtgtaatcagacagacattgcagtgaagtctttctttcttcccttacaaaaacttttaaaagcatcagtttcacagctggaaagtttagaataaattaagttctccacattaaataagatcatgtgaattagtgagctgggtagatatctgtaatgattccctcctcaaaaactaaatcaagcttcctcatggatcatctcaaaacccaaaactaaatatggactcctagggaaacccggagggactctccagttcatgggaggattcaagctctccaaaagataaagccggtatggtgcttcacctattgaaatgctaaaggataaaaagaacaagggcttaaaataatctgagaaaaggttcatctttccaaaaattaaacacatgttgacttactagggtaaagattgaaacttccccaacttttttgtacaaag

SEQ ID NO: 240377 - DNA, 771 bp, Homo Sapiens
  misc_feature (705)..(713): n is a, c, g, or t
ggatgaccgtgtgaagacatggagaagacgggtcaacatgctgagagaggcctcaggagaaaccagccttgttgccacttcgatcatggacttccagcctccagagtccagccagggatttctggatgttctctctggctctcgcaatgtcacggaggatcacgctggcgccgttttcctggcgggaggcacctgccacaggcccgttcatctgctcgtagaatctcctttctgcgtcgtcatatttgaacttgtcgaaccagatcttctcatgtgctaggaagtttgtagccatttttctgctgggaggggaaagaggcaaagtcagcatggctgggaagtgggcctcggcatcaggacagcccagaagcaccaaggtgcagtggggctgacacccgcttcagacaccagcggttctccacaaagcgacaccaagcccgtaagccctcaccccacatggcatccccaggcctgtcttccagacgaggagttctcaaagtgtggtccgagaacctctgagggtccccaggcccttccctttcactcacacgaagctgggtttatgtcaaacagctgaagtgcggaggcaggtatgagggcccagctgcctcccactaagccagacacccgagagatttgcaaaaacctcaagcaaggccattctgctcactaaattttttggttatgggaaaagtatttctcatnnnnnnnnngatgttagtaatatgtaacaagtttcttcaacaaataagtacacttagcatttctgag

SEQ ID NO: 240378 - DNA, 1732 bp, Homo Sapiens
  misc_feature (1050)..(1082): n is a, c, g, or t
ggggaattcaacatgttttgttttgccaggccaatgatttcatcaatatccaattaaattttagtgtgacaactacatttagtttgttttcttacacagattgaacattcaccattatgacagtttcatcatgctaaaatctattcacaaacttacacttgggaaaaaagtgtatttctagaaaattttatgtacaatacaaatggaatagatattaagtcactgaattgtcaagctacataaaataaaaccaatcaaccaccagtagtatacattaacagcatttttgaaaaaaaattttcttttacattcagcagagttatgttcatgaagaatttctacatttttaaaagtaatgaaagtgtacacaatttaataattgtgaaaatagaaagaattaaatagcacaaatatagtataaaactaaacaccgttactgtctatcagtttgggcttatgtgaaataaagggaactgtgactctgaaacaattttacttttaactttgagaatagattggccataaacacagaagatggttttggctttacattgacacatttctgtgtgtcaatgtagaagagaaaagaagtttaattataccttttaagcaggcaaaccattataataaactgctttagaaattactttaaaattatacacatttggaacaacagattttttaaaaaatgaagtttggtgttatgtcagcattttaactatttttgctatagcgaggcctcctcatatattatcataatttatcatagtttaaatagtgaatcatattctgatattctgattaataatcatattaattttgacaatgattttagtttttgaagttttagactgcaatacttaaaaaggccataatctactttaattaccttcatcatagattattaactataaataaaatgtttatatgatatttggattaggtacatggtacaatatctgtttttacctggaagcatgaaaatgtcttaaaaggtaaataaaaaagcaaaagtagtgtttttaaaatatatatgagagcatgaataannnnnnnnnnnnnnnnnnnnnnnnnnnnnnnnnggagaaaataatttcagtatgaaattattctaataaaattattctaacatacaattaggagataattattttattcatcacaaaatttactacttttacacttagagaccagtgaacgtatgtaccattaccttttgaaagacagaatgtctcctcatattgttttcttactttctagacataacaagcaccttgccatcacactgaaaagatcataaaatatatagtgttgacttaaaaatcagtatgatatctgagactggttttaataaaaggaagaatcattgaatttgagtactgaagttgaaaactagccatatttgttataaattcctcttaaaaaattagtagtttctactttgatttttctttctgatgatttcaccccttatttagaagtctaatacttcaaatttttccttcttatattgtttaatttgccacacagactagggaataagagaacaaacagtaataactgagtagtgcaagattatattctttgagtctaaaataaattaaataacttccaaaaaaagtaagtgcttttgtttggaaggtgataacataagaatataaaccaaactgcttcactgatataactcccaccaaatatcttcaccaacttttttgtacaaagttggcaatgg

SEQ ID NO: 240379 - DNA, 965 bp, Homo Sapiens
ctttgtacaaaaaagttggctgcaatctggcctgcacgcccccacgacacctgcatgtggtccggcctatgtctcactacaccacccccatggtgctccagcaggcagccattcccatacagatcaatgtgggaaccactgtgaccatgacaggaaatgggactcggccccccccaactcccaatgcagaggcacctccccctggtcctgggcaggcctcatccgtggctccgtcttctaccaatgtcgagtcctcagctgagggggctcccccgccaggtccagctcccccgccagccaccagccacccgagggtcatccggatttcccaccagagtgtggaacccgtggtcatgatgcacatgaacattcaagattctggcacacagcctggtggtgttccgagtgctcccactggccccctgggaccccctggtcatggccaaaccctgggctccaccctcatccagctgccctccctgccccctgagttcatgcacgccgtcgcccaccagatcactcatcaggccatggtggcagctgttgcctccgcggccgcaggacagcaggtgccaggcttcccaacagctccaacccgggtggtgattgcccggcccactcctccacaggctcggccttcccatcctggagggcccccagtctctgggacactgcagggcgccggtctgggtaccaatgcctcgttggcccagatggtgagcggccttgtggggcagcttcttatgcagccagtccttgtggctcaggggaccccaggtatggctccaccgccagcccctgccactgcttctgccagtgctggcaccaccaacacagctaccacagctggccccgctcctggggggcctgcccagcctccacccacccctcaaccctccatggctgatctttcagttctctcagcttctggggaaccttgctagggccctgcaaggccaggggct

SEQ ID NO: 240380 - DNA, 894 bp, Homo Sapiens
tttgtacaaaaaagttgggtattgctgcctccttaaaacgcctcagtggatccagcaacatctttgagcctggagctgatggggcccttggattctttggggccttgctttctcttctgtgccagaacttctctatggtggacgtagtgatgcttctccatgggcatttccagccactacaacggctccagccccagctgcgatccttcttccaccagcactacctgggtggtcaggagcccacacccagtaacatccggatggcaacccacacattgatcacggggctagaagagtatgtgcgggagagtttttccttggtgcaggttcagccaggtgtggacatcatccggacaaacctggaatttctccaagagcagtttaatagcattgctgcgcatgtgctgcattgcacagatagtggatttggggcccggttgctggagttgtgtaaccaaggcctgtttgaatgcctggccctaaacctgcactgcttggggggacagcagatggagcttgctgctgttatcaatggccgaattcgtcgtatgtctcgtggggtgaatccctccttggtgagctggctgaccactatgatgggactgaggcttcaggtggtactggagcacatgcctgtaggccctgatgccattctcagatacgttcgcagggttggtgatcccccccacccacttcctgaggagccaatggaagttcagggagcagaaagagcttcccctgagcctcagcgggagaatgcttccccagcccctggaacaacagcagaagaggccatgtcccgaggtccaacctcctgctcctgaagggggctcccgggatgaacaggataggagcttcagctgagacagaatcttgaggcagctgcagtccccc

SEQ ID NO: 240381 - DNA, 410 bp, Homo Sapiens
ccattcaaaaattgaaaattctttatttaaatcaacaaactcatgttcgtcaagccccagaccatggtaggcagccctccctatacataccctcaccccaccccttagccacagtgaagggaatggaaaatgagaagccacgagggcccctgccagggaaggctgccccagatgtgtggtgagcacagtcagtgcagctgtggctggggcagcagctgccacaggctcctccctataaattaagttcctgcagccacagctgtgggagaagcatacttgtagaagcaaggccagtccagcatcagaaggcagaggcagcatcagtgactcccagccatggaatgaacggaggacacagagctcagagacagaacaggccagggggaagaaggagccaacttttttgtaca

SEQ ID NO: 240382 - DNA, 1043 bp, Homo Sapiens
  misc_feature (778)..(811): n is a, c, g, or t
gaaaaagcaaaaacaatattgattttaataaaatgtccgcccttttaaaatcaaacacatgtaatacttttatctgtataatacattgaagtatgtcttgttctttaaaatatagtttctccaaatgattctgaggctcaatcatgattacaagatacatgaaattaggcacattaacatgacacaactattcagtaatctttacagtgcattatttataagacgccacaagtcacacagtttatacaagttaaaatgggctatatgaagtatctgcagtttttgtgtatttttccctgctaggtaaagtgaatattcctttaacattgtaccttggtgttacttcctttgaaagatggacattgaaagttaaaaatcagtcactatataggcactgctgtatggaaaacgcattttgtgtttctacaaattgtaagcggaaatgccttttgagtacatatttatgccagaaagcttgacaaacactgaacagtctgtaaaaaaaatggaaaatctcttgaccatcaattcaaataaatataatttaactatttgcagcaatactaatttactttattaaattaattactctaaaatgctcttgttgtcaggtaccaaaatggttttgaagttagggagctgctttctctcttcattcctgtgggtgccccaattctccataatatttgcagctgagaagtatgtctttttattcatttttaaattttcatttaagtggcaatcagttgggagcaaattaaatcctcccttaaggtgnnnnnnnnnnnnnnnnnnnnnnnnnnnnnnnnnnagaaacctcaaaccacttctgaatgacttcagactatctttcggctcctgaatgctgcttttgcatactgttactattgtaacacactaaaatgatgcctatcataaagtaaggatggcccaatctgttgacaatctaatctaatctaatctaatcaagatgacccaatctaatgaccgtattggatggcaggtacttctgaagtcagttaatagtaatactttaaagccaa

SEQ ID NO: 240383 - DNA, 1252 bp, Homo Sapiens
ttgggatcgtttgtcgcgatgtggagtggccgtaagctgggctcctccgggggttggtttttaagagtgctggggcctggaggctgtaatacaaaagctgcgcgtcccttaatttcctcggcggtttatgtgaagaaccagctcagtgggactctacagattaaaccaggggttttcaatgaatacagaaccatatggttcaaatcctacaggacgatcttttcctgtttgaacagaataaagagtttcaggtacccttgggcgagactgtacagtacttcccaaaccactgtcgacagcggtgaggtaaaaaccttcttggccctggctcacaaatggtgggatgaacaaggagtatatgcacctcttcattccatgaatgacctgagggtgccatttattagggacaatcttctggaaacaattcctaatcaccagccaggaaaacctttgttggggatgaagattcttgacgttggctgtggtggtgggctgttaactgaacctctagggcggcttggggcttcagttattggaatcgaccctgtggatgagaacattaaaacagcacaatgccataaatcatttgatccagtcctggataagagaatagagtacagagtgtgttccctggaagagattgtggaagagactgcagaaacatttgatgctgttgtagcttctgaagttgtagaacatgtgattgatctagaaacatttttacagtgctgctgtcaagtgttaaaacccggtggttctttattcattactacaatcaacaaaacacaactttcctatgccttgggaattgttttttcagagcaaattgcaagtattgtaccaaaaggtactcatacatgggagaagtttgtttcacctgaaacactagagagcattctggaatcaaatggtctgtcagttcaaacagtggtaggaatgctctataaccccttctcaggttactggcattggagtgaaaataccagccttaactatgcagctcatgctgtgaaatccagggtccaggaacacccagcctctgctgagtttgttttaaagggagaaacagaagagctccaagctaatgcctgcaccaatccagctgtgcatgaaaagctgaagaaatgaattgtttctgagaactatagtaatatggcttggatatctgatgttttcaaatacaaaaatgtacaatttatcctttgagagagaatcatgaagaaaagatgtcaataaaaagggctaaaacctt

SEQ ID NO: 240384 - DNA, 966 bp, Homo Sapiens
  misc_feature (687)..(709): n is a, c, g, or t
  misc_feature (741)..(750): n is a, c, g, or t
  misc_feature (794)..(839): n is a, c, g, or t
ctttgtacaaaaaagttggaacggatgtaaccgtattttcctgtgcctttattttgtgtcattctattggaaggaggtgtaacggcagaatagcatcgtgttgggggttttccttcaaacactgcaagtgatattgccaccatgtgaacctcaaatatgcaatccagttgtgttggtttctcggtgacttggagtgttcatctcttcatgaattgtgagcactgaccatgttcttcagttcttaattatggtgagttgacaaataccaactactgcttttctttaggtggctataaatttcttactgtcaggaggaaatgacattatattctgttccactgaacgtcagagatcagcaggcactgtactgggtagagaagtgcctatacttctctacctaagagggcaggagggaaaccctacagctccttgtgagcctatatattagtatatcggcctggagaggacaagggaataagaccactcatagtgaggctggccaagctgcactggtcggaccaggcagtggctgacctaaggaaggcaacttgctttgcttaaaagtagattttttaagcaatgcttaacacaggcagcattcacctttgttcaggccatcgacatgtattgttaaaattactgcatatccccctcagatatcaagtatacactgttcatgttggggtnnnnnnnnnnnnnnnnnnnnnnnacgcacgcatgtgtcccaaatcttgttttaannnnnnnnnnctgaatgtgatcatgttttggatgatacctgagcagggttgccnnnnnnnnnnnnnnnnnnnnnnnnnnnnnnnnnnnnnnnnnnnnnnttttgctttcttataactttggaggaaagtcaaatcttggtattattaaaattgttttaaaaaggagtaaattttccagttgataaatgaaaatcactgggcctatgtttaataagtttttctttaa

SEQ ID NO: 240385 - DNA, 118 bp, Homo Sapiens
ataatcttttaatttttgagccagatttagcagtgaggggctatataccaactttaatgacactaatgttaataagttctgataacccactaccatcagaccagctgtaattcatcca

SEQ ID NO: 240386 - DNA, 1130 bp, Homo Sapiens
  misc_feature (127)..(170): n is a, c, g, or t
  misc_feature (953)..(962): n is a, c, g, or t
ttgggcgatagctgagtggcggcggctgctgattgtgttctaggggacggagtaggggaagacgtttgctctcccggaacagcctatctcattcctttctttcgattacccgtggcgcggagagtcnnnnnnnnnnnnnnnnnnnnnnnnnnnnnnnnnnnnnnnnnnnnagctgcagtgacatgtccagcatgaatcccgaatatgattatttattcaagttacttctgattggcgactcaggggttggaaagtcttgccttcttcttaggtttgcagatgatacatatacagaaagctacatcagcacaattggtgtggatttcaaaataagaactatagagttagacgggaaaacaatcaagcttcaaatatgggacacagcaggccaggaaagatttcgaacaatcacctccagttattacagaggagcccatggcatcatagttgtgtatgatgtgacagatcaggagtccttcaataatgttaaacagtggctgcaggaaatagatcgttatgccagtgaaaatgtcaacaaattgttggtagggaacaaatgtgatctgaccacaaagaaagtagtagactacacaacagcgaaggaatttgctgattcccttggaattccgtttttggaaaccagtgctaagaatgcaacgaatgtagaacagtctttcatgacgatggcagctgagattaaaaagcgaatgggtcccggagcaacagctggtggtgctgagaagtccaatgttaaaattcagagcactccagtcaagcagtcaggtggaggttgctgctaaaatttgcctccatccttttctcacagcaatgaatttgcaatctgaacccaagtgaaaaaacaaaattgcctgaattgtactgtatgtagctgcactacaacagattcttaccgtctccacaaaggtcagagattgtaaatggtcatactgacnnnnnnnnnnattcccttgactcaagacagctaacttcattttcagaactgttttaaacctttgtgtgctggtttataaaataatgtgtgtaatccttgttgcttttcctgataccagactgtttcccgtggttggttagaatatattttgttttgatgtttataattggcatgttta

SEQ ID NO: 240387 - DNA, 902 bp, Homo Sapiens
gagctggcgctccacaagtgattattgatggtgacaggattccctcatcgtgctccaacctctcaactgtggacacattcaccggcagtcactcatctcacatgcccaccagcacgcgcacacacgttcccctaacccacgctaacacacccaccccctgcacacacacactttgaagccacacctcttccccgacaacacccgtctccacactgcgcacctaggcctgagctcacacacacccaggcccatgctcacggccctgtcacctatgcactcagcctggcccacactcccgacacacggtggcaggctctcaaccagacagcagcacaggatccttgccctgggcttgctggagccctggccctgaaagggagtatggtgaggcctcctgggaacctggctagggcaatggtcagggtgaaactccttcccaatcccagcagcttggtccctcaagatcccatggggagaatcgccgtgaaccttggctggccaaagaacaagcatccagcaccacctagtggtgtcctggaggagggtggggggtggtaacagaaggggaccccctgtatccctaaggcctgtggtccctggtctcccaggtagacagagggcttcaggacccagccaggcagctggggatgtggggaggaggctgatggggaggaaacaggcagctgtcctcccggtagagctaagagcacactcagttccaccccagttcagctccaggaggtagaggggctgcccactctcgagtcccagatgctgggaggccttccctagaacagactccaaggctggtgagggccaacagggggtgggctggccacatgattctgggcccacatccttcatgtccaagttcaagaagttgaaaagagaaaatcatccaa

SEQ ID NO: 240388 - DNA, 625 bp, Homo Sapiens
  misc_feature (67)..(86): n is a, c, g, or t
tcaagcaaaaatagtctttattcaaatttaatggaaacaggggtcactatactttgcaagacggggnnnnnnnnnnnnnnnnnnnnttcttttcttttctttgttaatataaaacaatataatcacaataccagaatatggaactctacagtttatttcctatgggttactgcaggtatcaattttcctcgactgtgctattcacaactttgttaagtccaaaaatatgaaaccaaagtggtaggaaacttaagacttagcactttcactaaatggcatacatcgaagggcatcaattcaagagcaaaaatggttgaactcaccatacctacctatgtggtcattccagccttagagccgtccaggttactgagctccctgtaggaaaggccaggcctgaaagccaaggcgttttggatattctactgtgggccatgagtaaaaggggattttcaaagagaaaatttttttcagtcgagcaggaaggcctggtgccaggaggctttactgagaggaagcacttagatttaacaattatagacacaccattaggggagttaaaaatgtacagcagtgacatgttctactccaatcacttgtgctacgccaacttttttgtacaaag

SEQ ID NO: 240389 - DNA, 1242 bp, Homo Sapiens
cagcagggggcagagctggacagtcccagctccatcctggtttctgctgccatgggtgtggggtgcgttactccctggctcctttctgctggctctttttaatggccggactcctcttgggagctctgttcagtctaggcttatccagctgagaaggtgcagcactttggcattttgagggacacatacaggatgcggcatggaatgtctctgaatttgggatcctgccgatggtaagctttaatttctaaaacacaagaaagaagaaagttaaatggctaaagattatctttaagcttgttgcttcccaatctgtcctcattcatacccttgggagctggtattgaagaaagtcctgcagtgaactgtaatatctgggccagaaatagacagggatgacttacttggctagttaggtggaaggtggatttttattttctggcatccatggcctgaaaaggaagctgagcttttaaggaaggatccaggtagcattgatggtgctctaaggggtccaattgcaccaagaattaaaaaggcctcttcaaacaagtgaatcaaaatgaaaccaccagacaggactcccccagacaagattgggaggaaacttaaacttgatcagtttctcctgcaacctgtcatgtccttcccctgcacacaccttctccccttcccttgaaaatctcagttctctcccctcccaatccctgccccatccccaccccaacctccacttccctcatctgtagcataacaggaaggagagtaaatgagattggctcaggcactttaaaacatcaagggccaatggctgttcttcctttggttccatatctcccttttccaatattctttttccttccagggactatgtgtttgaattttaaaagagcagtggatacccatcaacacaaagaaatcaggaatggaggcagtgagaaagtaagggaattttctatcttccagataatcatgaagatgaatactgcatatttctcaatagcatgtaggggctgttatcaattagaaagggaaggcagaacgagcacaagagaaatgcaatgactccacagtctagaaaggcagtcaggataaactgcagtcagcaacacccaggtacagttcctggatctgctcacaggcaaaaacccttttcttggcttctgaattaatgcctggatctttgggtcagagtagtgtttggtaactttcagaagagttcagaaggttatattgacccaa

SEQ ID NO: 240390 - DNA, 1271 bp, Homo Sapiens
  misc_feature (967)..(976): n is a, c, g, or t
ttgagggacacatacaggatgcagcatggatgtctctgatttgggatcctgccgatggtaagctttaattctcttctggatggaccggtaagaaacagggagacctcctccaggctctggggtttcaggtcattcactgccagaagatgatctccgtggcaaaatatgcatcccaaacgtggggggccttcccactgagacacacatatccgtcctgtggcttctgtgagagcaagatagttgatgacatcaggaggagaaaggaaaacgttcagtttctccacttggctttcatcggggatattactatgaacaagacatttgtaaaagtcacatcaggcaactgaccttggctctcaactgtactttctgagtagacttttggcctctatttctgagatgacattgtccaggtaaaggttgttcaaaacatttggagaataatataaatttaagttactgaaaaatcctcttgggatgtggtagcggatggtaggctatgggaacagagggaaaaatggactaaattggttatgtaactgtccacatcaggccagtctgcatatttctctgctggaaatgattccatagaagaaggcatggaaaagagttaaaattacatcaatcgtaccaaatgctcttggtatcacttaaagcctaaataaccccctcctggtctataactaagtctcatgcaacttgcatgtccataattacactcatgggaaaactgagtgacatgctactcagattggtgtggatcccaagtcctgggacctgaaagagtagccaagggggaatttttaaaaatagctgaaaatgccaccccccgccccaggaactgctttacttgagatctatcatcccctctccttggccacaacatcaatgacagggagaagatggtcaagtttttggctgacttggagatttttaggaacagctttaaaatttaaattctaagttnnnnnnnnnngtgggagggaggctgccttgctcttagggcccatcaagttttagaaattagagctttacttgattaatatagacaattgcacaacagttagtgaggccgaccccttttggtcatttgtggtctgtgcttccacatcggcaggggaaagacaccaatcaattcctgagccttgttcttgcaggtggaggtccccatcctgggtctctggaagggtctggggttcctctttgctgctatccacagactcatgggatgtctctttgaaaaaactagagcataagaagttaaaacccaa

SEQ ID NO: 240391 - DNA, 1431 bp, Homo Sapiens
ttggagttcctgtccagctcatggcggccaatgtaggcccaaaacttcctcaagtcaaactctccaggcccaccttctgcttcccagtggcatgaacaggcccagctttgacttgagaacagcctctgcaggccctgctcttgcctcccaggggctttttccaggcccagctcttgcctcatggcagctgccccaggccaaatttctgcctgcctgccagcagcctcaacaggcatagctcctccctcacagtggcccatttaggcccaactcatgactgtcgggccatttccaggcctagtgcctgcctcgtggctgactcttgaagcccaaaacttcctcaaatcagccttttgcccaacttctgtctactgtcggactctacaggccagcctctgcctcacagtggaccctccggacccagatggtgtctcactgtggcatcctcggttgaagctcctgcctttcggcagcctctccaggcccagctcctcctgcctcccagtggcctctttcggcccagcccagctcatgcctcccagcggccttcccaagccccgcttttgactttcggtggcctctgcgggcctcgacaaggcccagcctcctgcctcccgaaggcctgcacaggcccagcctctgcctcacagcggactctccacgcccagctagctgtcgcctcattgcggcctcccgagtccaaagctcctgcctctcggccgcttcggcaggcccagctcccacctgccagtggcctcttcaggcccatggggctcgttcctcacaacggcctttccagggccagtttttcccttccagcggcctctccgggcccagaacctcctcaagtcggcctctccagacccacttgcaccctccgggcgttctctccgggcccagctcttcttcctggttgcgtctccaggcccgactcctgcctctcaacaacctctttggactcagtgcctacccatctcctggtggccttggtcggtccacagcttcctcaagccaagctccccaggcccaggtcaggcctcacggtggcctctccaggatgagctcctgccctccgatggcatctccaggccccaaatggtctccggtcggtgggctcctccacgccaaggttgggcctcccggcgaccgccgcaggcccaagttgtcctggagtcgggctctcctggccctgcctcccggcaagtaagcaggctcttttggctcaactcctgcccagctcccaaccgcctttgtaggccccgaactttctccagccaagctctgagggcccacctcctgcctcctggtggcctgtacagttctagcactggttggagaacagcctctgcaggccccgcccttgcctcccaggggcctctccgggcccagctcttgcccccacggcggcctcccggggacttgggcctggga

SEQ ID NO: 240392 - DNA, 1114 bp, Homo Sapiens
  misc_feature (937)..(993): n is a, c, g, or t
aagttttgggctacattggccgacatgagctggacaggaactgggccaaaaaaggctgttgtgaggcagcagttgtgcctgtagacccagccaagaggaagaggtgggcctggagaagcccccatgaggcagaggttgggcctgtagacgctgacaggaggcaggagctgggcctggacaggtcaacttgaggagattttgggccttcataggccaccaggaggcagcagttgggactagagagtctgacttgagtaagttttgggcccggagatgacgtcctgggacaggagttgggcgtggagaggccaccgtgaggcataagctggatgtagagaggccagtgtgaggcaagacctgggcctgtctaggctgctgggagacaggcaggaatctggccagggaaggttgccatgagacaaaagttgggcctggaaaggcccttgtgaagcatgagcttggcctaaagaggccactgggtggcaggagctaggtgtgtagaagctgctgaaaggttgggagcttggcttggggggtccacagtgaggtagatgctgggcgtgaagaatctgctgtgaggcagacgttgggactgtagaggctgacgggaggcagaggctgggcctggaggggccaccaagatgcaggagctgggcctggagaggctgcaaagaagcatgagctgggcctggtgaggtcgacttgagaaagttcagggcctggagagaaggctgggaggcaggagctgggtctaaagaggccattgtaacgatggagctgtgcctgtggaggctgttgtgaggcagtagcctcatctgcggaggctgccgtgacatagggtatgggcctaaataggccattgtgagtcatgagcttggtctgtagaggctgactggagaaagttctgggcctggagaggctgccgggaggtaggagnnnnnnnnnnnnnnnnnnnnnnnnnnnnnnnnnnnnnnnnnnnnnnnnnnnnnnnnncgttttgctgtcacccctctggaatccacgtatacgaaaattccaaatattagttgggcatagtggcaagcacctgtagtctcagccacgtgggaggttgaggtgggaggatcgcttcagc

SEQ ID NO: 240393 - DNA, 872 bp, Homo Sapiens
ggaatggaaaaccaagcatcgtatatctcactgatatgtgggagctaagctatgaggactcaaagacataagaatgacacgatggactttggggacttggggggaaggatgagaggggggcaaaagataaaatactacaaatagggtgcagtgtatactgctctggtgatgggtgcaccaaaatctcacaaagcaccactaaagaacttactcttgtaaccgaataccacctgtaccccaataacctatggaaaaaaaatcccatgctctagtgataccgtacagtatataaccaccaccagtactcctgtcaccaaaccctacaaaatatctatacaggggcatgagatttgggccctgcataaggaaaatggcatgtcacattggcctcttgattctttcggcacctatgatgtgctaggagctatgcttttgatttgactacagaggcacaaaaaaccatgatcctagccttacaagcagtaagtgttatggtagctgtataaacacactggagcaacataaagccagggaccttgaactatgcccaagagatatatatatgtgctgaataacagagaatgaatgggagttctcgaagtctagagatagtggttggggagagtcagagacatgggcgaaacaaggagaccttaccttcctgttaagtctccgagcatcttgttttctgcctctgttgtgatttattacagtgtagtagtacctgcatgcctgcgtgtctccctgtctgaaatgtaagctcttagagggcagtgcttttattagcccagctcctaggacagtggctggcacataggagatgcaaaaaattttcaattaatgttgtggttgaaagagtaagttcaggccaa

SEQ ID NO: 240394 - DNA, 3374 bp, Homo Sapiens
  misc_feature (2522)..(2585): n is a, c, g, or t
  misc_feature (2862)..(2884): n is a, c, g, or t
gaggcagaaaccccatacaaagggctttcagagtacaacccaaatcagtagagagccatgtttcacctcttccaggtagagatctactctattcttaggctaatcttgcactaatacccaaggggccatgttgcttttgatggtgggtataatggcaaatcaggtgcatttcagacacttctgccaaaatatccaaagcctcattttcttaagctcttcactggagaatgaagcagggaaattcaggtttttaacaacctccatcaccacaagtggcatctctcctttaggttaacttaagatagaaaaatgaatcccacctcctaggatactgaaacgaagctgtaaagaagtcaacttcctttacatagtccaaattacataacctttctccaggatagaggctacatataatcaagccctttattctatataagaaatcccccaaagtctaatctggaaggaaaaacaaaaaacaaacagtattcatttaggtgaggtggaaggcacacctcatctaccctttctttctttacccactgaccctccttctggttcaggctctaacttaacacagtcccttcccctctcccacctcacaaagctgcaggactactgagatggaaactgaagtgtcagtttccatgtgcattttatcattttcccctacaagttcagaggtttctctggtacaggccagcttcacagctaacacacaatgaaacatggtttttagatcacatcagtctgtagtcattttagggatacaacaaaggcataaactggaaagtaaacgttatctgtgttcattagtagtgtgatggtgtacaaggtaggaggaatactgtaggaaaactggaagataaaacccaggctttgttatttactagtagtacagtgtagctttgggcaactgacattctctttaaattcagcatcatcacacataaaatgatcagtggttctcatccagggagagagtggttcaaatacacacatgcctaccttttctaactcactcagagatacaaagatctgacttcctcaaagatgctattgtcagggactgtgtaccaccacccacaggtgaagaagaaaaactagtggggatgggggtaggggttgtgtttactaagatggcaaaagctctctaaaggcagtggctttatattagcagcagggtctccttttaagcttaatttctcaatggaaggtgaggactgggacagttggcatcctatctcaaagtcgggggtgatggaggggattctaagaatttgaatactaacaaggccaaaccacgatgattccaaattgtactctggagactattcttctctattggccccagaaccaccatcagacgaagagaaacatcacaacaactgcagaaaactgcagacaactagaagtcattcttaaagagatttaattatttgaagtgcataaaaggggagggtacatttaaacctctgctatatcacaaactgctgtttttgttgttgttttattaaagacccaccagttttactcatcttcaggtttatggctatagaatgtggggaaaacaaaaattggcaacagaataggaaaaggtaagcaaaagtctggtcaccagaatgtcttctccactgcagaacagacccctttaaaaaagaaaagcaaggaaaatagctatgggctatccacagccagtaatgatagctacagttagaaagaaatgagaaaggaaaccaggaggcagagtctgggaattcacaagtctcctctcaagacatatactaaacccggacctctgtgaggattaattttccttagatttccttccaacgtcttaaccctaaaccaagttcccctgtcaattcaaatataataaaggcagcattccacaaggaagactgatttgaggattgaagtgatttgccaacattctgagaaagcttattttaaaagagcacggctttaaagataggttctagtccttgaagacagaggggttctttgttagtgagggctgtaggcatatggcccaccaaacagagcaggacacaaaagaagaatcccctaatgttgtttgcaggctaacatccactgctactgcaacctggttgggcagaggcaaaagcaagcagccccttctggctgtgcaacagtagaggggcagaagaagctgtgctctaatggctctaaataatcagcatttagtgttatgttaggacgaaggatttattccacaatataaactgtaacatttgatacaagctaccaaaaaataggggagaaaggaagggacagggagaaagccaaaatacagctgtggcaattacttacagagaagtctcttttctacatcactagttcatcagtgacactagaaactagacatttgtgttctgtacatcaatcaatcgctaaagcaccaacacactgtttggaagtttgttttgttttgttttaattccagccactgaaaccaacatagaagttattgctcagataaataaacctagtctaccaggaannnnnnnnnnnnnnnnnnnnnnnnnnnnnnnnnnnnnnnnnnnnnnnnnnnnnnnnnnnnnnnntttccccaatgtggtaacagagtaaacaagggagagcttcctcaaatgaggatttactggaatttctggtgggtgcccttttgggcactggaagtgagttggactcttaagctggtaaatcccagagagaggtaaaattttaatgctgtacatgaaaaggtgcaagcttcaatgccttccaaattggtgggaacccctgcaaaaaaaacagtcagcttttcaaacctcaacaaccacaaatagctcttaaggaaaaaatacaaaaagtgtcaaaaannnnnnnnnnnnnnnnnnnnnnncttcaaagagtcctggaaaaatgatcccataaggaatagaaatagcaccgtttacaggctggcttgagtaccagtcctgtagctttgctgagatttgaagaaatcctcttggttggagtcctgaattacattaagtaggggggtatctgtttttgtgtttttactttcggcttggtgcgtccttcacagtacagcgcacacagatgtagtcttctttctctgccatctctggggagacaccaacacagacctgatgaaaccactgattgcagctgccatcacactggacccagtccacctcatctccttctggctgcaggcagctcacagctgggcagatggcatcttcatcctcagagtcttcctgttcggaataggatgtgtctgagggcagggaatgagtttcagcagaacgaactaattcatagctacgctctctctctaacttgaaattgttcatgtccttggggtggctcagtttgattttctt

SEQ ID NO: 240395 - DNA, 1472 bp, Homo Sapiens
gaggtcagcggatgcccagagcttagggtcacataccctgaggatttctctggcttgggaggtaacgtgaggggctttcccagtcgtgggactttgcaggatttcgaacgctggaccgcggactcttctggctcgacttgctctcagccagctctccctcctcagctgagcgattccgggggcgcagcttggcctgagaagcaagtccagaagcagatagatagtagagggacaggcagtaggactctcagggggtaagaccttatctcaagagtgtgcagtccccagaatcaagcagagacccctctgcagtcctttcaccccaaaggatgggaagtcacttagagatgcacttcccgcagaactgagctatgccttgcacacctttctgtcctcaaaaacatatggcaggattgaattcagacaaactgggtgggacaaagccagtggtgacttcccacccctgttccctctgcctgcaatgccaccccaccatcccagctccaggagccaactcctgtgcctgccgccggctaagatcaaatacatacaagaggccttctccaatccaccctcccttcccatccccctccactctgctgttaggaaataactcctctctctctgaacaggcccagcccttatctgtgcctctcctcagggacacctaaacttcttctctcatccaggctaattatgggcatcatgtctcccactgcccctgaggttccagaataagaacacatcttgttcttctttccatcccatttggcacacagcatagggcccggcggggcacaaagggatcttctggagccctcgatggagaggagagtgagaggaggaatgggagagggggacaggggaatgaattgatggatgaagagaagaaagacagcatgcaaggtggccacctggccagatggctggacatgtttgcttaatgatcagatggtaccttcagggctgaggggctcaggccaggaaagaggttgactttcagccccttggtgcccaacgacatccgtgtccggcggctatgaggttcctccactacctcttcatctgaagatggcacccgagatgcccgtggctctgtagagtcctggaacaggtgtgcatccgagtctgctgcctccgacaggcccaaggtacccccaggccgaatgaccggggcccggtgcccacgcttgcgccccaagttggcacggctccgatacatggcactgtcgaggatctcggtgtcctcaatgaaggagaagtcctgactgggggatctggcaggagggccttgggagggtcgccgagaagtctgtgctggcccctgatcgctccacctggctgctgaagagccccaggtgccatccacgtcttctgtctggctggcctcaccatcaggctgcggcctccaggagggtggagcctggcagggactctccaccctccgaggagggtggagccaacttttttgt

SEQ ID NO: 240396 - DNA, 1496 bp, Homo Sapiens
  misc_feature (1293)..(1328): n is a, c, g, or t
agagatatacatcacttgggggattcgcttccaactcctgaagtttttcttctagctttccttgtgtttcagctaattcatcatattccttgcatagggcggtcagatccctgtgtttgcttttcactaagaactcggcagtaatatctctgggtggctttacttcagatgcttctttgtattgctgatggagttctttaattttctctttcaaatttaccatcttattaagaagttctttcaattcttcctgagttttcactatcttcttccaatgttcaatctgctcatctttgacatgcttctcttgtaactgaatgacaacttccaatgcctggccaagggacacaggcttattattgaggacattgaagtctagttgatgactaaggtaagatgtagcttctagcaaccggttaaactcttgctctaccatttcatctttctctttaggaacagcttgtccgttggcttcataaagtgggcatttttgcttgatcttggccagttccatatttacttgtttgctgaccacagccataggattccctccaagacctgttaccaccatggctccaagatcagctacatagtttcctttgcgaaatgtggcaactcgtccacccacacgatcctgtttcagaaattaagtagccaaaatcatcaattctgttttaaccacaaacctggcatagtaccataccacggctctgtcttctataatttaaaaataaagatgtagagtttacatggaatgcaatcaacagtactatgggcacaaagaacaaatgaagtttaacttgaagactatttgaaggagaagcaggcaacaaatgacatataattaaatgtcatataactaaacgacacagaattaaatgatgtgatataaaacagtcttgacagttggaagataaatttagtcacaggtaccactctatccagttgtctataataccttttaatgtacagggccacccatatagaaaatatttgttcacaaatcccaacactatttaaacaccaactttctaccactgtaatctgactcttacaccctgatccccaaagttagcggggaaaaatctgatggataatttttctgacaaatggttctccagtgcacccccatgcccaggggcagagagtccatactgaacatagcctgttcacaataccttttatccctaaataggcccaggtttatcactgctgacgagggattttcaagtatggctgagttgtagcgataatttaatgattataaataatgtaagagtactctggaactcnnnnnnnnnnnnnnnnnnnnnnnnnnnnnnnnnnnnctacatactagattacaaactcctcatgggtaggaatcaaaatggtcctattattccttattgtattttttaatacaaaatgtacaaagtgcacaaagatgttttctaaatatataaaatttttaataatagtatatcaggaaaatatttaatttcaatttcccccaa

SEQ ID NO: 240397 - DNA, 1074 bp, Homo Sapiens
atttcacagcacttgcttgcctcagtctttacgaagaacacaattccaaactaatggacaaagttcctcctgtgcttctaggtcattcaaaggaggcaagctcctttgtcaaatcaggagctccatcagctgatcaggagcccagatgccagggtggattttctcagtgggatctagtattgctagaagagccttccttacatggcagaaacaggcacataggcctcttcccttagaatgcatctgtctcacatgcttggggactgctgtgcaggaacacctggtgtggcctggcgaggcagcgtatacatggcccccaaaaactggtctgcaattcttcccgcttctcgcagcccactcagcagagcaccatgcactgtggctgggtagttacggatcgtatgttctcccgcaaagaagagtcgtggaatcggctattttaggggaaaaagagaaaattggcaggctgcacatatacctttattcttgtacttaaattgctaagtacttaaattgctgttgacctttttaaaggctgacccccccaattactattcatcattctattgaagagtctcccttatcagtaggcactttcccagaattgacaagtagaaatgagacaataaaactctacctaggctcagtcctaaagtgatgcttaacatgtgttctcatcagtttagatacccagttgtaaagcgtccttccctcatgtataactaccttctgggagggagcctcgctaccctgaagcacaggacatttggtgatcagggacacttaagcctcgcagctcagcaggtctgggctatgacactaaggaattcttaccgctctttggagtggggtctggcataagggtctagacaaggacccagggttatttctcagaaatgccctggaagcccctagtaattgagaccttacagcaatcctatgagccattacaaaatggaagtgcaattaaaaatggttttgttttttagggagaaaacctgaataaggaaaaatgttatttgacttatactctggactcctccattctgaatgtagccaacttttttgtacaaa

SEQ ID NO: 240398 - DNA, 1485 bp, Homo Sapiens
  misc_feature (156)..(172): n is a, c, g, or t
  misc_feature (211)..(219): n is a, c, g, or t
  misc_feature (299)..(311): n is a, c, g, or t
  misc_feature (564)..(594): n is a, c, g, or t
  misc_feature (1325)..(1344): n is a, c, g, or t
tcctcaaaagaaataaaacagaaaagctaacaatctgatcaaatgtacagttcaaaaatgtctttggcgtttaacaacaagtcctaggaaagaaaactacagagttatcttgaaccggacaaataagttaccactggcaagtctgtggcactagtnnnnnnnnnnnnnnnnnttaactctcttgatcatatagatatctctatgaaaatcnnnnnnnnncaatctgtacaaaaggtctttcttcataaattaatttttttataatttaatggctgtctactatgtgatgtttaactgannnnnnnnnnnnnatgtacagaggttatgtttcccaaatcttacccagacgagtatggcacttagttcagacatttctagcagcagatttcccctcccctctaaccgagctatcaaatttctgtcttaactaatgcaaaaatatcaagtagtgagagacccaggtttataactgtactaggtacacagagggtgctgcgttcagtctggactttcacaaagcagtaatattccagggagcatagaaccaataataccacaactttnnnnnnnnnnnnnnnnnnnnnnnnnnnnnnnacatttctcttatgactatgtaattttcactagaatctacacttctcagagcagcaaggacttttgaaactatgaaatgtcactgacatctatcatcaaatacaagcataaaatttaagaactaaaaaatacttgaaagaaataactgcttagccctagctcctgagctaggaggatttggtctgtggaaacagggagggccagcaacctgtcccagcacaaaagaaaatagactctgaggtagataactgatcatacacagctgaccagacaagtacacagttttggaagacaacttaatttaccattgcttttaaaacatatgcaattgccttaataaaagagctttaataacagtgaattatcttatatgtactaaagtagaaataactgtgtatttatgaatcaggaatttcatagtttcaaaattggttttctttacacttgaacacttgtagtgatgatgtaaagtgtggcactgcttggatccaaatcttccttcatgcttttttgtttgtgtgtgtccatacatcaattaaaattataaaacctaaacgcaaaggtacaaaaaaggcacattctcctaaccgcaaactggtccggcaaaaataaagagcacagaagatgtgatgctgagacaagttggagctactggttactggctcttcggtctttggtgaagttacctttaaaagtgccaagtcatttttatttttcaaatttacctaatnnnnnnnnnnnnnnnnnnnnctagtagccaatcgttttgcttctattccctatctcagcttatgtttgaagataaatccttacttttagcttttgccactttgttgcaatagcaacatttttcggtttgccagatttcaggcataattctcattctaaagc

SEQ ID NO: 240399 - DNA, 1206 bp, Homo Sapiens
  misc_feature (253)..(283): n is a, c, g, or t
  misc_feature (1014)..(1031): n is a, c, g, or t
atgtacagaggttatgtttcccaaatcttacccagacgagtatggcacttagttcagacatttctagcagcagatttcccctcccctctaaccgagctatcaaatttctgtcttaactaatgcaaaaatatcaagtagtgagagacccaggtttataactgtactaggtacacagagggtgctgcgttcagtctggactttcacaaagcagtaatattccagggagcatagaaccaataataccacaactttnnnnnnnnnnnnnnnnnnnnnnnnnnnnnnnacatttctcttatgactatgtaattttcactagaatctacacttctcagagcagcaaggacttttgaaactatgaaatgtcactgacatctatcatcaaatacaagcataaaatttaagaactaaaaaatacttgaaagaaataactgcttagccctagctcctgagctaggaggatttggtctgtggaaacagggagggccagcaacctgtcccagcacaaaagaaaatagactctgaggtagataactgatcatacacagctgaccagacaagtacacagttttggaagacaacttaatttaccattgcttttaaaacatatgcaattgccttaataaaagagctttaataacagtgaattatcttatatgtactaaagtagaaataactgtgtatttatgaatcaggaatttcatagtttcaaaattggttttctttacacttgaacacttgtagtgatgatgtaaagtgtggcactgcttggatccaaatcttccttcatgcttttttgtttgtgtgtgtccatacatcaattaaaattataaaacctaaatgcaaaggtacaaaaaaggcacattctcctaaccgcaaactggtccggcaaaaataaagagcacagaagatgtgatgctgagacaagttggagctactggttactggctcttcggtctttggtgaagttacctttaaaagtgccaagtcatttttatttttcaaatttacctaatnnnnnnnnnnnnnnnnnnctagtagccaatcgttttgcttctattcgttatctcagcttatgtttgaagataaatccttacttttagcttttgccactttgttgcaatagcaacatttttcggtttgccagatttcaggcataattctcattctaaagcactatcattagtataaaggaaggacaaaacccaa

SEQ ID NO: 240400 - DNA, 1206 bp, Homo Sapiens; identical to SEQ ID NO: 240399
  misc_feature (253)..(283): n is a, c, g, or t
  misc_feature (1014)..(1031): n is a, c, g, or t

SEQ ID NO: 240401 - DNA, 1194 bp, Homo Sapiens
  misc_feature (260)..(291): n is a, c, g, or t
  misc_feature (1021)..(1038): n is a, c, g, or t
atgtacagaggtttatgttccccaaaatcttaccccagaagagtatggcactttagttcagacatttctagcagccagattttcccctcccctctaaccgagctatcaaatttctgtcttaaattaatgcaaaaatatcaagtagtgagagacccaggtttataactgtactaggtacacagagggtgctgcgttcagtctggactttcacaaagcagtaatattccagggagcatagaaccaataataccacaactttnnnnnnnnnnnnnnnnnnnnnnnnnnnnnnnncatttctcttatgactatgtaattttcactagaatctacacttctcagagcagcaaggacttttgaaactatgaaatgtcactgacatctatcatcaaatacaagcataaaatttaagaactaaaaaatacttgaaagaaataactgcttagccctagctcctgagctaggaggatttggtctgtggaaacagggagggccagcaacctgtcccagcacaaaagaaaatagactctgaggtagataactgatcatacacagctgaccagacaagtacacagttttggaagacaacttaatttaccattgcttttaaaacatatgcaattgccttaataaaagagctttaataacagtgaattatcttatatgtactaaagtagaaataactgtgtatttatgaatcaggaatttcatagtttcaaaattggttttctttacacttgaacacttgtagtgatgatgtaaagtgtggcactgcttggatccaaatcttccttcatgcttttttgtttgtgtgtgtccatacatcaattaaaattataaaacctaaatgcaaaggtacaaaaaaggcacattctcctaaccgcaaactggtccggcaaaaataaagagcacagaagatgtgatgctgagacaagttggagctactggttactggctcttcggtctttggtgaagttacctttaaaagtgccaagtcatttttatttttcaaatttacctaatnnnnnnnnnnnnnnnnnnctagtagccaatcgttttgcttctattcgttatctcagcttatgtttgaagataaatccttacttttagcttttgccactttgttgcaatagcaacatttttcggtttgccagatttcaggcataattctcattctaaagcactatcattagccaa

SEQ ID NO: 240402 - DNA, 1208 bp, Homo Sapiens
  misc_feature (256)..(286): n is a, c, g, or t
  misc_feature (1017)..(1034): n is a, c, g, or t
atgtacagaggttaatgtttccccaaatcttacccagacgagtatggcacttagttcagacatttctagcagcagatttcccctcccctctaacccgagctatcaaatttctgtcttaactaatgcaaaaatatcaagtagtgagagacccaggtttataactgtactaggtacacagagggtgctgcgttcagtctggactttcacaaagcagtaatattccagggagcatagaaccaataataccacaactttnnnnnnnnnnnnnnnnnnnnnnnnnnnnnnnacatttctcttatgactatgtaattttcactagaatctacacttctcagagcagcaaggacttttgaaactatgaaatgtcactgacatctatcatcaaatacaagcataaaatttaagaactaaaaaatacttgaaagaaataactgcttagccctagctcctgagctaggaggatttggtctgtggaaacagggagggccagcaacctgtcccagcacaaaagaaaatagactctgaggtagataactgatcatacacagctgaccagacaagtacacagttttggaagacaacttaatttaccattgcttttaaaacatatgcaattgccttaataaaagagctttaataacagtgaattatcttatatgtactaaagtagaaataactgtgtatttatgaatcaggaatttcatagtttcaaaattggttttctttacacttgaacacttgtagtgatgatgtaaagtgtggcactgcttggatccaaatcttccttcatgcttttttgtttgtgtgtgtccatacatcaattaaaattataaaacctaaatgcaaaggtacaaaaaaggcacattctcctaaccgcaaactggtccggcaaaaataaagagcacagaagatgtgatgctgagacaagttggagctactggttactggctcttcggtctttggtgaagttacctttaaaagtgccaagtcatttttatttttcaaatttacctaatnnnnnnnnnnnnnnnnnnctagtagccaatcgttttgcttctattcgttatctcagcttatgtttgaagataaatccttacttttagcttttgccactttgttgcaatagcaacatttttcggtttgccagatttcaggcataattctcattctaaagcgaggtatcattagccaacttttttgtacaaagt

SEQ ID NO: 240403 - DNA, 1460 bp, Homo Sapiens
  misc_feature (955)..(1002): n is a, c, g, or t
tcaaagctgcagaagatgattataccccacgcttacctgggaccggatctgagcggctttcttgggatccaccatgcgcacatgctcgaaatgctttagggtgtgctgtctgtcttctgttctgcgcggacatacttctttagcatattgaacacgtgacgaggctgtgggaggaaaatgaaaaactctttttcaagtttgtgcaaaacactgcttcttccattggcgatgggttagaggttccactaatgcatccggtcatgtgaacgtactgtgagtcacctttttgcaggtctgccttctaaacatttctcctactcctttcttaatgggtaattacttagatcggctgcttttcacttccacaagagcatttaacattctcgacatatatgatgactgtcctccttactcaacattttctttttaaataggagtactctgctatagaaagagaacagatttgaggtctgtcaggttaagttaggtccttctcttttcgcacccaaggggcatatgtgagactacattgctacgtgtacattttgaagaccagaggtaatgtcacacagataatcccatcaccagtaacatgtaacatacgaaatcaaaatgagaaaaacaggaaatttaaccactattttgtaagccaaggagtaactgaactgtaagagacattatatttttctaggagaaaggccattgctaaactgtatttattttactctgaaatttaattaagttctttctaagctatcagattctaattctttcagcaacaattacatttcgtcttaagtgctcctattttctttctaattggttccatttcatttttattttagttttacctgaaaacatccatcctaataaaaactaaggacaaagattccctggtcttcaacaatttcatcactatatgcattccactacatgattttgtaagatgatttcnnnnnnnnnnnnnnnnnnnnnnnnnnnnnnnnnnnnnnnnnnnnnnnnagttgtgaaaattcatgttgggaatagaattttggtcatttgggcaaacctagctattattaacccatgtgtcatgagtaccctgaaaaccagttggaaggtacaaaatttattccagagatggtgtgtgtggtggtggggcgggtggtaatggagcttttgttgtgttatccatatcctatgggatgtgcctctccttccccttttgcttagttaacttaggagccatctccctgccatctcaggtggaacgaggtaccctttttctgtgctcctatgaaatactgtgcaaatccccattaatgtacctaactcattaaattatctataattcttactcccctctttaatgtgagatccatagggctggatttggtcttttttctttatttggaaccccaataacacagtgcttgacccagagggtgctctgtatttgcttggtgaatgcctgccaa

SEQ ID NO: 240404 - DNA, 968 bp, Homo Sapiens
actttgtacaaaaaagttggatccagcatttccaggagaaagtggaatctttggaacaggaagcagccaacgagagacagcagctggtggagacacacatggccagagtggaagccatgctcaatgaccgccgccgcctggccctggagaactacatcaccgctctgcaggctgttcctcctcggcctcgtcacgtgttcaatatgctaaagaagtatgtccgcgcagaacagaaggacagacagcacaccctaaagcatttcgagcatgtgcgcatggtggatcccaagaaagccgctcagatccggtcccaggttatgacacacctccgtgtgatttatgagcgcatgaatcagtctctctccctgctctacaacgtgcctgcagtggccgaggagattcaggatgaagttgatgagctgcttcagaaagagcaaaactattcagatgacgtcttggccaacatgattagtgaaccaaggatcagttacggaaacgatgctctcatgccatctttgaccgaaacgaaaaccaccgtggagctccttcccgtgaatggagagttcagcctggacgatctccagccgtggcattcttttggggctgactctgtgccagccaacacagaaaacgaaggttctgggttgacaaatatcaagacggaggagatctctgaagtgaagatggatgcagaattccgacatgactcaggatatgaagttcatcatcaaaaattggtgttctttgcagaagatgtgggttcaaacaaaggtgcaatcattggactcatggtgggcggtgttgtcatagcgacagtgatcgtcatcacctttggtgatgctgaagaagaaacagtacacatccattcatcatggtgtggtggaggtgacgccgctgtcaccccagagagcgccacctgtccaagatgcagcagacggctacgaaaatccacctacagttctttgagc

SEQ ID NO: 240405 - DNA, 1721 bp, Homo Sapiens
  misc_feature (493)..(509): n is a, c, g, or t
ttggccaatcctatcaaaaattctaatttatggagagttttcaactcaactgagctgaaacttggattggtttccatagataggtctcagtatttaaaagtgcaagccagcctggtttgcaccttctgtagaacccctaggtggctctaaagtgtgacaccaaataatttctgtgagctcagaaggggacagcatctgcctttaggcatgacagttcagccaactctgggtgcccttgagggtttctctttcaatcccagaaatgctgataactcagctgggctggggcaggatttggcatgataggctggctctgaaccccctcctaagagaccaagagaggaagtgatggaattggttggtcccatttcaactctatgctgattctcagggttctcatggcttccctaagagagccacctaaactgctcgggggtgaaaaatcctcttgtattgaagtgccaagctgcctgcagcagtgcatgatggacannnnnnnnnnnnnnnnnaaaacacaccaacaaaaaaatgtatttgtagattgtgataaaatgtaaataactgaattttcaaccatggtttgaagtcagctttcagggcattatgtcttgttttgatgaaaagagatcactctatacccccctttttaaaggaaaattatcgcaagagaatcaggatgtgtaaagctaacatgcatcgcaaaaaaccaaaggtaacctaaatgtctgattttaatagcacatatttctcttttacataaactgtgacagcaacttgcataaacaattctttagctgttaattttaatgttaaaactttgcaaaacttgtttaataaaaatagctgtaaaaagaaaaaccatatgttgccgcataaattagccataactcttaataatcctgcccatcacaagtgaactgtaacgtaacctgggcacaaagtctgacatcttaaatgacacattgtaaaatttcaatgactgtagattagacctcctgctgcaccccaaaagctttctgctcagctatttaaaactgtgtaaggatgagtccctgtaggtccccatattgatattcacaatgaaactttacttaaaatttcttaaaagttgcatgtttctcctgtaatgtgtaaactgcatgcaggatctctttatcttttattttgtatgtctttaaaacttcctcttcaaaagactgatctgttatttctccattttcaggtgactgaaaactcctgaggcatttcctggactagaatgggtagtgaagacccatgtcagctatcagaggactcctgaaacctggagagctacctgctgtataaaggctggcctgagggcatttgctgaacacagagaaacccaggagaggagatcagcagttttctttcactctacttgatctgtcagatttacccacagaaagccagtcaggatcccttaagagtctttaggcccagaatggagtcctcagggctgcaggggactgtggtgctaacaattaaactgttcaagactttaaagagttgaaggggactaatgggtatccctagcatggcctcctagatgggaattaactggcaactcctactgtgccattcccagtatgtgtgcttccctttagcctcccatagaattggctgaaacaccctaccaccgttttctgtttccccactaccacacctgtgttatgggtgtcagcctgtgagtccttgaaccc

SEQ ID NO: 240406 - DNA, 1464 bp, Homo Sapiens
  misc_feature (832)..(861): n is a, c, g, or t
  misc_feature (1197)..(1207): n is a, c, g, or t
ttggtgctcttatggcccatgccatggaggaagtcaagaaatttctagtaccggatatgatggatgatatctgtcaggagcaatttctagagctgtcctacttgaatggagtacctgaaccctctcgtggacgtggggtgccagtgagaggccggggagctgcacctcctccaccacctgttcccaggggccgtggtgttggaccacctcggggggctttggtacgtggtacaccagtaaggggagccatcaccagaggtgccactgtgactcgaggcgtgccacctcctgcaccagaaacatatgaagaatatggatatgatgatacatacgcagaacaaagttacgaaggctacgaaggctattacagccagagtcaaggggactcagaatattatgactatggacatggggaggttcaagattcttatgaagcttatggccaggacgactggaatgggaccaggccgtcgctgaaggcccctcctgctaggccagtgaagggagcatacagagagcacccatatggacgttattaaaaacaaacatgaggggaaaatatcagttatggcaaagttgttactgatttcttgtatctcccaggattcctgttgctttacccacaacagacaagtaattgtctaagtgtttttcttcgtggtccccttcttctccccaccttattccattcttaactctgcattctggcttctgtatgtagtattttaaaatgagttaaaatagatttaggaatattgaattaattttttaagtgtgtagatgcttttttctttgttgtttaaatataaacagaagtgtaccttttataatnnnnnnnnnnnnnnnnnnnnnnnnnnnnnncacacaaacctgttagtttcaaaaatgacattgcttgcttaaaggttctgaagtaaaggcttgttaagtttctcttagttttgatttgaggcatcccgtaaagttgtagttgcagaatcccaaactaggctacatttcaaaattcagggctgtttaagatttaaaatcacaaacattaacggcagtaggcaccaccatgtaaaagtgagctcagacgtctctaaaaaatgtttcctttataaaagcacatggcggttgaatcttaaggttaaattttaatatgaaagatcctcatgaattaaatagttgatgcaatttttaacgttaattgatatnnnnnnnnnnncaacaaaattaggcttgtaaaactgactttttcattacgtgggttttgaaatctagccccagacatactgtgttgagagatacttagagggagggagtatgttttgaagaggttgatggtggtggggagggaaggccctcctgaattgagtttgatgcagagctttttagccatgaagaatctttcagtcatagtactaataaattaaattttcagtatttaaaaagacaaagtattttgtccatttgagattctgc

SEQ ID NO: 240407 - DNA, 1007 bp, Homo Sapiens
  misc_feature (163)..(192): n is a, c, g, or t
  misc_feature (528)..(538): n is a, c, g, or t
ttggccccaccttattccattcttaactctgcattctggcttctgtatgtagtattttaaaatgagttaaaatagatttaggaatattgaattaattttttaagtgtgtagatgcttttttctttgttgtttaaatataaacagaagtgtaccttttataatnnnnnnnnnnnnnnnnnnnnnnnnnnnnnncacacaaacctgttagtttcaaaaatgacattgcttgcttaaaggttctgaagtaaaggcttgttaagtttctcttagttttgatttgaggcatcccgtaaagttgtagttgcagaatcccaaactaggctacatttcaaaattcagggctgtttaagatttaaaatcacaaacattaacggcagtaggcaccaccatgtaaaagtgagctcagacgtctctaaaaaatgtttcctttataaaagcacatggcggttgaatcttaaggttaaattttaatatgaaagatcctcatgaattaaatagttgatgcaatttttaacgttaattgatatnnnnnnnnnnncaacaaaattaggcttgtaaaactgactttttcattacgtgggttttgaaatctagccccagacatactgtgttgagagatacttagagggagggagtaggttttgaagaggttgatggtggtggggagggaaggcctcctgaattgagtttgatgcagagctttttagccatgaagaatctttcagtcatagtactaataattaaattttcagtatttaaaaagacaaagtattttgtccatttgagattctgcactccatgaaaagttcacttggacgctggggccaaaagctgttgattttcttaagttgacggttgtcaatatatcgaactgtttcccaagttagtcaagtatgtctcaaccctagcatgatataaaaagggacactgccgcctgaatgaaaaaggaatcaaaatcccacttttgtacataagttaaagtcctaatggattttgtaccgtcctcc

SEQ ID NO: 240408 - DNA, 3676 bp, Homo Sapiens
  misc_feature (806)..(1095): n is a, c, g, or t
  misc_feature (1157)..(1166): n is a, c, g, or t
  misc_feature (1738)..(1748): n is a, c, g, or t
aaaagaagagatgcgaactcgctccccctcccctctcgccatcgtcccccgcccccagcgagcaagccgcccctgctctgcgctgtctctccaatggcgtctgcctccggggccacggcgaagcacgagcagatcctggtcctcgacccgcccatagacctcaaattcaaaggccccttcacagatgtagtcactacaaatcttaaattgcgaaatccatcggatagaaaagtgtgtttcaaagtgaagactaccgtgcctcaccggtactgtgtgaggcccaacagtggaattattgacccagggtcaactgtgactgtttcagtaatgctacagccctttgactatgatccgaatgaaaagagtaaacacaagtttatggtacaatttttgctccactaaacacttcagatatggaagctgtgtggaatgaggcaaaacctcatgaattaatggattccaaatggagatccccaatgaaaatgataaattgaatgacatggaacccagcaaagctgtcccactgaatgcatctaagcaagacgggcccacgccacaaccacacagtgcttcacttcatgatactgaaacaaggaaactaacagaagagtgtaaaagacttcagggagaaatgatgaagctatcagaagaaaatcaacacctgagagatgaaggtttaaggctcagaaaggtagcatattcggataaacctggatcaacctcaactgcatccttcagagatgtcaccagtcttcttccttcacttcttgttgtaattgcagccattttcactggattccttttcnnnnnnnnnnnnnnnnnnnnnnnnnnnnnnnnnnnnnnnnnnnnnnnnnnnnnnnnnnnnnnnnnnnnnnnnnnnnnnnnnnnnnnnnnnnnnnnnnnnnnnnnnnnnnnnnnnnnnnnnnnnnnnnnnnnnnnnnnnnnnnnnnnnnnnnnnnnnnnnnnnnnnnnnnnnnnnnnnnnnnnnnnnnnnnnnnnnnnnnnnnnnnnnnnnnnnnnnnnnnnnnnnnnnnnnnnnnnnnnnnnnnnnnnnnnnnnnnnnnnnnnnnnnnnnnnnnnnnnnnnnnnnnnnnnttcattggattctttctagggaaattcatcttgtagagcaaagcatgcagagtgctatttcnnnnnnnnnnctcttgaccagaagatttgtttacctaccatttcattggtagtatggcctgcggtgaccatttttttgtgtgtgtacagcgtcatacaggctttgcctttaatgatctcttatggttagaaaacacaataaaaacaaactggctactggacaaattgtatattaccagatcatcactagcagctttcagttgcacttcagtcctttatcaaattcataaagaattgttctgggaagtgaggagcacctctgcctggccaccctgtctgggaagtgaggagccccgcttcccgcgagccgccccatctgggaagtgaggagcgcttgcctggccgcccaactgtctgggaagtgaggtgtgcctgtgcctggctgccgcactgtctaggaagtgaggtgcgtctctgctgcccgccgccccatctgggaagtgaggagcgcctctgcccggctgctgtgcaatcctgcaagtatgaagtgacagccttgtgtgtgatctttctgccctccccaagtttgcattttcgacattaaaatttactttttaattaaaagttttaaattggagaattnnnnnnnnnnnctaatttcagcttattattactagagatgcatgaaagctctacccacatacatgctaggaaaaacagttcagaaaacacaggggactgactcttccaaaaggagcagctgtctactctgcggcctgcttccaagggccactgtgggaggaagcctgggctgcagcgttccgaggcagcagcagcagaggggaaggaaggaagcaggccttgccttgtgtggcattccagttccctctcccagcaggggccagattccccttccttagcttcaactacaatttggcgaaagcaattctagtgtaatcgggggcagtgaggggtggggggcggtgagaagtttacttccctctgcttagataacagaggtagaagaaaccctttctgtcaattgcttggcctctaaatgccacaggcaggctacttttcatggctgttcgaagcatccaagcaatccaaagtggctttgaacaacagagtaaggccaagaagggcaaaaagggaccagagctgaggtgtttgggccagttctggatcactcatattgttgagggaggggtgggggcataagataacaaggagcctacaggccacttgaggaaattctctggttttgctgcagcttcgcttcaaacttccacagcagaagagttggaattctaatgccgcaatatcgttgtaataccagggattctctagaggcaagttaaggctttctgggcaaagaaaacaattccagatgatattgtgatagaatgctacagtgaaatgcttcttaatgactctcctgtcctgcctaaaggacaaagacctatgagtgacttcaacttgacgtgatgtttcagtgatctttacttcagctctaagtcagaatcaatgccacaggaaaagaaaagcttcttacatctcagacatctgcttgctgagcaaacacaaacaagaacacatgtattgtttcccaggagctggcaaactagatctcaagtcacacagttacaaagagagctctcattcagatgccgggcatataagctcagctacccagaaagttcagctttaatgaagactgtagttttagaatgaaagcctgagcaggaaggatttctgccctgggaattctcaatgctctgcctgagtcacactggaggatggagataggctcctcattccagcggccagcagctgccacagtcacaagaccaccctccaaacagcaagggtcttacgatgacaacggggactctgaagagaagccagtcaaagacacagggctttggacaagatcaagggtcttcaccaggaaagcttaatgcagaagccccctccctccaagtcccctcagcgtgagccttgagccttgacacagctgtttccacctgcaagggctggagaggccaagttcacgcagatgttcagcaatgttcaagcaaatgatgtgtaaatagatgaagtggtcttagagatggtctaagaggagggaacaggctcagagaggtgaggtgatttgcccacgatccaatgtgaattagagaccattaggacacgaactcaggtatatttccactcttacggtgaatcataaggttcccagtaagtgtaaaatgctgcagagaggttaaaagaatattgtaaccaacagctttctgctttcattctgctctggaatcatttgtgtaaactcacagcaggaaaagataacagttttcttcaagtctgttaaactcacttctaacataaaaacattaaagaaacttgacaccattttttgagtcagttaatcctaatttgactggaatcagttacttgtaagtgtcttcaaattgcttatgagacacggagtgctacaggagagatgtgggtgcttctccccattggtttttaacatattattcctgcaatggaattgtccagattgatgcaatttatccaa

SEQ ID NO: 240409 - DNA, 1290 bp, Homo Sapiens
  misc_feature (1046)..(1057): n is a, c, g, or t
ttggcgcagaggccgtcacgtgggtcgccgaggctcgcaagtgcgcgtggccgtggcggctggtgtggggttgagtcagttgtgggacccggagctgctgacccagcgggtggcccaccgaaccggtgacacagcggcaggcgttagggctcgggagccgcgagcctggcctcgtcctagagctcggccgagccgtcgccgccgtcgtcccccgcccccagtcagcaaaccgccgccgcgggcgcgcccccgctctgcgctgtctctccgatggcgtccgcctcaggggccatggcgaagcacgagcagatcctggtcctcgatccgcccacagacctcaaattcaaaggccccttcacagatgtagtcactacaaatcttaaattgcgaaatccatcggatagaaaagtgtgtttcaaagtgaagactacagcacctcgccggtactgtgtgaggcccaacagtggaattattgacccagggtcaactgtgactgtttcagtaatgctacagccctttgactatgatccgaatgaaaagagtaaacacaagtttatggtacagacaatttttgctccaccaaacacttcagatatggaagctgtgtggaaagaggcaaaacctgatgaattaatggattccaaattgagatgcgtatttgaaatgcccaatgaaaatgataaattgaatgatatggaacctagcaaagctgttccactgaatgcatctaagcaagatggacctatgccaaaaccacacagtgtttcacttaatgataccgaaacaaggaaactaatggaagagtgtaaaagacttcagggagaaatgatgaagctatcagaagaaaatcggcacctgagagatgaaggtttaaggctcagaaaggtagcacattcggataaacctggatcaacctcaactgcatccttcagagataatgtcaccagtcctcttccttcacttcttgttgtaattgcagccattttcattggattctttctagggaaattcatcttgtagagtgaagcatgcagagtgctgtttcnnnnnnnnnnnnctttctcttgaccagaaaaagatttgtttacctaccatttcattggtagtatggcccacggtgaccatttttttgtgtgtacagcgtcatataggctttgcctttaatgatctcttacggttagaaaacacaataaaaacaactgttcggctactggacaggttgtatattaccagatcatcactagcagatgtcagttgcacattgagtcctttatgaaattcataaataaa

SEQ ID NO: 240410 - DNA, 801 bp, Homo Sapiens
gtgctcttcttcctgcgcatagacgctcggacaaggtcagagccgaagtgggcattgtggtgccgctgggagcgtgcttcctggaaccagtcccctgtcaggatcttcagctgcccagggtctgccactgaggcccggagcttgctgacccgcccctcctccagctggcgcaggcgggcatctcgttggaggacgccagcaatggcctcctgctcctcctctgtcaggaagctgaggtccaacagtccttcagtctcaggctttggcccatgcgccatggggagggagggcagagcccaaagcccctcttgcgatgggtggcccctctggggcatcagctggggctgtgccccagctgggcacacggagcttcctgggggcagaccgagggtcaggtcaagccctgcacaaatgcttggcacatcctagaaccaacagcccttttctccccaaacacttggccgggtatgggtagggtgccaccccaggatggctgagctcaaggtggggtgagagacactcatgcacacatgcatacactagcccttgaacacacttggagacacagtggaagaagcaagagacacacatgcacgcaccctgaggtagggccacacaggactgcagcgatggaacacacagacacatgtgcacacgcgggtccatgtaggcatagatatggtcgcacatgcacacagacacctgcataaagacaggcgcatgcacagctgttcccccagaaagggccctctgcagacacagacccggacccatgcccacgagagacatgcacacacattc

SEQ ID NO: 240411 - DNA, 2401 bp, Homo Sapiens
  misc_feature (235)..(250): n is a, c, g, or t
ggtttgccagaacaagtttaaagtggctgtttattaagtttgctattttcagaattgaaactataagaccgccattttgacacctgaaacttgcgtgaatcctaaattgcatcaattatctattttgataaaagcttattctaatttaaaaccttatagagtaagagactgatatatatagcagtcttaaagatcacgtcatctgccttacattagtccagtcacgtgcttcgtnnnnnnnnnnnnnnnnttacagtaacaaagcacaggactacaaaggcaaaacatcacagcttctgattacattgaataaaaagtaccaagaaacgcaaatgataattctgtattaatactgatgaattaaagagctataacagacatttcacagcatgctacatatatcgctcacaacttaaggataaatgtctaacattgaaagtcaagaagttggcaatctgatttcatgtgcaattcagctacagtcttaatatatacattcattatgtagctgtcctgcaaaaccaggattttttaaaaagagttttcaagttcaacttctatttcataagttaaaagatgcgtccagttcttccatgaccaggaaagttattttcaggcttaaaggagctaatccaagtagcaaggccatgttgcaagtggacctgacagggttctttataaccttgctgagactgtgtatgtgtatgtgcctatactagtagcactgagaagatgccaaactggctgtggtttgctttctatgtctcttattttgggttgaaaagagtaaatgtgaagagaaagaggaaggggaaactgtattttctctccagagaagactaaataatgcaaaggaaatatctgcactagatatatagtttggatcactttccttggtgaacaagggtactatttaactcttttaccttagagaaccagcgaaattcagaaagcggaagtctctcaacattacaaaggaaactccttggccacccaactaatacatttcttttttcttttaatccttccttatcagacttggggagccagttgaaaatgtgtaaagatattaatttaagaaagagatgtataataagttttattctgtaagtttcataatgtatgcacttaactaatcaggatttgtgaacaatattttaacactataggccagagagattctctctgatattctttcggtagaaattatacattcatttttttaagaggttaacttgaggggtgcaagaaaatagactgttctagcaaaatttacataacaaaaattctattcatcttatttagacttactaatgtttgatgttgtcctatgaactgtaaaattgggtatctgttctaaaggctattttgtggtatgccctgcacgatctcaaagatttccacaagcattcaaaagaatcagatattcattctgtttcccccccatatatataatttttcattctgtacttcatggtggtacagtcataattaggttaaagctaaaatgaacacttcatggcatataatttaatacaaaccgcctcattcagtctccattattaagtctcatttcttaactaggatgtcaattcattcctgagccctgaaaggcatttattggatactactatcaggttgagttgttcatgaatgagatggaaaacaaccaaatactacaagaaataataataatctatactttcaaatgggatggttcatcaggtcagacaactgtgtgcagtgtcccatgttagaaacctgacataattttacatttatgaacaacctcaagtgcacctagctggagagaagaactattacatcttcttcctctttgcatttcctcttccttctggatatacccgaagtgcggctaggagaataaagactacaaagtcaatgcattttcttttcatcccatggaacattttttttcctcccataagaacaggataggaacagaggttagaggcttagtctaacccaggaaagcctggttaaacccttatgtacccaattttgtgttattttatctatattttaaatcatatgggcttctgtgatcccataggaccatctaaataccctttgccatatgtcattctattagaaatgtgtttcaaggcccaaacaccaccaataaaacaaatgtctggaacccaccctatttgcataccagaaatttcccattccactgaagggttacaagtcattctggattgctggagaattttaactttacattcaaatagcttggactaacaacagtattcattcataacctaatacaaatccaagttaggatggcaattcaatcactttaaaatcctgttatatgctaaattctgaacgatagaaatagttcaatttctgtatcatgtataaatataaagtccaa

SEQ ID NO: 240412 - DNA, 488 bp, Homo Sapiens
  misc_feature (94)..(119): n is a, c, g, or t
ggaggatcccgtgccgccgcacgtggtcggcatggcgcttggtttcctcccagctcagcggcgagccatgggacagcagccccagggccgcccnnnnnnnnnnnnnnnnnnnnnnnnnngggaaaacggcggtcgcccgctccgggcgcgagacggacactcagccgcccgcagaaggcggctgccgctccaccccgcgggggcgctctcgggccgcagtcggcggagggagggtcctgcccgctccggctccccggcggcggcccctggcgcccaggtgacagaccctgggtccgacgcaccgcgcggaggcgaaggcagaagaccgagagcaggcgggacggctctcggcccggcggcctcgccctccccgctgctcctcctcccgctccgatgcggcggcggcggaccccacggccgcgctgccgcggcggctcccgcttctttttgccggtctggtgcactggcttagttcctacttgtgccaa

SEQ ID NO: 240413 - DNA, 1088 bp, Homo Sapiens
gactgtggatgaaagctttaaaactttgcgggcaaaatacagaatgaatttcagtgagttcccatgtattaaacaaggtggcgctggctggagacatgctgtccctgtgcccacaggagtagcagtgctgtgctcatcttcctgacccgctcttcacagtcttcaccgcctttcttcaggagtctcccctttggcttttccacagctatgaaacccacgtagtcggacaccctaatgcttctcctgtagggtgtgtgatgaggaggtgagctggctttggagtgctgggaacctgaggaattgccaaggacccagagcccagccctgaccacccagagagcccaaaacacaatgaacaaattgaatttccacaacaacagagtcatgcaagaccgccgcagcgtgtgccttttccttcccaatgagaatctctgaacatcatcataaatgtgagtagatctcaatataattctgatagctggaggatagtgtattttcaggtttgctggagggaaaaaactggactttaaataattaagacaaaatgattgtattaattgacttctattcttaatcactaatttcattttttatatttcccttgacttttgggggagaaatagtctttgtctcaaaagtgggcttcagtgacctatgggtttgataaagcaaccagagataatgagacaagaatatttaatggcaacatgccagcaattattattagttaattgaaagcgtttatgattttggcctggggccaatgctttccccctctgctggactaacatgtgggtaaaggagaggaaaagctttgtttcactttttaaataaaagtattacgtaactttgaaatttgtataaaattaaaagatagtaaaaacaactattctaacagaattcaaaacctgttatgcttcagtggagagattattcaagataagtccgtgggaaattgggagtacatttctactggcaaagttagtgataactatgcacttctgacaaaatgtgaaatggggggtatgggcgtgtcatatcaccaacttttttgtacaaagttggccattataagaaaagcattgctc

SEQ ID NO: 240414 - DNA, 1367 bp, Homo Sapiens
aattagtgaaaattggagataaaatttttattacttgtatacaaaattctgtcaaaaacctgacaaattaaaacaatacaattaatatgtttaatagaactaattacatatgagaggcatccaaaatccattttttctatacaaacatggtttgatatacagtcattttatctgtgtattaattggtttatgaaataacaaatagaaaaatcaagtatgcattatcaagttaaagaagcaggagagatggagctataaaaacaaagagagaagaatgttgtaaggagggcttaacaaccaggataaatgttgtagaaagatcaattaaagtgatggcctagagatcacgggcttcctttggcagagccatgttggtgaagtgaaggaagtggaagccagaccacaatggttgaagaatgaatgtaatgtaagagccaagacatttatttgagtctgatagtaatgaaaaaggacaagaattttcttcttgctgttgtttttgtcatttcatgttcaaaaccctttatctcccatgtggtactgaaaactccaagatgggatctctgtttctgtgaggcctgtagtgcttagtacatccttgaatgtgtgaggctctcattggtataagtttaattcctgactgtggatgaaagctttaaaactttgcgggcaaaatacagaatgaatttcagtgagttcccatgtattaaacaaggtggcgctggctggagacatgctgtccctgtgcccacaggagtagcagtgctgtgctcatcttcctgacccgctcttcacagtcttcaccgcctttcttcaggagtctcccctttggcttttccacagctatgaaacccacgtagtcggacaccctaatgcttctcctgcagggcgtgtgatgaggaggtgagcttggctttggagtgctgggaacctgaggaattgccaaggacccagagcccagccctgaccacccagggagcccaaaacacaatgaacaaattgaatttccacaacaacagagtcatgcaagaccgccgcagcgtgtgccttttccttcccaatgagaatctctgaacatcatcataaatgtgagtagatctcaatataattctgatagctggaggatagtgtattttcaggtttgctgcaggaaaaaaactggactttaaataattaagacaaaatgattgtattaattgacttctattcttaatcactaatttcattttttatatttcccttgacttttgggggagaaatagtctttgtctcaaaagtgggcttcagtgacctatgggtttgataaagcaaccagagataatgagacaatgttatatatggaatggcaacccaacttttttgtacaa

SEQ ID NO: 240415 - DNA, 1563 bp, Homo Sapiens
ctttgtacaaaaaagttggctttattttacattggatgaaatctatgaacatatatacaatgtaaagcattgtttgactctttattataactagacactgcattgatttaaaagtagcaaacaacctgaaattaagtattaacctgaccttccatcgatattcctctggaaataggtaagtcctgagtgcagatagttgatgtttcccaagctgaagcttgtcctatagcaagcttgcttgcagctgtacttttagttcaagatgacaaaaaataaatggcatgttgacactattcctttattttactttagggtttttaaggtgtgtatatcttaggtcgtaaaacagtggtatattgcattccaaagcatgttgaggtgagggcaaattggctgtgttttgctccacatctccctgcacatctccctgctgtggttttgcacttcggtgtggagaggattgagaagtctgtggggacacattagttctgtggactgctggtaacacttccagtgaaacagcatataatggataaatgtttcccccctctttcacggttttctcactactttcacctgagaagactgaagcaacgtatgtaaacaaatgaaaagtcatcacaatcagtttaattaagtgcacagaatagcaatcaatcatcagtcatgtcaataaaaataaaacaattatttttacatcaagtgtgctttatttcctccacaggtattctgttaaataaagcaccatttatatactgccaggccacagctaaagaggattctttacagaatcaaatttcttgtggttgttccgtatacaagtaaacttaattttgataataagaaccacagcgatcggaggcaatctgcctctataaggtacaaaactggcacagaggacaccatatcatacacagtaaaaatgctgtaagtttaaattacattgtacagggctaggcaaccctgttcttcccagacagccatattaaatgaaagccactaaagtgaactcttaattacataaaacatatccattatctgattgccctttaggaagtatactgaagatgcaagtttttttcatctggagttctgcctgaccaagaattaagcctataaatctatcttgccattcaagcagagagcactggacaaactgaagcacaaaaacaaataagcaaaacttatacaaacagcatgggggttgggggtgagggacttaaaagtagacatgctacacctaatgtcaagaagcagcttggtttcctttgccagatatccttgtgacgacatggattgtagattcaatggtcctacacagggtatctaaaatgtcatgttgctgcatatgactaaagagtcctctggaatggccacaactgagagataaagcaacctcagggtcctgggagggcaaagcttggccatcacagcttctcaagtcagctaagtcagacagaactgcagagatagaagtagaagggaactcagattcttcctcggctagggtagaatccttggaacagtggaggtctttaaattcccaacttttttgtacaaagt

SEQ ID NO: 240416 - DNA, 1587 bp, Homo Sapiens
tctgcctggcagccaccccatctgagaagtgaggagtgtctctgtccggctgcctgtctgagaggtgaggagcgcctctgcccagccgcccatcatctgggaagtgaggagcgcctctgcccggctgccctgtctgggaggtgaggagcgcctctgcccagctgccccgtctgggaggtgaggagcgcctctgcccggccgcccatcatctgggaagtgaggagcgcctctgcccggccgccccgtctgagaagtgaggagtacctctgcccggccgcccatcatctgagaagtgaggagtgcctctgcccggccacccatcgtctgggaggtgaggagcacctctgcccggccgcccatcgtctgggaggtgaggagcgcctctgcccggccgcccatcgtctgggaggtgaggagtgcctctgcccggccaccccgtctgagaagtgaggagcgcctctgcccggcagccgccccgtctgggaagtgaggagtgcctctgcctggccgcccatcatctgggaggtgaggagcgcctctgcccggccaccccgtctgggaggtgaggagcgcctctgcccagccgccaccccgtctgggaagtgaggagcgcctctgcccggctgccccgtttgggatgtgaggagcgcctctgcctggccgccaccccgtctgggaagtgaggagcgcctctgcccagccgccccgtctgggaagtgaggagtgcctctgcctggccgctgtgcaatcttccaagtgtgaagtgacagcctttctgcaggtgtacccaatagctccgaagagacagcgaacatcaagaacgggccatgatgacaatggcggttttgtcgaaaagaaaagggaaatgtagggaaaagagagagatcagactgtcactgtgtctatgtagaaagggaagacataagagactccactttgaaaaagacctgtactctaacaattgctttgctgagatgttgttcatttgtagctttgccccagccactttgccccagtcactttgacccaacttggagttcacaaaaacatgtgttgtctaaaatcaaggtttaagggatctagggctgtgcaggacgtgccttgttaaccaaatgtttacaagcagtaaagttggtaaaagtcattgccattctctagtcacaataaaccaggggcacaatgcacagtggagagccgcagggagccctgcccttgaaagcagggttttgtccaaggtttctccccatgtgatagtctgaaatatggcctcatggaatgagaaagacctgactgtcccccagcctgacacccgtaaagggtctgtgctgaggcggattagtaaaagaggaaagcctcttgcagttgagatggaggaaggccactgtctcctgcttgcccctgggaattgaatgtctcggtgtaaacccgattgtacatttgttcaagtctgagctaggataaaagctgccctgtggcgggaggcgagacatgttgcagtaatgctgccatgttattctttactccactgagatgtttgggtggagagaaacataaatgtcgactacatgcaagtccagtcatatccaa

SEQ ID NO: 240417 - DNA, 685 bp, Homo Sapiens
tgtgctccagccttccaggaggtcacagtcttaggggaagcagtgcaatggaggttggaagcaggggaaccctttactgaaggctgagcgctggctggcacactaggcctggcagcactggagggcaggcagggaaagtagggtgggtaacccagcctggcaaatgcacggcagctagaaaacctcttcaggttctggggtggctgggccatgagaggggaggccaggcagggctgtcaaggtaaccggggtcagatcatggagttgcctgccaggctccacaggagtcggggacagaagcagagcaacccagctaccagccgggccctgagctccctcagggtgaccagggaggagctgtgactggctggggaggcagggctggggccgaggttccccaggacgacaggagccactctgcccggccagccgccccgtccgggagggaggtgggggggtcagccccccgcccggccggccgccccgtccgggaggtgaggggcgcctctgcccggccgcccctactgggaagtgaggagcccctctgcccggccaccaccccgtctgggaggtgtacccaacagctcactgagaacgggccatgatgacaatggcggttttgtggaatagaaaggggggaaaggtggggaaaagattgagaaatcccaacttttttgtacaaagt

SEQ ID NO: 240418 - DNA, 958 bp, Homo Sapiens
ttggcaggttaccggattcgagtcagaagcggcggcaggtctgaacgcttcgagcccaacacatacagctgatacacgcagaccagatctggtcaggtcctcggaagctgagtccagagcgatgctgctgaagacagtgctcttgctgggacatgtggcccaggtgctgatgctggacaatgggctcctgcagacaccacccatgggctggctggcctgggaacgcttccgctgcaacattaactgtgatgagggcccaaagaactgcataagtgaacagctcttcatggagatggctgaccggatggcacaggatggatggcgggacatgggctacacatacctcaacattgatgactgctggatcggtggtcgcgatgccagtggccgcctgatgccagatcccaagcgcttccctcatggcattcctttcctggctgactacgttcactccctgggcctgaagttgggtatctacgcggacatgggcaacttcacctgcatgggttacccaggcaccacactggacaaggtggtccaggatgctcagaccttcgccgagtggaaggtagacatgctcaagctggatggctgcttctccacccccgaggagcgggcccaggggtaccccaagatggctgctgccctgaatgccacaggccgccccatcgccttctcctgcagctggccagcctatgaaggcggcctccccccaagggtgaactacagtctgctggcggacatctgcaacctctggcgtaactatgatgacatccaggactcctggtggagcgtgctctccatcctgaattggttcgtggagcaccaggacatactgcagccagtggccggccctgggcactggaatgaccctgacatgctgctcattgggaacttggtctcagcttagagcaatcccgggcccagatggccctgtggacgtgctggcagccccctc

SEQ ID NO: 240419 - DNA, 1464 bp, Homo Sapiens
  misc_feature (159)..(245): n is a, c, g, or t
ccaaagatgaatgcttgaatcactgcccatattctacttttacaatgttattcatgaaaaacaagaaaaacaaatagcaatgcttctttttcatctcaaatgcttgtaggcatatctatagcataaattctcaggagtgagactcctggatcaaaactnnnnnnnnnnnnnnnnnnnnnnnnnnnnnnnnnnnnnnnnnnnnnnnnnnnnnnnnnnnnnnnnnnnnnnnnnnnnnnnnnnnnnnngtgaacctacgtttccacagcctcacccacagaatgtgtgctcaaacatttggatttttgcccatctactaggtgagaaatggtattgatacagttacaattttcatgcgtctcattatgaatgaagtagaatatattttcatatgttgcagagccttgtttctcctgtgaactttgttcatactctttgtatagtttccagctggttggtgtagtagttgtagttggcactgccaactacgagttcctcttggcggccacctctacaagctgaaagctggtggtatgaatgctggtacctctttgcctgtgggcctttttccccctagacatggtggcatacacaataagtgtgtaggaaaagccagaagtgccacaaagttaatgtcttggaagcatctgtattccaatgttaagcaaggatttggtggatgaaaagcacagtttcctttccccttgatgggaataactcttagttatatctgacactgtcttccagactttcccagcaaaactgagctccagttgcccagatgggtaaccagcttgaaaattcatactttattccttccctgctctgtctactttactactccattcccagtatctaataatttgatgatttttaacttccagtataaactcttttacaagaagccttgcctcaggatcggtttttagaagtgccaagccaagccaggttgttaggcctacgtttgagcactgtgcaaagtgtggtctgcccgtggtgctggcttgtgagctgttttttaccagtctgtgataaattcagaaattggggtgaaaagtttagaaacttttatggcaatttgatgttgccatcacatttaagggtgtgattttgtgttttacagacatatgcattgatttgtaatgaactggaaaaaaatgaaacaaaaattactggcccccatctctgatagttggtgaggcactgctttaaatgatcacactaagaaaaatgggtagaagtacaactagggaaactttggttatctacagagagaactccctgataatttcctggagtgcctaaaacaaaagatttcctgttggtgatggtcaatactccatcatgagaagagttaagcctgtagaaggctagctataacagactctatagaaaattcctgcatttggtagcagatctcttctgcttttttattttctaaaactgacaaataacagttgtacccaa

SEQ ID NO: 240420 - DNA, 1074 bp, Homo Sapiens
ttgggcaagtacttccacttcttccctaaatgcgctttgtgtgttttccacctcagtagccttgcacacatcattacttctgcatccttctttgtgaccaagtgaatacctacctacctcttaggactcagcttcagtgattctgttttcataggctttttaaagcccttttcagtcaaattagatgctcctttgttctggtcctttactcttcccctcccatgttgtcgcactgatcacactgctttgtaattattttctttattgttggtaaactccatattttaaaaatttacctgtatacatagtgcttaatgcatggtaggcccttagtaatgtttttgaattaatgaggcatgattctaaatgccaaactttgcacaaaaagttgttgctattggattccaaactgctatgccctctataccagtggctgacaaggcatatagggatatatgccatcctgagaggagtaaagtgtttagattctgaacctgagaaaagagaactttctcttaagaagttggaaacttcattttaccttcgtgaccctggtagaccacttggtctcactggttggtacaattatgagggtagtactgggtgctttttatacaactttccatcccccacacagttggagaataatttgtagaccatggcagttaaaatgctttttactctggtgtattatagaataatgaacacatttttatatatgttaaagcctgctaaatcattcacttagaatgaagtaacctcaaggtaccaaataccccacataaggaaagtactacactaaattcactcaactattgtatgcctaccatatgccagattttatcctagaccctgaggatatagctttttaaaaccccctcctgtttcagagcttatattctagtggaggaagttagacaagcattttaagtaataaatgtatagagagtgtcaagtgatgagtaccatgaagaagaataaatgagggtaacggctagtgtgatagggagaggggtgggatgccatcatatttacgggtggttgggaactgtctactgctttagcatttgtgtc

SEQ ID NO: 240421 - DNA, 916 bp, Homo Sapiens
gaaagaattggcagccctgtctacactggccctctctcaggtgcatcataacctattccattcaggcttttgactctcagcacttaggggcagttatgcttggcatagtttccaaaaacttccatttgccaaatctaaaagtcagtcttctgttctcatcttgaaaatgaattattaaattatgtatatttgggcggaggcacttgttttccctttgaagtcagggaccccctgttttataccctatgattattgttaatgtttctgtttctctcagttttaagacaattatctcctatattgatgagcaatttgagaggtacctgcatgacgagagcggcttgaacaggcggcacatcattgataatagggtgcattgttgcttttactttatttcaccttttggacatgggtaagtaattgtttatcgtggagaaatgctttactacatgggtttgtaagttttacccaaactgtgtattttaatataagaattaagataatttgagagagaagagttttgtatgtattttttttaaataagtgacaattctaaaattaattttagacttaagcccttagatgtggcgtttatgaaggcaatacacaacaaggtgaatattgtgcctgtcattgcaaaagctgacactctcaccctgaaggaacgggagcggctgaagaaaaggattctggatgaaattgaagaacataacatcaaaatctatcacttacctgatgcagaatcagatgaagatgaagattttaaagagcagactagacttctcaaggctagcatcccattctctgtggttggatccaatcagttgattgaagccaaaggaaagaaggtcagaggccgcctctacccctggggtgttgtggaagtggagaacccagagcacaatgactttctgaa

SEQ ID NO: 240422 - DNA, 943 bp, Homo Sapiens
tttgtacaaaaaagttggctcaactggtctccaacctcaagaaggagggttccacccacaattggcaacacatcaccgaccaaattggcatgttctgtttcacagggctaaagcctgaacaggtggagcggctgatcaaggagttctccatctacatgacaaaagatggccgcatctctgtggcaggggtcacctccagcaacgtgggctaccttgcccatgccattcaccaggtcaccaagtaatgtccctggtgcgaggaaacagagacaacctttctgtcttcagcctctgctattgagagcttcacacagacaatgagagagggtggatggtggtgagtggatcatttctttcagccacagtgtgtaacactcagcatttgaatgtttctcagaaaagaacatgtagtgacacagggcagaggcatccatggctggcgtctggaatattaaaccaaactctccccggtccttttttctccaacttttctcaaagagtttacatgtgcaagaaagtcatcgcaccaaaaaacctgtcaattatgccattgcaatatttcagaagctttaactgaagtgtcaggttcctcgtgagaaacagcacacgttagaggctttgagagaaggcctagttctgtcatgagtagtcggcctcgtgtctgtcctcccatcttggaacaaccttatcaacaggccgcactgcaaaaatgatgttttatgaaaaccaatgaggctgctgccactccagcaagggaaataatgcagtttcctgtcttatttaagaaaaagagaaggctctcttatctcccttgtcattgccgttcttttccttacacgcaaagattttttaactattgcagattttcatcccattctactgcttgattgaccatcaaactccatcctatcgagatttatttaagaatgaagacataattttc

SEQ ID NO: 240423 - DNA, 1059 bp, Homo Sapiens
ttggctattcttaaattatcaacttttgatagataatatccttgttttctgtatcttgctttgatactgctttcaaggagataatctcattaaagcattttactaaaggccagtatagtgaatgtaatcacttttacacagaattgtgtcagcatgacaaatgtgactactgagacatcattctgttaacattaaaataagtttgtaggtggtaatggaatatgtggcagttaacgatcatgagctaggagagtggaacacttgctgtctttttcatagctagtcataggtccttagcgtgtagtgatctttattatcttccaaggtgaagaaaggaaaaggctcgtatgttgagaagcataggaacttgagtcccgcaggtgttcaagtgggctaggctggtgtgggttttcagatgatcattgagtttttctcccaaatttgtataggcactagcacagtaatcctgtgcacttaaatctggcagcagctgtcaggggtgatgggctggtatggggaacccctcagtccccagaggagggtttacacaatattgcagggggctgttgccctggggttttcaagatgcaccattttatctcctagtgctgggctttgacaaacttcctctgtggggtaccatcctcatctcggtgggatgtgcagttttctgtgcccttatcgtctggttctttgtatgtcccaggatgaagagaaaaattgaacgagaaataaagtgtagtccttctgaaagccccttaatggaaaaaaagaatagcttgaaagaagaccatgaagaaacaaagttgtctgttggtgatattgaaaacaagcatcctgtttctgaggtagggcctgccactgtgcccctccaggctgtggtggaggagagaacagtctcattcaaacttggagatttggaggaagctccagagagagagaggcttcccagcgtggacttgaaagaggaaaccagcatagatagcaccgtgaatggtgcagtgcagttgcctaatgggaaccttgtccagttcagtcaagccgtcagcaaccaaataa

SEQ ID NO: 240424 - DNA, 1190 bp, Homo Sapiens
  misc_feature (322)..(334): n is a, c, g, or t
ggggaggttgtgtgtgggggagggaattgcctgtcggttgcaaggcgagtcctttgctgagccccagcctgagacccagcttatgggctttatccaggtgagaaaatgctggggacatgtgtgcgaggttaaggtctaccaggaaggggagaagggtgtcaggggaccagccccacaacctaggagaggattaggagggtccagccctttgggcagggaccagcttgaggcttaaatgaacttgcataggcacctgtgtatgcatctctgtgcatgtatgcatacatgagtgagagagaaagataaagagagctaaagaggnnnnnnnnnnnnngccgcaggctgccacacgtggtgcgatccgattctctctggaaaggaggagagtctctcatgcatgggtgaagttgggccctccccagaagcctagtgactcattatgttaacgtgtgggtgtgggggctggacatccttgggaagccctgaggggctgctgaagcagggttcctggtctcctcggaggctgggcctcccctcgctgggggctcacagaaagtcaaacagcccgaaattcttggctgctccaggcccagggaaaattgggggaggaaaaaagaaagaaaagaaatgtttcaggcctggaggtgagatgagcctgctggttagtagggttaggggtctgaaggaaccagcacgcagggcaggcatggggcaggggtagagcagagatgctccctggaagccaccagctgctcaggcaactgagggggccctctgggcctctgatctaggcacaggcagggatggcatggatggctattggaggcgactacagctttaggttgcaggactgaggcagcaggcagggggatggttagtaggggcagatgaagcaaatatattttggtttcagtaatgtggggtaaagtcaagaggtttgcacacgtgcctgatggggtggggttaatagagggatgatgtagctgaataaatggtgaaagggagctaaaggggaaacgagagaatgagggagtgagcgtgccaccaaggtcattgctggggtcaactcccaaaatgggggttgcagaggggagtaaggggtagcaccaacaagtctggtcccagagacaaaaggggttctgggaagtcctgcgcagggattagtgggcagaggaaacgaactggtccaa

SEQ ID NO: 240425 - DNA, 876 bp, Homo Sapiens
tttgtacaaaaaagttggcttcgcttcccctttcgggtgtccttactcacatagacatgccacctacccttaccgagtgtgctctgtgaatcctccttcagccatagaaatgcagttgcgaagagtattacatgatattagaaactcactgcagaatctttcacagtaccctatgatgagaggacctgatcctgctgctgctccatatagtactcagaaatcatctgttctacctctttatgaaaatacttttcaggagctccaggtaatgaggcggagcctgaatttgtttagaacacaaatgatggatttagaattggcaatgctgcgtcagcaaaccatggtttatcatcatatgactgaggaggagaggtttgaagttgatcagctccagggtttgagaaattcagtccgaatggaacttcaggacctggaactgcagctggaggagcgcctgctgggcctggaggagcagcttcgtgctgtgcgcatgccttcacccttccgctcctccgcactcatggtcactgaactgatgcaggagcagtcatacctgaagtctgaattgggcctgggacttggagaaatgggatttgaaattcctcctggagaaagctcagaatctgttttttcccaagcaacatcagaatcatcttctgtatgttctggtccctctcatgctaacagaagaactggagtaccttctactgcctcagtgggcaaatccaaaaccccattagtggcaaggaagaaagtgttccgagcatcggtggctctaacgccaacagctccttctagaacagctctgtgcagacacctccagatttggaaagttctgaggaagttgatgcagctgaagagccccagaagttgtag

SEQ ID NO: 240426 - DNA, 1907 bp, Homo Sapiens
  misc_feature (52)..(68): n is a, c, g, or t
  misc_feature (229)..(268): n is a, c, g, or t
  misc_feature (1473)..(1517): n is a, c, g, or t
ttggctcaatctggaatgtagattctgagcacaaagcagctcagttaacctnnnnnnnnnnnnnnnnnttcccatcacctgtctcagtagggcctgaaaggagagaagtagtgtggggaacccctgctttggtatggagagtcacggccccttgacccagaccgagaccgtgagtagccatagctggtgcttctctcaggataaactcggatgtaggaagtttcacccnnnnnnnnnnnnnnnnnnnnnnnnnnnnnnnnnnnnnnnntcagagccagaagaataagcaaaccaacatctaacaataatagttaagtattgagcacttactgtgtactctgtgcctggcatgaggctatctcattaaaccttcataacattatgaggtaggtactcttactatcccatttcaagaatgaagaaaattaagacttaagttatatcatttgcccaaggtaacacaataaatgccaatttgacatgttgatactcaattaactatgataaacaatatatctgaattactgccattgacccccctcaaagctaagaactggaaaggatctcaggggtcatatagtttaatcccctgccacctcatgtatgcatctttggatgggcatctatggaaggagctagcctgtatttaataccttccagatgtgaggacctgagctagatgctttagacgttatcctcttgctctagattcctggcaagtcttgtgatggtgctattatgtgaccattttgcccatgaaggaatcgaggtcccaagagtagttcaggtaaggaattaataagcagcagaggagtcatgtccaggctggcttgtccccaggccctctgccttcagccaccattctcagaagatccaaagatgccaaggggaaagaagccggatgctttttcaccttaggtgaaagtcagtaattggagttaccctttctgaggccctgctttgcagtataactgaggatcaggtgctgttctgtttctgcttcaaattcaagtcctagaggacagtctgaacaaaagcatcattaaaccagggaaggaccaacctctaagccaaaaactaggcaattatatgaatcctcagaaaaagaaatgagcccagagacctgtgtccccaaacatccgtaaatctcatagtaaggcaggacaggataaccagaaaaaaacaatgtccaactggtctggtttctggtctcaatggtaccaaagggatagtcaccacctcaatcaaactgagatccaaaacagcagctgctttcctacaaggaaagacatcaagaactactgagtctgaagggtgacataatcaaccacaagaaaatgttacggtttagcctggcacagtggtgcatgcctgcagtcccaactactggagaggctgaggtgggaggactgcttgggcccaggagttcaaggtcagcctcggcaatataatgagactctgtctctaaaatcnnnnnnnnnnnnnnnnnnnnnnnnnnnnnnnnnnnnnnnnnnnnntcatgatagctcaggtttcagagaggatgctgcactactctgggaaaaaagtgaagtgacagctcagccctgacagcaggacctagaagggctgagatgaagaggctgacctgtagagctcagcctggacccacaggaggggtagttgagttcacagagggatactgccatttaagctggttgtgaatggggtggtatgaagaccgactgcactagtattctctccaggttacaaataccatgaccaaactgtgtaatgtgatactaatatgcagaataaagcatattaaaaaacaaacgtaccatgaatgcatacttctttcagctatgaccctgaaggacttaggcatagcaaattccatggctttgtccacctaagatagatcccaa

SEQ ID NO: 240427 - DNA, 968 bp, Homo Sapiens
gagggattttgactcatcttctagagactgtatacttttttgaaatatccgccatcaatcatcttgttgagaatgtttagatttctctgttttaagtctttttctagacagaggatttcatcctcaagttcagaattggacctgttcagcttttcacaggttgcctccaaacttcgtgcttcttctgctgccgcttctcaaagctggcatcctctaaagatgactctacttcatagccttcatactctttttgaataaggctaaacttttcaagtagtttacatttttcttcaattagtccagaaagcgttgcaccaagtttttgctctcttcccacgtaaagccgactcctaaccgatctaaaacttctccacaaaaaaaggagaacaacaaaaaatccaataacagctgcacataccaccagttccgatggaaaaccataaggattctcatctggtctcatactctcaggtagtgctgccacaactctgcgtagctcctccaggaccagccccaggtagggctgaggggtagcaccaggctcctccatagcgtcgaggctgctctggcggtcaccgcagtaacactggccacaacaagcggtggagaacacgcagccttgggtctggaacccgaatgcgcacgtgacaaccaaccggagcggaccactgtggagcgggctgcggggggagctggggaacgcgggcacccacaggcctcacaggcccatgttgtcccccaccacctcccctggccctcttgttacacttcacatcctgaggcagcgctggtctgagcccggcccgccttagttctggcagttttcacatcacatattttgaagctttattttttggtgaatacacttttaaaattgctgtcttcttcatggattaaacctttgatcattatataatctctggttttggtagttttctttgctttatctgatatgcacacagacccaa

SEQ ID NO: 240428 - DNA, 1194 bp, Homo Sapiens
  misc_feature (978)..(991): n is a, c, g, or t
ggtactttttaaaaaatgcttacccatctattctttcagtctaacactcaatacagaatcttctttaatcttttagacacttcagtatcagtttatcacagctacacctgttctgtaattgttgtacttctactattctcaaagaacattcagtgaaatatatttctctgctcttggaaatcactgtctttaacaggctttactaaaggagtactgatgttgagtgctaaaagcttttgtttcaacagagtgtcttggacaccacaaagttaacgccaaattagttacttaggttcattaagcaacaacactaagtcactttcattggtatatttagttcaggtttacactttagaactactttacctacccgttgatagccagagtaatcccggggagcactgaactgagactgtgtataaccactgtttggagtgttagagaatgaagggcggtaaccatcatatcctcctaaaatttaggacaagaaaagaaataattttcttatcttcacaaggaatttttacttttttattaatgaagacgggaagaactagaaattataagccaggctagttaatcaaattaatctccaatttcctatcttgatccaatctgtttataaatttctgtaagtactaactgcccctcagaagataaacttttaacccatctatgcatgtaaacacacatctgtacaaatataataaacaatccccgtaagttttggtaatgtggaaaatacttatcctccaggagatagtggtagacattaatttgacataaccaaatgaacaaaaattccatgatctgttatttaaataacaaattataccaaatacacaaattgtaccaaaatatacattgtttaaattgcacataggaggctaatgcagatacatccttcccaaaaactgtgtgatatattttacaaatcaaaaaataatttgaactagtaaaaggtcattagaacctccnnnnnnnnnnnnnnacctctgaatccattggcagggccccggtatccattcatcaagcctctagcaccacgggagcctccacgagacacaccacgactattgtaatagggctgattgctacgtggaaatccagtgttctgctgaggaggctgctggtggttaccagtcacttgatgggactggtttggggaaccatggccaacttttttgtacaaag

SEQ ID NO: 240429 - DNA, 952 bp, Homo Sapiens
actttgtacaaaaaagttggtggccggtgccgcggggcagggcgaagcggcctgcgcccacggagcgcgcgacactgcccggaagggaccgccacccttgccccctcagctgcccactcgtgatttccagcggcctccgcgcgcgcacgatgccctcggccaccagccacagcgggagcggcagcaagtcgtccggaccgccaccgccgtcgggttcctccgggagtgaggcggccgcgggagccggggccgccgcgccggcttctcagcaccccgcaaccggcaccggcgctgtccagaccgaggccatgaagcagattctcggggtgatcgacaagaaacttcggaacctggagaagaaaaagggtaagcttgatgattaccaggaacgaatgaacaaaggggaaaggcttaatcaagatcagctggatgccgtttctaagtaccaggaagtcacaaataatttggagtttgcaaaagaattacagaggagtttcatggcactaagtcaagatattcagaaaacaataaagaagacagcacgtcgggagcagcttatgagagaagaagctgaacagaaacgtttaaaaactgtacttgagctacagtatgttttggacaaattgggagatgatgaagtgcggactgacctgaaacaaggtttgaatggagtgccaatattgtccgaagaggagttgtcattgttggatgaattctataagctagtagaccctgaacgggacatgagcttgaggttgaatgaacagtatgaacatgcctccattcacctgtgggacctgctggaagggaaggaaaaacctgtatgtggaaccacctataaagttctaaaggaaattgttgagcgtgtttttcagtcaaactactttgacagcacccacaccaccagaatgggctgtgtgaggagaagaggcagcctcagcacctgcagttg

SEQ ID NO: 240430 - DNA, 785 bp, Homo Sapiens
  misc_feature (161)..(183): n is a, c, g, or t
tgaaccacctggggagttccagtgtggtggtcaatttgcaatccccatgctaaattaaaaacatagcggcacctaccatatatagctagctattgctaaacctcaaaatcagaccacgttcgataaagcttctttaaaaggaatatacacatgtatttgtnnnnnnnnnnnnnnnnnnnnnnncaaaaaatatccaaacatctatcaaggggatcaaggccgttacgaaacacacaggtactctcccactcactcagctggggactgctagaactacgtgaacacaccatacttcaatgctgcagagcatgcacgggagacacaatgaggccccctccttgggacagttgagaaaggcaggaggaagggcaaaggaagtgaggctgggcgggaaagcttgagcccagacacccaggtgaaagagcaacatctatctgttgcttcctttcttaaaaatgaagtggagaaaatactgaagatttgtggacaactaacagtcaagacatgtttctgtctagcctgctgaacaaggaaagaaggatgaaaaagcgaggctctcgggcgtcagcaatctcttcaaattcgagataagtgcaaaaatgagccctgtcttggacaggtactccccaaaaaaggaaaagggtagaagagaaataaagggaaaccagaagagggactgaggagtcagtaacattctgggaaggaaggagaccctgacaaggaggggtcacagaggtgacaatgagactttgcatggttatctgccccaacttttttgtacaaag

SEQ ID NO: 240431 - DNA, 1167 bp, Homo Sapiens
actttgtacaaaaaagttgggcttgactccctgggtattagtcctgacctgcttcctgaggactttgtcaggtactgcttctccgagatggccccagtgtgtgcggtggttggagggattttggcacaggaaattgtgaaggccctgtctcagcgggaccctcctcacaacaacttcttcttcttcgatggcatgaaggggaatgggattgtggagtgccttggccccaagtgaactcaagatttggcagccccagagatgccaactgcagcatgcccacctgtattccctgtccccttccttcatgaaggcatctccaggcaaggaaaactgaagtcattggcccgatacaaaacatttcctgcaacgaaggaggtggtgccgacgtgctgcttcccatcaccagcagctgctcgacaaggggcgcagggtggctgtctttgttccagcactgttcaggctgcctgtcatcccgggcctgccagctcccctgagtgatgagcacttccaagcacccctctgccctttctctgtccttatgctgtcccggcctcgccagccctctggggcattgtgggagatgcctgccaggaatgagcaagctctgttgctcgggagcctcttgtcaccttcttggacttattccccacctgataccttatagagaaaagtgtgaattcaggtggagagtaggcccaggccccatgaggcaccagtggaagcacagctccaagttcagacaggtgcccttagagaggaaaaccatgacaggcaaatgcatttcctctggagtttgagaccctgacaaacaacaggtggcatctggtgtgctgttcttgagttttcgtttaggattagttgagttccagctgggttttgggagaaaggagatgctaccaagtcttggatgttagggcgagaccctgcaagttgagtattagagagcttgtctttcaaggcatgttcctggggcttcagggctaggagggaggagcctgcccttttaacagaaccccagtcacatgcggctcaagtcactcaaaggctgttgcatttcaggctatgttggtcctttgtttacctcctaaaccacagctgttgtgtttcacatatgttgtgaattttccttggttctttttaaggatgatataaaagttacttgcttta

SEQ ID NO: 240432 - DNA, 1682 bp, Homo Sapiens
ttggcagagaggtaaagtgacgtgcccaaggtcagataccactaagtggtgatacagagtaccagacatagtaattccaagttcctaccctctctgtcttcccccaacccgtgccccgtcgtcctctggaacatgagactgccccagagcagcaggaggggatagataggatggcctggcagtcgagaaagggaggccacttcagggaggtagcaatgcagtggaaagtgaccctcacctccagatgggggctgctcagacactgccaggtcctagctggactgctgcaccttggcaatatccagtttgctgcctccgaggatgaagcccagccctgccagccgatggatgatgccaagtactctgtcaggacggcagcctcgctgctggggctcccagaggacgtgctgctggagatggtgcagattagaaccatcagggcaggcagacagcagcaggtgttccggaagccctgcgcccgagccgagtgtgacacccgtagagactgcctggccaaactgatctatgcgcggttgtttgactggctggtatcagtgatcaacagcagcatctgtgcagacaccgactcgtggaccactttcataggcctgctggatgtgtatggatttgaatcatttcctgacaacagtctggaacagttgtgcatcaactacgccaatgagaagctgcagcagcattttgtggctcactacctaagggcccagcaggaggaatacgcagttgagggcctggagtggtcattcatcaactaccaggaccaccagccctgtttggatctcattgagggaagccccatcagcatctgctccctcataaatgaggaatgccgcctcaatcgacccagcagcgcagcccagctccagacacgcattgagactgccctggcaggcagcccctgcctgggccacaataagctcagccgggagcccagcttcattgtggtgcattatgcggggcctgtgcggtaccacacagcaggcctggtggagaagaacaaggaccctatcccacctgagctgaccaggctcctgcagcaatcccaggaccccctgctcatggggctgtttcctactaaccccaaagagaagacccaggaggaaccccctggccagagcagggcccctgtgttgaccgtggtgtccaagttcaaggcctcactggagcagcttctgcaggtcctacacagcaccacgccccactacattcgctgcatcaagcccaacagccagggccaggcgcagacctttctccaagaggaggtcctgagccagctggaggcctgtggcctcgtggagaccatccatatcagtgctgctggcttccccatccgggtctctcaccgaaactttgtagaacgatacaagttactaagaaggcttcatccttgcacatcctctggccccgacagcccatatcctgccaaagggctccctgaatggtgtccacacagcgaggaagccacgcttgaacctctcatccaggacattctccacactctgccggtcctaactcaagcagcagccataactggtgactcggctgagccatgccagcccccatgcactgtggcaggaccaagtgttcatgactgactctatgctggagcttctggaatgtgggcgtgcccgggtgctggagcagtgtgcccgctgcatccaggg

SEQ ID NO: 240433 - DNA, 1996 bp, Homo Sapiens
ttcagaaaacattaaaaatgcattactcgtaggaattacaaaagatcacccaactgtacaaactagatatcgctgaagcagagactctgattcctcagttactactgtaaagtgctttgccactctttttgagactccagagactaggaaaatggagatgcacagagagacataaggagctgttttccaagacatcacctgtttcttaaggaaaaaaagaaattcaactggtgggaagtttgaaaagtgaatgtcatgtagactttggaaatccatttgttacatctttaacagaaactgctctttctctcctggaccgaatgtcacatcctctcgtccgattcctcctgtggatgtaccccgttctgcctgagcattttttcctaaagggaagaatcaatagtttctgactgttttaacagctgaaagctccaactggaggcagaagatgggatggcttttcacacacgtgcgtgcaagtttagccacctccaaaggccttgttcttaaagcaacagtgctgtttgcattatgaaatgtctctggagttcccctttggaaaggctgctggtgggccacatggtcacgatactttcaagtcacaccctactttgtgaccttatcctcagagtaaaggctttagaggaaaagggaccccacagtctcacccattacctggctgtcagcatctccatatgctcctggctgagttttattgagcatcagctggggatgtgagcagaaacctgaatccttgagacaggtggttttcaaaaaggaagccataacaatgagtggcttagtactggcaattgatcagttggtccatgaaatggagccagtcaagttctgtccttccttcccctcccacatactttgtcaagtcccaggacctactgatatgggctcagcaatgacaaatgccagagtgctcagaggacacacccatcccttttcagggtgtgaacccagactggaaaggagaaccaaaggatgggaaaggcaggcccgggacggcttgctgctgctcctgctttcacaggaatcctggtcatgccaggaacactgccgcccacttggggtgggactatgtggaagtctagctagtgctcggcaccccttaacccaatggtgagaaacaggacaaacatgctgggggttcagagggtggaccgcagggatggcccccaaacaggtcccagtgaggtaatgcaaggcctcctctcgggggctgatgaggtcttctaggccacagactaaacgcactgcccagcctttagtttggagtgtgacttgcactgactgaaataaatctgacctgtcacccttgggggacatctcagtctcagatcttgctccagacccaacatctcctgcttgaaatgagacattaagaaacacacactcatccagtaggaactgcacacaccaccaaaaacgttcccctccccacaaccctgcccctttatgtttgtctagcaaggcactaggaaatggttcaagtttagggatttgctctatatttgcatttttctttttaaaaggcacagtttttattttaacgacgctgcattgctctttgatgatgaatctcaattcgactcctcaaactgtcaacactcttgttatcctagattctagaaggggcctcatcttttgacttctttctatagagggccacttctaaagctacagcactcatttggaaaaggacactgggatcaacacgtaagcgttgcaagcacaggggccgcctctcttgcagacaggtggccaaagcagggcttgtgctgggccagaagtggaagtaattcctcgccagctacacattcagtctgactggtggatgattgggagtgtttgtccctccctcccccaataattgatggccttgagatctgccagcatctcaaaggcagattcgtggctctgttcccagacttaggtctcagttatttaattggtaaatgacacaatcaagagactcaacacccaa

SEQ ID NO: 240434 - DNA, 1197 bp, Homo Sapiens
  misc_feature (858)..(895): n is a, c, g, or t
aaaacagtgcataccaatgtaataatattacccagagcaaaccaactctggagaccgccagagcagtgagaatttggtcagcaaaggagatcttttgtctcttgacccactcaatgcaatttaccaacactatgaagccattagcaaaattcccaagaacaaatgtaaccactactagaatggaaaaaatgatgggtagaaaagttatcatgtctgaacagacaaaaagatagaataaacgaaggcctaacagcactggctgtgatcctttaatatcctgaccttaaattttatgtgcacctgatttctgaatgtgcagtaacattctttttactttcaaatactgtgaccagtgtcaaacaagaaagtagcagtttatgctaattgatagttcaataatgtatttatggaaaacattctaattttcaaacagctcaacttaattcattcattcaatgtctgttcttgttagagacttgttagatactgaagtagaagtgaaaccggaattttcatttgccagcatgcaaataaagacatattctctttcagtgttttgcaatgttttcctcatttcacctttccataatttgtgttcagtaactttagctgtttgttatggaaaatgtgccacatatttcacacagtaaatgcctaaatcttaaagggagattagtcataactaggatcatcaccatgaccaatttttatgctagatttaaatagacaaaatccaaactttttaatcaaagtcatcgaaaattttcttgggaaccatgggaatgccaatacaccttaaaatcttattcctgctaaccagtacttttgtatgacattagtgttaacaagctcataaannnnnnnnnnnnnnnnnnnnnnnnnnnnnnnnnnnnnnccatccagaaaaaatgaacttttaaaataatttccaaaatggaaaatgcatttccaggaggtcatcctggtgaaattagtcctattttcccactcagggttttcagcccataaaaatatattaaacatatctctcatacttagacccttggtaaagttactctcaagtctattgaatgtctaaatatttgttatttcattaaaatattcaacatttttgtaaatattcctgagtatcccattatttgacatataatcttgcagtattttcccaccacacacagggtgactaccttgccccaa

SEQ ID NO: 240435 - DNA, 2275 bp, Homo Sapiens
  misc_feature (717)..(965): n is a, c, g, or t
  misc_feature (975)..(983): n is a, c, g, or t
  misc_feature (2168)..(2177): n is a, c, g, or t
aaagtggttttttattaatgaaacatttcattgcattaagggtagaaataaacatgtcaagaaccgcatgaagtgaaccaactgtataagctacatgaagagcattctggtcagtattcttgttaacaggcacaagcaatttagtgataatgtccagagggccaaggatgcggaccaccttttgcagaactcatatctcgagcagtttaaattaaaaattagcctcccttaagttaaaaaccccaataggggttagtcgtgtagtgcttgttccacttgaccattagtgatctttctagaacatgaggaaatcaagtctggttagaaaagcctggagctaaaagtggcaaagcccatttcctgtcctgtgctcaactcctaattttccctgagagaagtgagttaagctctctgtcttggtttcttcctctttaagttgaggatcatggtaccagaagcttgcattctgtgatcatgacagtgcttacaatcacaaagcctttgggggtctttctaagataactgccgcaagaaaatgagcatgagaaataattcatcttcaacttaaagccaaataggtgcattcattcctcttaatctataattttgactgtagtttgtagatctgtctcagacttttcagaaggatagtatcaaatgtgatttaaaccaagtaactattaagaatcataaaacaggccaggcccggtggcttannnnnnnnnnnnnnnnnnnnnnnnnnnnnnnnnnnnnnnnnnnnnnnnnnnnnnnnnnnnnnnnnnnnnnnnnnnnnnnnnnnnnnnnnnnnnnnnnnnnnnnnnnnnnnnnnnnnnnnnnnnnnnnnnnnnnnnnnnnnnnnnnnnnnnnnnnnnnnnnnnnnnnnnnnnnnnnnnnnnnnnnnnnnnnnnnnnnnnnnnnnnnnnnnnnnnnnnnnnnnnnnnnnnnnnnnnnnnnnnnnnnnnnnngactctctcnnnnnnnnngaatcatgacacaagtatggaagtaatgtttttggtctccctgccagtgtgcaactcagtctaaatgtgtatatcattaactgttatcatttacagtatttaaaatatcctcctcacagatgattatatcctgataataggactaaaccaataagtatgcactagcattgtcaattttattagtatggataagtacatgcataattaagacatgcccaattatctagttaaatgttgataaattctaaaaatgtagatatttagcattattgaagaccaaatatttttgttagtttttttacattttggtgagttggagtatctaaaggttctatcttgattctatagaaaatttgagagtttaatgaattgcctcttcaagaggggaaatatatcacatattgttttagtgtagaaaaaggaaaaattgtcagtaaaacaatttattacctcaatacagggataagaagctatggaaatgaaatctatatttttttcttcatttgcttacattgaaatccagttttaaacaaaaaaaatccttttgaatggttcagttgttaagaaattctataagcactttgtcagctaaatgtataggcttctcaattcaaaatgaatgctgaactttgagaatcaaagaaaatgcccttaaatatgcttgaattctgaacactgtgacatatgatggctcccaattccctgtcttaggttatgctgaaaccaagaagtcctttgaaaagtggtgtctctgcttctggtcctaacagacctttctttaaagtactttgtgcaatattttaaacatccatcattctgtcagcaaaatgattgtcacaggaagtatagggcacacgtttctctattcagtgagtgacagtgagctacaaaacactggaaagaactgaaactgaggaaggaacttgtaaaaagaacttcaaaattaccaagaagaaggctgtcccagaagaaatatctctttagtctaatcagactttctgaaacttatgtgtaacttaggctgtagatagatggatttcccatattcataattttacaaataatcactcaatattagattaattaatacagtaacatatttggcaagggcgactcaggaagaaaaatcagttactcattacattctctcagaagcatcttttcgtagcatgatcattttgactnnnnnnnnnncagttaactatccacaagcatcataactagcaattaattctacatgaaatatctgtactttatcctcaccaacattatttatgcattctcttcgccaa

SEQ ID NO: 240436 - DNA, 1393 bp, Homo Sapiens
  misc_feature (359)..(372): n is a, c, g, or t
  misc_feature (1089)..(1112): n is a, c, g, or t
ttgagagtcaataactgcaataaacttttttaagtataatcaaatgagttcaactgtcacgttaagatgccttgaattcttttgattttctagttccaatttctagctttaatatcttcaaatcacctgccaagtggtgtgtgtttttacacctctctggccctttagttttctgctgggaaacccagaacgccagtccagacaccgaggagccgaggaaacaggacagcaggcagggggctgcggagagcagcacagtcacggacactgcctccttctccatgccacccgcggtttccacagttaaatactggtccacatgacatgtgaacacatggctccttggtctgtcacagtannnnnnnnnnnnnnaagagaaacacccgtcaaatttattgcagttgtccagtcagcaatggtgatcttcttgctgattgctgatcttgccattcttggaccccaagtgctccatgacctccacaatattcatgccatctttcaccttgccaaagaccacatgcttgcaatccaaccactctgtcttggcatcttggcagggcagataaaaaactgggaaacgttcacgctgggtccagcatttgccatggacaagatgccaggacccgtatgcttcaggatgaagttcttgtcatcaaatttctccctgcagatggacttgccaccaatgctgtatggcgtgtgaagtcaccactctgacacgtaaaccctggaataattctgtgaaagcaggaacccttataaccaaatcctttttctccagtgctcagagcatggaaattttctgctgtctttggaaccttgtctgcaaacagctccaatctgttaacatagttttatggattagatgagcagtcacttcttgctttccaggccccttacctcgaaggagacacagcccaagggctcgccatcgacagcaatgtggaaaaacatggtggggttgaccatggctggaagcagggggccctgggcggcagcagcatctgcaaagctcacagccttctttttaaaagtcagcttcattagctactgggaagaatgactagttaaaacattttcccctagcannnnnnnnnnnnnnnnnnnnnnnngagatggagttttgctcttgttgcccaggctggagtgtgagactccgtctcaaacaaacaaacaacaaaaaagagcagagcaaatattgaactctaaaagagaagaaaaagaaaccagcagaagtgttagataggtaggacccaaggaatacacattgttaaaagaaaagatttcccagggccaccggacaccagcgcgtgagaatccggaggcagggaggcgacccggttcccgaaacctacgcggctgcgggaggcccaggagccccacgcgaacccaa

SEQ ID NO: 240437 - DNA, 1340 bp, Homo Sapiens
  misc_feature (321)..(329): n is a, c, g, or t
  misc_feature (1276)..(1285): n is a, c, g, or t
tttgtaaaggagtaataaccacaagaaataatattctagagtccatctcttccatcaactgatggatcctaatttgcacatgtattttgcaagtaaaatcttacctcttaaagtaaatatatgatgcatattcaccacatgcagctgaaatgtgcaagttgggttacatagatgggaaaagagtatgtattaaaaagcctttaagacttgtatactcttgatgtgcttgatttagagccatttaaaattttattgtgtttaacacatgttccttttatattattggatcgctctttgaataaactaagcatttaaagtaannnnnnnnnaaaaagaaactttggtatgacaattacagggtttaaaagactgtgcaactgagtgaaatggattgagaaatatgggagaagtaacagtttgaaaactcagagtcaaaaaggaaacagtgtagaatatcgtttttcaggtaatttaaaaataagctatatgatagggttgttatctttttatttttataggtaacttcttaatttataaattacttattccttatttgtaaaacaaataaaatatttgtgtacttaacgtttaggtgtgtataaattcacaaaaattattaacacttaactttcaaccttatatttgagatatcttcagaagaattgcaaccttttagctgaaataaactcagaatctcatttctcagagatttaaaaaaaattctcctttaagagagggcatatttcctacaagtttagaattaattggcaagtatagacacacaatgtgagtatatgggctttgtgactttgccgagacaaaaaactcaggtagctgcattcctgaaacaaatgagactctaatttcaaacatttttcaaatgcaaatcaggcccccatgaatcatttgatgattttttgaagcattaatgcaacagagttagtattcctcaaatgatccccaaagtcatctctttgctaaggatatttctcttcttgattattttgaaactgccaacagtctgtcaccttcatgtagaggatgacttatctgcagatgtcctattattatcttaaaccaacctcattttgaagcaacaaagagaaaaaaattaaatagtgcattaacatttcatatcagtgaaacagacttttttcatgcataaagtagttctagcaatctgtggaaaggtctaccttttgtttttccctgtgtttataagttacatttttaaaagtacttgtggatcctctgtagagtggattggttccctggnnnnnnnnnngattcaagtgaaagtatgtatattttgtttttatactgttttaatacgtagccaa

SEQ ID NO: 240438 - DNA, 1662 bp, Homo Sapiens
  misc_feature (1465)..(1473): n is a, c, g, or t
ggggctattggaggtggaaggtgatacatttcagtttatagcactaactctaaagaacttgactttacaaaatggtgatgtccaggcccgctccctgctgtctcttgccttctgtggctgcctccttttgctcttctccttggccccagaccaagaccatcaaggcagtcagaacaggtcacagaagaatccagaaatccaagaagagggttttgtgccaagcaaataaaagaaactatcatccatctaaggttcattgtttaaattaccatgtttatttatatcaacacaaaatacaataataaacacgacaaaaccattttatcttcatgtaacataactcttcagtgaacagaagtactactgttaatgttttggcctttccaaggtcctgcctggggtcaaaacagtattcagagaaagagcagattcttctctaccttccctaaaacacacacaaaggtaacttctattttctaaaatcccattccaataataattaaaaaaacaacagtaagtccacgtagaggagaggattgctgttgtgttatcagcattgcaacctgtatattgctgtagatttcccccaggttctgcgcatcagtcaggaacataaagggtatatcagcccttcggattttcaaggtgatttttcagtaattctttcacctagccctgtactctgtaaaggtctgatttacctgagttatctagaaaccagcaaaaaaagagtctccaagtgatcaaaggtatatggatctatcttgtagaattgaagaaacttatagattttgctgtgacaattcaatggacaaccacgaagcctccactacataatgaactattcacctagtaaaagcttcacattacaatttaatcaaaggtaataaacattgcacaaaagtacaatatctcatctatatgccagcagtttaaatgctatttgttcagtctcgaacattttcaaacaaatgacagttatcacttaactaacacaatctttctattatttcactgacaaaagaggcagtttcctgcagtggaaagaggagatggcttggagttagaagagctagattctgaacccagctctactcattctgagccttagtttccttatgaggatcaagtgagacgaaagtgctttgtaaaggagtaataaccacaagaaataatattctagagtccatctcttccatcaactgatggatcctaatttgcacatgtattttgcaagtaaaatcttacctcttaaagtaaatatatgatgcatattcaccacatgcagctgaaatgtgcaagttgggttacatagatgggaaaagagtatgtattaaaaagcctttaagacttgtatactcttgatgtgcttgatttagagccatttaaaattttattgtgtttaacacatgttccttttatattattggatcgctctttgaataaactaagcatttaaagtaannnnnnnnnaaaaagaaactttggtatgacaattacagggtttaaaagactgtgcaactgagtgaaatggattgagaaatatgggagaagtaacagtttgaaaactcagagtcaaaaaggaaacagtgtagaatatcgtttttcaggtaatttaaaaataagctatatgatagggttgttatctttttatttttccaa

SEQ ID NO: 240439 - DNA, 889 bp, Homo Sapiens
  misc_feature (505)..(555): n is a, c, g, or t
  misc_feature (657)..(711): n is a, c, g, or t
ttgtacaaaaaagttgggtcccagtgcatgctgggactgttcttcggcttcctcttggtgatattcgccattgaaatagctgcggccatctggggatattcccacaaggatgaggtgattaaggaagtccaggagttttacaaggacacctacaacaagctgaaaaccaaggatgagccccagcgggaaacgctgaaagccatccactatgcgttgaactgctgtggtttggctgggggcgtggaacagtttatctcagacatctgccccaagaaggacgtactcgaaaccttcaccgtgaagtcctgtcctgatgccatcaaagaggtcttcgacaataaattccacatcatcggcgcagtgggcatcggcattgccgtggtcatgatatttggcatgatcttcagtatgatcttgtgctgtgctatccgcaggaaccgcgagatggtctagagtcagcttacatccctgagcaggaaagtttacccatgaagattggtgggannnnnnnnnnnnnnnnnnnnnnnnnnnnnnnnnnnnnnnnnnnnnnnnnnnccactaattttagtattcattctgcattgctagataaaagctgaagttactttatgtttgtcttttaatgcttcattcaatattgacatttgtagttgagcnnnnnnnnnnnnnnnnnnnnnnnnnnnnnnnnnnnnnnnnnnnnnnnnnnnnnnnatattaagcagaaatcctgcaatgaaagggtactatatttgctagactctagacaagatattgtacataaaaagaatttttttgtcttttaaatagatacaaatgtctatcaactttaatcaagttgtaacttatattgaagacaatttgatacataataaaaaattatgacatggtc

SEQ ID NO: 240440 - DNA, 1073 bp, Homo Sapiens
ttgtacaaaaaagttgggtggggacggggtccaccccaagaagaaagaaaggcccgtccacaggcccggctctgggccacgtgccccggaagcaggtgtgtccagagtcagctgagggctctccccacaccacccagcaggcgctggtgctccttctgcctcatgggaccagtccagcttccagccgctctggctcgagggtggtctgagcacttccttctgagtgggcttctctgggagctctccagtggcactgctggacctgcccacgtttctgtaaaatcaggatacgtggctttagtaagcagaccaagcgcttcgtggcagggaaagcagcgtgcggggaagtcactgaaaagtgctgcctaaggaagtttggaaatagtccccgttccagattgccttgaattttaaaacattttgctttgggaaagtaggtcagcagcacctaagatcaaggatgcgttccattttcacacttcacagtcatgaaaactgagaagactgtcttcagcgtgaactaaagttcacaggcagatcactgatccagaacacttcaagaactcgtcaaacagctcgataagcctttttgactgtgtacatctgtaccgggaataacattcctaggctgaaatttccacaaagaatagaacctgtacccagttcttcaggctgatttccctgacctcttgggcatttgtatttgtagtaaagtattgcagagattcctaagtattttatagcagccatcaaaattggactttgtattgtttattcataaaagacacttggtaatagacttcagtgaactctgtatgaatgcagtagtgtgcgtgcaaaatccgcttcctgagcgtagggtgctgagctggcgctagggctcggttgtgaaatacagcgtagtcagcccttgcgctcagtgtagaaacccacgtctgtaaggtcggtcttcgtccatctgcttttttctgaaatacactaagagcagccacaaaactgtaacctcaaggaaaccataaagcttggagtgccttaatttttaaccagtttccaataaaacggtttactacctg

SEQ ID NO: 240441 - DNA, 1168 bp, Homo Sapiens
tattccccaatgctatttaatacaattgaggttaggacgttaagtccttatcagactgtgtactctgagccccgtgtcatcagcaaaagccgtgtgagtcaacaggtgtgaagactcaagatgcgcacacagacgctgtccgtggttttatggggaatgatgagggctggtcagttctcctcatgacaaaagtcaaaccgacttccctgtgttgcgtgtgaagcttgttagtggacagagagaaacgcagggttctgccctgggagaatgacagccacagcgctgggtgccgtcaggcggcttcgtgtgcagttagcgtttcacaaactgagaagagtataaaaaagcccaaaccccaaagatttcttatttcaagtgactaaatctagaaacagagatgaacagggaatagaaggtcaccagtctgcaagacgagaggactgtccttcaggggcagctctccggccgcctgtcctggaaggctggcaggttcactggccaaggtcaggagaccgcaatggccacgtggtctcccggctgggctgggctgcggagcgtgcacctcacaggaagcgtcgggactgatgtgctggagcgctttagttgttttcaaatctagcatacgggttttcttctttaaacaggcctgaaacaaaataaacttgaatcataacttcattcattcaaccagaaacaaaatcttagaaagccatacaaaccaagctttataagaagatttactgaggctatagcaacaacgggcattgtaagcaggctctcatacagtgcttaaccttttttgaagtcaaaccactttaaactttaaaactgaaataaaatttactagaaacaagaactctaacagatcctaagagataagcacttacttcctgatgctcggcgaagaaaagaaatttaaggcaagtatttctttccacagtggttggctagttccacagtggatggctactattaaacaaaataaccttactttgtgcttatagctgctcttaaacctttggaattaaggctacagaaagaactaagatgaccatcaatctaactctcgagtactctgacaaaactgggataaaatgtgtatttaatcataagagtaaacctgtgctacttacccaaagaccaggagttttcccttcacactgcagaa

SEQ ID NO: 240442 - DNA, 808 bp, Homo Sapiens
gaaaatggaacgcatcctttgaatcttaggtgctgctgacctactttccaaagcaaaaagttttaaaattcaaggcaatctgaaacagggactatttccaaaattctttaggcagcacttttcagtgacttccccgcacgctgctttcccatgccacgaagcgcttggtctgctttactaaagccacgtatcctgattttacagaaacgtggggcaggtccagcagtggccactggagagctcccagagaagcccactcagaaggaagtggtcagaccaccctcgagccagagcggctggaagctggactggtcccatgaggcagaaggagcaccagcgcctgctgggtggtgtggggagagccctcagctgactctggacacacctgcttccggggcacgtggcccagagccgggcctgtggacgggcctttctttcttcttggggtggaccccgtccccacgatccctaaatggccaccccccagacagcccaacaggcagcgagaggcctgcaggcactgaggatgccaacagggctggagagagctgcagcgtcctgccccgtcctccccacaccgctggcacacgagcagtcaactggtgctgctgaggcaggccaaacaccacatttataattcaagcttccaagggaaaaagattctcatgttctagtaaagatacaaattttaaaaattgtccaaaaagggcctgaatttttatatgaaggttttctggtgaaatcttttaagcagggaggaaaatccaataaatttttttaaaaaggttccaacttttttgtacaaagt

SEQ ID NO: 240443 - DNA, 1004 bp, Homo Sapiens
  misc_feature (651)..(706): n is a, c, g, or t
ttgggtgtgggggtccccacagctcttatgttcctcctgggcatcctggacttcctcttcgtcagccacgcctatcacagcatcctgacccgtggggcctctgtgcagctggtgtttggctttgagtatgccatcctgatgacgatggtgctcaccatcttcatcaagtatgtgctgcactccgtggacctccagagtgagaacccctgggacaacaaggctgtgtacatgctctacacagagctgtttacaggcttcatcaaggttctgctgtacatggccttcatgaccatcatgatcaaggtgcacaccttcccactctttgccatccggcccatgtacctggccatgagacagttcaagaaagctgtgacagatgccatcatgtctcgccgagccatccgcaacatgaacaccctgtatccagatgccaccccagaggagctccaggcaatggacaatgtctgcatcatctgccgagaagagatggtgactggtgccaagagactgccctgcaaccacattttccataccagctgcctgcgctcctggttccagcggcagcagacctgccccacctgccgtatggatgtccttcgtgcatcgctgccagcgcagtcaccaccacccccggagcctgcggatcagggnnnnnnnnnnnnnnnnnnnnnnnnnnnnnnnnnnnnnnnnnnnnnnnnnnnnnnnnagggcctcctgcctccttttcctccaggcatgttcccactgtggccccccatgggcccctttccacctgtcccgcctccccccagctcaggagaggctgtggctcctccatccaccagtgcagcagccctttctcggcccagtggagcagctacaaccacagctgctggcaccagtgctactgctgcttctgccacagcatctgggcccaggctctggctctgccccagaggctggccctgcccctggattccccttccctcctccctggatgggatatgcccctgcctccacccttt

SEQ ID NO: 240444 - DNA, 1278 bp, Homo Sapiens
gacagtgttttcccacttctgactagttcctctatgcagagcttcattatttaagtacaatccagtttaaaatagtattccaaagctcagcataaatggtctggggatgatttcctttccttgatttaggaagataataaagctaattataaatatgggtacaacacacctgaatcacagagtagtacccttccaactccaaaccaacagtatgatccttaacagtaataaagggctgcatttattgtgattgtctgtgcccagacacaggtgattaaaaagaaaccaaaggatgagtgaactgacaagagggaaagggtttgtgttgctacatttaaaaggttacactaacagagccgagtgagtcaggtgtgctgtggcaggatcagctgtgggggcctcctttcctagtttctgaatgatcttcctgtggctctgtgagcaggcccagcatggggaatgggctaaaaggcttatacatctcttttggccctcagatgcacttacccttttctttggtgccctctttccccaagagaatattcaggccaattttgcttttttccttgtttctgcattagtaagacattataaactagcaacttgtaatacctctaactctcactgtcttatgttagtataaagtacctcaagtaataagaatgtggaacttaaatgccacttacagaagtcaaacaagcccatgtcacactttgatgaatccaaagtattaaatcttagcaactgatgaagtaaaaagctatttttgctaaggtttaactattggactttaaaccaactttaatattccatgaaatcaaaggtcatttatattgaattaacatgccttcatgtttcctacacacaacaaagtttaaaatatacatatatttttaaaccaattcactcccttttacaatcatactttcattcgaacatttaaaatataaatccaaactcaatgaaaacaacagtgggacaagtaacactatcattaaaatgaaacaataatgcaagaaaaggtcagcgttgaaactcagaaaataaacataaatagattcactggaaatctgctcatatgcctaatgtgttcagaaatgaacctcacaaaaaacagatcccactgtgatgttagacaactcattcctttctcattttctcattccatgatgcatgtcttcactatttttactgaggtttatacagtgagtagatatcctaatggcagagattaatattaaatacatagcctattccataattggcatatgttcccaa

SEQ ID NO: 240445 - DNA, 1580 bp, Homo Sapiens
gttaaatttgcatttactggggaactggagtgtataaaaccttaattaagtataagctcttgatcttcatcgtggtgcctattgggtatgtgatataactgcagtatccctttggggaaggggggaggggatttctttacaccaagtcctaatgaaactataattttcactttttactttaagctatcaacttaggacttggcaaaaaaatttttgagggtggttcaatagaggatgcttcaccactggacactcactgtcatcaaggtgctttagaaaattaaaaacatagcacaaatgattgtactctactctacaagttatcatgacctgcataagaaatggaaagctgattcacatgtttacagtgatcagcaggaagaaatgcactaatgaaacataccttttacctaaaaagctaaactacagccatatactaatttctatgatttatgaaaaaacttcaaaatatccaaatgtcaggcttcgctgtacaattgtcagttttagtctgactttttataaagggacactgcagtatttagtacaagttcggatgcacttttttgaacatctgatgtcttacaaaagtaacatcttgctaaactattatacatccaaataactacaatatctgaagaagcaaggctgctttttcagccacaaaatacgacaaaagcaaggcctgttatgatggtcatgaggaagtcttacaagcctctgaaactaaaggcaactaagaatgttacatttggtatattaaaatcttaccctcatatcatatttaacaagccttgcttttatctacaaagattttctatgtacagtacagacagggtatagttcaatcctctgctactgaggtagttaaccaacccttttaaaaaggttctgaaaagaaccactatctggaatgcctgactaaccagctctgatgattacacctgaaactgcatatctgaacacaattcaaaagtgatcactataaaaaagatatagacaatcatgattaaccttggtgagcagaaataaaatttaaggataccatcagtggcattcatctataccactgcaataaaatttaaatgcacaaattcaagagaatatttcaaaataccactgttgggatccttaatttaaaaaaggggaaaaatctacttagagcagatttttaaaagaactttattctttattaagataccatgctaggagttatgaaggatttctgttggaacacattttgaaaatagagtagctttagtttaataacttgcactgcagagaaaattgttaaagaaattcatatcaaagtccaagtattagttcaatgtcccgtatttgattccatgatcttcataggaaggtcttctgcaatagaatatgctcctatacagccgacatatttaaggttgcttgatttccttaccattactccactgcaagcttctggtgtaatcccacatagcaagtcagtcttcattgtaacaggtcaggaccggcctcgaccccttttccctgctagccaggtaacaaaaggaatcccaacttttttgtacaaagttggctttttataggaaaag

SEQ ID NO: 240446 - DNA, 1932 bp, Homo Sapiens
  misc_feature (394)..(403): n is a, c, g, or t
ttggaataattccgaccttcaagcaagtttctgaaggtattttatgatgtataacaactgaagttttacaataaaaactaatttaaatgttagctgaagatatgtggcatttaaattaaaatggaaattatataaaggaaagtgatttttaaggatatacataaagatatatttagaattttcatgatactgttctcctcatctactgcttatgttaagtgagaactttcttagtaatacataatgcatgatgttactgcattttctaaatgactagtaagtgattagttttttcacttatgcctattaatttgataccaatttaatcatgataaaacaataaccgttaacatatattttgttaaatggacatttaaaagaatgttgttcaggnnnnnnnnnnaaatactgatatggggcatacaatctattcacatgttttctactgaagtactaagtaaaaaaattaaatcattatcagaataaaaatatgtgttctaaaattagcaacaatttctggggatacatgcagatgttgttaaacgtacctctgcatacagatatattataaaacacaagcaatgttatttatgaaactgtgatgcagtcttcaacatcaagaaaaaatgacaactataataaaatttacaacacagtttcacagtctaaatgctatgttcctttaagtattttcatatttttaatcatttattaagagaaaattgtgaaaagttaatttggccttatagagagattcaggatagatgtagcctatagatgtgtcattttaataagttgggatacatgtttagtttttccttatattcctgttcagtgaacagattttcataattctcacttgttaaagtgctgcaaaaattgcattttcagtactctaaattactacattagaagagagcatttctccattgtctttattttctgttatatatgtgttgtaaaagtacactacattagaagggagcttttccgttgtctttattttctgttatacatgtgttgttaaagtacatgcattcttagactaactctcagatgctttgctcttttggagctgaagaattgtttgatggtgatgtcatatatctgatagattagtttcagtggttctcatttcacttttatacgtaatttcttaactatattaagatagttgcaggcagtgtacctcaggttgactctgtacatctgaatagtgagtcactagtattttgcttcaagccttctgaaaatataaccatagttacctaagcacacagtgaatagtcacatggtagtacttgtgattagagcatgtaaaacaatgtaattgaaaagtcagcttccatattttgtaggggaaatagaacaccctactttttatctagtgtgaaatatttaatcgaatttttgttgatttatattatgttacctgtgctgaattaggtttggtacttgtgttttgtttgacatattagtaagttgcttttgcttctttctgtcaacttattttttaaataaaattgatctggaaaaattgttaatgggatgttttaaataatgaatttttcatccagcatcagttgaaaaggaaaagaaagcttcattatggaaatgacaatattgaatatgacagataagtttatttgcttctgttttaactgcagttaatagtactagacaactttaagtggaaagcatttagtttatttcttcacttatttgtagagtgaacaaatgattcacaattctacaagtaattccacttaggtaacttacagttgttaggtttgacaataaagatctactatgagaggagaagaatttatgggttttgggtggaaggaatttctcaaagaaataaaaaatgttctttgcccttgatactgcaaacccactgatacaagtgccttgaatttattattattatta

SEQ ID NO: 240447 - DNA, 889 bp, Homo Sapiens
ggtcgctctgtcactggtgcccattatgtgctcacgtgcccactccctcaggtttagaagtcgcgtcgcccggcaacagaacaatctgctggcttagctttggccaagttggcagctggacgaggacgctcagagcccagctctcgagagttcaagtatccgacagttccccactgctcccaggagcggttacccgggcactctgtgcccctcattcctgtttgggccaaggccgaggacctgcgagtagggctcagttgcctggagccccttcagcccatcgcccagttcactttgcttgtgggatctccccgttgctcctgcccctggactgagtggcaggccatcctacaaacacccggacactcgacatcagtggtgtcaagacaactctaagaaggttttccgtgatcctgcaagacctgtgttccatcctggtgattctctcttcaatttcactgcacaggtaccacagtaagccagtgctgtgtgctccgaattccagggcatcccccagctcagccactacactcagcacaaggactctgtggggcccaggagcaggtagtcacccctttgggctcctcaacacccggctgtccccagacttgtgtccagggaagatagtgttgagggccctcaaggagagcagggcagggatgcctgagcaggacaaggaccccagagtccaagaaaatcctgatgatcacagaacggtccccgaggtcaccggggatgcacggtctgcattttggcccctgcgggacaatggaggcctctctccctttgtgcccaggcccgggcctctgcagacagacctccatgcccagagctcagaaatcagatataaccagacatcccagacatcctggaggagctcgagcaccaa

SEQ ID NO: 240448 - DNA, 1143 bp, Homo Sapiens
tctttatagatcttttcactaataaaatacagttgtgatgtctgctgaatttcccttgaaaacattttgaagtgaaaaaagtcagtattgagtactgtacatttgtgttgattaacatttggacacaaatatacttttaacaccaatagagctgaaagactatgcctttatcttggatttcatagatttccccttccccccagtgacttatcttacaaggcaaacaccagcaggcaaaggggatctgtagaaatgtgcaccctggtttcctcctccatctcttctaccaatgtgggaagaaagccaatgcttcccagcactttctgaaggtggaatctcctcctctttacttaatgttggagaaaagtggccaccagtactcgatcattgtagattcggaatctcgccatctaaaccagacttcaaaagtgcactttcgggtctacttagttaagaaagagaataatggaagatgataagtggttagcaaagccagatgccttatcaccagggtcctgttctgctgatctgtgccaagcaactcatctcaccaaacctaatgtcaaccctcttgatccacaaaccttccttcttttctaacatggtctgcagtctgtcacggaggacatgaaacaagatgcaagcagatccttaatgaccttcagaccaaactgctccaaacagtggccaagacgttgcagtcaggagtaaacacaatccttaggaaaagaactgtgcatcccagcatggatgtgtttccaaagaaaggagaacctgcccatgcctccatgtcccaatcaaagctgcctttgtcagataacctgaaaaccaaggtactggattgtgtcatgacaagtgtgtcaagagatgctgcagaacatttacaagcagccaccagttccctccacaggtatgcacgcttgcacttcgagcaatgacaaaagacaatgcttgtctgttctgtttcctcctgcctgtccacagtcacatgatgcagaactttctgctacagcacgaggcttctcagagtctgcttttgatgagctgtatttgtgaagttcatatcagagcgaacactacttatgaggggaaacaagctctgtgtattttgtattaaaccatcagtaaaaaaatgagacccaa

SEQ ID NO: 240449 - DNA, 1002 bp, Homo Sapiens
ttggattagtggtcaggttgctgatctgatgtcacagagctggaattcaaactattgatttctattgaggccgagtatgtattgtttaaatgctaagaacagaattgggaatatgtttatgttaaaatacatagatggagaaagagtaaagcattttcttcctaatacagcaatgaactgctaacagtttagtaacacagaagacttttgtatggttaaagaatagaatgaatgtataaatttgcatactgggttcaataagttgttgtttcaacagacactctgcttttctttatcaatcagaatcctgaggttggcttgaagcctgtgtggtatagtcccaaagttttcattgaaggtgctgatgcagagactttttcggagggtgagatggttacatttataaattggggcaacctcaacattacaaaaatacacaataatgcagatggaaaaatcatatctcttgatgcaaagttgaatttggaaaacaaagactacaagaaaaccactaaggtcacttggcttgcagagactacacatgctcttcctattccagtaatctgtgtcacttatgagcacttgatcacaaagccagtgctaggaaaagacgaggactttaagcagtatgtcaacaagaacagtaagcatgaagagctaatgctaggggatccctgccttaaggatttgaaaaaaggagatattatacaactctagagaagaggattcttcatatgtgatcaaccttatgaacctgttagcccatatagttgcaaggaagccccgtgtgttttgatatacattcctgatgggcacacaaaggaaatgccaacatcaggggtcaaaggaaaagaccaaagtagaagctcacaaaaaatgagacctctgctccttttaagaaagaccaacaccttctctgaataataattgtactacatctgagattccttggtcctttacaatagagtggctgttcaaggagatgtggttcgtgaattaaaa

SEQ ID NO: 240450 - DNA, 966 bp, Homo Sapiens
gccaactttgtacaaaaaagttggagaaaaggcccagaagttactgcagaaggtgaaagaagtatttaaagcatcgcctttccttgtaggggatgactgtgtttccatcatgaacggaacagatgaaggcgtttcggcgtggatcaccatcaacttcctgacaggcagcttgaaaactccaggagggagcagcgtgggcatgctggacttgggcggaggatccactcagatcgccttcctgccacgcgtggagggcaccctgcaggcctccccacccggctacctgacggcactgcggatgtttaacaggacctacaagctctattcctacagctacctcgggctcgggctgatgtcggcacgcctggcgatcctgggcggcgtggaggggcagcctgctaaggatggaaaggagttggtcagcccttgcttgtctcccagtttcaaaggagagtgggaacacgcagaagtcacgtacagggtttcagggcagaaagcagcggcaagcctgcacgagctgtgtgctgccagagtgtcagaggtccttcaaaacagagtgcacaggacggaggaagtgaagcatgtggacttctatgctttctcctactattacgaccttgcagctggtgtgggcctcatagatgcggagaagggaggcagcctggtggtgggggacttcgagatcgcagccaagtacgtgtgtcggaccctggagacacagccgcagagcagccccttctcatgcatggacctcacctacgtcagcctgctactccaggagttcggctttcccaggagcaaagtgctgaagctcactcggaaaattgacaatgttgagaccagctgggctctgggggccatttttcattacatcgactccctgaacagacagaagagtccagcctcatagtggccgagccatccctgtccccgtcagcagtgtctgtgtgtctgcataaaccctcc

SEQ ID NO: 240451 - DNA, 1640 bp, Homo Sapiens
ttggcacggcaggcgcgaatcccagcggccggcgggcggcggggatacttctacatagacataatcaagttttgactatttggaaaccaagcatcattaaaattctctcaaactcctaattgcgaagaatcgataacatttcaagaagtgataacatttctctgaacaagaaaagaagtgattgaccacgttttaaaagtactctggcactggtgctgtgttttcttcccctccctaaatttgaagaactatggagaaatggtacttgatgacagtagtggttttaataggactaacagtacgatggacagtgtctcttaattcttattcaggtgctggtaaaccgcctatgtttggtgattatgaagctcagagacactggcaagaaataacttttaatttaccggtcaaacaatggtattttaacagcagtgataacaatttacagtattggggattggattacccacctcttacagcttatcatagtctcctatgtgcatatgtggcaaagtttataaatccagactggattgctctccatacatcacgtggatatgagagtcaggcacataagctcttcatgcgtacaacagttttaattgctgatctgctgatttacatacctgcagtggttttgtactgttgttgcttaaaagaaatctcaactaagaaaaagattgctaatgcattatgcatcttgctgtatccaggccttattcttatagactatggacattttcaatataattctgtgagtcttggctttgctttgtggggtgttcttggaatatcttgtgactgcgacctcctagggtcactggcattttgcttagctataaattataaacagatggaactttaccacgccttgccatttttttgctttttacttggcaagtgttttaaaaaaggcctcaaaggaaaggggtttgtgttgctagttaagctagcttgtattgttgtggcttccttcgttctctgctggctgccattctttacagaaagggaacaaaccctgcaggttctaagaagactcttcccggttgatcgtggattatttgaggataaagtagccaatatttggtgcagcttcaatgtctttctgaagattaaggatattttgccacgtcacatccaattaataatgagcttttgttttacgtttttgagcctgcttcctgcatgcataaaattaatacttcagccctcttccaaaggattcaaatttacactggttagctgtgcgctatcattctttttattttctttccaagtacatgaaaaatccattctcttggtgtcactaccagtctgcttagttttaagtgaaattccttttatgtctacttggtttttacttgtgtcaacatttagtatgctacctcttctattgaaggatgaactcctaatgccctctgttgtgacaacaatggcattttttatagcttgtgtaacttccttttcaatatttgaaaagacttctgaagaagaactgcagttgaaatccttttccatttctgtgaggaaatatcttccatgttttacatttctttccagaattatacaatatttgtttcttatctcagtcatcactatggtgcttctgacgttgatgactgtcacactggatcctcctc

SEQ ID NO: 240452 - DNA, 2326 bp, Homo Sapiens
  misc_feature (1754)..(1780): n is a, c, g, or t
  misc_feature (1804)..(1816): n is a, c, g, or t
tcttagctgaggtcactgggatgaaggtcctgctttccttcgtgtgtgggtaatgagaggtataaccctcccagtaaagtagttgagcttcagaatgatttgggtctcttcttccacctgtgacatcattctattgcttgatgtcagagtagaagttgttggatggtctttatcttcttccaagccttcatgtgatgtagagaagctctgagaattactctgctgcgttgtcattgaaagaggtcctgtcctgtccaaatcttccaccaaacctgtgtttggatttgcagtaggctgaagcgttgtactatgactggagtccatatctgaaggaatcaatattagtgttattgcttgatttcccaaaccactacctgaaggtggcttatggtctacagctgatttttttaaatattcacatctggccaagaggaaagaaagcacatactgactatatctcccgaactgagatagattattgtttcatcaaagagcaccacaacaagtaactggctttccttgaagggccgagttatatgaaagctatgctgtgtgtttgtttttgctgagtctggaaggactccacatgagtgcatgatggaacacccaaatcttgcagagagacagaaacattgccttttttatagaaacatgcaatctgacacatggagaaaagacaaagtgtgctggctcaggcaccattttatcccctcccccttaccaaccaaagggacttttaaaaatagccctcttcccccctttagtctttttttcttcacaaagtgaatatgcaaataaacagaatcgtcatccaagaccacctaggtggagttacagaaagtatacaggggcaagaaataagaagcagtggacgtcattgaattattcttcccaaaaacccaagtataagcggtctttaaaatttaacatgtacaatgttgagtagtgcagaaatttcactgaaatacttgtaaatgttgtttttaacagttatcacagatctactctgctgaaataagaagtcttgagtgaaacagaggccaaacaattcataaaccccatcgatatttctggctgtcaattcagtcaaagtctatccacatcactgcctctgggggagatttaatcagtcccagtgaagcaccagaatactgggtacccaggtctgcactgcagcctttcaacactaaatattcaagattcaacactaaatattcaacactaaaatattaaagatctttgtaggacaaaaatgtggtgaccctgttatcccagatttcaaacaagagcaagtgctaacctgaatcaaaaccacaaatggacattctcccagaaaaagtcccacttgatgatgggctctagactcttgttcatcttccctcttataagtagagtccttcaagagtcatcataccattgtgtagttgaagccaattgtattgtccttgacatgttcattaatttaatggaatctctttctcttcatcagtacatagaattaatattgattctgaagatctttgcctggcttggttttcccccatgggtgtcctcagagctccagctgccatgtgcaaactcatgtgtgctgggtctgcctgtggtacttcagtcactcaacataatggcccctgcctagccattcaaacacatcttcccttgtgaaaaatggatccactcactgacatattcattccttggcttttcttccttcacgtttctccttacaggagtctccttcttaggaaaactgnnnnnnnnnnnnnnnnnnnnnnnnnnnttcctttctctgactatccagggnnnnnnnnnnnnncataaaccaagtccaattcacctttctgtgatgctgtggtgggcagggaggggttctcagaatttctttagcgtttattgttggcaacattcatttcatatctattacttactgcctcacacagatatattttgacaataagttttttcttttgccaaccctcctgctaaattccttactttcagctcagaacttcatattcaggtgaatatgagtatcactcctaccaagaaaactaatttttgaagaacctcaggtccttcaggaaagtagtttggtctaaaaccaagggcatatttctagaaaaatagtcagcagtcactcagtggatttcaaaaaacataatatataaaaatctcagaggctattacccatccttcttcctgcttgatgacctcgtcccatggggtgtgagattgggttgaagaaatcagtccaggaactgtcctctgggcttggtgttgtccttccttgcattggatggctggtatgagctgaggctgctgccaa

SEQ ID NO: 240453 - DNA, 351 bp, Homo Sapiens
ctttgtacaaaaaagttggctcaaactttaactgggtaagaagcccggctcgctggcgtggagccgggcgtggaatgcgagtgcctagtgggccacttttggtaagcagaactggcgctgcgggatgaaccgaacgccgggttaaggcgcccgatgccgacgctcatcagaccccagaaaaggtgttggttgatatagacagcaggacggtggccatggaagtcggaatccgctaaggagtgtgtaacaactcacctgccgaatcaactagccctgaaaatggatggcgctggagcgtcgggcccatacccggccgtcgccggcagtcgagagtggacgggagcggcgggg

SEQ ID NO: 240454 - DNA, 953 bp, Homo Sapiens
agttgggccccggcgaccgaaaggggtgccgcgcgcgggtcggggggcggggcggactgtccccaatgcgccccgggcgggtcgcgccgtccggcccgggggaggttctctcggggccacgcgcgcgtcccccgaagagggggacggcggagcgagcgcacggggtcggcggcgacgtcggctacccacccgacccgtcttgtaacacggaccaaggagtctaacacgtgcgcgagtcgggggctcgcacgaaagccgccgtggcgcaatgaaggtgaaggccggcgcgctcgccggccgaggtgggatcccgaggcctctccagtccgccgagggcgcaccaccggcccgtctcgcccgccgcgccggggaggtggagcacgagcgcacgtgttaggacccgaaagatggtgaactatgcctgggcagggcgaagccagaggaaactctggtggaggtccgtagcggtcctgacgtgcaaatcggtcgtccgacctgggtataggggcgaaagactaatcgaaccatctagtagctggttccctccgaagtttccctcaggatagctggcgctctcgcagacccgacgcacccccgccacgcagttttatccggtaaagcgaatgattagaggtcttggggccgaaacgatctcaacctattctcaaactttaaatgggtaagaagcccggctcgctggcgtggagccgggcgtggaatgcgagtgcctagtgggccacttttggtaagcagaactggcgctgcgggatgaaccgaacgccgggttaaggcgcccgatgccgacgctcatcagacccccagaaaaggtgttggttgatatagacagcagacggtggccatggaaagtcgggattccgctaaggagtgtgtaccactcacctgccgaatcaactagccctgaaaatggatggcgctggagcgtcgggccatac

SEQ ID NO: 240455 - DNA, 1376 bp, Homo Sapiens
  misc_feature (161)..(179): n is a, c, g, or t
  misc_feature (911)..(950): n is a, c, g, or t
atcgatcaattcactgtctgtagcattaatattttaattttttaaaaaccaatcagaaaactgacacagatcagtatgctatttcaaatctattaagttttatcacaaataaagagtactataaatgaaaactgtcaataggaaatttccaaaatggccgnnnnnnnnnnnnnnnnnnnaataatcaacatcaaaagacatatgcaaacagcagtttaagactggggtttcttaaatctaccaggaaagtctgtggtggatttgactagggggtggttgaaaagccagtcatttttgtttaccaaatatacagtacttcttaatttataactttataaatgtgtcaacttgttttacccttatgaaaatttaataaatttaataacagcaaaagatgcatagtctgaaaagagtatctggcacaccattcatgaaagtattcagtatgattatcaagaaatataaatttaaaagaacaaatacaatcactatattctaaatcaaacatttcacatttcactcaatttcacttatatagcctggggtaagcaacattaggtccaactcttcagtgactcaagttgtcaaaattcattatcagtgtattacttacctctttttctttatgataacgcaagaatagtagtttagatgatggtataaacagtttttctacaaatgatgatggcagtttcgtatttatctgttcaacaatctaaaagaataaaatttttaaaaaatgagcttctcaaattacaaaaagacatggagaaaccttcaaggcacactggtaagtgaaagaagccaactgaaaaggctacatactatatgactccaactacatggcattctggaaaaggcaaaacgatggagacagtaaaaagatcaggggttgccatgggcttaagatnnnnnnnnnnnnnnnnnnnnnnnnnnnnnnnnnnnnnnnngggtagaacatcaaagatttttagggaagtgaaactatcctgtatgatactggtaataggggatacatgtcattacacatgttaaagtccatagaatacataacacaaagtaaactataaaattagttaataataatatatcaatattcactcctttgtaataaatgtaccacactaacacaatatgttaatgagggggaaactgttgggatgaagaaggtatatgggaactcattgttttctgctcaattttctgtatatctaaaaaataaagtcttttaatttagaaaaatatatctaagctatattttaaggccttaatactgtgacattaaagtgtttagacacctaaataggacacacgtattttacagttatcatgggcattttttcacattagcaaagagaggtgtaattctggcccaa

SEQ ID NO: 240456 - DNA, 1403 bp, Homo Sapiens
  misc_feature (509)..(517): n is a, c, g, or t
  misc_feature (1244)..(1283): n is a, c, g, or t
gtcagggcactgaggtcaaatttaactacaaattttgcatgtctacatgaaacacatgattcttaaaagcctcatgttttatttcagaacaggcctcaggaagttgcagactgtgcaggaggttgtttagggcacaagtcatttctcccaatattaactttataggcagtctcccaaaacaggaatattcttcaagctgagcattgcttgataaacagcatgggctacagcaacaacctgaaaaacaaaaaattcaaggaagtgataaatggaaaataaatcttctaaaattatatggaaaataaatcactatctgtattagtgctgatgatacaaataaatttaagattgatcaattcactgtccgtagcacttaatattttaatttttaaaaaaccaatcagaaaactgacacagatcagtatgctatttcaaatctattaagttttatcacaaataaagagtactataaatgaaaactgtcaataggaaatttccaaaatggccgnnnnnnnnnaaataatcaacatcaaaagacatatgcaaacagcaatttaagactgggtttcttaaatctaccaggaaagtctgtggtggatttgactagggggtggttgaaaagccagtcatttttgtttacaaaatatacagtacttaatttataactttataaatgtgtcaacttgttttacccttatgaaaatttaataaatttaataacagcaagagatgcatagtctgaaaagagtatctggcacatcattcatgaaagtattcagtatgattatcaagaaatataaatttaaaagaacaaatacaatcactatattctaaatcaaacatttcacatttcactcaatttcacttatatagcctggtaagcaacattaggtccaactcttcagtgactcaagttgtcaaaattcattatcagtgtattacttacctctttttctttatgataacgcaagaatagtagtttagatgatggtataaacagtttttctacaaatgatgatggcagtttcgtatttatctgttcaacaatctaaaagaataaaatttttaaaaaatgagcttctcaaattacaaaaagacatggagaaaccttaaatgcacactggtaagtgaaagaagtcaattgaaaaggctacatactatatgactccaactacatggcattctggaaaaggcaaaacgatggagacagtaaaaagatcaggggttgccatgggcttaagatnnnnnnnnnnnnnnnnnnnnnnnnnnnnnnnnnnnnnnnngggtagaacatcaaagatttttagggaagtgaaactatcctgtatgatactggtaataggggatacatgtcattacacatgttaaagtccatagaatacataacgacaaagtaaacccaa

SEQ ID NO: 240457 - DNA, 1041 bp, Homo Sapiens
  misc_feature (122)..(176): n is a, c, g, or t
caaaatttcctccttcatgggtccaaaatttgaagactgattgttgtaattcccaaaatcattgtagcttccaccacctccaaaattgcttccatcattaccaaatccattatagccatccnnnnnnnnnnnnnnnnnnnnnnnnnnnnnnnnnnnnnnnnnnnnnnnnnnnnnnntgaagtttcctccacgaccgaagttgtcattcccaccgaaaccacctccacgaccaccaccaaagtttccagaaccacttcgacctctttggctggatgaagcactagccatctcttgctttgacagggcttttctaacttcacagttgtggccattcacagtatggtatttctgaatgacaatcttatccacggagtcatggtcgtcaaaggttacaaaggcaaagccccttttcttgccactgcctcggtcagtcatgatttcaatcacttcaatttttccatactgttcaaaataatctcttaggtgatgttcttcagtgtcttctttaatgccaccaacaaatatctttttcacagttaagtgggcacctggtctttgagaatcttctctggagacagctctctttggttccacaactcttccatccaccttgtgtggccttgcattcatagctgcatccacctcctccacagtggcatatgtgacaaacccaaagcccctggagcgcttggtgtttggatctctcattaccacacagtccgtgagcgttccccattgctcaaaatggctcctcaggctctcatcagttgtttcaaagctcaaccctccaatgaagagcttcctcagctgttcgggctctttaggagactctgacttagacatgacggcagggtgaagagagactttaacgatgcttcttcggcggcgtccacgggcagaaaagcgagatttttctaaatgacataaaaatatgtattcgtgaaacagtcttttcaagataaggatcccatccatcggactcaaacattacccgctggtccttggtaatcttgccccaccctagtgcttcttctctctcag

SEQ ID NO: 240458 - DNA, 1770 bp, Homo Sapiens
  misc_feature (1250)..(1290): n is a, c, g, or t
  misc_feature (1353)..(1361): n is a, c, g, or t
ccccattttgaagacttaggcacataacctcagttaaaaccattggggaatatccagttcttcaaaccacaatctaacctgttctgtgatgttttaataggtgccctaacctgctttcagctccaactaccccataaagatttcttgtctcgaccagcagagttgaagacatttttgaataagttgacttaaaccacagtctatcagtcagctttgaccacagcaaaaacaggctctgcaattgctagaaaagaaattcatacttgagaattttctacctaaaaaattcagacctgagaaattcatacttgagaactgaattaagaaagccctgaacaaatcttaattcaatgtatatcatattcaaatttcaaccttgttaatttatcaaacttttaaaatcaagaacaacttcttttgggaggaggaaaacggagagggataaaaaagatgcctcagaaaagtagttaacttcttaattaggtaaatgttattcaaaaaacgatcaaatatctttcttctcaattcctttattaattctcacatttaccttaaacaagtttcacacatttttcaaataaaacttagatcataaaaccactcttaagccacctcttaccaaggctaatctactttatttccttttttcagagagttattcaacaaatataaacatttaccacttacgatcgtgggatctttcctttcactagtgaacccattgcttctgaatcaaaacaatttctcgtcttcaaactacttaggttccactgtcccggtaggataatccataaaattagctgtcaatatcttataaggattatatcacactgagttctcagaaaagaaaggtagcatctaagccattttaaaaacgatcactagactctgaccctgctgctagaaaagatcaacttagaatttgatctacctaagcaaaataaaaaggggtaccaaaaaggctgaacagacatgttcatttgtcaaaggtgttcacaattgctgtataaatctaaagtattttataatgtcttgacatttaaaatgcctgtcgagacaatttttaactgtttttaaatgctttgtcagttaataggaaatataaacaagtcagatcatgggaaaagctacttacagatagatggaaagatatagaaaaaaagtatagataagaagtattcagttaagaagttataacatggtctggcttagagctaaaataggcctcagaattttatattcttgttttnnnnnnnnnnnnnnnnnnnnnnnnnnnnnnnnnnnnnnnnntcacgcagaaagaaaggaacagagccagaagtagaacccaggtttcctgactgtcagtgttcnnnnnnnnngtgacttttataatttcttcctattaatgctctatttggaattatgagatctattttaagttaaaagtgaatctattaatttccaatctgttcatagagaccttagcatacagactatcaagtgacatatatatacctttttttcccccagtgttttgatgttcatctctacagccttccaagttaaaactatttaatacttggtctatcatgctacccaaaaacaggatcactaataatctgagtagtaaacaggaaaaagcttcttaaaaatattactcaatccaacaacttagtaaaaaactggtacaatctttctttttaaaaaaataattttttccaagaagaataactattaaatcatatctactacttatacctcaactcttcccacctttaagggtgacca

SEQ ID NO: 240459 - DNA, 1825 bp, Homo Sapiens
  misc_feature (173)..(182): n is a, c, g, or t
  misc_feature (1712)..(1720): n is a, c, g, or t
agtagaagaaaatgctaagtcataaagagaactcccaagaggaaatatgtctgttttcctatacaaggggtatttaccctctgataagaatggtgacattattgctatgagaatcaaaaatagtatactcttagagggagacaactcttttcattcctccataaaagccaggnnnnnnnnnntctgtgactttcattatagcaaaagaaaatattcatataaaagctatatgttatttcctaaaaccagaatctattatgctcattaagcacacattttaattactacacactgctcaagtcttgatgtaatcttagaacaagaaagtggctttgcttttaaaagaggcaacagtgtaaatgtgacattatgatggcattttaattaacagaaagaaatgtgaacatttaaaaaatagaaaagcccaacataaagatccccctcacataacagacattttactctagaaattaattgcacattaaagagttgttttagccatatgtggcactccacagaaattaaacatgctctcaggcattcaaatggtctgattacccaaatggccaccaagcaagagtttgtatactgaaaggcacacatttccatgttttatcttgtaattttgtgtaaattttccttagcactgttgattaatgttaatttaagtaaaaggtgccatcgccatctgtgcaaatctaaacaaatcctctccagaaaccattacttattttcataataccaagtccgaactattttctgcctttagataaacatgctactttcattttcaaattctgaaagtggaaatcccttgccttttcaaaggaatgacattttaatggaacctaatacgaaatgatttgttaaatacaatgttaaaagcatgattaagaattcaagtacaataaaagataagcaagtgacattcttacagcaaaagctactataataaaactaaaacatgctatttgattaaaaaggacacgatgcaaataatatataagagcacaatttggtatgcaatgtagcttggaccagctttcagaattttcacaggtaaaagaaaagcatttgccaagtataccataattcatatgcaatacgcaggtgcaaatacaaatggttatttcctgcttcaaaaataacaaaataaccactctgaaagcagtggttgttaatatttgaaaaataaagttataaaaacaggccagtatacaacactactatgaatatgaatgtttgtctacatagagggcccaagacaagctgaatatcatacagtaatccaagtttcagtagcataaaaactactagatagccaaagggtttcacttaagcaacactgcagcactgctgaatttttataggtagttcaggtcactgacttccttactgagtaaatacaaacctactagcaactatattgaagaacagttgaacaacagcacttctgtgatgttactccctcccatttcctcttctctcagtcttaataatatatattttaaaacctctgtgtgctttgagagtcacagaataaacaaacttcccctcaaaaaactaaattaatatagtcaaaataaaagctgtattaccagttatggcatctaaataaaatctaactactagcatgctagacaccaccattaacaccaaagtttagaacataagttaaagagatcaaggtggtaagctgggtgggaagtagnnnnnnnnntttttgcctttttttaaagttaaaagatttgtgttaaaaaagaaacactatataatagctcacagttttctgggtctgtaatccaacttttttgtacaaagtggg

SEQ ID NO: 240460 - DNA, 1302 bp, Homo Sapiens
aaagttaaaagatttgtgttaaaaaagaaacactatataatagctcacagttttcttctctgtaatgtactttaaaaagtgttcatgtgttacttctgaaaacacaaaggcaaaaggaagacaaaaactgaagattaaaaaaatatatcaatatacaagtaacctaaacacatgtaaattttgtcaagataaaccatggaaagttgaattcgttgtaagaacacaatggtgaagacaagcattcctgcagttctcccaggcagtgaattcacactgaacacagcagtgccatattgttcttcagagccccttacagaatacagacctatgcattcttaatatacatattacatttctattatttttaatatacaagtcaaatttctatgctttcttcccaatgtgcaaactggagccaacgtctttattttcaatggcctggaagggccaccaaatgaaagagaggtaacttagtggcccacccacctcttccccccaaattttcccctcaaattacaaagttgattttaaaaacttgttgaattagaatagatttttaaaattctttactagtaaacacaagaaacttttataattactaaactgtttaataaaaatccaggtcctcaccacctgccctatgctaatcaatgcacagactgttaactgaatgtttagcttaaaaactaaacacatttataagcacacacttcagcccaacaggaaaagtctacatatattcatgtgtatacaatttcagctagatggtatgcttgcaaaataaaactatattcctgaggagctagtttggggtttctttttaaggtgtggcactaaaagaaacaaattaagtttttctgtaaggaaattaaagttgtggtttcaattccactgaactcagacaagacccaagtctttaattacatttaataagtatgaaaacctaattaaaataaatattcattcctgggtcaaattttatctccaaactatgatcactgataactttaaatcttaaatagatgtttcataaagctggaaaggaagaggtatatatcactgagggagaatagcaagtaaaaatatttaagacctattatgagagttttaaattgttttcttatacaagtgaattaaaattcaacacaattcttacccttttgtaaaaagctcacacgcaacttttaccaaatataaccacatacaataagcagtttcagttcaatctatcaaaagggaagtttcttcagttcattccaacaagtatcttctgattgaacccaagttggaggaaggatccaa

SEQ ID NO: 240461 - DNA, 1590 bp, Homo Sapiens
  misc_feature (361)..(409): n is a, c, g, or t
ttgggtaattgggaggataaagcaataataaattcaaatatatttttctccaaactgccaaagggaaagtagaattgtggagggaaatgaaatatccatgtaccaggccaggcagatggtcagttaggatgacaatagtaagttcatctacagcataaaatgtgaaatgctttcatcctcattgcccatttccaactaccattctgtttctcctctattgttcatggtttttcaaacatatctttgatttttcaacccccctttttcattaatctgttcttaaaacttctttttactggctttcatacttagcattccagtgaaatgttcttagactcaccagtggacaaataataaggcnnnnnnnnnnnnnnnnnnnnnnnnnnnnnnnnnnnnnnnnnnnnnnnnnattgttgaattctccctcctttggcttgtgggatcctttttctctaatatctgtctttctttttttagttgatctttccacccactcccctttctcctcttctccactgagaataatctccctgtcttttattcacttcattttctatactcctatttatccattttgattgtttatacctactatttgtattcgaatgacttcatttttcccaccctgtgggtcagtttgtgacttttggaattttccacaggtacctgtacaacttgatatttgaaaacaggattcatcaccatatatccccagcccccgttttctttttaaacaggcctcattgcgtaattcctttgccctgaaaagtgtcaccacctttatatttttaccccagccttggagttatctttttctgctctccattctccatgtccaaaaacttgctgtcagtccagtttttaatcagttttctccttgaggcttgatctcccatttctctcatcccattatagcttttcatgtagatctgaggcccaggttactgtaattcttttttttccaatttccttgctcccaggatccccatcttgtataaagtttctaaggtgctcctcctcaaactccatttttacaatatccgtattgtaaaattttcattttcagtaacacccagtagataatttttcaaagacgatcctcctcaaacacccatttttacaatatctctattgtaaaatttcattttcactaagtaacacccagtagataattcctatggagcagtggtgttccaaattctccattacctctatgcctaatattcatcagccttcattactctctagcatattcaccttgattcaacagattcaaacttcctacagccttctactgatgtcttacaagctcttgcctctgtgcctttctcatgctattctttttgcttagattgctctttggtcccagctcatgttcatcactcccttcaaagcctttcttcctttatatcttctgactgagctctccctgattgacatcacctcatgcgatgacctccctcattctgtgctgcctcagcacttatcttttgagtttgtactgtggtccatgtacttactaatatgttgctttgtaattattttctagcactctgtgttacagtttcatatttgtatttatttccaaaa

SEQ ID NO: 240462 - DNA, 2464 bp, Homo Sapiens
  misc_feature (1087)..(1101): n is a, c, g, or t
aaaacacattgcagtaaaaattaaagatatccatccataaatttacttttaattcttcattaaatgagcacagagtcattagtatattaataacagatatgtttattattacatatccatcagtgcggctttcaataccacttgaaacatgcatatcatcctagagacgatcggttttccagtgcttcttatctgatacacattactgcaaagccattataaattactgaggaggtatttggttaaaaaaataaacaataaatcatactgtccatatgaatcaactcttgttactggacaagagtttaacagtatttatctggtaattcctatgttaactggaaaacatcatggatgtattgccatatttcctttttatgttggtgcaaccttctacattttttgcagttttataaagtcattattgtagcaggtagtttgatgcaaagattgtactcaatttatgaaagtccaacaaacctctaaatattttaaattaaaccaattatcaatgaaaaactcactgacacacataattttttgaaaatacattttttgaaatttctatacttactcatggcagtaaaataattatctcaaattaaggcactaaaaggacaatgcaacccccattgaaagtgttctaagaataatttacatttcaaacagtgcatacatttcttatatgtttgttaacttaatgtctttatcatttaaaaccacaaagaaatacattatacaattatagaaatgatgtaccccacaaaatgcttttaaacttggttcttttgtacagttagtttcctaatgtctctagtagtaaaataactcaatatggcttggcaaaaatgcatagattaaatgtaacttttttttgtcctctcccattccccaaacttgctgaaacatatacagtattttgtaaagcataatgaaagatatttaatttctccatcaagtccaacatgggcaatcaacagtaaggcttttaaattctacagtgagggcactgaagttcaagtgatatcactgctttcttaaaatagttttgtatagtcttgcaagagcacaaaaacttaagtcattnnnnnnnnnnnnnnncttcagtttgtctcattttgagatattttctttactccttccatgagctgatcttgatagtgatggctgttccacttgaaagtgaaagtcccttcctcttactcatatgaggaaaactctgttctatcacgactgacaggcattttcttataaatccaaaaaggcagcaccttttaaaaaaaatatatctacctaagctttcccccaactgtacttgcattacatagtaataattaatctaatctacctgtaggcaaacccgcaataaaaaaaaccctcagtgtgttgtgccaaagcaaggacagaaaaacagcaatcttaaccctgaagcctgtgatatttgtgtcaaagaaacagcctgtctgctctgcatggttaaagaagcctggtttatcaggtagcatcccacacgattccacagggcactcagtcacatggttaactagtttttccagatgtatttttgaccactttccggaaagactgatttgcagtggatcttgtagaaagcgttcgaggggaagcacgaacaaaaccagatggtggattcttagggattttctttactaaatgagttacccattttttttgttcatcctgagaacatgctaacagcagcatatctcttgctgatgttacatcataacttactttacatggacaaattaagtcctctttcttatctaagtgatctctgtggcacttaacatggcatcttcgacactctagggcagggggtggcttaaaaacatgccagagaggtttggcacaggcatcacaattggcaggaaagtggtagagtgtaggaataaactcatggcctttgtgattttggaaattagttttttcagcttgttgtactggttccatctctacatcttttctacattcaccttcatttgcatatagtatctggaatattttaggaatttcttcagtttcagctctatacacatctccttgggttacaggtctaacgtgaaacagtttatctatgtccaataccatagatggattggattgctccttatcttgttcgtcattatagaacaaaatttttttgctgcttaccacaacatactgtttcttccagccatatcgtttgatatttcctctatttggtactgaaagccaaccttcaattcttgactctaggagaaaaagaatatatgtattagtcagtcttaaattgtaacaaaagaaaaactattaaaagttgtctgacagcatgcagcaacaagcaattgaacacaactaaatgaataagtgctataatttgctcttccatgcttcaatcacacaaatcaactttaatggccatacaaatattgcagaaaaaaattccaagccacttttcccccaa

SEQ ID NO: 240463 - DNA, 561 bp, Homo Sapiens
ttaaagttcagctttttattgaacatgttataaaagaggtttagtcaaaaagaccaaagcccatgtcatcatcagactcctcggattcttctttctttgcttccactttcttctcctcagctggagcagcagcagtggagggggcaggacctcctgctggtgcagcaccagctgctggagcaggtccaccggcccctacattgcagatgaggctcccaatgttgacgttggccagggcctttgcaaacaagccaggccaaaaaggctcaacatttacaccggctgctttaatgagggcattgatcttatcctccgtgactgtcacctcatcgtcgtgcagaatgagggccgagtagatgcaggcgagctcggagacagaggccatggcgcgggcgagtgtagggctggcgctgccggacgcggtgctagtcgccggatgaagtgagggcctcaccccaacgcagccttagcttcctcggaaggaccgagccagcaccttggccaacttttttgtacaaagttggcattatagtaagcattgctcatcaattgtgcaacgaa

SEQ ID NO: 240464 - DNA, 1185 bp, Homo Sapiens
ttggcctgcatatattttatagccaggtttaaattatgactcaccctatatggccataaactgcctaagcactcaggcctcccactcatcaacccctttgaccagagaaagaagcactctggttctctatccccttgtcacatagagagtttgtcatggggcctctggctgtgcccttcacataacagaataacttgccatctgcctgcaccaaacccagggatgtggaagacatctccccacaactgccactgctcaccaggacaagctgcccttcctgtctccacctctcagtccccctagaatggatggctggggagaggtggaggctgacagctgagacgtagtgtcagatatgatctaggagggcggatcaccgggatccgggaccatacaagtaacatggtttccatggcaactgcttgctcgtttgaattaagacagcagtcagttgtcattgccatgacaaggcctctatctccaggcacaatgtccctgctgtctcctaatccaatggacttgctctcaccccagggatgaaacacccagaaactcacttctcagtcacttccacagccgatgactcagaagagccaaacccagaatggggcctctcttttccccatcacagactcccctgacaacctttcctggcgtaactagaggagtcccagtgcaggataggccctaaacgttttgttaaataaacaggtgcatgaaaggagcctaaggccattgttgatatccactctcttctttccacttccttctcatctttttctccatgttttatgcttctctgattccctcttctgcctgcaccagaccagccccagccctttattcctctccattttcactccttccagcctctgtccctgaactgccactggcaacccatgggacctcaggaccagagactgcttgactcatctggggagggtaagttcacgggggacaaaaaaatgattcctaaagaagaggcttcctagaccagcacaggctcgagaaagacatcccctaggcctggacttctgagcagctttagccaggctccggacggcagccaaagaaggcctttccccattgctcctttccccattgctcaatggattccatgtttcctttttcttgggggagcaggaagggagaaagtagaaaaatggcagccacctttctagaaaa

SEQ ID NO: 240465 - DNA, 1068 bp, Homo Sapiens
tgtacaaaaaagttggaatttatttaacctgacaagtacaacaccatttagagttgatattgacataaatgttattagcctactaatttggaactgcatttctcaacaatgctggcaagcatcttccgtacttagcataccaagttgtaggggagagactgtgtatatattttttaaaagcaatccaatggatttgtttttgttcatattttgaaaacaactcgaaggatttttcttattttagaaggtagaaaatatgtggacctgtgttttaaattaatatgtatttataaattataacattgaatgatacaacagagctctaatattttttgttctcactttctgatatttaatttttataaatgtttttgtaagtaactaattgtagtattgcttttaaatagttttaaaatctatctcaaataagttctgcccagacctatttccttaggacagtattctaaagttcagtagtccagtgtgagcttgaaatactcctagatcccgtcagtgatttttatatataccaatacacaagcaaattattaatataccaaaaacctaatttctgcattgcattaataaaatacttgttattttgcctttatccaattcagttgattaggtgaaatagaaaattaatcttttcaaatgtgcatatgatcataatttttcaaaatgttactgtggtcatttttggtgcatgatgccaagtttatctttagttagccattgccacctgatatgtaatgacaaatgttttactatctgatcattgggttgtagattaaactattttttttctctgtagattctcactacattttcaaatatgtacttggaaaaagctgcaaagtgctacctataagcaaattagtaactttggccttatctatgcatagcgttcgctcagtttggttttgataaattgattgacttgcagttcctttgtagtattttaacttattgtgatgtaatgaattttttgaaatgtttatttgattacctgttaaaatataggaaagaatgtagctttgcatgaaataaattacatttctacaagtt

SEQ ID NO: 240466 - DNA, 282 bp, Homo Sapiens
taagctaacataccaacaggacagttattacttcctaaaaaaataaaaggatatacaggaagggaaaaataaataaaaatttaccacaagcttcagctccacatagcatttgtatagtcatgataatgtaaacatgtaatgtgaatatatgaatctagccaaaactatgccataactataaagaggggaaggctagtacaggaagggggtcatggagcaaagggatgaaagacatgaagactcatccttcatagcctgaatccgaggagtggataaagccaa

SEQ ID NO: 240467 - DNA, 1775 bp, Homo Sapiens
ttggctcgtgcttgccaccatctgcctcgcgcacgcgctcactgtcctctcggggcattggtctgtgcacgcgcattgcgcgctcacctgcaccccggagtacgaccccagcaaagcgacctttgtgaaggtggtgccaacccccaacaatggctccacggagctcgtggccctgcaccgcaatgagggcgaagacgggcttgaggtgctgtccttcgaattccagaagatcaagtattcctacgatgccctggagaagaagcagtttctccccgtggcctttcctgtgggaaacgccttctcatactatcagagcaacagaggcttccaggaagactcagagatccgagcagctgagaagaaatttgggagcaacaaggccgagatggtggtgcctgacttctcggagcttttcaaggagagagccacagcccccttctttgtatttcaggtgttctgtgtggggctctggtgcctggatgagtactggtactacagcgtctttacgctatccatgctggtggcgttcgaggcctcgctggtgcagcagcagatgcggaacatgtcggagatccggaagatgggcaacaagccccacatgatccaggtctaccgaagccgcaagtggaggcccattgccagtgatgagatcgtaccaggggacatcgtctccatcggccgctccccacaggagaacctggtgccatgtgacgtgcttctgctgcgaggccgctgcatcgtagacgaggccatgctcacgggggagtccgtgccacagatgaaggagcccatcgaagacctcagcccagaccgggtgctggacctccaggctgattcccggctgcacgtcatcttcgggggcaccaaggtggtgcagcacatccccccacagaaagccaccacgggcctgaagccggttgacagcgggtgcgtggcctacgtcctgcggaccggattcaacacatcccagggcaagctgctgcgcaccatcctcttcggggtcaagagggtgactgcgaacaacctggagaccttcatcttcatcctcttcctcctggtgtttgccatcgctgcagctgcctatgtatggattgaaggtaccaaggaccccagccggaaccgctacaagctgtttctggagtgcaccctgatcctcacctcggtcgtgcctcctgagctgcccatcgagctgtccctggccgtcaacacctccctcatcgccctggccaagctctacatgtactgcacagagcccttccggatcccctttgctggcaaggtcgaggtgtgctgctttgacaagacggggacgttgaccagtgacagcctggtggtgcgcggtgtggccgggctgagagacgggaaggaggtgaccccagtgtccagcatccctgtagaaacacaccgggccctggcctcgtgccactcgctcatgcagctggacgacggcaccctcgtgggtgaccctctagagaaggccatgctgacggccgtggactggacgctgaccaaagatgagaaagtattccccgaagtattaaaactcaggggctgaaaattcaccagcgctttcattttgccagtgccctgaagcgaatgtccgtgcttgcctcgtatgagaagctgggctccaccgacctctgctacatcgcggccgtgaagggggcccccgaaactctgcactccatgttctcccagtgcccgcccgactaccaccacatccacaccgagatctcccgggaaggagcccgcgtcctggcgctggggtacaagga

SEQ ID NO: 240468 - DNA, 423 bp, Homo Sapiens
tagtagggaaattgtagataattttaatgaagtcaacgtcaagaatataatctggttgtaataccaatacaatgtgttctaaaataatttttctattgagttaaatattcatctgtagatcctataacagcatgttcatattcacaaaatctgaatgaaaagtaaacacaacttggcatttctgacgcagggtaacacaaagttcacttcggaggggactgagatttttgtttaattttgcttttgaaaccaagcacagttatagtcaaaatgagggacattattcagaatgaggttatgtatttatttaacaaaatactgcttctctgaagtacatttcattagggagagtgacagtaatgctaaaaaaaagaacatgaaaatgcacacagcatttctgaaaggttataataatttatttaa

SEQ ID NO: 240469 - DNA, 1520 bp, Homo Sapiens
  misc_feature (251)..(314): n is a, c, g, or t
ttggcagggctcttctttccaccccagctcaatggcacagccaatgacacagcaggcccagagctgcctgaccctttggggggtctgttagatgaagctatgttggatgagatcagccttatggacctggccattgaagaaggctttaaccctgtgcaggcctcccagctggaggaggaatttgactctgactcaggcctttccttagactcgagccatagcccttcttccctaagcagctctgaaggcannnnnnnnnnnnnnnnnnnnnnnnnnnnnnnnnnnnnnnnnnnnnnnnnnnnnnnnnnnnnnnncttttctgaggaaggtgcggttggctacagctctgactctgagaccctggatctggaagaggccgagggtgctgtgggctaccagcctgagtattccaagttctgccgcatgagctaccaggatccagctcagctctcatgcctgccctacctggagcacgtgggccacaaccacacatacaacatggcacccagtgccctggactcagccgacctgccaccacccagtgccctcaagaaaggcagcaaggagaagcaggctgacttcctggacaagcagatgagccgggatgagcaccgagcccgagccatgaagatccctttcaccaatgacaaaatcatcaacctgcctgtggaggagttcaatgaactgctgtccaaataccagttgagtgaagcccagctgagcctcatccgagacatccggcgccggggcaagaacaagatggcggcgcagaactgccgcaagcgcaagctggacaccatcctgaatctggagcgtgatgtggaggacctgcagcgtgacaaagcccggctgctgcgggagaaagtggagttcctgcgctccctgcgacagatgaagcagaaggtccagagcctgtaccaggaggtgtttgggcggctgcgagatgagaacggacgaccctactcgcccagtcagtatgcgctccagtacgccggggacggcagtgtcctcctcatcccccgcacgatggccgaccagcaggcccggcggcaggagaggaagccaaaggaccggagaaagtgagcctggggaagaagggggtttgaagcccaccaagaccgaaactggagaagggctggacctggacctggacctggacctacagcggggacttaaatgccttcttatccaatatatcttctcagatgggatgactgcgggtcagtgtacaggaagaggcaggcactggctggctcagctccactcgggtggagtggaagtggccagaccatttagacggacagggtcctcaccctacccctttcctgtgaggcaggggtggtggtggagttgctggaggtagaggagctatgtggagcaaaggccgacagaggggaaggaatggacctgtgagaggaagggaaggtggcagaaagtctcatttcaggaaggagggatagaaggaaggaaggaaggaacctcccccccgctccgaaaaaaatcaaagcgggaagaaaatc

SEQ ID NO: 240470 - DNA, 1725 bp, Homo Sapiens
  misc_feature (1151)..(1162): n is a, c, g, or t
  misc_feature (1586)..(1616): n is a, c, g, or t
caaagccaggatttctttacagccaatacaagtggcatttcccgctcagttctgtggctgatgccctagccactgctgtgtcccctaatcctggggtgtcagagggatcctaagttttccagatttttgcccatacttaaaacttcaacgatcctgcttcacaaggaaggatgagtggagaattgagtggagttacacgcagcagagtgctggggaatctggagagcgggggcgatcacatgcctggaaatagagcagctgcagagcccaccccaggaggagcctgcctctccttacaaaggctgtaataagacagcacttgacgatgccatacgtgcgaaaagtgcagagtctcagagggtttacaacccccatccctttgtaactgtagtttgcttacactgtggattctaaagagacatgtaaatctggggccgatttcatctgtttaatgattactccccacccgatagagctattctatactgttgctaaaatttcattaagtctctcaagatgcattgatgagatgagacaccatgaataacacattcatcaactcaagtatggcaactgttcagagagcttcagagctttggtacccgagtgcagacttggtaattaccgggaatttgtctcccccgtataaattctggcgaacaacgagaaaacaccatctgtgatcgtttccacatcacgtttgctaacagagcacttctggagagcaatggccagtccaactggaaaatcagccagaggagctggttcctcagcactcacaggctgaggtgcctttcgggggcagcgccaccttctgaaggggaaccaagacagatttggaggggacttgctgctaaaagcatgtgaacagagaggagaggcaaaagcacattgaaaatggtgcatgtttttttctttgagagaaagaaaagccagcgaaacctccgccccagagactgcagagacgtttgttttcatgtacacaccaaaccgtacttgggcactggctccaggccgatccagggcagggatgatgttttaagggcaattgctgcttcaaggcttatctttcacatcagtggttttgatctattcaggaagagaacgattttgttcaaaactgaggtggaaattaggtgagggggcaactnnnnnnnnnnnngaatagaaagatgaggatatttacaggcccaaggccctgcagaaggaaaaggatttgaagaccctcacaaagggacacagccaactgccatcctctgtggcagtggctgtcacagtcgcccttccacttgcatgatggcaaggccctctggactaggaacagtccgtttgctggtcatgttatgtggtaggtggctgtcatctgtgagagaaaacttgagcaagagaagagacaggcgtggcctatttccacacgcacatccacggaggctggcctggaggccttgaggggctcacagccggggcaccaggcaggccatgcgcatctgcccttggccagtgtgaggtttgctccttcagcaaacctggaaggtaagaatggggcatatccacatccatagacccttttgtttccctcacagaannnnnnnnnnnnnnnnnnnnnnnnnnnnnnngggggagcagggaacatcaactttgttgggggaaatttctctgcataccagcacgccagcgagggcagacggccttacacactggcctgtgaacatacctatttgccaa

SEQ ID NO: 240471 - DNA, 1072 bp, Homo Sapiens
  misc_feature (81)..(107): n is a, c, g, or t
  misc_feature (235)..(250): n is a, c, g, or t
ttgggatatcattctgcctttaggtgtctcaaacgaaaacaaaatgatccaacctatgttacccttgagattcaaacccannnnnnnnnnnnnnnnnnnnnnnnnnnctcttgctgcccacaatgcgcctttatttcagcacccccaattttctgggcttactttaaaaaaatggtcaagtctaaacattgcatttagaaagcttttgttcttggataaaaagtcatacactttnnnnnnnnnnnnnnnnctttttccaggaaaatatattgaaatcatgctgctgagcctctattttctttctttgatgttttgattcagtattcttttatcataaatttttagcatttaaaaattcactgatgtacattaagccaataaactgctttaatgaataacaaactatgtagtgtgtccctattataaatgcattggagaagtatttttatgagactctttactcaggtgcatggttacagcccacagggaggcatggagtgccatggaaggattcgccactacccagaccttgttttttgttgtattttggaagacaggttttttaaagaaacattttcctcagattaaaagatgatgctattacaactagcattgcctcaaaaactgggaccaaccaaagtgtgtcaaccctgtttccttaaaagaggctatgaatcccaaaggccacatccaagacaggcaataatgagcagagtttacagctcctttaataaaatgtgtcagtaattttaaggtttatagttccctcaacacaattgctaatgcagaatagtgtaaaatgcgcttcaagaatgttgatgatgatgatatagaattgtggctttagtagcacagaggatgccccaacaaactcatggcgttgaaaccacacagttctcattactgttatttattagctgtagcattctctgtctcctctctctcctcctttgaccttctcctcgaccagccatcatgacatttaccatgaatttacttcctcccaagagtttggactgcccatcagattgttgctgcacatagttgcctttgtatctctgtatgaaataaa

SEQ ID NO: 240472 - DNA, 1500 bp, Homo Sapiens
  misc_feature (269)..(282): n is a, c, g, or t
  misc_feature (301)..(551): n is a, c, g, or t
ttggatctgaaatctcactgttgctatatactatggtcctatgtggattagcatctacgcctggattctctattcgctcctctgactattcctggcccagtaacttgtctgacaagttcagttttacagtatgttttgttctctagtaaagcagcacacccttgctctcccaactcttccttttcagttttcttggctattcttgagggtttttttccagataaacttcaataaacgtgtatcaaggtccaaaatgaacgctggtaggnnnnnnnnnnnnnncgagttggggtctcactcnnnnnnnnnnnnnnnnnnnnnnnnnnnnnnnnnnnnnnnnnnnnnnnnnnnnnnnnnnnnnnnnnnnnnnnnnnnnnnnnnnnnnnnnnnnnnnnnnnnnnnnnnnnnnnnnnnnnnnnnnnnnnnnnnnnnnnnnnnnnnnnnnnnnnnnnnnnnnnnnnnnnnnnnnnnnnnnnnnnnnnnnnnnnnnnnnnnnnnnnnnnnnnnnnnnnnnnnnnnnnnnnnnnnnnnnnnnnnnnnnnnnnnnnnnntgagccactgtgcctggccaaacgctggtaggttttgagtgagaccacattacatttaaatatatttacaatgttttctgctctattctttagtagacttttcctcacgtggtcctacgcatttctttctaagtttattttcatatagcctatccctgtctacaatttaaattgggatcttctatattctagttattatttgtaaataagaaaactactgacttttttctagtatattttctcagaataggattttctatttttctataaaatgaccaatgttatgaagcttcgtaagttttgtcaaagtgatacacacatacagcaaaaaatcaaatagtacagaagtataaaagcaacaacctctgccttgccccttctccaccttcaggtccccttcccagatacaataatttttagctttttatttttaattattctggttgttacctacataactctgggcaatatggaaaagttattgattttgtatattaatttcataatcagttaccttgatgaattctcttgtttctagtagtttttctttagggttttaaagggatacaatcataccatttgcagttagtaaccattttatctcctcttatttccaacttcgtactgttttctcttgtctaatttgtttttaattggtgggtacttctagaacaaggttaaataaaagtggtgttggtgggcgtccttatttctgatattaatgggaatgagtataatgtataaatatataaccatgattttggtttttttccaagtttttatcagtaatgattgctgagttttatcaaaatttttttggcatccattgagaggattatatattactctttgacacattaatgtgggttaattaaagtaaccaacttattaaccttgaaataggtcttagttaaataaccctacttgtcaatgctatatcattatttta

SEQ ID NO: 240473 - DNA, 1086 bp, Homo Sapiens
  misc_feature (884)..(906): n is a, c, g, or t
ttgtacaaaaaagttggctggaaccttccttttagaaagccaggcctagacagacaggcctggggacactggccccatgaggggaggaaggcaggcgcacgaggtccagggaggcccttttctgatcatgccccttctctcccaccccatctccccaccaccacctctgtggcctccatggtacccccacagggctggcctcccctagagggtgggcctcaaccacctgctcccgccacgcaccggttagtgagacagggctgccacggcaaccgccaagcccccctcaaggtgggacagtaccccggacccatccactcactcctgagagggctccggcccagaatgggaacctcaaagaagagctctaaggagaagaaaccccatagcgtcagagaggatatgtctggcttccaagagaaaggaggctccgttttgcaaagtggaggagggacgagggacaggggtttcaccagccagcaacctgggccttgtactgtctgtgtttttaaaaccactaaagtgcaagaattacattgcactgtttctccactttttattttctcttaggcttttgtttctatttcaaacatactttcttggttttctaatggagtatatagtttagtcatttcacagactctggcctcctctcctgaaatccttttggatggggaaagggaaggtggggagggtccgaggggaaggggaccccagcttccctgtgcccgctcaccccactccaccagtccccggtcgccagccggagtctcctctctaccgccactgtcacaccgtagcccacatggatagcacagttgtcagacaagattccttcagattccgagttgcctaccggttgttttcgttgttgttgttgttgnnnnnnnnnnnnnnnnnnnnnnngaagacagcaataaccacagtacatattactgtagttctctatagttttacatacattcataccataactctgttctctcctcttttttgttttcaactttaaaaacaaaaataaacgatgataatctttactggtgaaaaggatggaaaaataaatcaacaaatgcaaccagtttgtga

SEQ ID NO: 240474 - DNA, 873 bp, Homo Sapiens
aaagatgtcattgtctccgggacagttgtaatggcaggcacaggtcttgatgaacatcatgttcttcttcatgacctcgccgtcagggcacttgaactccaccggcagggtggtggttctgtggggggtgcagcatcggccgtcggtacatactccacagaatttagctcggtatgtcttcatgctggtgcagccagaaagctcaaacttgataggcttggagattttgggagtacggatgcactttttgcccttcttaatgttctcttccaggtcagcttcgcaaggcctgaccatgcacaggcggctctgcttctctagcctgcaggaggcgttgtcattggtaacccgggtggagatgcccatcccacaggtcttggaacaggcgctccactctgtggtctggaccaggcagttggctctaatcatagttgggtctgggccaaacgtgtcttccagtcggtaagctgcgagagcagagcacacaaacaccatgtaaaacgcctggataaggtatttcccccgttcggtcggcacagttaggactccctccctgggagagaatcacgaccctgacttagaggaagactcgactcacccgcgagggcaggcccaaccacggtttggtccttgggctcgtcacacacccactcctcgcagcatttcccgggcagcttgaccctcctcgggaaggggcagtcagggctgggcagacgaacgtccatgctgcacaggggcatgcagcccaccgccccgtccaggcacgtgcactggtacttgcagctgctctggaaggactctccgctgcggtacaccgtaccaccgaagatgcagggagcaccatctttggctggagaagaggaaggaagccaa

SEQ ID NO: 240475 - DNA, 421 bp, Homo Sapiens
atagaaaaaatatacactttattttcaactagaaaggtgcaaacatgtaacttttggtcacactctcaacaaataaactgtccgaaaaacagtcatatcaaagtagaaacaaatgcttccaggtgaaaaaactgatcagctatatagagtcactcagtttttaataaaggccatttgttcattaaaagtgaggctaccacatttcctacctagaaatcagcctgccaaggacactgatgcctcccctttgcaaacaatctgttttgacggactgtcattctatctgagcagaatttccatataagtatccatttcatgctttgaacgatcagacaagctttacattctacctatggtgttcagaaattgaggctaacattgaaatatcaaagcattaataaagaaaaataaaaaggcccaa

SEQ ID NO: 240476 - DNA, 1050 bp, Homo Sapiens
  misc_feature (137)..(154): n is a, c, g, or t
  misc_feature (192)..(226): n is a, c, g, or t
tgtttgacggactgtcattctatctgagcagaatttccatataagtatccatttcatgctttgaacgatcagacaaagctttacattctacatatggtgttcagaaattgaggctaacattgaaatatcaaagcatnnnnnnnnnnnnnnnnnnggcacaaacaactttaaattaacttagataactgtacnnnnnnnnnnnnnnnnnnnnnnnnnnnnnnnnnnnatatttacaatataaattttaaaaaatctggcttgttacaggcaaattcacttgccacaagctgtccagtctaatcgacaggattccgattcctgaacagtgtcattcgaatcagaatgtcagagctgagtctgctgttctgacttaaggaacaacttgactcagtctcttgatggctggagaatgcacatcctagctgtcactggggctacaggcaggtcagtgagcacgctaaaattttccttctcaattacacttcaaatagcaggcatattactcgtataagatgctatctgatgatactaacctttctgctggtaccctcccactgctcctaaagccacaccttaatatacattctggtgctgtgtactaatgtagttccactgtcaagtcttaacattcttcaaaccagtgtctggggttgatagactatttgtttgacatggcacaatgttttgaattgggtgggaatcttttcccccagttagaaaaacagatttaaataacttgtgctactgaaatcatttttacggaaaaatgagatgtgaatcagttcaagttccagtctaatgagttaatgtctctcactctctggcttcatgccatgtctccgtacatcttcctgtagtacagcgattcaaagatgtcattgtctccgggacagttgtaatggcaggcacaggtcttgatgaacatcatgttcttcttcatgacctcgccgtcagggcacttgaactccaccggcagggtggtggttctgtggggggtgcagcatcggccgtctggaaggatactccacagccaacttttttgtacaaagt

SEQ ID NO: 240477 - DNA, 819 bp, Homo Sapiens
gcccaccaaaaagggccctgtctctagcctggagtatacatgagtcactggcggtgggatcagtcattttttaggctgccccattttcctaacatgttaaaatgtgtgttctcagtcttttcaagagaggaagaagcaaagcggcacttacagagtgtgagatagacacagatctgtggcgagggattggggaaggtgggtggcatcttgggactctctccaggctttctggagtggggtcagtggagagatgaacagtgagaaacatttgaaataactcaagttttggagcagcggggggtggggtactaatggctgaggactcacagacagtgagggagcaaagcgctttgacttccctgggtgcgacaccatgaagtgtctatagcacgtggttagctcacgctggttccaagggtcagcagatcctctgcccttgtgcattaaaacaacatgaaggaaactgttagagatcagttacctccataattcatttgtaaaggaattgctattatgatctagtatgatcttgggatatttttcatgtctttaaatttaggacacggtacattttccactgaaaatttacaatcatccaacataatgcacaccacccctcaaaggtaacattagctcatatacaaaatcatggaaaacctcacaacatccttggaaggtagatattgttatatccttacaaaaatttaatacacccattaacattcctatttcaaatagctcaatcgatatcaacacataagacagcccacaattgtgatacagtattaagaagaaactcaggccagccgcggtgcctca

SEQ ID NO: 240478 - DNA, 1841 bp, Homo Sapiens
ggggagtcaacttccccatgattgccaagtggccaagaccagaagcagggacgattaggctagttctgcggcaaggtgaactggagaccctgtctctgccctccttccctggcctgtcccacagacatcccgttgtttaaccccactgcctttgcaaggacctgctctgtccactccaaatcaaaggatacttgcatccttcttacacagactcccatctctctgctcatagtggtctcaggctgcccgagaaaaagaaacttgggtcagtagaaggctcattagtgtgaaggagtgagaggccaggccttcctgtgacataatgcttctatgcttgtttcctaaacacttggtccacacacaatacctgggcaggaagagagaaccaagcaccactggatggctctggagccaggggacttctatgcacatacaaccaacatcaccccactctgctcatcggtgcctccaccctgaacagcagagtacctagatggcaaatgtcatggtttctggtccactaattctactcctgactctccatggaatcagagacccagaggctcttaaaaaactaagaccattgtttgttccatagaaagctcaagttcagatacagagttggccaaatgctgggctgccacggaggggtagagccttccatcccttccttgttccagaaacagtgtgtcacagaccccagcagacactgttcattgtccccagccaagccaccaagaattggtgatcatttgacaaggggcagggcagcccttatagctgtttccaagctaggagtgggctattcagagatattggaggcttggtcccaacaccacaggtagatgaggaagcagctaggtaaaggctcagagatgagaggagtccatcttccaaggcagtgggataaacagccaaggcactaaatggtttggcacctgggagcttcaagtaaagttgagcatgctgcccactgaaaagccaaggctctcccagacacgggtgggcttcacctgagcacggcccagtgccatcaaggccaggggccctgtgtcctcaggatgctaacccaggcctgcattccctgcttcatctcagaactgatcaaggcatgactacaaggataatgattgatcctgaactgatcttggtgagcaccggctttcaaaggaggcatcttgggagccttcccttgctccaagtaggcggctgctgtgactgggagctcccttcagagcctgcacggtctcctgaaagtctccgggtggcaagctctgctggggaccaggtttgactttttaaaatagcaaaacagatttagagtcaaactgagcccagaaacggggaatcagactggatggtgctgagtctgggggaaaatctggtgtgaccaggtaataatggagaccaatttacctgaatggctcgaacaggctctgagagcaatgggaagaaaaggttctccaaaatgtttctggcaatggcagccacagtgggatagctaagggcacagtccaccaagcactagggtggtcaacaatgaaatgaacatctctggctcttctgcagtcagaaactgaggctcgggactctataatcagaactccttcaggctcacttgggctcccctccacccagaatgtcaggaatctgtacttccagagaaaacactaccaccaagcagcagctctcaggaaagctagaaatctccaccccaaatatttcaacctcaggctccaacttaggtacctatgatttaaatactctccttttaaatactttgtaaaaactgcttttccgagccccttttatgctctgcagttgccaccaacttttttgta

SEQ ID NO: 240479 - DNA, 970 bp, Homo Sapiens
gaatcaacatgggccaaatgaaggctgcagttttcccactacctgtttggcaataccaatcatgtctctaccacttaatgccacaggcacaccctggcactgtattggagtgggctgtgtgtattcagatttccgaatctggtgcataagttgttcgtcaaacccaaaatgagcaaagctacttcctggtctaggaggtgcagcaccagagacccgaagattgagcttatgccggagatctattaactgctgtggagtgaggttggttatctcttcatgctcattgtaaaagtttttttcaaatggtggatagtcaatctctgaatgatcaatggggggaagaggatcaatgatttttttggtaggtgcaattggatttccgtcactatcatattctagattgtcttcctcttcctcctgaaccacaccagcagttgggttttctgccatgtatcgaaaataagcttcctgcaggaaagcacaagaacataatcacacccaagtacaattgagaatgtttctgctcctgtaattagcgcacatagtgtaccagataattgcacagttaacatacctaccaagtaaggcaagatccttactagcaatgattcctttaataatagcaatattcagaagaacaatcagaagaaatgaattaaacagttagtactattaaatgttgcaacttgtttaatagaagacttacaaatctgtctgttccacagccttcctggagtggggtgtctatcaaccctgcccagagccatagaacacatgctgtggctttaacaatccaagtttggaagttaacgctaattagaaaggtcacaaacctggaaacggctaccactcactctgattctcatcactccacaactgaacaatgggggaaaagagactaatggacagtaattaatgttccagcttgaaatacaagaaccacaaacccaacttttttgtacaaagttgg

SEQ ID NO: 240480 - DNA, 1262 bp, Homo Sapiens
taccaccttgccccagtggggcagcagcaagcgttggtcatcccagcatgagtaggcggacattgtggtgagtaccgttggcaaggggtaggacctaggtcacgggcaatgaagtctcgctgatgttcaggggtgaagcccaggcactggaaggggtatccactcaacagcccagcagaaggctcattttcagctgtcactgcccagaactgtaacttgtgctcagcataggcatccaggaacttcacaatgtatctggcccaggtctggtggtagatgtctctgggctgtcccttgagtggccccttcccattccccgctcccctggtcttgagccaagtgggtgatgtccaggggctggcaaggagtgaaacgggacgctgggccaactgcagggctcggtgaatcaggggtatcttgagcttggtatcttcctctgggaggctgaagttgtgcaactggaaatcatcaggggtgtctgcataggtgtaggtgcggatggagaagtcacagctggccatgggtacccagatgatgttatatccgattcctgtgccggtgcaattagcctgtatggtcctgtactcagctccatccaatgcccactgcttctgctcttgtagcggctgaaggcacctagggcaggaaaggtcggggggtcaagagtcacagtatgtggcattgcagacacagaccaccgagctgtactgaagcttttagggatgcaggggcaccacctgggagggagggagcacaagcagaggtgaggtctgacaaggatgtggagaacggacacagctgtttggagagactgaagacggtttcaaaaatcctcaccccaaagttggtctcagtcactcaaaaggatttattgagcacctactaaaagtctaccccagcttactggaaggctaccaaaggactatgaggcagaagggaggctctgtgctacctccccactgccttgactcactcatctgatgcccacgacactgcctgaagtagaagcaatcctgtgaggctgccagccatgatgcttaccctacccgaaggcttgggacattcctgaggacagaatgaggaatgactgaaaagcaagtccctctccacccctcaactactctcccgggcagggcttagctgcctttgggtgcccatggcctggtctcccacattcattaggacaaggcccacagacacctgggtgcagctctccctgcaacccttctgatgacaactctctgcccaccccaaatcaccaa

SEQ ID NO: 240481 - DNA, 628 bp, Homo Sapiens
gagagaaataaaacaatttaatgatggcttccttgatttacacacaactctaagacaagaggacaaaattttctctccatgcactggtacaacgaagttcagggacaagaggcaacccaagtacaggggctgtggtgttcagatccacgctcagcctcgagtctcatgttccaaccgaccgtctggctcagtgactgtggacactggggagaggagggactgcccagacccctcaagtgcaggtgaggggaccggcagcagagtatgcatgggcactccatgccccagtgcgagaagtgcacaggggacagcgaacaccagcttccagtgcaccctgaagacccagtgggctcagggggcccagctctcccatcagagctgtcctcagggctggagctggggctggggctgaggcgctggggctgggagggaggtggtgataagaaccactgcagaaaggaacacatgctgaatgctgggccatgctttcctcccagacactgagttcctgaagacccagctttatcttccaagggtaacaacattcccaagactcagagctggaaggcggcaagagtggagccaggagagacagatcgcatccactcctgccaacttttttgtacaa

SEQ ID NO: 240482 - DNA, 1440 bp, Homo Sapiens
gcatgtcgtcatatgttccttcccgggtagaagagcgtgtggtcactactaaacagtgccaacaatagtctgaatagttcaagctattctctgcttgacagctaaaataaagtttctgaaaaaaacagaaacagaacttctttgtgctcctcggtcgatgatgaggggaagatgggagagaagacacatccattctcttctcctgcccttagttctgtcccctttgaactcaggactccaaaaaagaaaccaacaaaaaacttaccctcgtgtgagttagataattaagaaactagacagtgtttaaattacataaatggcaatctcatggtaaagtaaaataaaatttcttggaattgaaacatttctaaatcccaacaattttagaaacagaaattgtaaatcacttagaaatataacccccttcctcttttcctcttcaaactcgcacctacaaacccacaactgaaaagattttggggtaaatacaaagtgttctcctcattttctttcactttgtgttcagttcattctccagttctgttaatttacgagaagctttcactttattggatacatcttgaccttgtgaaaaaagacgctggcgttccttgaatgtcaagttttcaggggccccagaacttccaggtgaatctgcatcttggcttttagagcgcttctcttttgcatcccgacaggcgtcatgggctccaacagctgctccagtagatcctgggtaagagtttggtccttttccatgaaagaaacagtacaagttaaagtacctgattatttctaagctttactcatgataaagatgcagtgctcagagaatacaaaaatacctttactgagtaagtaggaaggtaaaagacccctcatattgtatcaaagtttcatcagtttgaaattcatccctgttggtggcctgagcaatccaattactactctcaaaaggtgctaaaatgttgacctgacgcccttcactatgagggaggaatactgcccactggcccagctctgcctctgactggcacagcaactctgggtgagtgtaacatcaacccatcggcaacatttgccctgttcctactggcttcggtggattgttgaggatcaaaagatgtgatgcagatacaaagttttcaatgtatccaagtaataatgtcactaagtgtatccaagtaacaatcaatgttatattgttaaaatcataatgcagtaaatcagtgttaatgtatttctattaattgtagcattagaaaaattcacactggaaaaatctgacagtgtaatacaggctgcagtaataaatgctcaaactatttagcaaatactgacagcaatgaatattggattaaacaggccacaaaagtagtacaatattttcacattaaaattctttttcaaacaacttgcacaaaaatacatttttgccaa

SEQ ID NO: 240483 - DNA, 917 bp, Homo Sapiens
attcaacaaattaaaattaaataactctattatagtataaaaatagcttgaacttccatatgagttattttacaatatttaagttacagatgccctgtaactgaattccttcctttgacggcatacagatgaaaatcgatttctttttcaaatttaaaatttctgagtgacagctgtgcttgaggggtccctactcatctcccattcttctgtcattcccagtcacatgaacattgctccaataaagatatcttcttttacagacgccttggagcgaagtattagtgaactttccaaggtaactgtcatctttaaatttaacagtgatttattaagtctaacaataatctggtatttataaaaataaaatcccctaagcttaaatcctcaaaattttctttcagaattaaaattaatcaaatatttagaattgatcagaagagctcaaatttgcgaggaatgagatggaacagtctcggacgtgcgtcatcacacaggaagctttggcctaagccacttcacgatgcagactagaaggatattgtgggaacagacaccatcaggggacatgggaggagcatgtcgtcatatgttccttcccgggtagaagagcgtgtggtcactactaaacagtgccaacaatagtctgaatagttcaagctattctctgcttgacagctaaaataaagtttctgaaaaaaacagaaacagaacttctttgtgctcctcggtcgatgatgaggggaagatgggagagaagacacatccattctcttctcctgcccttagttctgtcccctttgaactcaggactccaaaaaagaaaccaacaaaaaacttaccctcgtgtgagttagataatttaaacactgtctagtttcttaattatctaacttaccctggtgtgagttagccaa

SEQ ID NO: 240484 - DNA, 1968 bp, Homo Sapiens
  misc_feature (1484)..(1521): n is a, c, g, or t
tacaaaaaagttggctggtgcttgccccgcccggtggactaactcgcttaattttaaataaaaagtcgaggacacggcggtcgttttcccgaagacatgggccctcccatgggccatttgctccctggaggccctcgcgtcttgctgagcccggggagttaggatgacgcgagcgatctacgcagaccccaccaagaggctggagctgtacttccggcccaaggacccatactgccacccagtgtgcgccaaccgcttcagtaccagcagcctgctgctccgcatcaggaagagaacgaggcggcagaaaggggtgctgggcactgaggcccactccgaggtcacatttgacatggagatccttggcatcatctccaccatttacaaatttcaggggatgtctgacttccagtacttggctgtgcatacggaagcaggcggcaagcatacgtcaatgtatgacaaggtgctcatgctccggcccgagaaggaggcctttttccaccaggagctgccgctctacatccccccacccatcttctcccggctggacgccccggtggactacttctaccgaccagagacccagcaccgggaaggctacaacaatccccccatctcaggtgagaatctgattggcctgagcagagcccggcgcccccacaatgccatctttgtcaactttgaggatgaggaggtgcccaagcagccactggaggctgcagcccagacgtggaggagagtctgcactaaccccgtggaccggaaggtggaggaggagctgaggaagctgtttgacatccgtcccatctggtcccgaaatgctgtcaaggccaacatcagcgtccacccagacaagctcaaggtcttgcttcccttcatagcctattacatgataacaggcccctggcgcagcctatggattcgatttgggtatgacccccgaaaaaacccagatgccaagatttatcaagtcctcgatttccgaatccgttgtggaatgaaacacggttacgcccccagtgacttgccggtcaaagcaaagcgcagcacctacaactacagcctccccatcaccgtcaagaagacatccagccagcttgtcaccatgcatgacctgaagcagggcctgggcccgtcggggacgagtggtgctcggaaaccagcttccagcaagtacaagctcaaggactctgtctacatcttccgggaaggggccttgccaccctatcggcagatgttctaccagttatgcgacttgaatgtggaagagttgcagaagatcattcaccgcaatgacggggcagagaattcctgcacagaacgggatgggtggtgcctccccaagaccagcgacgagctcagggacaccatgtccctcatgatccggcagaccatccgctccaagaggcctgctctcttttccagctcagccaaggctgatggcggaaaagagcagctgacgtacgagtctggggaagacnnnnnnnnnnnnnnnnnnnnnnnnnnnnnnnnnnnnnncttcaagccatccgacggcagtgaaaacgaaatggagacagagattctggactacgtgtgacagggcccaaggctgggcctccctgacccggccagactggtgtctggcctaatgagggagccggggctccccattgccacccacagtgcccggaatggccctaggaggccctctgaggagagctagagtcccagcaaagggtgcagctgaccctagcactggctgtgacatgctgcttggtgctgcctctggtcctgaggggttagggacatccccaaagggtataccctggctctgccacccatgaaccagcccagcatccagccagtgagtgggcacccaatgcctctcaggatgagaccagtaaatgccggaaggtggagctgggcagctgtggagccccaggccacaagcccagtctcgcttggctctcatgactgtggtgg

SEQ ID NO: 240485 - DNA, 944 bp, Homo Sapiens
  misc_feature (223)..(231): n is a, c, g, or t
aaaaaaatcccatcagcatctaatgggtttaattcatccacaggaagattaattgcttaaaattctatatttccccttctgctctggttctcagttttaaaaggggagataaaatgaaaacaggatttacttttttgttccttaaaaattgaactttgattttaatctatcagtccaaatacattcaacaatagcaaccctctgttcaatcttctggatattnnnnnnnnntccaagtgcactgccatccatttgaagtagtaagtcacaggtaaatcatatcctatcattaatgaaatgaaatggggacgaaaagtggcagaaaaggaatacgggagactccctccaacaggtctaatgtgttttctaggagaaagaatattcatgtgttaaactctcaaaagtgttaaacatccaacatcccctatgtggacatttcaacaaatatttttgccaaatatgagacaggctcactctccactgtggatctggaactttcaagaaaaactatcaccaagccaagtctgcctttttaagccaagtctgcctccaggagaatttgttgtgtttgcttgttcttactattgtgttgttatgaaaaccagtaatgagttcagcttgcaacccaggtgggaagttagagaggggaacctgtgtaagttgaagtttgtcacagtaggcagaacagtcgctttgcagcccaggcccatctcagggtgcactgcttcacagctacactgcaaagtgttaaaaatcctcccacccaccccagaatatatatatatgtatattaaaaaaaatcccctgtccatctctcagtacacaaaaggacctcatcacactgcaaaaatagcagtacccactttggtcaattaaaacaaacaaacaaacaaaagcatacatttttttataaggtgtttaaatctgtgccaacttttttgtac

SEQ ID NO: 240486 - DNA, 1657 bp, Homo Sapiens
  misc_feature (711)..(733): n is a, c, g, or t
  misc_feature (906)..(917): n is a, c, g, or t
  misc_feature (994)..(1046): n is a, c, g, or t
  misc_feature (1359)..(1404): n is a, c, g, or t
ttggatcttatttgatctgtgaattacagatgtttctcagattaggtgtttttatgtaattcagattagctgtcttgacttttctgatatgtgcttttgttcttagaagataaacttgagaaacaggagaagcctgtaaatggtgaagataaaggagactcaggagttgatacccaaaacagtgaaggaaatgccgatgaagaagatccacttggacctaattgctattatgacaaaactaaatccttctttgataatatttcttgtgatgacaatagagaacggagaccaacctgggctgaagaaagaagattaaatgctgaaacatttggaatcccacttcgtccaaaccgtggccgtgggggatacagaggcagaggaggtcttggtttccgtggtggcagagggcgtggtggtggcagaggtggtaccttcactgcccctcgaggatttcgcggtggattcagaggaggtcgtgggggccgggagtttgcggattttgaatataggaaaaccacagcttttggaccctaaaaggtctggattgatcgtactgctttctgaaagaaagacaacaaagttgctgcatagtctacaaacaagtctctgaaaataggtgaatttctagctcttcatggtcctgaacattgatttcagtctttgcaaagaatgaagaagtgaattcgctgtacatttgtcaccagcactggnnnnnnnnnnnnnnnnnnnnnnnccgcttaatttcaaagataaaatgcagttacttttgggggtggaacgctcatcttaaaacatgagcattaaatatatttggaatagcagaaggttaagtaatttcttatgtatagttaaactaaagcagtacttcagtgggacttaacaagtattttttcatcactgaaaggnnnnnnnnnnnnatcactaaattgtatttggcaattgcaagttgcctgcagatagggccgtgatactgtgttttgagccacagaaggtnnnnnnnnnnnnnnnnnnnnnnnnnnnnnnnnnnnnnnnnnnnnnnnnnnnnnctttttcctcctttcttttggggaatcctgtaatatgaggtagcttatttcgtcaattaattagggtgctggatggtagagaattttgtcagtcaactatgtacacacagtaaatactgtttcttaggcaaaggtaacttttttatatagttgtaaaattccattatattccattgccaaagaaacattaagaactttgtatagctgtataaaaagcaactaattttttaaagaataaacattttaaagtcagcaaacatactgtgtccttgcagaagttgatgtgctgagcagcagccttatgggtgggtcnnnnnnnnnnnnnnnnnnnnnnnnnnnnnnnnnnnnnnnnnnnnnnaatgtttggaacataaatgaagatttgatacattatttcattatctaaaaaggattaattattcatgctcattgtaagaacttcattttgtagcaaatggcatatcacaggatctgtccagataatcgatattttcagtatacaaatgtaaataatcacagatgagaatgtacttagctgtattttcaaataagtaatcttccccccttttgtaggactttaaaactaggcatcaatgaacctgttttcctat

SEQ ID NO: 240487 - DNA, 2981 bp, Homo Sapiens
gaattcagacccgatgccatcctggcacagactgctctggcaatgtaagcagtggccagtgtctgcagctgtttcagagcacaccgtgccaaaaaattatctgaaatacaaaaacaagactggtaaaaaaggcacttcctttcattactgaattcctagaaacagactgtctaagtgaggggtgaggtagcgacagaactccaggattaaaatgcggcaacaaagtttacttccaggctaaaagtggctaaatgtgaaagtacacaataagatgaaaatattccacagaaaacacctcagttaacagaaaagcaactttcttttacacaatagttttggggttcaggtgacactcaactagagcaaccatggatcatgcctcctataaacaggaaggttcctgtcacagagcagaggagcccggtgcttggagtcagatgacgtgggtttgagtcctttctctgtcacttgttaactgcgtttgcgatcgcgggtagatcagatgtgtgaaccctggtttactctcccagcatggagatcacccacccattacctcacaaagtggttgggaggagtaagaaggaacatgcatgggaaaaaagttttcagtctgtgcaaaatacaaaatgttttatagtctaaaacatagtcccctgcaggaacaacatctatccaaggcaggtaaatcttgtatgtatggcctttcacagaaccagcttgctagctcctgcttctctctaaagaattcacacccccagggccttgggagacctacctgcggccatacagcctccagatggccgttttctgtgcgatgctgatatcgatgagctctgacaggctgtgtttccagtgcaggaggtcggagtcctttagggcatccatcagcttgtttgccgtcttcccagcaaaagctctcggtaacccaaaatgtactgccttcttcacagaatgctccagcagaacatagctatcggatctcttctgccccagcacataaagccagctcaaacagtgctggagacacacgtgatcgttggactcctgggcaatcctaattgcctcctgcagggcgagctctgcctgttgatagtgaccgaagcggcagtgcagggcggcaagattcagagcggcgtatctcaagctccggccatagccctcttccccattacttttgctttcggctccggtaagaatcagacgatcaaaataatggaggagactgtgtgttgaactgaaaacatcttggacacggaggttgtttaagtagctgagataatgcgcttcagcaaaatcaggattaaatttcaacaaattgtttaattccttctgcaaggaagctggagtgagggccttagtctcatcattctttagcaaagaagcctgttgagaaagaaaaaattctgcttgtttttgggacagaggcccactgcaagatacctcctcttctcttacagatacatcaagttcttctttttccatttttctttcaccctcatctctactggtcagttccatatcagcatcctccactgtctttttctcaccattctggaagtactgctgaagggcagtgtacagtttaaacacttggctgaaagaaagcttactgtaggccaagatcatgtgacgcagaaacaaacctacaaaataagacgagagacaaggggaaagcattaactgacatcaggctacgcaatggcaactccacaatggcaatgactgtctgctggaattcttccttcagaagagtaagaaagagacacttgcagttgccattccctcctcctggaatgttcttccccagtcctttacaaagctggtttcttcttatacagggcacaatctacccaccccacctccacctgaaggcttccattttactttcttcatggctgttacactatctgaaatgatatttatgtgtttacttttaccaactggctcccccaaccagaggtaatctccataagaggaaattccatgtctatcttacacgtccagagcctggcacataggaagagagagagaaatagctcacgctgaataacataaaaattaccatgcaaaaaagccagagggatagagcatgggataaagctaatagaaaagcatcaaagaaacaccacgtatgccctcactttgcatactatatcaataatgtatttttacttacctctcttcataagtctgggctggtgaccctcacttacagatggaccatgcaggcaagtgatccagaggactgtgagaaagagctgggaacccctaaaaaccccaggaccaggctctgactcttactattgtagacaaaacagaaggtgcttttccacagttaatgatttaaatatagatcaaaacagtaaggcaataaatacaaactgcaacacctccaacatccccactgtgtctgttcacagatatagcagaacaatgatagacatgacttagaaagctgctcacttcaatgaaaatactctctgctcttcttagaagagtttcatacctactacacttgttttgtgaacctctggttcagttccagagaaagaatctgaaaggtcatcaaaaaactgttccatatccttcaactcgccttcagccatcagtttgattctgatctgcactgaatttgccagctgtggacaagactcttcaattaacttgtaaagttttgacagtgtaatatctgggccctgcagcaggggcaggagcagctggttgagcctccgccgctccatgaggctgacggcgccctcgcctgtgcggctcatctcgttcagcagcaccagcaccgcgatcttgtacggcgtcacccagtccttgatgccgaacacattggcgtgcacaaccccattggtcatcatgggattgaagtagaggctctcgtggacgctggccatggcggcccgagactaagtctcgggcccgcggcgcgctgccgccagttgtcaccacaaggcacaacccaacttttttgt

SEQ ID NO: 240488 - DNA, 1461 bp, Homo Sapiens
ctttgtacaaaaaagttggagaagattctgtgcctttaatcagcgatgctgttgagaggtgctttgtttctgatcggaccatttcactgcagcaagcaacacagtattctgagcagaagatcgggacttgaggccatgttgcggagggccagtgacattatctggactctggagtgtgaggaatatggactccactcttcactatattcacagcgattcagacttgagcaacaatagcagttttagccctgatgaggaaaggagaactaaagtacaagatgttgtacctcaggcgttgttagatcagtatttatctatgactgacccttctcgtgcacagacggttgacactgaaattgctaagcactgtgcatatagcctccctggtgtggccttgacactcggaagacagaattggcactgcctgagagagacgtatgagactctggcctcagacatgcagtggaaagttcgacgaactctagcattctccatccacgagcttgcagttattcttggagatcaattgacagctgcagatctggttccaatttttaatggatttttaaaagacctcgatgaagtcaggataggtgttcttaaacacttgcatgattttctgaagcttcttcatattgacaaaagaagagaatatctttatcaacttcaggagtttttggtgacagataatagtagaaattggcggtttcgagctgaactggctgaacagctgattttacttctagagttatatagtcccagagatgtttatgactatttacgtcccattgctctgaatctgtgtgcagacaaagtttcttctgttcgttggatttcctacaagttggtcagcgagatggtgaagaagctgcacgcggcaacaccaccaacgttcggagtggacctcatcaatgagcttgtggagaactttggcagatgtcccaagtggtctggtcggcaagcctttgtctttgtctgccagactgtcattgaggatgactgccttcccatggaccagtttgctgtgcatctcatgccgcatctgctaaccttagcaaatgacagggttcctaacgtgcgagtgctgcttgcaaagacattaagacaaactctactagaaaaagactatttcttggcctctgccagctgccaccaggaggctgtggagcagaccatcatggctcttcagatggaccgtgacagcgatgtcaagtattttgcaagcatccaccctgccagtaccaaaatctccgaagatgccatgagcacagcgtcctcaacctactagaaggcttgaatctcggtgtctttcctgcttccatgagagccgaggttcagtgggcattcgccacgcatgtgacctgggatagctttcgggggaggagagaccttcctctcctgcggacttcattgcagtgcagttgcctacacccataccagggatttcaagagtcagagaaa

SEQ ID NO: 240489 - DNA, 1322 bp, Homo Sapiens
ttggctcctgtgtcaccaagcggcggcctcccctcagccacatgatcagcctcttcattaaagacaccaccaccagtgagccctggctacgttggccagcaccaggcgagaccttccagagcttggcaggggggctctgcccagccccacccattgctagggaggcctgggcagatgaaaagtagactgcttccaagtgttccactctggcagggctggaattggggaccagggctgggatggtgttggctgcagaggccgggattgtccaaaggatgggaatatggtgtctgcattccaagcccagtggcattgcagagccttgctgtccgtgagtcccagggagtctcctcctctggcaggggctcctcagcgcccttctccaggaggacagtgcgttgcctgtcaggtcagcgtgagggggctggttagcgacactcagggtttgaactctctcccccaggcacagagcagatgctgtcccatggcaccgctgatgtggtcttagaggcctgcacagacttctgggacggagctgacatctaccctctctcgggatctgacagaaagaaagtgctggacttctaccagcgagcctgcctgtctgggtattgctctgccttcgcctacaagcccatgaactgcgccctgtcctctcagctcaatggcaagtgcatcgagctggtacaggtgcccggccaaagcagcatcttcaccatgtgcgagctgcccagcaccatccccatcaagcagaacgcccgccgcagcagctggagctctgacgaagggatcggggaggtgctggagaaggaagactgcatgcaggccctgagcggccagatcttcatgggcatggtgtcctcccagtaccaggcccggctggacatcgtgcgcctcattgatgggcttgtcaacgcctgcatccgctttgtctacttctctttggaggatgagctcaaaagcaaggtgtttgcagaaaaaatgggcctggagacaggctggaactgccacatctccctcacacccaatggtgacatgcctggctccgagatccccccctccagccccagccacgcaggctccctgcatgatgacctgaatcaggtgtcccgagatgatgcagaagggctcctcctcatggaggaggagggccactcggacctcatcagcttccagcctacggacagcgacatccccagcttcctggaggactccaaccgggccaagctgccccggggtatccaccaagtgcgggccccacctgcagaacattgacaacgtgcccctgctagtgccccttttcaccgactgcaccccagaga

SEQ ID NO: 240490 - DNA, 2483 bp, Homo Sapiens
ttggcttggctgtgtgtggtcccctggggcccatatgctcattgatttgggtgtggcatctgtgtgtgtggccctgggctggttcctgggtgtcctgatcgggctgtgtcctgtgtgtcctgcctgaagaagggatcggggaggtgctggagaaggaagactgcatgcaggccctgagcggccagatcttcatgggcatggtgtcctcccagtaccaggcccggctggacatcgtgcgcctcattgatgggcttgtcaacgcctgcatccgctttgtctacttctctttggaggatgagctcaaaagcaaggtgtttgcagaaaaaatgggcctggagacaggctggaactgccacatctccctcacacccaatggtgacatgcctggctccgagatccccccctccagccccagccacgcaggctccctgcatgatgacctgaatcaggtgtcccgagatgatgcagaagggctcctcctcatggaggaggagggccactcggacctcatcagcttccagcctacggacagcgacatccccagcttcctggaggactccaaccgggtacgatggcaggatctgtctcacgtgttcctgtagtggtcccatagctggtccaggggagaggtagagaggtggtgggcaggcggtggaggggagggatgctgatccccatcccgaagccgctggcatctctgctttctccaggccaagctgccccggggtatccaccaagtgcggccccacctgcagaacattgacaacgtgcccctgctagtgccccttttcaccgactgcaccccagagaccatgtgtgagatgataaagatcatgcaagagtacggggaggtgacctgctgcctgggcagctctgccaacctgcggaacagctgcctcttcctccagagcgacatcagcattgccctggatcccctgtacccatcccgttgctcctgggagacctttggctacgccaccagcatcagcatggcccaggcctcggatggcctttctcccctgcagctgtcagggcagctcaacagcctgccctgttccctgacctttcgccaggaggagaccatcagcatcatccggcttatcgaacagttcctttcttgcctggtccagctgccgccactcctgagtaccaccgacatcctgtggctgtcctgcttttgctaccctctgctcagcatctctctgctggggaagcccccccatagctccatcatgtctatggcaacggggaaaaacctccagtccattcccaagaagacccagcactacttcctgctctgcttcctgctcaagttcagcctcaccatcagctcctgcctcatctgctttggcttcacactgcagagcttctgtgacagctcccgggaccgcaacctcaccaactgctcctccgtcatgctgcccagcaacgacgacagggctccagcctggtttgaggactttgccaatggactgctgtcggctcagaagctcacggccgccctgattgtcctgcacactgtcttcatttccatcacccatgtgcatcgcaccaagcccctgtggagaaagagccccttgaccaacctctggtgggccgtgacagtgcctgtggtgctgctgggtcaggtggtccagacggctgtggacctgcagctgtggacacacagggacagccacgtccactttggcctggaggacgtgcccctgctgacatggctcctgggctgcctgtccctggtccttgtggtggtgaccaatgagatcgtgaagctacatgagattcgggtccgagtccgctaccagaagcgacagaagctgcagtttgaaactaagctgggcatgaactctcccttctgagccactggctgtggtggctgtagttgcccccgtccctggggctaaagccagacccatttctgaacaggggagtttgtatcatgaatgtttccaggtttgctcctgcacccgtggcactggaaacccagctccccgtgtcagaccccgctgtcttcctgagccctggggctcactgtggaggagctgacggcctgggcccttggccagtcctggctcttccctgggcctcaccagggacactcttgaatgtatggcctcaggcgctccctagaggggccctaaaccccctcacctgtgagctaccccctttagggatcccttgcccccttggagatcccttgccccccagtgcctctgctcgtgggtccctggacacggccttgaagccaaccttctttggaggagcaacagcagcagccttggccgacgcgtccaactcccaaggctgccgtggagggcaggggggtggtgcttgcctggatgtggccccgagtgcctcccctccctccctctgtgggggagtctcccgcctgaacctgaagatggaggcagggcccccgcttcgccctgagcctcttcctgtgcctgggctcaagctgggctgcctgtcatcttgggggaatc

SEQ ID NO: 240491 - DNA, 1541 bp, Homo Sapiens
  misc_feature (1289)..(1298): n is a, c, g, or t
  misc_feature (1331)..(1351): n is a, c, g, or t
ctttgtacaaaaaagttggcaattgtagtacctacagagacaactgaagtaaggaaaactaaaatcagaaatggaatatcatttacaatttgggatcgatggaccgtacatggaaaagaagatttcaccctcttggatttcataaatgcagtcaaagagaagtatggaattgagccaacaatggtggtacagggagtcaaaatgctttatgttcctgtaatgcctggtcatgcaaaaagattgaagttaacaatgcataaacttgtaaaacctactactgaaaagaaatatgtggatcttactgtgtcatttgctccagacattgatggatatgaagatttgccgggacctccagtaagatactacttcagtcatgacactgattaatacaagttgtcttaacgttactccaggaccacttgattttggaaagagtgcacttaattcagaagctaaagaaaatcagttcataatactatggatttctctttcattaagccttaattttaagggaaacatcagtaagaaactgcactgaagaattataaaacattttggggcatagcatacacttgtctaacggttcacacgtggctatgatcacaagcaactttgaactggaatgctatttacaaaagttttgtgtattaatctgtgtattaatctctctggataaaaagaaggaaaaaatatgtatgaccagaacagatatggatgaagaaattgaaagcaacgaatgcaactattcaaaaagtttaattttatgaatttcttttttgtttagtcttgaagactgattttctatgcaaatagtgtttggcatcctgcacctctgatatgatttggctttgagaatttaataccactgggaagaagtatggtagtggtggatgaagggtggatattttaaattgtgcagttacagtttactgtcctattacctctgctcgtttaaccagtttgttatatcactgtgtccccaaaatcaggatttttgttgatagcatcagtgttgtaggagcaataggtcagatgagacatattaacttagactaaacgtgaacagtattatatggactctcacaacgctcttagagaatccgtgaatgtgaacagacaaatgtggctaaccatttgattcttcagtatgccttctaatgtggctattttatttatgtgagactctaaacctgattgtcctaatatataaaactaaaagattttgtaaagggagtgtctttagaaatagatgaaatgtagaatgttaaaaattattgctagggtagtcnnnnnnnnnnccagaaacctaattagggtattaaattttgtgnnnnnnnnnnnnnnnnnnnnnaaacagaagcatgttatttcattcccattcccagaaagggagttaatgaagataaaaatttatttttaaaggtctttattgagagaaactttgttttctgatatgaactattgcagatgtttttataaatactttcattaaaatgatgtaaacagtagtacccacactgtaaactcagtgaaaatagtaa

SEQ ID NO: 240492 - DNA, 960 bp, Homo Sapiens
ttggattccatttgcagaagaggacttatcagcagatgccctcttgaatattctttcagaagtaaagattcaggaattcaagccttccaataaggttgttcaaacagatgaaactgcaaggaaaccagaccatgttcctattagcagtgaagatgagaggaatgcaattttccaactagaaaaggctattttatctaatgaagccaccaaaagtgaccttcagatggcagtgctttcatttgaaaaagatgatgatcataatggacacatagatttcatcacagctgcatcaaatcttcgtgccaaaatgtacagcattgaaccagctgaccgtttcaaaacaaagcgcatagctggtaaaattatacctgctatagcaacaaccactgctacagtttctggcttggttgccttggagatgatcaaagtaactggtggctatccatttgaagcttacaaaaattgttttcttaacttagccattccaattgtagtatttacagagacaactgaagtaaggaaaactaaaatcagaaatggaatatcatttacaatttgggatcgatggaccgtacatggaaaagaagatttcaccctcttggatttcataaatgcagtcaaagagaagtatggaattgagccaacaatggtggtacagggagtcaaaatgctttatgttcctgtaatgcctggtcatgcaaaaagattgaagttaacaatgcataaacttgtaaaacctactactgaaaagaaatatgtggatcttactgtgtcatttgctccagacattgatggagatgaagatttgccgggacctccagtaagatactacttcagtcatgacactgattaataaagttgtcttaacgttactccaggaccacttgatttggaaagagtgcacttaattcagaagctaaaaaaatcagttcataatactatggatttctctttcattaa

SEQ ID NO: 240493 - DNA, 1441 bp, Homo Sapiens
gcataaaaaatgactcattatggtcatattagtaaaaccagaaagaacaaaatggtagtggtatctgtcttctttgccccttccctgatcataagctttattaaccagatagcatctgatcctgtcttcaactgatgtatatctgtctttcaacatactacctaaaatgctccccaaggaaaacagtgagaccaattctgccagagacagtatctgccagaaccaagaagtcttattttcctttgagtgaaagccagtggatggggaagaggtccccaaatgccacttgtctgaatcttttaagatatgctctgaaacaagaaaacactacagattacattttagtagagatctaaaaatagcaaaagaacattccctatttttagatatctgacttccaagtgtaaaaacactaaaagtaaaagaaaccactgaaaactaactatatttttaaaagggttttaaaaactctgaattggaaaactgtttttagagataaaatttcaaaaatcctcccctgtgttgactgactctttgctcaaacttacccatctccaaaatttagtcctaatcctatgtgttattaagggcatttccacagaaccaaaagatggtacagaaaggttataccacaaacaagaaagaacagctaagaaaaaaaatttaaagatgctttcataaaaacatagagtctagactagtgattaaagacaacaatgtataaaacagcaaagcaatttaattgtctttcatttaaaacagtgccacagacaatacaacacttgattaaagaagacaaagagttttttttctcaaacaggtctccgcaactgaataatcttaaaaccagtaaccatctaattcaaagctgtcagaataactagaatttgcaatgagagaaaaattaataaaaaactgaaaatgcagtacatttcttcctccccatttctgtccactcctagtacaaatatgacccattttttttaaagaagcctgtggcaaataagatttgtaggaaattattagcaagttaggaaattaggatttatgtgaattacctgactgtactgccatcattaacatctcaggttccagtagagtcatgacggattcttccagaaacaaaaatccacaaatataatgaagaaagtcaaagtcacaggagaaaagctgtcttgaaagctttcacaaattcaatctgatgccttatgctcaaatcagactgtgagaatatccccttctcagtgcagttaccaatttatccacccttcaggcgagtcaagatgacacagatttgaattactgccgacaggaaaccaaaaagctctccagttaagacatactaagtgtggttagaacagtgagcaagctcctccccttgctattcgtctctgggggaggggagagacgatatataaagagccaacttttttgtacaaag

SEQ ID NO: 240494 - DNA, 830 bp, Homo Sapiens
ttggcgtgcgttcattttcatcctggtgtggggcttgtaaacatataacataaaaatggcttccaaaagagctctggtcatcctggctaaaggagcagaggaaatggagacggtcatccctgtagatgtcatgaggcgagctgggattaaggtcaccgttgcaggcctggctggaaaagacccagtacagtgtagccgtgatgtggtcatttgtcctgatgccagccttgaagatgcaaaaaaagagggaccatatgatgtggtggttctaccaggaggtaatctgggcgcacagaatttatctgagtctgctgctgtgaaggagatactgaaggagcaggaaaaccggaagggcctgatagccgccatctgtgcaggtcctactgctctgttggctcatgaaataggttttggaagtaaagttacaacacaccctcttgctaaagacaaaatgatgaatggaggtcattacacctactctgagaatcgtgtggaaaaagacggcctgattcttacaagccgggggcctgggaccagcttcgagtttgcgcttgcaattgttgaagccctgaatggcaaggaggtggcggctcaagtgaaggctccacttgttcttaaagactaaagcagcgaactgcgacgatcacttatagaaacaggccggttaggaatccattctcactgtgttcgctctaaacaaaacagtggtaggttaatgtgttcaaaagtcgctgtccttactacttttgcggaagtatgggaagtcacaactacacagagattttctcagcctacaaattgtgtctatacattttctaagcatgtttgca

SEQ ID NO: 240495 - DNA, 1155 bp, Homo Sapiens
aagaaactactctgtattttagacaacctcataaaattattttcacatccccccccaacttcttgctcttaatccttcatcttttagttgaagaataaggcttaagagagagaaaggaaaaaccataatggctaaacttagcagcaccaacacggttctttcatcaaggcgtagctcatcatttctccaaactgacatgctacagaaatgtcttccaaaaagcgttaagttttcacagagtggggactatgatttccatgctcaaatagtgtaggaaatggtagattacgttagttttgtttactgtaacaggaattctcaggagtccttagacactctaatgtgggttgatctccagaaggagaaagggagtgtgtagtattttccaagctttttgagcaaacaatccttttctcatggaacacatcagaaacagtttggagtatgctggtaaatgtgttttggggatggaagtcagaaagcctgatctttttcatatggttcctcctattctctgctaaagccagcaacagagtaagttgactctagcatcaagaccactagtcatattaagaaagggcaggttggtcgagaatggaataggaagaactagctgcctcacttttcactttcgcgcctacattttcttcgctccctaagttatacaagatgtacatttcctctcttaagcaatttaatttgggtgctacttccctccttttgtgacagcaactaattcatcactacctgaggagacaaagtgggtgctgcagaagcaagactgtaggccagtgggatttgtctaataattgatgataagatgatagcacagagggcaacgtactgagagaggaaggcagccttaagaaatgatgcagaaatagccaagcaagatttttccaagcactggttaaatcaccagcaaaacaaagcatttatgtgagtacctcaggcctgggcacctctttgcttgaaatatggcaagacttggaaaaatgtttgcccttagaatctatctcactactttagttagttgtctcctttgggcctgggcacagttctggcactgatctggaacagactcccttttctaaaactgaacttgaccacatcaaaagtttgtaaaacaatctccatggtaattaaacttgccaa

SEQ ID NO: 240496 - DNA, 1412 bp, Homo Sapiens
acagcctgggcctcgccgcgatgccggagaagaggcccttcgagcggctgcctgccgatgtctcccccatcaactgcagcctttgcctcaagcccgacttgctggacttcaccttcgagggcaagctggaggccgccgcccaggtgaggcaggcgactaatcagattgtgatgaattgtgctgatattgatattattacagcttcatatgcaccagaaggagatgaagaaatacatgctacaggatttaactatcagaatgaagatgaaaaagtcaccttgtctttccctagtactctgcaaacagtatgccactttttggaagtggtcactgtcaatatcttgttatggtttgatggccttggagatttaaaaccgagtaaaagtgtacgggaaccttaaagatagattttgttggagagctgaatgacaaaatgaaaggtttctatagaagctactgatgcccgaagggcttttccttgctgggatgagcctgctatcaaagcaacttttgatatctcattggttgttcctaaagacagagtagctttatcaaacatgaatgtaattgaccggaaaccataccctgatgatgaaaatttagtggaagtgaagtttgcccgcacacctgttatgtctacatatctggtggcatttgttgtgggtgaatatgactttgtagaaacaaggtcaaaagatggtgtgtgtgtccgtgtttacactcctgttggcaaagcagagcaaggaaaatttgcgttagaggttgctgctaaaaccttgcctttttataaggactacttcaatgttccttatcctctacctaaaattgatctcattgctattgcagactttgcagctggtgccatggagaactggggccttgttacttatagggagactgcattgcttattgatccaaaaaattcctgttcttcatcccgccagtgggttgctctggttgtgggacatgaactcgcccatcaatggtttggaaatcttgttactatggaatggtggactcatctttggttaaatgaaggttttgcatcctggattgaatatctgtgtgtagaccactgcttcccagagtatgatatttggactcagtttgtttctgctgattacacccgtgcccaggagcttgacgccttagataacagccatcctattgaagtcagtgtgggccatccatctgaggttgatgagatatttgatgctatatcatatagcaaaggtgcatctgtcatccgaatgctgcatgactacattggggataaggactttaagaaaggaatgaacatgtatttaaccaagttccaacaaaagaatgctgccacagaggatctctgggaaagtttagaaaatgctagtggtaaacctatagcagctgtgatgaatacctggaccaaacaa

SEQ ID NO: 240497 - DNA, 1570 bp, Homo Sapiens
  misc_feature (212)..(292): n is a, c, g, or t
cacttctttacatggctagacacagagcccgggagagcaaaggaaaattggaggccccttcttcccatgagccattttctctgcatcccctgcccataagttttcactggcctctgatcaccctcatggttgactgcagctgctcctctcagtgcccctcatgccctccactgtgctcagcgcacggaaagagtgaatactcagttcttccnnnnnnnnnnnnnnnnnnnnnnnnnnnnnnnnnnnnnnnnnnnnnnnnnnnnnnnnnnnnnnnnnnnnnnnnnnnnnnnnntggcaacctgtgtttttaaatgttgcttatgttcatctgtgacctcttactcaccctctcctgctccattgctttaggctatgaactctccaaagtggaagggaaaacagggacccctgagaagcccctctcagaccttggcctcctatcctatcgaagctactggtcccagaccatcctggagatcctgatggggctgaagtcggagagcggggagaggccacagatcaccatcaagtgagcctggcgctgtctacctgggggtacatggcatggcttgtctgttcctgggctttctctctcagggctcctggggacagataaaggtcctcagggaacctgacctgtgctctcccacagtgagattagtgaaatcaccagcatcaagaaggaggatgtcatctccactctgcagtacctcaatctcatcaactactacaaggtagggaggcaggcaggggagacaggtgtgtgggatgcagagtgcagtcctctgtgggctgaccacctgctgaacccatctcctctgcccagggccagtacatcctcacactgtcagaggacatcgtggatggccatgagcgggccatgctcaagcggctcctgcggatcgactccaagtgtctgcacttcactcccaaggaaggtgctgtgaagagctcctttattggggtgatggaatcggttccaaagagctggtttactgctgtgaagggatcgcagctttgaatttcaagctctggttctcagtcctcgggcacctgtgcgtgaatcgctgccgcaaggctgggccaagttaaggccccacgcactttggcatccgggccagggatggtctccagaccccacagggtgaagcggctgaagttggcagtggctccaatgaagcggtcgaagtcccgctccagcggctcctcctcttggtcgtcagtcccggaatcccgcaaggggtctggcttccccatcgacaccttcttctcttctgtcaccatcacgtatcccacgaggccaggcggcaccgccacctcctctccccgtagacagcggccccgaaacgacacttcgagtccctcggggccctggcggatggcgggcgtgaagaagcgccccaccggggcgggcccgtccaccgcaacctcgcagggcagcagatgcagtgtggcgggtacggcgtcgcgcaatgtggcggagcgcaagtggacgcggtgcctctcgatggccgcttcgtcgccgctctccatcctccctcctacgcgacgccagggctcgcgagcccaa

SEQ ID NO: 240498 - DNA, 707 bp, Homo Sapiens
cactgtacctggcaggcatggtttttaactcccaagattattttaatgtgtacaaagttttaagaaccactaacttaaaggaatcattctaaaaatcataatcttttttttggcagatagctgccaatatttaattagaagtacattttataatgactttatcttagaatgctcatctggaaatattaatagcaaccaccagccaaaaattaaaattacaaatattttgaaaaagaatgcttatctgtaagttaggatattcaaagaatgctcatctggaaatattaattgcaaccaccagccaaaaattaaaattacaaatattttgaaaaagaatgcttatctgtaagttaggatattcaaaattagacaattattttatgattatgacagacaatgataaactctgaacatattcctcgccaaaattattgctacttttctcttttgcagaggtaagcatcagaagcacatgggagcttttccaaaacacatatgctaagcccttcccaaataaaaataaattactacttataagcagtgtatttactttgaatttgcatgtatgcatcagaaagttaaatgtcaaactgttttagtgggtaagttcctatttttaaaacatacttcaaatgtctaaatcatctaaattttgaagtagaaaatggaatgcaaaagtatctcattagttaaaaggagaaacccaa

SEQ ID NO: 240499 - DNA, 1783 bp, Homo Sapiens
  misc_feature (109)..(117): n is a, c, g, or t
  misc_feature (353)..(363): n is a, c, g, or t
  misc_feature (1147)..(1159): n is a, c, g, or t
  misc_feature (1434)..(1449): n is a, c, g, or t
  misc_feature (1542)..(1558): n is a, c, g, or t
agagagtacatatagtgctccaactgtaccctacgtacaaacttaaagctaccgctcattcatctgctgtccaggaaagcttaggagacattcctgctttctacatggnnnnnnnnntagtacaagttttggaattttctgtaattaaacaaggcatattcatgtactacatatttcagcactaaggcggttgcttcactttatatctatataaaaaaagtggtaaaaatcttttccttttgtgcagttgaacccatcctacattcagattctctcaagcactaataaaatacttatttggttgaggaagatttaaggcaagttcgggcccttccaaaggcactgtgagactnnnnnnnnnnnactccccgttattgctacatgtctttatactcgagtatgtcacagtagaactggtggaataagcaaacacttttttgctagtttataaagttggaattagaaaagcatgccacatttcagcctgattgcaaagtatgtggtcattttttttctttgaagttggatgggctacaacctttatacattctaagaaaactcataggatgttcctcaaactacttccacagcatcaagatcgatttctgtcaagaaatcatgcaatctttcaaaatttacgtaaacaaggaaagaaattaatgaaataaatattacatacaatctcttaaattaagaattttgtactcatttacaataaaataaccaagtgaagttacaaaaggcatatattactgtgaaaagaacatacactccacattttgccgattaataatggcaatcataatttaacataataaaagaatatatatctattgcttttcatcatacttgataaatacagtatgaacaaaattttcattgtatacttttcacaagataataaataagttaaatagttttcatattgagttgtggtgcagtggtgcgaatcaactcaaaacagctaaaaattcagcagttattctccaacaattacaaagtaagctctgcgcaaggcttccagagggagcagacaaaatggttctaaactgaacatccactaagtggtggcaatgaaaccaagtaaccagtatggacctttggaatgcaagggttttttcacccccagacatatataattctgttnnnnnnnnnnnnncacctatgggctgagggctaactatcaaggcatattcttggcagaatatattggattttaaaaagcttataggtttagcaaggtggcggctggctggtttgtttacaccggtctgagacacaattaggaacttcttccaagagaagggttcccacatctggacttaactaatgctgttcaagtgaagagatggaatggtggttggtagctgctggtgctgggttgatttttcctgaagtcccaaactcatcggagtcctaacaaagtttaagtgnnnnnnnnnnnnnnnngttctattcgtatcacaactgccctgttgtgaatattttgttcaacagaaaaagttcgacttttttgctcaaaaagaatgaaacttcgtaatnnnnnnnnnnnnnnnnngacaagaggaaaccgaaaaaggaggggtgggggcccctcccggcacagagttcgagtccaagtgctcggtcgggcttgcagtctgcctagggcccatgtcaccccccccactcccgtgcccccagcaagggcgagatggcgaggggtgtcctccaacatctctgaaccgccttcccttcctcctcactggcgccctcttgcctcagtcgtcggagatggagccaa

SEQ ID NO: 240500 - DNA, 1350 bp, Homo Sapiens
  misc_feature (236)..(244): n is a, c, g, or t
  misc_feature (1269)..(1282): n is a, c, g, or t
aaactacaaaaccattacagtacaatgttacagtcacaattgtagtgagctgattccccaagaagtattgcaactcaagtgacttatcttgttacaatcaaaaacctacttctgtccaaagtagtccagagagtacatatagtgctccaactgtacatacgtacaaactaaagctacggctcattcatctgctgtccaggaaagcttagggagacattcctgcctttctacatggnnnnnnnnntagtacaagttttggaattttcgtaattaaacaaggcatattcatgtactacatatttcagcaataaggcggttgcttcactttatatctatataaaaaaagtggtaaaaatcttttccttttgtgcagttgaacccatcctacattcagattctctcaagcactaataaaatacttatttggttgaggaagatttaaggcaagttcgggcccttccaaaggcactgtgagactccccccccactccccgttattgctacatgtctttatactcgagtatgtcacagtagaactggtggaataagcaaacacttttttgctagtttataaagttggaattagaaaagcatgccacatttcagcctgattgcaaagtatgtggtcatttttttctttgaagttggatgggctacaacctttatacattctaagaaaactcataggatgttcctcaaactacttccacagcatcaagatcgatttctgtcaagaaatcatgcaatctttcaaaatttacgtaaacaaggaaagaaattaatgaaataaatattacatacaatctcttaaattaagaattttgtactcatttacaataaaataaccaagtgaagttacaaaaggcatatattactgtgaaaagaacatacactccacattttgccgattaataatggcaatcataatttaacataataaaagaatatatatctattgcttttcatcatacttgataaatacagtatgaacaaaattttcattgtatacttttcacaagataataaataagttaaatagttttcatattgagttgtggtgcagtggtgcgaatcaactcaaaacagctaaaaattcagcagttattctccaacaattacaaagtaagctctgcgcaaggcttccagagggagcagacaaaatggttctaaactgaacatccactaagtggtggcaatgaaaccaagtaaccagtatggacctttggaatgcaagggttttttcacccccagacatatataattctgttnnnnnnnnnnnnnncacatatgggctgaggccaacttttttgtacaaagttttttttaaagaaaaagcattgctcatcaatt

SEQ ID NO: 240501 - DNA, 633 bp, Homo Sapiens
  misc_feature (269)..(277): n is a, c, g, or t
accttttcttcccaaaaattttattgggggaaaactacaaaacatttacagtacaatgtttacagtcacaatttgtagtgagctgattccccaaaatatattacaactcaagttgacttatcttgttacattcaaaaacctacttctgtccaaagtagtccagagagtacatatagtgctccaactgtacctacgtacaaactaaagctaccgctcattcatctgctgtccaggaaagcttaggagacattcctgcctttctacatggnnnnnnnnntagtacaagttttggaattttctgtaattaaacaaggcatattcatgtactacatatttcagcactaaggcggttgcttcactttatatctatataaaaaaagtggtaaaaatcttttccttttgtgcagttgaacccatcctacattcagattctctcaagcactaataaaatacttatttggttgaggaagatttaaggcaagttcgggcccttccaaaggcactgtgagactccccccccactccccgttattgctacatgtctttatactcgagtatgtcacagtagaactggtggaataagcaaacacttttttactagtttataaagttggaattggaaaagcatgccaa

SEQ ID NO: 240502 - DNA, 1966 bp, Homo Sapiens
agcaatgctttttccattttagccaactttgtacaaaaaagttggcgcacggctccgggtagccatggaggaccccacgctctatattgtcgagcggccgcttcccgggtaccccgacgccgaggccccggagccttcctccgctggggctcaggcagcggaggagccgtcgggggccggctcagaagagctgatcaagtcggaccaggtgaacggcgtgctggtgctgagcctcctggacaaaatcatcggggccgtagaccagatccagctgactcaagcacagctggaggagcggcaggcggagatggagggcgcagtgcagagcatccagggcgagctgagcaagctgggcaaggcgcacgccaccacgagcaatacggtgagcaagctgctggagaaggtgcgcaaggtcagcgtcaacgtgaagaccgtgcgcggcagcctggagcgccaggcggggcagatcaagaagctggaggtcaacgaggccgagctgctgcggcgccgcaactttaaagtcatgatctaccaggatgaagtgaagctgccggccaaactgagcatcagcaaatcgctgaaagagtcggaggcgctgccagagaaggagggcgaggagctgggcgagggcgagcggcccgaggaggacgcagcggcgctggagctttcgtcggacgaggcggtggaggttgaggaggttattgaggagtcccgcgcagagcgtatcaagcgcagcggcctgcggcgcgtggacgacttcaagaaggccttctccaaggagaagatggagaagaccaaggtgcgtacccgcgagaacctggagaagacgcgcctcaagaccaaggaaaacctggagaagacgcggcacaccctggagaagcgcatgaacaagctgggcacgcgcctggtgcccgccgagcggcgcgagaaactgaagacgtcgcgggacaagttgcgcaaatccttcacgcccgaccacgtggtgtacgcgcgctccaagaccgcggtctacaaggtgccacccttcaccttccacgtcaagaagatccgcgagggccaggtggaagtgctcaaggccaccgagatggtggaggtgggcgccgacgacgacgagggcggcgcggagcgcggggaggccggcgacctgcggcgcgggagcagccccgacgtgcacgcgctgctggagatcaccgaggagtcggacgccgtgctggtggacaagagcgacagcgactgagccgcccccgctgccacccaccccattcctcgctccttccgaacttcctctttcgcattctctctcggctcgagctggctgagatttttctaaattgaaaacacgcccccctccccacacctccaggaactccactcccagtcttagagctgttaggacccgatggggaggcagcccccgcagtggacagcccccgcttggacacagtccgagtggaatgggaagggaatggtcaatccctgtcctggttgtccaagtcgggatctcagaggaaattgcagtgattccacggttaggcccccctgggggggctgccttcccctcagcctctccccacaccacccacccagctgctgtcattccgctcactgagctcttcttcattctcaccctgatccctgggggactcaaagccaaaactgcccaaagaggaaagattgaatcctaaaggggatccttgcccccatgggaggccccctactagaaggacgtgaaagcagcttttgggggaaactgaggcagtggggaagacagagcagaatgagccctcaccctggctgggggtccagcacaggctgtatctgcagagggtcccagaggaacgctggagccaagagaagccctgggaaggaggggtggggaacgacatgcatgtgagggatggcacactgatgtgtttatgcacctgtacacaggagcgcatggccatggctttggaaaggagaatgg

SEQ ID NO: 240503 - DNA, 677 bp, Homo Sapiens
aatggtggtaaaatgcaaatgttttaaaatatgtttattttgtatgttttacaatgaatacttcagcaaagaaaataattataatttcaaaatgcaatccctggatttgataaatatcctttataatcgattacactaatcaatatctagaaatatacatagacaaagttagctaatgaataaaataagtaaaatgactacataaactcaatttcagggatgagggatcatgcatgatcagttaagtcactctgccactttttaaaataatacgattcacatttgcttcaatcacataaacattcattgcaggagttacacggctaatcattgaaaattatgatctttgttagcttaaaagaaaattcagtttaatacaaagacattcaagatgaaaatttcaggaccgttgatcagaagctttcaatgtgtgttgctctactttattataggcaagattcaagtaaggctaagaaagaagagtgtttccattgagacatgatctaagaatagccttctatagaggcaaattatgttctgtagaaactagctagccagccaccaagatgttaccaataaaggattccttgtactagcaactaaccatgtttaaaaggtcttagccagaattacaaaaatcttatataggatttagagtaatccaacttttttgtaca

SEQ ID NO: 240504 - DNA, 1312 bp, Homo Sapiens
  misc_feature (237)..(255): n is a, c, g, or t
ggcatccgtaggaagtttgagttttggggattcttattcagcttccagtgcaagcctgtgggcaaggaatgaaggcggaaggagcggtgtggagggaggcggtccgtggcgcctcctgctttgttaatgtgcttcatttcactcttttgattgaatgattgccggaaagtgcaaggcattaagaattaaactaatgagaaccgaggcaggcggactgactcagattttaattttgannnnnnnnnnnnnnnnnnnagatgaatgtgaagaagtagaacatcagtgccaaaagactattcagcaactggaaactgtcctgggagagccactccagagctatttctaagactttctgtggtgtttcatactctactcagagttcacactcatatttcatatttttatttttgggtgttgggtgccatgttacttttggtgccttaatacacctacttggattacttacaaatgttttatcacttctttacaaaatccccacctggcttgtgctgccacataagcctctcctgcctatcgtatagagctgcagaaagagtaaatgatacacggtatttttatacagactgctgtgtttgtttaaacatttattattctcttcctgattgatggtaataatattagacttgttaattttagcacccaaagctgacgcctcatttgcactgtaagccttaactcttctgtacagcagtatcttacatacatggtatccatgttgcagatttcactcaaagttgctctatttcaagaaaatgaagttatttagcaatcaacagaagtacttttgactgtaaagcctacttttcattttgggtaggcgaacttcagccttcgtttctttgttgtgcccataaagagaagtggttctggaatgctttttttaacccaggagtgtgactgtcacctttatcctttgttcttttgggaaacgggagagatgaaggcaacacgctgcttcaaaaacagctcatacctggctgctcacacagagggcccagaaacactgggtggcacgaggaagctcctccaggattcagaatgaacccagttccattggtggttaactaagaactacttgtctaagaaagtaagtatcagtagatttttttcaatgctttgaagtgccctaatctctagtactgggtcatggtgaagttggaaagtgagggttcaaataaaattagatctgccccctttttaaaggcatctaagaacatcccgtagaatgttcgcattgagtttaaaagcctttgtaatgtatggatatagaagccaacttttttgtacaaag

SEQ ID NO: 240505 - DNA, 955 bp, Homo Sapiens
actttgtacaaaaaagttggcttttagtatcgccattcttaatctcatctgtcaaagaaacaaaaattatgtttttctagtagctgtttccggttttcaaacttatgcatgctttcttgcctctttagtcaatgttttcttcatgtttctggtttaaacatgcaaaaatgtgtaataattacagaggtcctgctgtactagccaccaaagcagctgctggtactaagaaatatgatcttagtaaatggaaatatgcagaactacgtgataccatcaatacttcttgtgatattgagctcctggcagcttgcagagaagaatttcataggagactaaaagtgtatcatgcttggaaatctaagaacaagaagagaaatactgaaacagagcaacgtgctccaaagtctgttactgattatgctcagcaaaacccagcagctcagattcctgccaggcagcgggagattgaaatgaaccgacagcaacgcttcttccgcatcccattcatccgccctgccgaccagtacaaagaccctcagagtaagaaaaaagactggtggtatgcccattttgatggaccatggattgcccggcaaatggaactccatcctgacaagccacccatcctacttgtggctggtaaggacgacatggagatgtgtgagctgaatcttgaggagactggcctgactcggaagcgtggtgctgagatcttgccaagacagtttgaagaaatctgggaacgctgtggaggcatccagtaccttcagaatgcgattgagagcagacaggctcggcccacctatgcaacagccatgctgcagagtctgttaaagtagatgttgcacaccagccttacagctgggagcctttgccatggtacttaatagggtgtgtgcccccagatttaaccattccataatcatgttagagttacttctataaagtgaacaga

SEQ ID NO: 240506 - DNA, 2400 bp, Homo Sapiens
  misc_feature (981)..(1106): n is a, c, g, or t
  misc_feature (1196)..(1252): n is a, c, g, or t
  misc_feature (1275)..(1292): n is a, c, g, or t
  misc_feature (2106)..(2126): n is a, c, g, or t
gcttcaaaaaaattactgctaccacatgtactatcatcccccaaggccttttacagtctgaaatatcaaaattgaaagcaaaaataggatgaccaaaggactactattttacctcttttcagaactctacaatagtagaaactaaattcccttatggatctcagggggaaataatgtgcctgttgaaggggctcagtgtttggtgtccaggctggcatttttcaggtgagggtttcatactgacaggaggcaggctcctaaaacaaggcggtagcaccagcaccatgactagggctgctttaaaacaaatttctaggacttacgctctttgggcctgatttgttaatgcttatgaggtaatgatattatgtttgagaagctctacttctagtatacctcaatgctcagagagaaagccaacaatacaatcaggaaaccacaatattgacaaaacttagtactaccaccaagattgttcctcttgccttggcactactaaaaaactttacctttgttactaaagtcatggtgaatacagattttgcatttctcatgtaagcagctatataagctagggttctacaagccttagatgaaaggaaaaactttgctggaagccctgtaaaaatcactttattcacaatctgaagaatgaaagacaaatttggctgtcaatacaaaaactgtagtacaaggaagttcaactgtttaaaaatctgcacatcactgtacaagtgttttttgaaggcctgaaaattaaagcaccataggattaactgcataatttagcaagcactctctaccccatgactgtaatcatgtatgaagagcagagatcagacactgagaggagatggcttctgattagcaagggggaagggagtgagtgttatggaacaggcaaaccttgggcatggggagataaaagtgagaagagtcaaaaagattgatttctataggccgggcacggtggctcatgcnnnnnnnnnnnnnnnnnnnnnnnnnnnnnnnnnnnnnnnnnnnnnnnnnnnnnnnnnnnnnnnnnnnnnnnnnnnnnnnnnnnnnnnnnnnnnnnnnnnnnnnnnnnnnnnnnnnnnnnnnnnnnntaaaaatagaaaaaattagctgggcgtggtggcgggcacctgtagttccagctactcaggagaggctggggcaggagaatggcatgaacnnnnnnnnnnnnnnnnnnnnnnnnnnnnnnnnnnnnnnnnnnnnnnnnnnnnnnnnntgacagagtgagactctgtctcnnnnnnnnnnnnnnnnnngattgatttcgtcaaactgttatcaaaggttggccctctagccaactcaggaaggcgccatcctcttcccattatctccccttcctccaattctcctcctccccttggctccctagccttggaggtaaacactaatatttcagtgcactgttggttaagccagattggcttgggaacctggtaatgtttttatttttattttaaaaaaggacagtcttgagtctcaaaataccaacacatctctgatttatgtcccatttataagctgcctttactactgtcctgacatgtgatcgtctttcatttgctttggagcttagtggtgaagagggaacatttccataactgaaaataaatggagaaaagtggtaactcttttgtttgagaatatttgaaatactagaaataatgaggaaagtacaagcctagctgagaaactagtttcatcacttgtggacttaaaaaagtaaagctaacagggtttaaagttgagaggcagttcacatcctaagtgatacctagaaacctgctttcttgttcgcaaatgatcaacatgaacatacagaatggctgacatttggacctttggataagcttaaaacatggattgtggaatgtctaatagagggcttttctctcttttttttaataatgactgtcccacactttaattcctcaatgatatgtggatgctaactaaatcagatgaaatgttttctttaaaattctgtatatatttaagaatttctaggaaatgattatttaaaatggagtttctaagtaattattttctttatagtttagtggagtaagnnnnnnnnnnnnnnnnnnnnncatcaaatctaacctttatcaaagccatcgaggaggttggtaaaatactttgcaaaaatcacagctctgaaccacatagaatgctgatgaacttaaagctttgccagtttggcaagtcttccagtataatacttgttgtgcctcagtacattttaaatagacagctagagtttactaaatcctaggaatcaaataaaaaataaatgttttcttcactgaaggggaaggcttttatatcccaatagaaatccaactttttttgtacaaagttggc

SEQ ID NO: 240507 - DNA, 1754 bp, Homo Sapiens
  misc_feature (174)..(194): n is a, c, g, or t
tttttttaataatgactgtcccacactttaattcctcaatgatatgtggatgctaactaaatcagatgaaatgttttctttaaaattctgtatatatttaagaatttctaggaaatgattatttaaaatggagtttctaagtaattattttctttatagtttagtggagtaagnnnnnnnnnnnnnnnnnnnnncatcaaatctaacctttatcaaagccatcgaggaggttggtaaaatactttgcaaaaatcacagctctgaaccacatagaatgctgatgaacttaaagctttgccagtttggcaagtcttccagtataatacttgttgtgcctcagtacattttaaatagacagctagagtttactaaatcctaggaatcaaataaaaaataaatgttttcttcactgaaggggaaggcttttatatcccaatagaaatagaggaatttcaagttttgatacaaaaacaattaaaacaagataaaacccaagtggaagctcagtccatcttttgaatattaacaaaatgaggatttttttaaaacttatttctcccattttgtttcctttaaacacatacactcactcactctctcaagaataggtagcacaccaaaactttatctgtgttataagatgtgtacaccttcatggtttattgtggttttccttaagttttatccttattaggatgaagttcatgcatttctacactactcttaactaaggctcaagagacaataaaaacatagaagtaattttttaataaaaggaaataaaataatcaagtactctgagtattttcctccattctcttatccagaattttaaggcctctgaaaaataatgaaataataaaaatagtggttttgagatctaaatttattaatattttggattccttttctcagccaaaagctactatctgaattaagcttttcagtttaaaagcctggaagaccatccttagaagacattaaaaaattacttctgatacacacactcctaataatttagatagatatgaaaacaatctcaaataaagatcaaaaaataaagtccctgtaaaaataactttggttgctcccacccacacgtcatatgatgatttaaactgcaatcatgaattttgaaaaaatagacgtatcttatctataaaaacactaccatacaaacttgaaactaaaatgttatctgaagtgacacagatgttctaaatctcaaggatactgaaaaatacattttttattcgtaaaataaaagaataaaaccaatctgattgtgttattaggaaatttgttctggaaacttattcataaattattgatggaaattcttaatgtccattgtgctgtcacctaaaacagattcaatcattttcttgtaaagaaatgactgagtaaatgagtaaaagaataataagtaaatttataagctacaggttaaccatcacatattacaaccaagtatgactatgtgataacaacaagagtggtcacacagtacttaagatttggctgtgtccttaaggtcttactcggaaactatcacaccaacctacctttgggataattttatcagtagacacaggcaatgggtatctttttatcctgttttcttaaagtttgtatcactagtctataacagatagcaatgagatagttctagcaatagatgaagcaagggggtaactgtgttctagaagaaacatttatctggcttttgatccaacttttttgtacaaagtggg

SEQ ID NO: 240508 - DNA, 1171 bp, Homo Sapiens
atgacaaacatgaaccaaaaaacctaggtataataaaatgcaaaacctggtttaataagaactgaaaaataactgttaggttttcttcaactaattgaagaatacaataaaaattctctcattcttagtacctgaagacaaaaatctcaccagtaaatggcttccctttttgggttagcttagttcttaaattttctgtgtaataagatgccatttaacttacagtatttggattggtgagattccttgcatctgtcaaccagctgcttaagtggttatatgtacttcttctgcaaaaataaaagtttaaatttgtgactgccatataattatagaaaaaaaacttaaatatttaaaatacatatttaatcaacatatcctaaaataataattttgctttgaccagttactcagaacagtagttgtgaaatacaactgcatacttttcaaaaatctagccaaacctaatatttttaaataaacaactcaatatccaacaactttgataattacaggtcaggagtaaattgtttactcctaaaagcataccgtaaacagaccaataagcaagcaaggaacaacacagtaaattgatggaaatgccaatgtggagtcaaaactcaaattactttgaaatcatacagactttcaatcacaaagcacaaagttgtatcaaaatgcctaaacatgacacatttaatggaagacacttttgcttgtctttaaattttaatttcattaaaaaccaagtcacactattataagctggcatacaattcacctttccttaataatttaaagagcaagctaactataacagcataaaattgactttgaagacatttgacaagaattcaagtccccagatatcagtgaaaaagttcgtcctaactttgttctcttatctatcaggcagctaaattattctggaattctaactgcccaagcaagagtttaaaaactcataggctcatttgcactagccaagtaagctctaagataagtaaacaaacccaaatatttgtaatatcatacacagtagaatctaccaaaggggtcaaagataataaaatttttgaggttaaaaatgtttctgatttatagactcacagaatgttagtctatcttactcgtttaacatgtgaggaaacggaagcccataaagacccaa

SEQ ID NO: 240509 - DNA, 1009 bp, Homo Sapiens
ttaatctagatacaggtactttatttacaaatatttagattaatagcattttgttacatcaaatgaagagtacagcagtctgaataaatccttcagtcacaaaaacaataaaacccactgtaactaactttgggagtcagggtattgcacctcaacaagccgcagtctttagtttgtgattgctaccttatatcccaatgggtggtttgtttgttttgtttttgtaaatatacacacacaccagcaggtcatggtccctgggtgagtcccttgtgatgcaacagtgtaagcaaaatggatcactgtaagtctttaacagaatataccaatctactccagaaatcttattttttaaaaagttaaacaaagacaaaaataaaaatgaatccacaaattaaccaaagcctactttctgcacattccagttttggcttttatttaacattgactatacaatactctggtactaccacatgtttacaacccagaaagatgtacttttatgttagtgtctgtaaagagggatttaaaatgtgtattttaaacacagcagttgagctgagtgcattttctatagtacgctgaggtgttacctattctatttcaaataaattctcaattcccagccactgaatcataaatgcaataaaaaaaatcaacagaaatgaagaacttaataaaacatgttgtccaaaaaaataagattgtttctcttgctatacagtattaattcagtggccaaaccacctggtgcaaagtaataacttactttgtatcagcacaagcgctgaaacacctttagaaacactttcccttttacaaaacaatttatgccaacatgacataaaacagcccctcacactgtgaacacagggatatcttaagttatttcactgtagggttaaaaatgcacaatttaaaatcccttaacagcagacctgtggttctgactgtccagttcagaatctgaccattccgagggaagataaagccaacttttttgtacaaa

SEQ ID NO: 240510 - DNA, 2218 bp, Homo Sapiens
  misc_feature (1878)..(1893): n is a, c, g, or t
aaaacaataaaacccactgtaactaactttgggagtcagggtatgcacctcaacaagccgcagtctttagtttgtgattgctacgttatatcccaatgggtggtttgtttgttttgtttttgtaaatatacacacacaccagcaggtcatggtccctgggtgagtcccttgtgatgcaacagtgtaagcaaaatggatcactgtaagtctttaacagaatataccaatctactccagaaatcttattttttaaaaagttaaacaaagacaaaaataaaaatgaatccacaaattaaccaaagcctactttctgcacattccagttttggcttttatttaacattgactatacaatactctggtactaccacatgtttacaacccagaaagatgtacttttatgttagtgtctgtaaagagggatttaaaatgtgtattttaaacacagcagttgagctgagtgcattttctatagtacgctgaggtgttacctattctatttcaaataaattctcaattcccagccactgaatcataaatgcaataaaaaaaatcaacagaaatgaagaacttaataaaacatgttgtccaaaaaaataagattgtttctcttgctatacagtattaattcagtggccaaaccacctggtgcaaagtaataacttactttgtatcagcacaagcgctgaaacacctttagaaacactttcccttttacaaaacaatttatgccaacatgacataaaacagcccctcacactgtgaacacagggatatcttaagttatttcactgtagggttaaaaatgcacaatttaaaatcccttaacagcagacctgtggttctgactgtccagttcagaatctgaccattccaagaagataaaggtataaaagcttaaaatgtgcaatagtaaacccagccttttttctttttctatacagtaaggcaagaatgcagcctgtaatgcaaaaacgtttacaaaaagagaaaagcaggttagcacattgtcgattgcacaagaacagttaagaaaatcagcaggtaagcaacagtgcaaagatggaacagaatctgctagtgttaatcctctgatgctaggagctctttccagcataatgtccccaaacactgccagcaccaaggggtggagccagtactacttgtgaactgcagttgtgtctatttctttgtgtgaaatggaagggagtaacatggtcacatataggtcatactgtacaaactggtattttatactgttccaatgccagtaatcaatttattttcttcattaaaataatatacacagaatgtattgttagttcgattccttcaaattttatacatatttactttctgttaaagagaaaaggataaaatggtataaaaaaagataaagctattaattaagcacgagagagaagataaatggatattttccctgtgtgaggctaagacagaagcaaatctcgttaagaaaaatgccacccacacaacaggaaatttatccaaaacaaaacaaaagcagttatagaaccccttctctaccatcagaagtaatttcacagcaataaacttattggttacaacagacatacttgaacagttaaggatgggaagaaaggcttaagatatcaccaaattaaaccgtacagtgagacaaagccttgccaaagggagggtaaaaatcatgaagtccagcatcagtgctcggtttaaatcatatattggtgacatacttatcacgaggacaagggggaaaaaaagtctagatttaccatgcaggagagatttattactctacttgcctttgataacctgattacatctagttgtttagcagtttagtattgtgttaaactgtttttacaacagagnnnnnnnnnnnnnnnnaattaaacccagtaagatgtacagaagacaatgaggcagtaaaaagtactgcttccaacagacagaggtgaaaggtcaaatgaggggccacagcaaagaggtcactagcagccacagccttctctctggggttggggttcactggttagccggcctccctgcggggctgaaggtttgtgttgtacaccagactcagcagcattcagatccaagcttccatcctgaatgttctgatagattttcttggcagcctcaaggaaggcatcttctacattctctcccgtttttgcactcgcttcgaggaacaataagcctaaaaatccaa

SEQ ID NO: 240511 - DNA, 1814 bp, Homo Sapiens
  misc_feature (1788)..(1797): n is a, c, g, or t
ctataaacgtgaggttgaaagctctggatagctcattaaattactttcctctaatctaacccctcacagcgtgaatttctgagtattgcttgaccagtagtgacacattcgtgaggcactaatataacccaaatggaaactacaggtcctaggaaatccagataggtcacaatgggttcatgtgaagatcaaggtgagccagaagatctcatctgcaagccatttagcagccctttaactgtaaaaagcagttccactttcaaaggctacagagtttgtttacatacaaggtctccatgtaacatgttggatttcttcccactgtcatgggccaacccacactagactcagaagtcaagggaaagctctgccagctaaacacttcttatcaaagagggtgtgaagaaaccttgcaattttaacaataactaagaccagcatgtaaggtggtcttacagagatcacttgcaggaacagatattgataggaacttcagaactcaaacagcactcacataacatggaatttatgctgaaaatcccatgccttctctctcagaaaagagaggagcatacctgtgtggagagcttgtattttctcccctcccatccattcggtttacaactgaatagcgaatgtgaacttgaaactaatctttaataaatctataaaatgcaagatattatgaccaagttctgtactccgtttttactgaaatgacttctacttcatcaacgtacggtctgttcctgaagaaacttcctctttctgggtcaaattctgactgagaatgtaaaggtaggttatctttgagacttgagcttaaaactcctaccttttcataccacttgatctctgttgccctgtgaaaattctgtaaaccttcctcattgcatctgaggaatcatgctggaatgcttctttctggctcggagggttccaagacctccccagctagtggaccttcctagtccttatgccgttgctgtagcaatggggcaggtcaagtttcctgatcatagctgtgaagcactctggggcacctctgctcctggtatttcagggtgatattacatcactgctgctaattttggtagctctaaagtattctcttaaagacctctaagaacctgatatttatgctaataattacccagcaagaaacattagctgtagttttttgcaatatcactttatacagctaaaatcactttgtatatgtatagtaactcattgtatatatttgtctcttatgaatatgtgctaattacatctataaatcaaccagtatataattaacaaaaacaaatgattttttagccttttaatgcaaaaaatttaaatttagtattacatatgatctggctaagagcaagaggccttcttatgagtgatctccatcaccctgtacagtgcctggcacagaatctagagtttagccaactctcaacaaatgttttagtgaatgaatgaatgattgactaaagaaaaacatgagttacttagtgaccaaatctaatactcagtggaatagctgattataatcgctaaaatattcataatagaaataaagagatctgtatgcagtctactccatatagtcaaaagatctcatggtagccttttctaaatgaaatttttcttaagtagtgtaagaataaatttaaactaattataattatcagtgacttcttagggagatgttttaggaaaaattattaatatttctacctttaaatactttccaaaaaggaaatcttcaacgcttaagaactaccccccaacacnnnnnnnnnnccttgggacagtgtctc

SEQ ID NO: 240512 - DNA, 1382 bp, Homo Sapiens
  misc_feature (1179)..(1188): n is a, c, g, or t
ccaactttgtacaaaaaggatggtttcttctggaccattatatacccacatttatctgctctgtcatatatttactaattgtatggctgggaccaaaatacatgaggaataaacagccattctcttgccgggggattttagtggtgtataaccttggactcacactgctgtctctgtatatgttctgtgagttagtaacaggagtatgggaaggcaaatacaacttcttctgtcagggcacacgcaccgcaggagaatcagatatgaagattatccgtgtcctctggtggtactacttctccaaactcatagaatttatggacactttcttcttcatcctgcgcaagaacaaccaccagatcacggtcctgcacgtctaccaccatgcctcgatgctgaacatctggtggtttgtgatgaactgggtcccctgcggccactcttattttggtgccacacttaatagcttcatccacgtcctcatgtactcttactatggtttgtcgtcagtcccttccatgcgtccatacctctggtggaagaagtacatcactcaggggcagctgcttcagtttgtgctgacaatcatccagaccagctgcggggtcatctggccgtgcacattccctcttggttggttgtatttccagattggatacatgatttccctgattgctctcttcacaaacttctacattcagacctacaacaagaaaggggcctcccgaaggaaagaccacctgaaggaccaccagaatgggtccatggctgctgtgaatggacacaccaacagcttttcacccctggaaaacaatgtgaagccaaggaagctgcggaaggattgaagtcaaagaattgaaaccctccaaaccacgtcatctgattgtaagcacaatatgagttgtgccccaatgctcgttaacagctgctgtaactagtctggcctacaatagtgtgattcatgtaggacttctttcatcaattcaaaacccctagaaaacgtatacagattatataagtagggataagatttctaacatttctgggctctctgacccctgcgctagactgtggaaagggagtattattatagtatacaacactgctgttgccttattagttataacatgataggtgctgaattgtgattcacaatttaaaaacactgtaatccaaacnnnnnnnnnnaactgtagatcatgcatgtgattgtaaatgtaaatttgtacaatgttgttatggtagagaaacacacatgccttaaaatttaaaaagcagggcccaaagcttattagtttaaattagggtatgtttcaagtttgtattaatttgtaatagctctgtttagaaaaaatcaaagaccatgatttatgaaactaatg

SEQ ID NO: 240513 - DNA, 1662 bp, Homo Sapiens
  misc_feature (399)..(462): n is a, c, g, or t
  misc_feature (927)..(1214): n is a, c, g, or t
  misc_feature (1223)..(1251): n is a, c, g, or t
ttcagcatcgaggcatggtggtagacgtgcaggacgtgatctggtggttgttctgcgcaggatgaagaagaaagtgtccataaattctatgagtttggagaagtagtaccaccagaggacacggataatcttcatatctgattctcgtgcggtgcgtgtgccctgacagaagaagttgtatttgccttcccatactcctgttactaactcacagaacatatacagagacagcagtgtgagtccaaggttatacaccactaaaatcccccggcaagagaatggctgtttattcctcatgtattttggtcccagccatacaattagtaaatatatgacagagcagataaatgtgggtatataattgtccagaagaaaccatccttttactctagtatctgnnnnnnnnnnnnnnnnnnnnnnnnnnnnnnnnnnnnnnnnnnnnnnnnnnnnnnnnnnnnnnnnctctaaccatgatgatataaaagtcacctggtattcatgttcttaattccaataaagcaatcaggagaggaggcatggattttcaatacatatcaaacaaggtgaagctccttgttacatgctctgaataacaatgtattattcatgatttttgctcagtaaaataataatacaaatattctttccaaagaacttaagaagaaaacaaggagaaggctacacttcccattaattggatttattaaccaggtataccagattacacatagggtgataaaacccaagaaatggcagtcattgaactctgaagtcctccatctcagctgtgtgtcagtcggcaagtgtggccagcacatgcagactcagaaaacgtgctgcttagccacgttagtgaaactggcactaattagaaaggcagcctttgctatgagtgtaatggtcaacagcagagaggacaatgatttnnnnnnnnnnnnnnnnnnnnnnnnnnnnnnnnnnnnnnnnnnnnnnnnnnnnnnnnnnnnnnnnnnnnnnnnnnnnnnnnnnnnnnnnnnnnnnnnnnnnnnnnnnnnnnnnnnnnnnnnnnnnnnnnnnnnnnnnnnnnnnnnnnnnnnnnnnnnnnnnnnnnnnnnnnnnnnnnnnnnnnnnnnnnnnnnnnnnnnnnnnnnnnnnnnnnnnnnnnnnnnnnnnnnnnnnnnnnnnnnnnnnnnnnnnnnnnnnnnnnnnnnnnnnnnnnnnnnnnnnnnnnnnnntccgtctcnnnnnnnnnnnnnnnnnnnnnnnnnnnnntgaaggtgaagcagcaatgatcagataaatgcctatttaaagggcagtatttaacaaactgaggagtagtagcatgagagcgaagacctaggcggatccagaggagatactggtataggaagggcctctcctgcccctattccttttcttaggcagggaggagggagagggaaacaggtcagccgccagcagcaaactgacaacctcttcttggatggcgggaaactccttggcagccagagcccctaagtgttatgtgtcccctgaaagattcagcttcatactctggctgaccccaggaagctacctctgaaaagcatgctcccctttgaaccctgctatgatgttccccgaaaacctgtggctcctcaatcttaactacccgccaaggctcacaactccagaacccaa

SEQ ID NO: 240514 - DNA, 861 bp, Homo Sapiens
  misc_feature (501)..(525): n is a, c, g, or t
tgacatttcacatttagcatgttgtttaacaactttcacaagccgaccctgactttcaggaagtgaaatgaaaatggcagaatttatctgaagatccacaatctagaaatggaaccactgctcttttgacaggtgccatctcagtggcatcactggaaagtccagattgcctgacacactggtaaccaatgactaggggtcaggtctcaacagatgtctgggcttaagggagttaagtctatgctgaaagatggaaagggagaagaggacataaaaacaaatttgtttttctataccacaaggcttttgtgccaaggtggccatgtgtgtcaaagtcagggaatccctcctcctgggagccaagaggaagtctctcaaaactagaagggaaaggtgttttctccacatcaatccagctttggagacattctattagtgacatatgccccttcccccaaaaacaacaatgaagtgttctgtgtgctaacaacatagcttttnnnnnnnnnnnnnnnnnnnnnnnnnttctgcatttttataaaacttgataaaaaatagtatttcaaactgtacagtcaccagaagtacacagttatcaaaaatgcacacacttcacttggcatctccagcaccttcagctttctgtgcctggtctgttttggcatctccattttctgcagggttattcccctccttgccagcatcagcttttccctttttccctttgggtaccttctctcccttctttgcaggggcctttttaggcttgggctctggctttggaggagcaggtttagcagacaacctcgcggatcttctctgtggttcgtccttcacctttgctttatctcccttagccaa

SEQ ID NO: 240515 - DNA, 2965 bp, Homo Sapiens
tttgccccaggtcttgtatctagcttttcctcgcccaactcctccccatagaccagtaaataagccaaacataagatcctgttattgcctttccccaacaacttccttttaccatccaaacttcgcaaaaggaatgttttgcccaatttccacttcctccgtcaattgctcactccctcctttaatccaaacccatgccctcaacacttttcttactaaatgtaaccacttgctaacaaattcccttcttctcaacagtcatgtgacactgccagcagtctcagtccttcctagaagtgcccctgccctcatctccttttgtttccgccatagcccctctttcctgccaatccaaagcatgagcatcgttctgtctccctcacagctgccactgtgccctcagttttaatctctctgctgggtaccaatgactgcaaatctactctgtatttccaaagaacctcaaatcaatctgctgtgaccaaactcaccaactcatccttccaccccaaatcaactctcccttttcatggccctaacttctgtagctccaaattggatttcaaaggcctaagccatcaaaactagccttacaaccttcagggcatcccatcatttgctggggatcaattattacatctaaacaagaaaatggggatgtttaaccaaaatctgtattcacctccctgatgctccaactcctggctaccaagtgttacaggtctgtctctatgatattcctggactctctgtgcccccacatcctcttgtgctgccataatcggccttctaacatgactcgtgcctcccattcaacaaatacaattctgttgatactgtgtacagggaaattgtgctagacactggggctgaaaggggtgagtcgtcaacaagtgcagcaggaaacttgccctttaaggacacgatgcaggggagaagcagccatggagacaatcagccatggtgccctctttgtgtgcatgcagggactagggtgttgacatggaaacagaggttctgcagcagagtgttacagttgagatgtgatggggagcagtgcctcaaaacaagggggagtggggccctcagaagcctccaccaaaggcccagagatggggcccgaggagagctacaccaagctgcaccagtcacagtgggactctgaggctgaactaagaagcctatggaacactgtccattgagcccaagtccataaggctggccttcccgatgcaacatccctgttccacaccctgccagttgactgtacccccgccccccagctgtgggcttctttgcttctgccacactgcctggatggcccttcctccctgtctttccactcctcacacccatgccccatttctttcctgttaatctgttgggtaggacccttgcaacatgctgccttatgtggtcaatacttgtacaagctccttcaagcacacagaaatgactacacagccagactgtagaaaactggaacttggacaagaatattgctccgatgatctaaccctcctcaggggttgaggaaggtgcatgcagaagccacaggagtccttcaagggacctctacttcccttgagtggctgcgtcccattctgtttctgagccctgtcctctgagggccccagtgcatcactacccccccacttatggtagggctcaccagggggatagccacgcttgggcagctccacgccccaggcgtcagccacatgggtcagaagcaggtgtgagaggtggcggtgtgcatgctggtcccagtggacaccatcccgatgacggtgctgtactgcatgccggaagtgaaagtggaggtctaggacatcaaagcagtggtccccggccagcgtagcactgtagaagttcccttcaaccacatcccgccgcagggagcctgccaggggctggagctctggcaggaggaaacccccagtgatacgttccccgaggggcatcgccatgttccacaccagcaggcaggagtctggcaatacttggtccatgcgcacaaacacccgctccaggttctcccggtagctctccattgagcagcgaccatatctggagagatcccagaggcaggagttgatgatcaccaggtccggggcaggtccatatgtcagctcttccagaacatcctcaaggtactcggagtaaacacgagtgaggaagtagaagcgcacaaggtggtggccagagcccgagcagaactggcggacctcacgatactgtgtcccgttgtgcagctcgcccagctggcccccagccaccagctggtcctgttcaaagccagctcccccttggctttcagctgggcagctgtgagcagtgagtctttctggagcaagagcaccaggtccttgtacacagccctctgaatggagtcccccaagatgaccacgaacttgttgtgtagcagctgctggacttccgaggcctggaagtggaccatgtcgcttcgcagcgggcggcgcggctcctcgctcgacagacagaagaccatgccgccaccagcaacgacaggcaagtcccggggctccgcggtgttcacccgcgacccgggtatgcctgcgcaccgcgcgcctggcccgcagcgggctcctagccaagcctcatgttcccgcgccccagtcggccagtcggttctgcaaagctcccgccccgcagagaccgtgggtccaggttagccgtcggtgcacagcccagcgcccagcgctctccatgcgagcgtcgcggtggccccgacggcgcctcaggcctcggcgcctcgggctgcgacgctcacagcttccacttccgttcacccatgtctcgccctgagcgacccccagtgcccgaagggaaagcaaggcgatggaggtggccgccacagggcgcaggagccagggctgggcccacttggcgggcgcgaagcccaggtacgggctggggtctcggggcggcagccaagtgccaa

SEQ ID NO: 240516 - DNA, 1348 bp, Homo Sapiens
ctgttcgttgcaacaaattgatgagcaatgcttccccttttaaagccaactttgtacaaaaaagttgggatttgtggcgtgatgtctcacagaaagttctccgctcccagacatgggtccctcggcttcctgcctcggaagcgcagcagcaggcatcgtgggaaggtgaagagcttccctaaggatgacccgtccaagccggtccacctcacagccttcctgggatacaaggctggcatgactcacatcgtgcgggaagtcgacaggccgggatccaaggtgaacaagaaggaggtggtggaggctgtgaccattgtagagacaccacccatggtggttgtgggcattgtgggctacgtggaaacccctcgaggcctccggaccttcaagactgtctttgctgagcacatcagtgatgaatgcaagaggcgtttctataagaattggcataaatctaagaagaaggcctttaccaagtactgcaagaaatggcaggatgaggatggcaagaagcagctggagaaggacttcagcagcatgaagaagtactgccaagtcatccgtgtcattgcccacacccagatgcgcctgcttcctctgcgccagaagaaggcccacctgatggagatccaggtgaacggaggcactgtggccgagaagctggactgggcccgcgagaggcttgagcagcaggtacctgtgaaccaagtgtttgggcaggatgagatgatcgacgtcatcggggtgaccaagggcaaaggctacaaaggggtcaccagtcgttggcacaccaagaagctgccccgcaagacccaccgaggcctgcgcaaggtggcctgtattggggcatggcatcctgctcgtgtagccttctctgtggcacgcgctgggcagaaaggctaccatcaccgcactgagatcaacaagaagatttataagattggccagggctaccttatcaaggacggcaagctgatcaagaacaatgcctccactgactatgacctatctgacaagagcatcaaccctctgggtggctttgtccactatggtgaagtgaccaatgactttgtcatgctgaaaggctgtgtggtgggaaccaagaagcgggtgctcaccctccgcaagtccttgctggtgcagacgaagcggcgggctctggagaagattgaccttaagttcattgacaccacctccaagtttggccatggccgcttccagaccatggaggagaagaaagcattcatgggaccactgaagaaagaccgaattgcaaaggaagaaggagcttaatgccaggaacagattttgcagttggtggggtctcaataaaagttattttccactg

SEQ ID NO: 240517 - DNA, 3536 bp, Homo Sapiens
caaagtagaaaattattttttgccccactctggactcagacacattcagaaaaaatatatatttataaaaataaaatgtcaagcctatccccaccaattgatagtcttaatatcctacactggtttatttgatcatttaatgcataaggagtgttgaatgatttttccctgtcctaactccatgtcgtatgaagcaatgatgaaaatatgttactttttgcaacaccaaaataaaaaggtcccaaagcaaaacacacacaaaaagtcactaacaatatccactaaacaaaaacagtactgctaattcacctgctcatatagacccttccttcaatcccccagatacttggcatttaaatgttatttctaaatcagataccaggaagcaactatgtgagaaagaaaatgaaaattctaggtctaatacatgttaaacaagtttcaggtaatagtagctgagaaaaatattgatgcacataatgaaacaaaaagaattgccagatataatgtggtgcacagggtactcgataaaaacatgcactttgtctcgctgaaatgtccttaaatattgtctgagcaccaaattctgcaaaagcaaggatctagaattccgaattttagaagttataaagagaacttcactgcaattaaaagagaaggcaaaaattccaacttcctgaaggaccccattattcatatagaatcatgacaaaatttaccatggaattagaatgatacctatgttcttccactagattcacttattaagagatctgtctttatatggaagtaatgtttcacggaatgaaactaacattcatagtaatctctgatatcacattgaagggaacagcatacgagcaaacaaattttagaatctgttttgtgaatagtctgacaatgtaaataaacatctcccaaagtagagaaaaaaacaaaattttaatacaagaagaaataaaaattattcacttacaaaccacctacacattttgttttcccaacagacacactttaaaagcacaaatagaatataaggcaaacagtacaaagctgtgaaaagggtagcagagaactgaggcattcatttataaacaacatcacagaatataaacgaagatcatattttgtggatgtttgcattcacactgagctttactctttttttcctattaaggtctttcatttacaggtaatgatcaacaagacaaaaatatgtaaatgactaattataaatatgaaaaaattcagtgacattttctataactatttccccatgtcactgactgctaagttttcacttccttactaggctgagtttcaaatgaggtatccgtactcatctaagcttttcactactgcaaaacaagcttgactattgggaacattaacatttatcttcccaagaatcactcatcattctttggagaagaatctacttgttaaattaacagcatttatctctggtttccacttaatatcatttcactctagtagttcctgaattttggactgcatatttgtttcatttccaaaaaaaagaaatatggagtgtcaaacactaagaataggtatttaattattaaatactaaaagagtacatggataaaataaaacaatcactagtaattccttagtacttaagatgcaagtgtccatacagtcttgattagtacggcattagaaacaacagagggctgtccttgatgactaaatccctaaacaacgtcagtgtccagaccatgaattacatattttttgaccatgcattacattattttttaataaatgttcaataaaattctttatagtggaaaattactcaatgaataaccactcaaatcatagttgcctaatataaattctaaacttagctaaaatgaaggcctcaaaaataatttatctacaataaacataccaaactgttactttaaaaaaaagagtttttagacattgctttggaaagaattcctgtattagtttatagaagatgagaggtcacttgacgaaatgggtgacagaactaagacaatggagaaggtaactggctgatctcttttttttacaccggatgtgacttgtcactggacatgctaatgtcagtcgttactccttatgaagcagacacggacaggtctacagcattacataatagatgtgtcaataaactgtgtgtgtctgtgggtgcatacgtacgtattctagagtagaagttaccataaagttcacacaccagaaacataaaaatatgatacataccacttttcaaaaagcagaagatttttatcaaaggaaatgttagaagaaatctcaatatataaaatagaaataaaatactaggctattctggctaaagcagagtaggattaacagagacccttcccaacctacaatgactgatgaaatacctgttagtattccaaggaatgggctgaaacctctactcagtaaatcctgtttattttgcgaaagtcaatcacaagacttttttttccccattatctaggcatatatgaaaattttatgataatgcaactgagtataaagttaaaaagtaacatttcttctcctttaaaaataactaacaaaataaaaccactatgctatataaaaccacattatttttaacctcataatcttgatacatggaaaaagttattagttctccttaaagtgcctaaattttaaagacttaattttgtcccatataaatcttgtccaaaatatatgagggaaacggatggcagcaggagaggcattatttttctatatcacacatgtatcttctacgtgactgaccaatttaaatattctgcccaagaatcttaactttttgtcacagaatattcagatagagaaacatgcaaatagaattgttctgttctaatcacaaagatcaggtaaattttgatggagtgctctgtgtttgtttcagacaaactgttcatctctttgctccaaacacttccccatgtatggagggactactttaatccatgcagttgatattagcaaaatacgaataacatgttcttttctgtaaagatcatgattaaatgtctaaattcaataaatagactctttaataatttgaagtcctaacaaatattttatagtcatcaagtctcaatctttcttcttttctaatacatccttgggctcctgcactgtaggcactacagatcctccactgctgggctcctgctgttctttgctctcttctatctgttcttggttttcattttcacttttagacacttcatatcgttcttctatataacctccatctgtgtcggctgtgtagattccatagcacatgatactgatgacacccagtggcaggccaaagagaaagcagcccatcagtggtgagctcttgaatatagactgtggaaagagaattaaaactcagttcccttcacatgtaattctgatatatatagcatgaaatgaacttgaaaccactatagatttctcttgttgctattcagcttgtttttagttccaatgaatcaatcatttcagcagtaacccaa

SEQ ID NO: 240518 - DNA, 899 bp, Homo Sapiens
  misc_feature (738)..(747): n is a, c, g, or t
ctttgtacaaaaaagttggcacgagcattgggtgtactggcacagctcatctggagccgagccttaggcttccctctagaaaggcccaagtccatgagcacagagggtctgatgaagtttgtggactctaagtcagggtaaaactggagactgggtgaaagtgactaccagaaagtgaggaagcctaaataaaaagtatacttttgtttcagggggcctttaaagacttaagattaaattatatctgaggcactgataatatgtttgaggttaaaatataaattaagactttaaaagatgaaaaatggtcccttcttccctaatcagctcccttcccctgcctggtatgagttgcccatcatacgcatggtcctggaggatgaccaggactaatgcatgtggtatgagtaggtttggccccctcactatctctagagtgagaatctggctcctgtttccatgggtcaaagccggttgcagagaatctgtagtcactttggagctttagcttctctgccaagccctcaataagccagcaaaccaggactctgccccttctgtttccataggaatcatgttggatagtcagctgtaccaagccccttggccctctcccatgcacacaaacacctcctagcaagacctgttggttagctggacatgctttggcaatttttttatactaccaagtgaccataaaggcatggcatttgttgtgactggcacccaatgtttgannnnnnnnnnaaaactatccaattaaaattaaatctgggagtgttctgtttcccattactttaatactcacctcctcccagactttctacacctgttgcacctcagcagaggatgttctggacctcccctcttggtccctactagagactctcacagatctg

SEQ ID NO: 240519 - DNA, 1060 bp, Homo Sapiens
actttgtacaaaaaagttgggactatttcctcttacacggccttctcccgtctcatcctgattctgcgtgccctacatgtgaacaacgatcgggcaaaagtgatcctgaagccagacaagactactattacagaaccacaccacatctggcccactctgactgacgaagaatggatcaaggtcgaggtgcagctcaaggatctgatcttggctgactacggcaagaaaaacaatgtgaacgtggcatcactgacacaatcagaaattcgagacatcatcctgggtatggagatctcggcaccgtcacagcagcggcagcagatcgctgagatcgagaagcagaccaaggaacaatcgcagctgacggcaacacagactcgcactgtcaacaagcatggcgatgagatcatcacctccaccaccagcaactatgagacccagactttctcatccaagactgagtggagggtcagggccatctctgctgccaacctgcacctaaggaccaatcacatctatgtttcatctgacgacatcaaggagactggctacacctacatccttcccaagaatgtgcttaagaagttcatctgcatatctgaccttcgggcccaaattgcaggatacctatatggggtgagcccaccagataacccccaggtgaaggagatccgctgcattgtgatggtgccgcagtggggcactcaccagaccgtgcacctgcctggccagctgccccagcatgagtacctcaaggagatggaacccttaggttggatccacactcagcccaatgagtccccgcagttatcaccccaggatgtcaccacccatgccaagatcatggctgacaacccatcttgggatggcgagaagaccattatcatcacatgcagcttcacgccaggctcctgtacactgacggcctacaagctgaccccagtgggctactaatagggctgccagaacacagacaagggcaacaaccccaaagggctacctgccttcacactatgagagggtgcagatgctgctgtcggaccgtttccttggcctcttc

SEQ ID NO: 240520 - DNA, 736 bp, Homo Sapiens
  misc_feature (643)..(651): n is a, c, g, or t
  misc_feature (674)..(684): n is a, c, g, or t
ttttaatgggaggggttcccccactctgacagtcttgtaaaatcctgagaatgtctgaggggatcagatggtagctagttcagggctgaggatgggacagtgttgatgttacttttccccccacatctggctttttgcaacctcctccctctccctaccccttgattttggtgtgacaaaaagatacctcatttatggggaaattgaggaagatacatatacaagcaccccaacccatatttaacatatttggcaataactcccttcccattcttccccctccaattttcaaatagtagttttttaaaaaattaaagacatgtcactcacaggggaagatggcatcttcaatttcctcaaaattactgagtccagccctgcccaagggttgtgggaagaagggggatgagaggccagcagggcaagcccttcactgcctccacatcaaatgcggcagaaacctgcctgcatgaacaaagaacacctaagggattttagggggcaaagcttggtgccctgtaaaatttacttcctgatggacaggcctggagccaggggggcctctttaccagttctgtttgtccccctttctcttaccagaacccctttggctatcacccctaatatgggaaagtaagaaatnnnnnnnnngacaagaaatcaacatatttatnnnnnnnnnnncaagctacttccccaaactaaattaaaaattaagaaccaccaccaccaccac

SEQ ID NO: 240521 - DNA, 1473 bp, Homo Sapiens
  misc_feature (656)..(759): n is a, c, g, or t
  misc_feature (787)..(1029): n is a, c, g, or t
tacaaaaaagttggtgattttctaagaatatatggagccaccgtgcctggccctagtatttttctctattgtttacaatgcatttgtaggcaaattggtatctcagaagtattctttaccaataagttgaatcttcattcctttgcaccaatttttttcacatttgttaggtttttaaaaattacaaataagtattgacatcaagagcttatgccaggtactttttaaatcacttttaataactctttttactatagcttttcgaggaaggtctttaatatccatgtctgtaggcagggaagtgtactgaggaataaagaggaagaaatcataatccaaagctacccagctaatgaagatagtacaagtatgcaaacccagagagattggctccacaactcttgctctcaaccccccatatgatctcattgctagaatgaatgaatgacatgtacatagtttgaaaatttaaagaatacataaaggcaaaaagttaaaagtgaactttcatccttgcctgcacactactctatttcccaaaattcatcatgatgctattggtttcttgtgattttatataccagcatctgatatctctatttgttaatgtatataaagataccacattgtttacactgttctgtcttgttttcacnnnnnnnnnnnnnnnnnnnnnnnnnnnnnnnnnnnnnnnnnnnnnnnnnnnnnnnnnnnnnnnnnnnnnnnnnnnnnnnnnnnnnnnnnnnnnnnnnnnnnnnnacatttttttgagagggagtcttgcttnnnnnnnnnnnnnnnnnnnnnnnnnnnnnnnnnnnnnnnnnnnnnnnnnnnnnnnnnnnnnnnnnnnnnnnnnnnnnnnnnnnnnnnnnnnnnnnnnnnnnnnnnnnnnnnnnnnnnnnnnnnnnnnnnnnnnnnnnnnnnnnnnnnnnnnnnnnnnnnnnnnnnnnnnnnnnnnnnnnnnnnnnnnnnnnnnnnnnnnnnnnnnnnnnnnnnnnnnnnnnnnnnnnnnnnnnnnnnnnnnnntgagccactgcgcccagccttcacatatatttttaagatctttttatatccatacgtgtagccccacctaagtagttacgtcattgtatacctgtatcctagtttatgtagccagtcctttgatttgttttcacttcccattacaaaaaggactatagtgtatatccttgcacttttatcttagcaagcctttatgagtctattagcttttacctcaaaattttaagccagaactatcatctttgtttttttattttctatctttaaacatttatctgtgaagtgacaaatggcctacagctgtgagagcaaatggacatctcctccctgaactctgagaagatgtcaaaatccacagggcaacttcctcactttgacccaagctattgacaaatttttcagcagatggaatgcgtttggctctggctgatgctggtgacactg

SEQ ID NO: 240522 - DNA, 918 bp, Homo Sapiens
ttggggactctaagctgtcggagggaccgctggacagacctgggaactgacagagggcctggagggaaacaggccaaagacccacaggcagagttgacacggaaccccaaagcaaggaggagggctcgggcccgagaccgttcacctccccttatccctgttcccctcttcaggatggagctgacctcaagggaaagagggaggggacagcctctgccctgggaacttcgactgggcctactgctaagcgtgctggctgccacactggcacaggcccctgccccggatgtgcctggctgttccaggggaagctgctaccccgccacgggcgacctgctggtgggccgagctgacagactgactgcctcatccacttgtggcctgaatggcccccagccctactgcatcgtcagtcacctgcaggacgaaaagaagtgcttcctttgtgactcccggcgccccttctctgctagagacaacccacacagccatcgcatccagaatgtagtcaccagctttgcaccacagcggcgggcagcctggtggcagtcagagaatggtatccctgcggtcaccatccagctggacctggaggctgagtttcatttcacacacctcattatgaccttcaagacatttcgccctgctgccatgctggtggaacgctcagcagactttggccgcacctggcatgtgtaccgatatttctcctatgactgtggggctgacttcccaggagtcccactagcacccccacggcactgggatgatgtagtctgtgagtcccgctactcagagattgagccatccactgaaaggcgaggtcatctatcgtgtgctggaccctgccatccctatcccagacccctacagctcacggattcagaacctgttgaagatcaccaacctacgggtgaa

SEQ ID NO: 240523 - DNA, 1394 bp, Homo Sapiens
  misc_feature (181)..(189): n is a, c, g, or t
  misc_feature (385)..(393): n is a, c, g, or t
acttgaaatacagacacagtgatgctgaagacactaaacaaaaactgaaaagtactatatcttgataaattttgttattgccttctttagagactttataatctctagttgattttcaaggacttgaatttaataatggggtaattacacaagacgtaaaggattttttaaaaacaagtannnnnnnnnacctctagcatcaattcttttataaagaatgctaaataaattacattttttgttcagtaaaactgaagatagaccatttaaatgcttctaccaaatttaacgcagcttaattagggaccaggtacatattttcttctgaacatttttggtcaagcatgtctaaccataaaagcaaatggaattttaagaggtagannnnnnnnnccatgatgcattttgttaataaatgtgtcaagaaaataaaaacaagcactgagtgtgttctcttgaagtataagggtctaatgaaaaataaaagatagatatttgttatagtctgacattttaacagtcatagtattagacgtttcgtgaccagtgcattttggactctctcaggatcaaaatacgagtctgccaactgtattaaatcctcctccaccccctccaccagttggtccacagcttcctggtgggtcgttgtcatcaaatccattgggccgaaatgaacatgaagcagatgcagcttggagggcccgggctcgagcattcaactcttgttcctgtaaatatagtttattgtcttttgttatagcatccataagttctttctgtagaggtgggtctccatttatccagagtccactggttgggttattaccacttaaaccattagtactatgctgttttttatacaaaagcacataagctgtgtcctttggaaacctgctcgtaattttctggactgactgaaatgaagtaaatgtcactctactgtcattaaataaaaaccattcttttgacatttccttattttccaaatcctgttcaaaaactgcactgggactatctctccctagtaaatgactctgggaggatgctaatgccagagcctcagactggtggtacatctgatatgaagagtctgtacttgtgatattcctggcataagaatagtaatgcccactttcagaggatataccagagtgaaccacaacggaacttaatagatagggcaccaattttgtgcaggaagcttcatcagtccctgaaggctttaattttttagcaaggttctcactaagatcagtgaagtcaacatctacagaccaactttctgacaatgaagagaaagaagtaattcttttaactggcaactccaaaaccagtggcagtgatacattgtctaaaattgttccttctcacccaacttttttgtacaaagt

SEQ ID NO: 240524 - DNA, 1694 bp, Homo Sapiens
  misc_feature (1300)..(1386): n is a, c, g, or t
aggggcaacttggggtgaagactgaagggtgggtagagggactcacccctatgtgcccgaagaattcttggctctctcccaaattaacttgatggggatgggaaattttgaggaaaggcactgcacagaaatggaggagtggccgggtgcggttgctaaaccctgtaatcccagcctttgtccatgattttgacagcatgacctgctaattctaccagagactccagtgggaacactcagcaaaataggctttgactcccacagtttccatccttttgcagataaataaggaagtaagtacacctttggctaaaactctggcactctgggcagttgatcctggcagagtccaagggtcagacccatggacctgtgaagtgggcaaccgtttccgggaactgtccatagcacttgctggggtgaccaggtcctgcctttcacgtcacctacttatccgactatttcctccatttgcttcttttctatttgccatcacctgtgacccgatggggccagacccctggttcatcccaaaccacatgacatgaacggactcttcctagggacagaggtttctccccagcagggatgccctcaccctcattcaatgtttatcgtctcttttcaattcctttagaacctcagccccacacatacatttattaaatgttcttttcttctcaaatatgaatggtaactctagtgagagcctacttgaacaggcttagggaaccatccctacaaacatgaagaagctgagatgcctcatgtaagtcacaagaagcagcagcatagaaatatgctcagaggggaatggggagttctggagggaacgccatgagtctggagactgtggctcttctgtgcggtggagcctgaccacgtgccccctgagttccttagaattcactaagtccatatcattcagaggttacaaaaccccagtttcaccaaagctacatgtccctggagctacaggaagcccacatgttgtgtagtgtgcagaaattctgttcttctccttcctgtaaactgtcagtgcactgtaaaatcaatagtagatggtgatgagtctggcctcaagaaaggaccctgaatagcactgggagccactttcaaagaatttaaatgtaagactaaagccaagcgagcttcctcatgaaaaccagcctatctgcaactgtattcagaaataattttagaagttaaatagtgattaatgtcattttacatcaggtgcagaaaggtgtagcttaaaactatgtgttggtttttgttccacttgtaccaagaaaatagnnnnnnnnnnnnnnnnnnnnnnnnnnnnnnnnnnnnnnnnnnnnnnnnnnnnnnnnnnnnnnnnnnnnnnnnnnnnnnnnnnnnnnncaaagataaagaaagagagaatgaaaaggtcattcaggaatttaaaatgtgaaccgcaaagtttcaccaggacttccaaacagcccaggcctaaggaagagcggctttatgaaggagtttccaagacaggtgagagatcacactgtgaaagtccaacatgtgagggttcacgcgataagcgtggagtacagagccagaacatgtgaacggtagctacacagtgatggacaaacacaacttattccacagctggtaaaatacttagaatatatctgaaattatttaaacacttgctattctgtcaaata

SEQ ID NO: 240525 - DNA, 1481 bp, Homo Sapiens
  misc_feature (558)..(576): n is a, c, g, or t
  misc_feature (1401)..(1410): n is a, c, g, or t
gattgccggaaacgtgatgctggacatggcagccacggtcttgctgcccacatcatccaggcctgtgatccaaaaccgtaccaggctaactggagcatctggaagcccaagccaaggaggacagtattcttatttcctaatgatctcatcaagatgctaagaaaggccgtctgagccacaatagacagaattcctaccatagctatgaatgctgcaattttaacagatccaaaacctatgacctgcctgagatagagaaaaaaacttgaatactgtccagcttcaggaaggtatgaaagaaacacggtgatgcagattagtaagacagtagaatcttttccaactttcttcaacgactgagaataagcagaaagaacacacttaaaatgccaatacacattaatgttgccaatgttctgggacatcagcttcattattttgatctattaagatgaataacaaaagtcaaatggttaacaaaaggaagttctatcaccatctttctgaggaagttacaagtcttaatttcagaggtatatatttcaaatcatatagctnnnnnnnnnnnnnnnnnnntaaacccacaaaacacacttactcatctttgttaacacactgattaaaatccctgaacagatcccgaacttcctataaacagaacctggaaatatattcctacagaaccttttaagaaaatcacttctctcaattcataatgtaacttctttaaagccatattcagtacagagcgtttccgtataggtaaattcactctattcttcaaagtgttcatgttcaacttttatatctggtagacaaataagtacgctccagccataaggtcaaactggtaagaacttgttgaatgttacaaccttgttgaaaaatccttcttacatacattggattgttgaatagaacaaaatggtaagttaataccaaaggagtggaaagtgctacagagcttctagctcatcagaccatagcttttatgtaattaataagcaaaagcagctaatgttgttgagactttgctgggcaacagacactaggctagttaatttacacacattaacagtaatccccacgattgcccggaaaagtaagccacagtagctctacttcacagaggagctttgatgcataacttgatcactacaaaggaaggtgggaagcctaactggctggctcccaaccccactactggcttccttctctaaatatttcttttggtgtctgacattgtgacaataatagaacaggcaggatccctaggtcatgccctcagggggtattttagaaaaagtaatttctgattgattacatgaatttttctgaaaggtaaacttgggggacgaaaagcagaaaccaaactgctggttctttttttgtctacaaacnnnnnnnnnncccaagaacaatttcaaaccaggtagggtagagagaaggtgggagataagatccaacttttttgtacaaag

SEQ ID NO: 240526 - DNA, 1627 bp, Homo Sapiens
  misc_feature (733)..(795): n is a, c, g, or t
  misc_feature (1423)..(1433): n is a, c, g, or t
ttggttcagatcatgcacctttgtacatgaacattaattccagctttgtatagatatggcttagagggaacaagggaagaaatttcaaataaatagtacaaaaagtaccctacctcaatttttagctggatttttaggtcatttcaaattttaactagcctgggcttatccagagaatagtgtagtgattgtgtaggtgaaaacagaatctgaacaaagttaagacatatcttttacataagatattaaatcactaaaatgacccctccctgatcccgagaagcaatgaacacaatacttattgctgccaaataaaatatagtaacatacaagaaagaatgctctccaaatttaaggtcacaagattttgctataatcatacataattgttgttacaaaactagacttatgaccaaattacctgcaggggaacgttgttagaattcaatttcgggcccaactcagtcagttccacatggaacatgtagaatatgaagccatacagtgctggccccaggccattgcatagtcctcttattccagttatgatcccctgggcaactcctaaatcagaacaaagaaaataatgccagtcttctcagaaaggcatctcaagatttggagctgcacagtactttctcataaccatgatacactaattcggcaagactgaggaaaagagaaagcatgctaatgaaagtagattaggaagactttatccattataaaatannnnnnnnnnnnnnnnnnnnnnnnnnnnnnnnnnnnnnnnnnnnnnnnnnnnnnnnnnnnnnnctttaatatcttcccatttcaggcaatgtccacttttctgtcaactgagatttccctgctctggtcatttactggtgctttcacaacaaaaacttgcccttcacctctggcagccctggtgtcaggaatacagaccagtccccagtaggcagacttcatcttcacaggtgtattccagcctatctccctagagacctacactgaaaaacccagaagtgccaaattcctaaatatctctgctttctaacatagcaagtaaaaagttagcttgaactgtatgaaatgaatgtttctgtaaatcaaaaatggtagtatataattcagcctaatacaatgtgttccaaaacttttatatgctgacatttagaaacatgtatattgacatgaataagtataaaaagtcaaaagaaaatccatgccccaaatgacaggacggtgtctgtcagatgccaaggcagtgacagtcctccacggatgggtcatcacatattcacttcagacacagcacctccctaaggatgcaaaccaactgagttactgtagccaggagtgacatacagaatgtgtggtcttcaagggacaatatttaacaatgaatctgagtaagatacctaacttctgatatagnnnnnnnnnnntgcaatgaataaaccatcctttccaatatagttttttactaaaacttttaaaagggctcttaggcattaaaaaatttttctccctctaaaattgtctacttcttcctgaatacaataaggtgagccattaggagatagagaaggacaccttgtatgtaattgaaatctagccatgccaacttttttgtacaaag

SEQ ID NO: 240527 - DNA, 997 bp, Homo Sapiens
ttggacctaattgagccatagagttaaaacccttaatcttccattttcagtttcatagtacttttttctgctttatttttatctgctctaggtattgtattcgtattcaattggttttgtatacattttactgggattgacatgcactagtggattaggccctgcagtaacattttgtgcaaagaatccagttcggacctatggttatgcgttccttttttccctcactggatattttggaatctcctttgttctggctttgattaaaatttttggtgcacttattgctgtaacagtgacaacaggaagaaaagcaatgaccattgtactttcgtttatattctttgctaaaccattcacgtttcagtatgtatggtctggtttgttagttgtccttggtatatttcttaatgtttacagcaaaaatatggataaaataagactaccatcactgtatgatttgataaacaaatcagtggaagcaagaaagtcaaggacgctggcacagactgtatagacagtgattgtcctatttaaaatagaattttaagggaacaatcatcaattaattaactttccaaagggactgataaaaaccaaaggatctggaggcattgctatcccatttgtggacagatttcatatgaagttgttttgcggtgtcagccttttcttcagagcatttgtttgactgacttccaaagcaatcaagagagccacgtctagcagactttacaataaaatgtcaatatgaaggactgtaattcctagcagtttattgagaatttcactggaaatggaccatgtgttgcaagactaattggctataattatatcctatcaaagaaatcgatacgtaatagcagattgttttatattcattccattttgatggtgttatttaaattgattctctgttataagagtaaactgatgagttgaagtctggagagaataacattcattataaataaaaattattctgtgatcttttttc

SEQ ID NO: 240528 - DNA, 937 bp, Homo Sapiens
gccaactttgtacaaaaaagttgggtacaaatgaaaaggatatgtacagcttcctagaggacatgggcttaaaggcattcaccaactcaaagattcgtaaacccaaaatgtgtccacagcttcaacagtatgaaatgcatggacctgaaggtctacgtgtaggtttttatgagtcagatgtaatgggaagaggccatgcacgcctggtgcatgttgaagagcctcacacggagaccgtacgaaagtacttccctgagacatggatctgggatttggtggtggtaaactcagcaggtgtggctgaggtaggagtaacagtccctgacaccatcaccgagtggaaggcaggggccttctgcctgtctgaagatgctggacttggtatctcttccactgcctctctccgagccttccagcccttctttgtggagctcacaatgccttactctgtgattcgtggagaggccttcacactcaaggccacggtcctaaactaccttcccaaatgcatccgggtcagtgtgcagctggaagcctctcccgccttcctagctgtcccagtggagaaggaacaagcgcctcactgcatctgtgcaaacgggcggcaaactgtgtcctgggcagtaaccccaaagtcattaggaaatgtgaatttcactgtgagcgcagaggcactagagtctcaagagctgtgtgggactgaggtgccttcagttcctgaacacggaaggaaagacacagtcatcaagcctctgttggttgaacctgaagactagagaaggaaacaacattcaactccctactttgtccatcacgtggtgaggtttctgaagaattatccctgaaactgccaccaaatgtggtagaagaatctgcccgagcttctgtctcagttttgggagacatattagctctgccatgcaaaacacacaaaatc

SEQ ID NO: 240529 - DNA, 1387 bp, Homo Sapiens
  misc_feature (298)..(373): n is a, c, g, or t
  misc_feature (484)..(564): n is a, c, g, or t
  misc_feature (663)..(688): n is a, c, g, or t
  misc_feature (695)..(968): n is a, c, g, or t
aacactggtcttcagtttcctctgccatttgagaaaactaaggctcaagagggctgtggcttgcccagagtcacactgcaggctatcagcagagcacagcagaaacaggtgaccagatgttcatattcctggcctgtcatgtgtctccttttagctctcccataggccaggatattatccatgactcctgatggtctcatccagccccaaacttcttggcagcagcaaccttctcttcctattctgttactagatgtttggacatcaaaggaataatagctgatgcataacactaacnnnnnnnnnnnnnnnnnnnnnnnnnnnnnnnnnnnnnnnnnnnnnnnnnnnnnnnnnnnnnnnnnnnnnnnnnnnnacaaggggaatccagagcactcaaggtactagcattgttgagacaacccaggctgggaaggggaaatggaaaatctatattcagtgcatgctctgatcagggcaacttccnnnnnnnnnnnnnnnnnnnnnnnnnnnnnnnnnnnnnnnnnnnnnnnnnnnnnnnnnnnnnnnnnnnnnnnnnnnnnnnnntcagagtgggaagtagcttgttcaaggtaaatggcacagttggtactcaaacccaggtcttcctagctccaacgctacgcttgttcttttttcttttcnnnnnnnnnnnnnnnnnnnnnnnnnnataatgnnnnnnnnnnnnnnnnnnnnnnnnnnnnnnnnnnnnnnnnnnnnnnnnnnnnnnnnnnnnnnnnnnnnnnnnnnnnnnnnnnnnnnnnnnnnnnnnnnnnnnnnnnnnnnnnnnnnnnnnnnnnnnnnnnnnnnnnnnnnnnnnnnnnnnnnnnnnnnnnnnnnnnnnnnnnnnnnnnnnnnnnnnnnnnnnnnnnnnnnnnnnnnnnnnnnnnnnnnnnnnnnnnnnnnnnnnnnnnnnnnnnnnnnnnnnnnnnnnnnnnnnnnnnnnnnnnaggctctttccattgcttcatattccactgcctctggcagaggaatcaggttggagattgaggcctggaaagttgaactcagagaaaccctttcctggggcttgatgtgatctggctctcctagaagggaaagaacctgagaatcttctgagaaatccagcacctaccaccttgggttcagtaaacatggaccccacccatgtcataagcttggttttctgggttccctgttggttttcttgagttccagttgttatattccctcctcgggcctcaatttctttttggcactatgaggagctgggtctatgactgtcttgaaaggttcattctactgtgaagcttggatggactttgtcttaaaaattcttaggaagtacagggcagtgacagcgctgctccaacttttttgtacaaag

SEQ ID NO: 240530 - DNA, 1218 bp, Homo Sapiens
ttggcaggaaaagccctgtgttttacataggaatacacacattaacaaagcatttcttatagttttccaaaactctattatatcagtccgaaatttataaattaaatatatcagaattcttaaagttaaaatgaattccctgaaactactggatatgctactttttccaaaatcaaatgaacagaggatatggatgtggtttgtgttaaataaggtttattgttagctttattgcctatagtctataagatgcaactttactgtgcctttgcaaacaggatacatttcttaaaaaattgatcaaaattttccatacatatagctctatatgatagattacagtgcaacactattctcgttacataattatagaaatactatagaacccaagagcacggggtaagcaaaataaatacaatcctgagccatctgaacaagatgatttgatgaatcctttagtgtaagtttagaaaacacagagaaggaaaaaaatacatgcatactgcagtcatgagcaaaatacatcaaacacctgttccttgctaggtgcaggtgggggcaatggtgaacttcagacacatgcacactcactcacactcccattttcttctgcttccctcccagccccaacacattcattcccgccccttcccaaaaaaaagatcaggcactaaatcctagtgaaccccacaactgccttgctggagaaggttaagtgactgctaaagtaagagtgtatgtaggtcctcacccataacatgaaacaaagcatgtgctgtaagccaattccagctgcttttgcctctttggaagtaaatgaagcatatgcccactacagcttgaaactgcagtggaaatgtcttgaaaacaaaattttgtttctcttgctatgtcttgaagtaaaatcaacagtggaaaattcatcctaaaactgcctcatctgctattaaaatacatttgtcattctatttttggtatctattcaattatagttcattaagaacggttcatgaagcttgtacctgcttatggtaaacatcagtgtaccacacaaaacctgccacacctagacaggcttatgaaacaccaaatcttctatgtgttccttgctaacattccctcaagaccacagcattctagtgttaccagagataaagtacgtatagttaagtgatgaaagaaaggtatttggtttgtgccaacttttttgtacaaagt

SEQ ID NO: 240531 - DNA, 1467 bp, Homo Sapiens
ttgggatcagatagattccagttaggtgtgttgttccttatcctacctgaaccctagcaactcatcaatctttctgtataagatagaggtattatttctaaaatcatgctgtactcatgaatacataaaaatgatcacttatgtctgattgtatactaatgttttagatttaaaaataggttgacctttatcaaacttttgaactgggctttgccagtggttgtcatgagtatgtcattccctttgattattcccctaaatatgcattactacccatgtctttggatttggtgcaaaataaacctggtctgttaaagattctcaaacacagccatgtttttcttaccacctactcttaaccagagatcactgtccacaatttcattcaagtagaattccatgattatactaaagcagtacagtaaataccactatctctattgaatacgtttttctcttgtataaaacaggtggaggtttttgatctgctttttgtcactaatgagagtaattcacgaaagacctacatagtacattgccaagattgtgcacgaaaaacaagcggaaacttggaaaactttgtggtgctagaacagtacaaaatggaggacctgatgcaagtctatgaccaatttacattagtaagtcaaatcaacatgtgagtacatagttagctgggttatgaagcagcagtgtttgctctgccacctgataagtaggaggtaatgaaatattttaaattttcctttggctcattatatattgcatgagggtatattcatatcattcccccctccatttccaagtatttattcctataaaattggcatatatcattttcagttttcctgggtgagaccagcctaaataattttacaacaattacatttaaaaatctttgcgtgctttagatagaacactatcatatcctttatgtcattttatctcagttgataaaatgtttgtgtacgtaggttattagagcccacaaaatgaatcagtaagtgtgcttttaaatatacttctgcttttagagctaattgtatttgtttaaaattttgtccttgccagaagtattaacctcatgggagtatttaatggagcttaacttcctggtatattatgtaaccttatgaaattcaagtatacttataaattgcacagtttttaatttcagacagcagatgcttgggggaagcattttactttcgcagatcaatagctttatgaatagaaacacagagataatttatgaattgttgattttctccagtacttgtctcccacacatatgtgatcagaaactaactttttgaaatttactttctgatattttcacttgaatggtcttcaagattgcttgaagaagaaaattatctgaaatatgttgaagaaaatatattacctagctgagatagattctgaagcagtcactagtgaaattgtaatttgttaaattattttgca

SEQ ID NO: 240532 - DNA, 1405 bp, Homo Sapiens
  misc_feature (446)..(454): n is a, c, g, or t
  misc_feature (966)..(991): n is a, c, g, or t
ttggattttctttacaggatcctcttcaaaaaggaagggatagtggaaaactgttcttatatcttcagatccctagcagaaatgactgtttatttcaaactatgttttacttgtatatgatgtagtcaccttaactatctttcaattccatacttcccccgcccccattttaaaggcttattgttgtattttgtagcagcttcaagtgaccaaaagactaaaatctttcaacgtcaatgccaaaagccaaggggaattttgcagtgataggattttagtctcttactatgaatactaatttcgaaccatagctttcattttaagcatcatcttgaatttctaaacttttttctatgtcttggtgttaaaagatttcaagattggcatttttacttaaacagacattttatggttgagttttctctttattatagagaattagtaannnnnnnnnggctgacagatcagataaaattactttctattcattaatttttctctacaactttatgagtttatttaggtgaatagtctagactagaaacaagtttactttatctgctttgcctctggtggtacaaggtttttaacatggatggtaaacaattgtctagaaattctggcaggttttttgtattggagatctggcagtatcctgcataactttgggtgaggaaattgttctcttaaagatcagccatgttcaggaaatgatctctgtttgaacctcactatcctgtaaggttatccaagtagcttagcccagctaagttctatcagagacccaaattatattttttaaaaatttaacagctggaaacttggactagagctttaataaaaaatcttaaattctttgaaattcaagttaaaaatacttatatatttctattacaaagcagtgacaaatgatgccctgtgtgacttggagttatctttgacttttaccacaaatcttcatttatnnnnnnnnnnnnnnnnnnnnnnnnnngttagattgtgtatttttcagtaacagctttccatgtcttaagatttttttacagacttaagtttctaattcaggttgtcaaactggccatttgacttcagagatttgttttcattaaaaaataagcctgccgccaaaataaatcacttatcaagatgtgaactgttttcctcatgttcagttatgttaaagtagtatgataaatgcatgcctagagtagtgctctcgttgatgaagcacatgtatgaggagaccagcagcaaaacataaccatatgtgttttgcgtgtgacttcctctagaaaagaatttgcaggcaaccatgtttaatttgaactatctaagatggtagattttagaagctaggataattgagttttatagcactattttcagaatacgaaaagatacacaa

SEQ ID NO: 240533 - DNA, 1267 bp, Homo Sapiens
ttggtttatgatgggggaggggaggaggggagagcctcacatgttacttccttattttataaagatattttttaatcccaaggtgccctcatacctcttgacattaatgacttcattttttagcttgaatttgttagcaaatattaatggcagaaaaccaaaaactaaatttatggtatcgagagcaccaccttctctttttgcccatattgcactttgatttcaaactatgcactgtgaagagatttttttccccaggtaggaagggatgttccctgttatcgttattttactgagctgtggaaactcatttttaccctttttaaagtcataaatatggacttaatagcccttaaccttcaagtccaagcagttccaatcaggctgacttaggatcatgctggaaggaagccaagtctcaagaactgtcagcaacagaaaatgagatatgatgctagagagcatttgtccttgactgtaagtacagaggcttaggggaagtgagacataagcttgtaggaataataaacgttctacaataaacgttttggctatcttaagccattgtatgggggggattaggaagtaggagggattgtcctacaacaggcccttatacttcaacagcccaaatattttggtttattcctttttatccataaagtctttattcttcaagtttgggtattatagattaccattgttagcctcccttaatgggaccatatgagccaggcttttaagacggactcattttgaattgagtttcaaactttgaaagtgcaaggatttaatttttaagttgaatcccatgaaaggtgtcatcatcactaggaataacaccctttgtaactacatatagaactgttacaatggtagcagaaaatcctattgatttcatctcacccatttcagataccttcagtgaaattaagggtagtgtgatgtcccatgtaataaaacaggcttagaacatcaattcctctgctgccatttatgtgcttttattcccccttcaaaaattttttattggatatatatatttttcagtattcagactctgaaatctgtcattacaatcaagtgcttgtcacagctgaaagatttctggtggcttaaagtttactagcagtaaatttatgatatggtacagttctttgtacagaaaggcaccattatgttagaataaatttccagaacttagtgggaagaatcagttttaaccttgtgtgtctgttacttctgagtgcatttctatatataaatg

SEQ ID NO: 240534 - DNA, 1498 bp, Homo Sapiens
  misc_feature (1137)..(1164): n is a, c, g, or t
ttgcacaaattgatgagcaatgctttaacataaaagaacaactttgtacaaaaaagttggatcagagcctaaccatcctcacacactacaaacggccccataccctgaacagcaccagcatgtctaaggcatatcagagcaccttcacaggcgagaccaacaccccctacagcaagcagtttgtgcactccaagtcatctcagtaccggcggctgcgcaccgaatggaagaacaacgtgtacctggctcgctcccgtatccagggcctggggctctatgcagccaaggacctagaaaagcacacaatggttatcgagtacattggcaccatcattcggaacgaggtggccaaccggcgggagaaaatctactaatatctttaatcgaggcatctacatgttccgaataaacaatgaacatgtgattgatgctacgttgaccggcggccctgccaggtacattaaccattcctgtgcccctaactgtgtggccgaagtcgtgacatttgacaaagaggacaaaatcatcatcatctccagccggcgaatccccaaaggagaggagctaacctatgactatcagtttgattttgaggacgatcagcacaagatcccctgccactgtggagcctggaattgtcggaaatggatgaactaagaagctttgaggctaccaggcaggggagtccccctacccacaacctcttccctgaaagggatgagggggaagagaggtagcagccagagccaggacccagggttggggctgccggctgacccggagcccctggagcaggaggctggggcagagggccctaggccaagcccaccctgggcaccagggacaatcctcttccccaccaccggccctcaggctggcatctctgcccccagctccaggaggggccagacagaagcagccattgggcatctcaggtttgagggggatatgggccgggaactacccagaagcatctgggaggcagcagggtgggggaagaggatgtgtggccgggcctcacagccctgctgctcccactgacctctccggcccaactcacggctgcaaagagacttgactaagcttgacaatcccaaaggccgggtcccacacctggccctgcctgccgggtcctgnnnnnnnnnnnnnnnnnnnnnnnnnnnntcttgatctgtctctgtttccctcttttcctctgtgtttctgtctctctatgggttgtgtttccttgttttccactctgacaaatgcaatatgtacgggaaagaggcgcccagctgcctaggagggcaagctgcgcaagccgggcaaggagaccccgcacccacacctacctcatttaagtgttggattttttgctgttttgaaatgtgagaccctctccaagccccctactgccccaaccctctcccccacctcactgccctcttctgagtgggtggaaggggggtaggaggaggaagaaaaacaacaccaaaaaatccctctttgtttttaa

SEQ ID NO: 240535 - DNA, 889 bp, Homo Sapiens
tgagcttttgtgctgagggggttggggacaagccacagggggcacttgcatagcaggggagtagaaatggggataagggcatatggtgaggacaggggagaaggggaagggcatcatagctgcaggtgaagggggcctccaaaaggcagctcctcttccccctcatcccctcaaattgctgctgggttgaggagtcagactgaggcagtataataccctcccccatccttaactctagaaccccagtttggtggggaggaggtgggaagctgtggagctatggaaaggcctcagttagtgagtcaagctgtgaggtgtgtgtctgaacacaactggctcccttggtataccgggggctccctctccagatgggtgtgagtgcatggtcctactgtacacacaggtctcagtatctatatgtgtctcatttgttcccatgggtctctgtgtttggatacataagcatggatatccctgctcatacagcaggaactcaggatctgcatggtgtatgtccctgtctgtaaacatgggctccagcaagtggatatgtgcgggcctgcccgctcctgtccatccgcaggtcttccttcaggcctggctggtcaagggtcctggccaaagaggtaggtggtgagctcaagccggaggccccgagcataggagcgaagagtatagaagagggtgaggaagtcctgggtgctgaagacagtgtcggccagcgcgaaggccagggtggatgggatgacgccccggccgtactccaccatccatgtgtttggcccccactccacagctgttgcctcaccaggcccgtgtactaccgtctcccctgggggacagggagcacccaagccaacttttttgtacaaagttggcttttttaaag

SEQ ID NO: 240536 - DNA, 1465 bp, Homo Sapiens
aggagggcactggggtcctcccagccctgagagcccagtcagtactgtgcccacagcacagcttttgcatcctttgtccacactgacaacgtgcgagccagagggcgaccacgccaccgcattgatggatgagcttcaaaggagagatcagaaaagcaccaagtttcagaacatttgggatgagatcttggtaaaccaaacaccagaagcttgtgcattcagggagtcctaatttttccaacttccattttactctctggcactgtgcccgcgacaaggcaggagctcactaacatgcaaaagacctcagaaaaaatccagtggtgtacttaattaagtcatgctgggatgaagggagtttggcccctctggcagtcaggccttatcacactctccctaagagaggagctctgagtgagctggaaagacagtacacatgcctctgaagagccgggcagtggtggtcagcactggttaggtctgggagcagttgctgctgcccaaggacagggagagaggttctgaaggaaaatggtatctgggttccaactagcaggtgggcttgtgtgggcagaacaaagctaggaaaaaagggggtctggggcctgcctatcaggtggaagataaaagaaggtgtgtggagatcagtgtttaggacacgtcaatgcactgaaatgcactgacaacagggacttccaagggagacagggaggcagaaaggaaggagagtagggaaggggaaggagacacagaggacgtgggacataaccaaagagtcagggatgtgtttctataaccctttctccagcggctgccactctaaccgctctacctggcgtactctgtagactgtggcctgctgtgctgtgtgagtggccccagcttctctccactgacctagctcagccagccgagcaggtgggcggacagtgccctcacagcgccgactgaggtctaaaccggatgacccctgagatgaagtcaaaggccttgctcacaacgcaacggggggctgagacagggttcatcttacctgtgctgctttgaaagaaccttttccactttccctgtgagcacactccagatatacagagagccctcagcagagcctgccgccacgtaactgccatcagggctacagaagacagtaagaaaagaaaggttgtcaattccccacccccaattcagcatctctgtggcctttttcccaagaaggaatgtttgttcttcactgatgaccactcctgtgtacccagacctcagaatgtgtgctagtcatggcccttccagccaaatctgcttttccccagtatttcagccccgtccggctaatgaagagtggcatcacattgcttcttggggctccaagtccttaaccgtctacagacttcaacaaaacaacatatagggagatcaaagccaacctccacatggctaagggtttcccaacttttttgtacaaagt

SEQ ID NO: 240537 - DNA, 1253 bp, Homo Sapiens
tgtctctttaagtgcttactgtagtatgacttattgctaaactttcgtccacactcttggcattcataaggcctctctcctgtgtgtattctttcatgcacagtgaggtctgacttactggtatagcctcgcttacactcctggcaaacaaaaggcttctcctttgagtgtatccgccagtggtgtctggtgagacttctcttccagctgaagccttgcccacacacattacacacgaagggcttctcccctgagtgtgtcctctggtgtgtgaggagatttcccttccagttgaagcctcgcccacactccttgcatacaaaaggctgcttgccagaatgtgcaagctggtgtttcacaagatttgacttccagataaatccttgcccacattcactacagatgaaaggcttctcccctgagtgtgtcttctggtggaagaggagagttgattttaggatgaagcctcgcccgcaatccttgcaattaaatggcctttcccccgagtgtgtccactgatgtctaagaagatttgccttcaaactaaaacttttctcacactgcttgcacatgaagggcttctctcctgagtgtgtcctctgatgtatggtgagatttggcttcaaggtaaagcctcgcccacaatccctgcagaaaaaacgtttctcacccaagtgtgccctcaggtgcttgttataggaggacttatcccgaaaccttcgcccacactcccgacatccataaggcttctcctctgagtgtgtcctctggtgtaaagtgaaggttgacttttggataaagcctcgtccacagtccttgcacacaaaaggcttctcctctgagtgtgtgatctgatgtttcacaagggttgacttctgaataaatccttgcccacattctctacaaacaaaaggtttctcccctgagtgtgttctctggtggtagacaagagttgacttttggctaaagcttcgctcacaatccttgcacacaaaaggcttctcccctgagtgtgttctctggtgtctgaggagacttcctttcacgctaaaactttgcttacactgcctgcacgcaaagggcttctcccctgagtgtgtcctctggtgtgtgataaggtgtgacttattgctaaagcctcggccacactcctggcatctgtaaggcttctctcctgagtgtattctcttgtgcacaacgaagtatgacttattagtatagcctcgcccacactccttgcacacaaaagccaa

SEQ ID NO: 240538 - DNA, 1294 bp, Homo Sapiens
  misc_feature (140)..(148): n is a, c, g, or t
ttggcactgatagtagcatttaagtttcagattctacagcctagtcagcagatttatctttgacagcataatttctgatctacatttaaatactactttattttataaggtaatatagttacttactgtcactagctaannnnnnnnnaccaaatctctcaatataggaaacattttttggaaaggatggatttagaggagagattctaaatccattttggatgtatttgtttctttgacttccttaacttccaaactcaactccctttctagatcccattcattttctgcacctcccccataggcttgtttctctccattgctattaaatgtagaaggccatacctggaattttaaaaatattattcctggtaatacagctcagtgtcattttcctatttttaaaacatgctctacatgcctaatgttttgtgattcactttaacctgatggtttgcatttgctgtttttcactcttatgtcagagcagttgggttttaccccttagtttttatgcctgttaagctttactgtgcttttgacaggtagttttgggtcagttatattcagttttagtattgtattccaagttgataactcttccatgtttcacatttctaaatttaacagagatgctgtagcttaaaacatgttttgataagtaattacactggacctaggcaaaaccactgaagaacaagtgttcctttttaccacatacatattatgttttgatcactgctgcttgagccccgctattggtataattcagatcattttagcttgttgctgaggatgtcacatataagacaggatcaaacctgaaagacactaatggttcatcctctataaggccaacaaagaaaacaaattaatgtgatgtaacttgcatttatgtgcactctgcataggtttcccaataatactgtaatgttgctgaacacctttccctgttttccatttatacacatattaaagtcatattgggaaagatggcaaagcttttgagaatataaacacacctgttttgtttttcttaagttcaacatacttttgtagaatttgtaaaataaatgttcgtatcataattgagaatttatagccaaggatcctcaaaacagaaagtttcatcttagatagtgtttgatatatctaagaaagtccagtaacagagaagaaatgtctcaatgtctcgtatcagttttagtgtttttcagtattaaggaaaggtaatataaaaacaggtaaaatgtataaaaatagaccctgatcaacatcataagagataaatatt

SEQ ID NO: 240539 - DNA, 1013 bp, Homo Sapiens
catagtaacaacagccttgttcggggcctaagaaagcccccaaaggtagacgaaaaggaaccatggccaaatgcctatcaatcagcccggtacctaatgtaacccgggacccatgtgagggaggctgagccttcacctttcagcccttccctcagcatgtggttctcagtttagggcagagcttcttaagattcactttctggcgtttaggggcccagccccaccagcagtacaggcctacaccagtgtaatttgaaacgtacagacggtggaagaggaagtctagggagcttgggtccttagaccaccagggagcagggaagggatgggaagggctggggggcggcgggggctcaccttcctctgcttccctgtgggctgggttcagagctcctcagtgtcctggcctcccaggtgggatcaagcagggtgggtgcagctgcagcgttccaggcaagagctcaagctccagtaccaggaacataaggggacataagggcctcaggcaaactagggttacgggccactgccccaagagttgagtgggccacaagcaatccccagtgcccaggcgcttccccatgagagccgccagcaggcaacggtgtgccaggccggcctgagcggggccagtacacagtgggtgcgaggcttctctcaaatgcgcgctccagctcatcagtcttagggcttctgaggcaacctagtgggtcctggacttctgttgctgtggggcctcaaacctgttgagtagccacctcagatgaccagaacccacctccagagttcctatgaccaaagttgtctagagccgctccggacactgccagggttgctactgacaggaatggggtccccagagaaagccatgcccacaggcatccaccagctgcagacaggcccggcccctgcatggcctgccttggctgcaccttgtacatcctggatggcatctgccggccacgggctgagtccccacacacacagactggccctggagagagcaaggccaa

SEQ ID NO: 240540 - DNA, 1069 bp, Homo Sapiens
aggaaaatacaccaaaatacattaagtaaattatttaagatcatagagctggtagtgaaaagataaaatttgacctcagaaactctgagcattaaaaatccactattagcaaataaattactatggacttcttgctttaattttgtgatgaatatggggtgtcactggtaaaccaacacattttgaaggatacattacttagtgatagattcttatgtactttgctagataacgtggatatgagttgacaagtttctctttcttcaatcttttaaggggcagaggaaatgaggaagaaaagaaaaggaattacagcaatactgttctttctataggaaggattagatatgtttcctttgcaaatataaaaaaaataataatgtttactactagtgaaaccaaggtattaggaaaataatgtacaagcatctcttgcaagaaagggtaagattgttatgagtgaaatcgtgccttcctcaaatttatatgttggagtttttattcccaatacctccaaatattatcttatttggaaataaggtctttgtagagaatataatgttaaaatgatttcattaaggcattagcggtgggccctgagccagtatgactggtgtcttaataaaaagggaaaacttgggcacagagatgtacataaagacaatgtgaagagtcatagggacaagatgccttctacaagccaaggagagaggcatggaacagagcccttccttgcagacctcagaaagaaccaactctgctggaatctagatttgggatttccagcccacagtacggcaatacaattacagtttaaatcagcaatctatgatgctttgctatggaagccctagcaaatgaatacaaagacattctaagtaaaagaaggggaaagaaaggaagagatggtctcagtagagatgaactcaggtgcagaatctgagtctcagcacaagggctactatgcagaagtgggtaaaggaatgagaacactcaggagctcggtgggcacacagtcatggggactaggcagttttcaagggttgaaatccaacttttttgtacaaag

SEQ ID NO: 240541 - DNA, 1443 bp, Homo Sapiens
  misc_feature (337)..(348): n is a, c, g, or t
tgattaagagttggattttgttttaaaaggctttattcatttttgatcagggaaaaggacaatctcaatgtcaactcgtcacctaatcataaatttgaactttacaggattcactaccctagacaccgcacctactgacaacacaacttaaaaatgaacttacttccattccctaaagttgcatgttgaatgaacagaatcccttctaacagccaacattggtacttggcctaagtttaagaatagcaaaacagcagcaaaaaagaggccaagagcattataatgtgatagcccaggaagtagaatcattgttaagaaagttgcaggcaccaaattnnnnnnnnnnnngggagggctcatgagcataagaaacttaccagttttgtgagatcacccgttgtgtgagatcaactactctgcctgtgaacacgtatgccaatcccagtaaataacactgaggccaaggtcccaaaatccaactacactgaatgcaaaatccaaagctttttattattccaggtcctctgacacctggatataaaacggattcttttcaatgcacccagagggtccactgtaatgactcagtcacatttgtaatgacttagtcacatttgtaatgactttgtcataaccaagataccttttccactattcctttctgaatatgtaaatatttaactacttagttcatgcactgtgtcaaaaactagatttactatcaagactttttctaaactcacagagcattaacagctaatacaacttcctcaggatgcccaaacagaaaacattttgttcaatcttgtggcggctctgagaaaacacaactaaatcttattttgccactattttaatttttcgaccaaactcatacctttctaccaaaatccttgagttgtaactacttccaatgctcttaaaccatagctcctaccagttttacagtgctccttttgtatctgaacttttatcaagaattactcattgtgttatgattacaaagctttttctaggtgaccactgattaaagccaaagtaatcagcaattcaaaaatggctttccagagacaggaacaaagtaaaaggagctactaacaattttattacaatccagaagaaatatggtctactagaaagcttctactaatcacaacacttatgtcttcctttcaggacagtcttcagataaccagaagggaaagaacattgttcaaaggtgtggtagaaatctcagttacagggagaagatgaagccttaagagcataaaatacacctacaaattggagaagagggtgacgctggctggctatttataaaggaccacagtttctctgtatggaccaatactctacaaaatcaactgtgccttaattattgcttattttaaattacatccaacttttttgtacaaagttggctattatagaaaaagcattgct

SEQ ID NO: 240542 - DNA, 3181 bp, Homo Sapiens
tcaaaaactagatttactatcaagacttttctaaactcacagagcattaacagctaatacaacttcctcaggatgcccaaacagaaaacattttgttcaatcttgtggcggctctgagaaaacacaactaaatcttattttgccactattttaatttttcgaccaaactcatacctttctaccaaaatccttgagttgtaactacttccaatgctcttaaaccatagctcctaccagttttacagtgctccttttgtatctgaacttttatcaagaattactcattgtgttatgattacaaagctttttctaggtgaccactgattaaagccaaagtaatcagcaattcaaaaatggctttccagagacaggaacaaagtaaaaggagctactaacaattttattacaatccagaagaaatatggtctactagaaagcttctactaatcacaacacttatgtcttcctttcaggacagtcttcagataaccagaagggaaagaacattgttcaaaggtgtggtagaaatctcagttacagggagaagatgaagccttaagagtataaaatacacctacaaattggagaagagggtgacgctggctggctatttataaaggaccacagtttctctgtatggaccaatactctacaaaatcaactgtgccttaattattgcttattttaaattacattttttacagagctatgtagtacctgacgcagaaaagcaatcacataaggaagcatttatttgaggtttaacatgaaatgatacaaataaaatgtgtataaacaaatccacattgagtcataacacagatagcaaaggacaaagtaaaaacaaagaaaactaattggcagctatatacagttggacacaatggtgtcttgtacactagaaagtcttttacaaaataatcatcttagatcaacagaagaccaatcttcaatgtcgtcctgcaagatgggttactttaacatctcctcctaaaaacaaaaacaaaataccagttagatttgtgcaactctgacaagcttttaaaggtccactttcatgaattgttttaagtcctcactttattttcttcaataattaaagatcatatgcatatttattggtaaaatacagtttgggtagtcaataaactcaccctggagttcccaaatgacattaaattcaaatctattcaggaaagaatctgggaatacaaccttcccatattcagaggttcaactatgctagattaaggtctactagaagcatctctagtaacccaagtaaaatgctatcacaaacaccaatttctaataagtttattacaagaacataaattgatctgtgcatatgatctttaatttatatcccagatttaaaagttcttgttttggtttgtagatttcactattagctataaaaagaaaaagcaagcattaaatcttaaaagaatgaacacttaaaatgaggctccacaattgaaatacaacactaaacagaagaccaaaatgattaagctgtaaaaaggcatttatgtactttaactcctgtaaaaaaccatttaagttaagtttagacacttaatctccaaaaagattaaaaatgaagccaaagtctgaagttttccactttaatctttacgctggtacatgaagttggaagagaccataccacaggacagcgttttctggtgtatgccttgcgctctgcccgcaacgtgcgacccccagagatagacgtggtcagggtgacacacggcctgcaatgaagttcccgctggcgggtacaaacaaggtataatgtcagagttagaagacaacattcttgttttccttaagttgtacccatttcagtactttacctgttaatagttctaaaatgtttaattattcctctagaccacctggtacacaaaagcaaacagaaaaactcttaagtttttctgcaatactaaagaaagtgagataagactttaaagttaaagatctatagacactttaggcaaaacaggctcataaagcaattaaaaaatcaacaatttagtaaaaacaggctacatagtattttgtttttacgtttcatttgtctattgatctttaaattaaattagacatttctactgttttcctgtactcttatacacacctgttttctccaatgttctcctttagtatggctggtaattgttttggtgattgccaccccctcgagatgccttgccataagtgctctgttggccactgtagtctgcatatccctgtccatatccatagttcccatagttatacccagtataatcatatccgccatagccactatagttttgatcaccaccataggcactattgtaatttccatatccttgatcataatagttattaaatccttggttccagttttggccctgacctcggccacgacccctcgtaccacctcgtccaccagctgcagcacctcttccacctttttgttgttgctgttgctgcctatatacctctttgggttgtgcaactttgatttcacacttcccagaaccaatttgatggtatctgctttctaacaatttttttactggctcttcatcagtatatgtgataaaacaaaatcctcttctttcatttgtttttgtatccatgggaagttcaatattttcaatctctccaaaggctccaaaatattctttaatttgttcttcagaagtatccgggctcaatccacccacaaaaacctttttgggaggttctttcccttttaaagctttggcccttttgggatctatcaatttgccatccagtttgtgttctttcagttccaaaaccttatcaacactagcagcatctttgaaaagcacaaatccaaatcctcttgatctcccagtgactggatctgttttaattgtgcagtctacaacttccccaaatcgagacaagtactctgtcagatcttttttgcttgtatcccagctcaagcctccaataaacattttaccgtcatcctgctgattcttgctcgcgttgatcttggatccctctgcgaattcctctatattgctgtactcgttcatatcctccatagtgacggagctgtcggcaggggggtgctggcgcgcagtccgggtcgcggcagcagcggcggcggagcgttgtatggagctggatttaaaccaacttttttgtacaaagt

SEQ ID NO: 240543 - DNA, 1923 bp, Homo Sapiens
gacacttaatctccaaaagattaaaaatgaagccaaagtctgaagttttccactttaatctttacgctggtacatgaagttggaagagaccataccacaggacagcgttttctggtgtatgccttgcgctctgcccgcaacgtgcgacccccagagatagacgtggtcagggtgacacacggctgcaatgaagttcccgctggcgggtacaaacaaggtataatgtcagagttagaagacaacattcttgttttccttaagttgtacccatttcagtactttacctgttaatagttctaaaatgtttaattattcctctagaccacctggtacacaaaagcaaacagaaaaactcttaagtttttctgcaatactaaagaaagtgagataagactttaaagttaaagatctatagacactttaggcaaaacaggctcataaagcaattaaaaaatcaacaatttagtaaaaacaggctacatagtattttgtttttacgtttcatttgtctattgatctttaaattaaattagacatttctactgttttcctgtactcttatacacacctgttttctccaatgttctcctttagtatggctggtaattgttttggtgattgccaccccctcgagatgccttgccataagtgctctgttggcctattttgaaaacacagaattctcattaagatagttttctacaaaactttctttacaaacacaaactattaaatctacaaatctttgcatgctaaataaaaagtattaagatattttagcacccattagatgctactcataaatcatacatcctagttcatttataaccaccagtctatgttagtataatcatcctatgattgtaacatgcctcaaacacttaactccgaacactttaatggaaagcccatacacacaatttcagaacaggattgtatgttaacaatgaattttaataccactgctttataaaattaagttaaatattcttaccactgtagtctgcatatccctgtccatatccatagttcccatagttatacccagtataatcatatccgccatagccactatagttttgatcaccaccataggcactattgtaatttccatatccttgatcataatagttattaaatccttggttccagttttggccctgacgtcggccacgacccctcgtaccacctcgtccaccagctgcagcacctcttccacctttttgttgttgctgttgctgcctatatacctctttgggttgtgcaactttgatttcacacttcccagaaccaatttgatggtatctgctttctaacaatttttttactggctcttcatcagtatatgtgataaaacaaaatcctcttctttcatttgtttttgtatccatgggaagttcaatattttcaatctctccaaaggctccaaaatattctttaatttgttcttcagaagtatccgggctcaatccacccacaaaaacctttttgggaggttctttcccttttaaagctttggcccttttgggatctatcaatttgccatccagtttgtgttctttcagttccaaaaccttatcaacactagcagcatctttgaaaagcacaaatccaaatcctcttgatctcccagtgactggatctgttttaattgtgcagtctacaacttccccaaatcgagacaagtactctgtcagatcttttttgcttgtatcccagctcaagcctccaataaacattttaccgtcatcctgctgattcttgctcgcgttgatcttggatccctctgcgaattcctctatattgctgtactcgttcatatcctccatagtgacggagctgtcggcaggggggtgctggcgcgcagtccgggtcgcggcagcagcggcggcggagcgttgtatggagctggatttaaaccaa

SEQ ID NO: 240544 - DNA, 1601 bp, Homo Sapiens
  misc_feature (902)..(911): n is a, c, g, or t
aaatataaaaagcctttaaagtatttaccccaaggaactcataaaaagggtcaattggtaaaaggacattttgaccccaagagcatctaatatttaagctttattttattggataagcatatctcttgtccatcacaagttatagaaaaagttatatacgactaaaagaaaaagttatctactgtaattataggaagttgtcacaacaggaattcagctcaagaacttcttgcaattactgctacaacgtctataaatgggaaaagcaagcattaaaatagattaataaaatataaaattaagactggaaaatccagagacaagctgtatccttagaagaataaatagttaaaattattcagtaagctgacgtatttaaccattactgggcctgtaaaaaatgcattaaaattacattacaaatagtttttaaaaagcaaagaaataagtgaaggcaaagcttgaagtatccattttattttataatgctgatacaggatgttggaagagaccataccaaacggcagcattcgagagcgtgagcatctcgtaccctgtccgcattgagcgggcctgtgagaatcgtgaagtcagcgcgacacagggcctgcaatgaagttcccgctggcgggtacaaacaaggtataatgtcagagttagtaggcaatactttttttgctgcaattccttaatttgtacccattagcagtactttacctgttaactttactgacttgttaataataggacaaaaaggcaaaagcttaagagcacctgtgttacatatctttgaaagtcactatgttataatatggtaagcacttctgggtgctgtgaaactcttaaattaagcattattttatgaacaatatagattataaaaactactattgtaaatgacnnnnnnnnnnctatttttagaacatacctgttggggataagttgcaaatggaataatttagtatggtttgtagctattttgatgaccacctcgcctggataccttcccataaccactctgctggttgctataatcaccatatccatagtagttgttgtaaccagtgtagtcatatcctccataaccaccgtaaccttggctgttatatccatagttgccatagccttgattccaatagttactatatccctggttccagttttgactggggccaccacctcttccacgagctcttcctgcaaatcctcctctagatccccactgttgctgttgctgatattgttccttcgacatggctacttttatttcacatttactaagaccaacattgtggtatttcttttccattatcttcttcactggttcttcttccttaaaggtaataaagcagaacccacgcctcttattggtcttgttgtccatggggagctctatggattccacctcaccaaaaccaccaaagtactcccttattttctcttcaggtgtatctggagaaaggccaccaacaaaaatttttttaaccggctcttttgttttcatggctttggcccttttaggatcaatcaccttcccattcaatttatgttctttttgatccatgacccttcatcctcctcgttcttactggcgtcaccaa

SEQ ID NO: 240545 - DNA, 1078 bp, Homo Sapiens
tcaaaagttccttaggcacacatactaataatcacagtcgtgaaattttaaggccctaaccaaaaaaataaacctttgagaaatggaaaataaaatcattcaaacaaataagcacacacacataaacacggtatatatttctttaatcctccctcaacacttgaattcatctatgaagtccaccacagctctaaaaatctctctgaactagccgcatttctattataattaacagattttaagtcctttttatttaatggaagcataaaacattaactatctgtgcaaaggggtacttttgcacatttatccagatttgttctaaaaagcacaatacatattaagcaaaaactgggcatttgggaaaatattcatataaatcttaatggctacataaggaagtattattaaaacaaccaacaaacaaattgacattaagtcattcccaatttggacagggaggacacattatggcaaaaattagattttgctaaaaacatttcaaacttcactgcaattttaatcatgtcctcaatttcggcaagcctgtcttccaaacttatgcttttaataacttgaatccatgacaatttttcctattctgatgataaaagagccaatacatttttatacaaaaggatttattaaaaaaccagtaagacactactacatcatgacactgtcacactgggcttttaacacaagacttgctctacaatactgggggaaagggcataaaacacaaattgattctgaagcatagcaattaagaaataaaacaatgaaagcaaatttcttttaatgagaactcagaattaaacttcagagggacccaacgtcatacttccattcagggacttgatacaaaaaatttagtttgaactgctattagcaggtggcaggagccaccttcaaatgaatcttcaaattggaaaatactgcttcaccacctggagacaaagaagaaaaaatagaagtcactctgggcaggctacaacacttaacaaaaatttacataaaactgagttatccctatgttccactatatgtaaatactgtataacattaaatgtgccaa

SEQ ID NO: 240546 - DNA, 1820 bp, Homo Sapiens
  misc_feature (480)..(515): n is a, c, g, or t
  misc_feature (991)..(1021): n is a, c, g, or t
tttttttaaaaaattgacctttcccgttaaaggctggtcatagaagtggtaaacaaatgtaaatgaattccaccattaccagtgtcatatcatatatatgtcacctgtgtatttgagattacacacatacctgccaatatacctgggaaaggttattttatcacagttacacttgagttcttggcaggcaggactgaggaagagtaatttgaaagaagttttacatcctatttagaagaaatcactagtatttccttaaataacaggttacaatagaaagatactgcctggaagttatcctttcactttggttcatttttagtttttctttatgatttacatagctgtttaattcatttgcttatagtacaatcctgccataaagtattaaagcacaagatacctattattccttcaacatctgcatttttcaagttttatactctacatccacagtacgtcagcagttcttgaatgttnnnnnnnnnnnnnnnnnnnnnnnnnnnnnnnnnnnncagatgtttataactacaatggtactaagatgggaaggagacaatgagagaagggataaaagcaaacatgttcatgtgcagggaatgtggttcaagtctttggatttaaaaacaagttccccagagaagctggcacttcctttgccctccaaaaaggacctgaaaagtcccaatccaaactttagaaaattagttatgagatgcaataaatgatgatcaaagcagtcagagggagaaggatgaatgtgtcttccatttagctagagactgtagcatagcctctttaggtgttggtggatcagtaaaaacgactgaagtaccagaagtgcttggaaggataggggtacaaagtaatgaccataataccttgtctaaatcagtagcagggcttcatggctaggaaacttttttaaacagtaaaatgtcattaggatagatcactttttcaccaacattaaatgtggcagaattaaccnnnnnnnnnnnnnnnnnnnnnnnnnnnnnnngatttacacgtagatatagcagtaacagaaaattacaaggcagagaacacaaaagaatcaagacaacgctataggttcaacagtattccatgaggctagaaaaccggttaactttgaaagccctagcaaaatatcactcttgtttataaatcacttatttatcatatgaccacacgttgaatccttgtctttccacatactgaagaatcctacattcagcctttaagcattctgcatttctttgccaatcttgtagctgagtatcttgttccagtcgattttggtgcgggtaactggaagctgccggcgcaaggccttgaatgtggtatctgacattgtttgatagttttcactaattgctgtctgatactcattttctgcattctctatgattttaataaactccttggcagtttgggcttcattcgaaacagttagtgaatcctgtacatctttatgactaaccaactgaacattgccatcttcataatagtgaacctgaatcttaagcacgccaaccacctgggctgtaggtggtgtgatggtgaacttccactctgatctccaacgaccattccagaagtttttaggctgaaactggtggctttcaatacatgcaataatagtctgttgcccatcgatagttttagcataaacagtacagaagccgttggaataatggtctttcacataggctcttaaagcactgtcacaggattctctccaagacttcagacctccatctgcttcttctggctgggggtcacttgcttctccaacttttttgtacaaagttggc

SEQ ID NO: 240547 - DNA, 1217 bp, Homo Sapiens
ataggtttatttcattaaaaaataaaacaaaacaaaccagactcttcccccaaagagtactttatcctttaaagcagcagcaatcacaaggcacatatgtacaaaatacctcaagcaaaatagaaactgaacattcaaaaagtatgtgttattaaaaagatgttgaagaccatttgagtaataagcacaggttataaaaatcacaattttattcttctacctttaacaagagaaggaatgatggcataatatttatatgctatattgtggcacgtataacaaacctttacaccacataaaatggtttgctaaagaaaaaacaggtaaagtactgcttaaaaatggtatttttagtgctttcacatcttttgtagatatctggaatttgtaagatgaaaagaaaaattctctttttccttggcttagtaaaagcctgtagttacacgtccctaggcaaacccaccatacaaaaaaggaatacatttgagatattctaaaatataaaggatatgatttatattatgggatcaacataataaccaactctcttcctaaaacagattagaggtgaacacataagaaatgtaaagaaaggttaattacattaaaataaaatagcttctgatttaaattattgctcacttaggaagtataatgaatattctctggctaaggatgctcagattagaaatggtgtgacatcaatatttagtgtgtacaaaagttctaagattcaaatacaatgcaaagtttataataatcacacaaaaagtgttccttttagccaccatttagcttcacacaacgaagactggaaaatacgtggtttatttagatcttcaatataaatttgtaccacatatgttgaagtgttcctcttagctttaatgttgcagtcatttttctatgaaatactaaggagttaaggagtgcttactgaaccattactattagagggagggaagagacactgaagctccagttttaaacgacaacaaaagaatataaaatactagtataagaaaacatttaaatagtactaaatgcacaatttaaacatcagttatacactgtcattagttttcctcttaaaaaaatcagttcctgggcttttagatgtgttttctttttaaaaaaaataagcatccttctcatggtcacacaattggtccatactgacaccatttgccaacttttttgtacaaagttggctttta

SEQ ID NO: 240548 - DNA, 1197 bp, Homo Sapiens
  misc_feature (1000)..(1051): n is a, c, g, or t
aactttgtacaaaaaagttggcaaagatgccctgcttccaccctcacagctaaactgttgccccgtatttctggcccaacagagtgtgccctggaggatgaaacgtatgcagatggagctgagaccgaggtggactgtaaccgctgtgtctgtgcctgtggaaattgggtctgtacagccatgacctgtgacggaaagaatcagaagggggcccagacccagacagaggaggagatgaccagatatgtccaggagctccaaaagcatcaggaaacagctgaaaagaccaagagagtgagcaccaaagagatctaatgaggaggcacagaccagtgtctggatcccagcatcttctccacttcagcgctgagttcagtatacacaagtgtctgctacagtcgccaaatcaccagtatttgcttatatagcaatgagttttattttgtttatttgttttgcaataaaggatatgaaggtggctggctaggaagggaagggccacagccttcatttctaggagtgctttaagagaaactgtaaatggtgctctggggctggaggctagtaaggaaactgcatcacgattgaaagaggaacagacccaaatctgaacctcttttgagtttactgcatctgtcagcaggctgcagggagtgcacacgatgccagagagaacttagcagggtgtccccggaggagaggtttgggaagctccacggagaggaacgttctctgcttccagcctctttccattgccgtcagcatgacagacctccagcatccacgcatctcttggtcccaataactgcctctagatacatagccatactgctagttaacccagtgtccctcagacttggatggagtttctgggagggtacacccaaatgatgcagatacttgtatactttgagccccttagcgacctaaccaaattttaaaaatactttttaccaaaggtgctatttctctgtaaaacacttttttttggcaagttgannnnnnnnnnnnnnnnnnnnnnnnnnnnnnnnnnnnnnnnnnnnnnnnnnnncttgactacgtattaagcttttgtaattatttttcagtagtcccaccacttcatcagtgggaaggagtttggggttcttcctggtgcacggctgaaataacccagatgccccccaccctgccacatactagatgcagcccatagtt

SEQ ID NO: 240549 - DNA, 2235 bp, Homo Sapiens
  misc_feature (1940)..(1979): n is a, c, g, or t
tatcactttaatttctttattcatcaatagtatccgaaaaggaagaatcaggagttacaaaaacaagttaaatgcaatatagaagcctactaaatacaaatacaagttcacaaacacatatgcaacagaaacttgtttagattgtttcttgaagtttgactatttaaaaacataggtgtaaaggaaagacattcagactggtccacgtgggcttgttagcaggcagaggaaccctgctttccaaaaactgatatagtccagagtcacggcatgtgggaaggtttccatggacactggatcttaacagatgctatagtgtttacaaaactacacacacagagaaagcccaaggaagcctgcaggctaagccctatgcttttagagggctgaaggaaccaaacctagtttaatcctgtttgtttgctccatgcaaaactttatggaagactccccagactaggctatttagcagcttccatgaatggtcctcagatcatgtgattctacggcatagacgacagctgccctatttacacagaagctgcagaactcaagaggaatgtggatttgctcttgggagttcaatgttgcagggtagagtagtcttggatgataaccatgttctaaatgactagtgaagagacactgtggtttcttgcttttaacaaattggtgtactcttgccctcctcccatagtgtccaagggctggtaaaacctttgattaaggcgtgctgctgtgagttctccaaggcacttggacagggagctgcatttcagactgaacaagtggagtttgaagagtttttagatgggatggatacataaaagcttgaaatgctaaacaaagtggaattttctcctttcaaatgagaacaagaaaaactagaaggaattctatttttggcacaacagtttctcacagttgcctgtgcattacaacctaaataatttccttctgatggtctttaatctgctttctgcaaatgagatcttatgtcaaggatttaatctttggtattccaaatgcatctgaaacagggtagtgagtggggttaataatcacagaagtcgaaagacacaggactaactgtaaatgactgacctccccaagtcacagttttaggattaaatctccattttcttccccctgttgaatctgaaactttcttttatcctcatctctaagggaatgctttctatttccagccggaggttaaacatgaaatgcaaatatgaagacagagtggggtggttctctttcccactctcttcctgctttacccatgaggactccatatcatagcacgacctgtagggtcatcaggctgagatcaaatctggtcatcttgtttttggccatctgacatttcttgttctagtaacaagatttcatttattctatagagaagaaggaaaaatcacaggaacctatctcccctctggaccaatgatcagaaccacagaatttataacttatcaaatcaaaaggttagtgcattcttaccagctcactgaggaaactgaggtccagaaaaaagaagagacagggccaactcaccctcctagttagtcgaatgagcatattggtaggctgggatatcctaagccctgcttggctgcccttgtcgccatccttgggaatactgatttgcctcaacttctcagaataaataaaaacaaattaatgtttggatcttgaaagttttttatgaagatgcttcttcccctggcttaggtctaaggcacccttgctcctctggcagatagtggactgctggaagctaggggggccaactatgggctgcatctagtatgtggcagggtgggggcatctgggttatttcagcccctgcaccaggaagaaccccaaactccttccacctatgaagtggtgggactactgaaaaataattacaaaagcttaatacctagtcaagnnnnnnnnnnnnnnnnnnnnnnnnnnnnnnnnnnnnnnnntgaagaataaagtcaacttgccaaaaaaaagtgttttacagagaaatagcacctttggtaaaaagtatttttaaaatttggttaggtcgctaaggggctcaaagtatacaagtatctgcatcatttgggtgtaccctcccagaaactccatccaagtctgagggacactgggttaactagcagtatggctatgtatctagaggcagttattgggaccaagagatgcgtggatgctggaggtctgtcatgctgccaa

SEQ ID NO: 240550 - DNA, 1007 bp, Homo Sapiens
tctgatggtctttaatctgctttctgcaaatgagatcttatgtcaaggatttaatctttggtattccaaatgcatctgaaacagggtagtgagtggggttaataatcacagaagtcgaaagacacaggactaactgtaaatgactgacctccccaagtcacagttttaggattaaatctccattttcttccccctgttgaatctgaaactttcttttatcctcatctctaagggaatgctttctatttccagccggaggttaaacatgaaatgcaaatatgaagacagagtggggtggttctctttcccactctcttcctgctttacccatgaggactccatatcatagcacgacctgtagggtcatcaggctgagatcaaatctggtcatcttgtttttggccatctgacatttcttgttctagtaacaagatttcatttattctatagagaagaaggaaaaatcacaggaacctatctcccctctggaccaatgatcagaaccacagaatttataacttatcaaatcaaaaggttagtgcattcttaccagctcactgaggaaactgaggtccagaaaaaagaagagacagggccaactcaccctcctagttagtcgaatgagcatattggtaggctgggatatcctaagccctgcttggctgcccttgtcgccatccttgggaatactgatttgcctcaacttctcagaataaataaaaacaaattaatgtttggatcttgaaagttttttatgaagatgcttcttcccctggcttcggtctaaggcacccttgctcctctggcagatagtggactgctggaagctaggggggccaactatgggctgcatctagtatgtggcagggtgggggcatctgggttatttcagcccctgcaccaggaagaaccccaaactccttccacctatgaagtggtgggactactgaaaaataattacaaaagcttaatacctagtcagagaaaataaaatccaacttttttgt

SEQ ID NO: 240551 - DNA, 1200 bp, Homo Sapiens
  misc_feature (361)..(396): n is a, c, g, or t
  misc_feature (598)..(598): n is a, c, g, or t
acaaaaaagttggggaatcctgatcccttttaaagtggtccttggtaactgctcgagtagaacatgtctgcatccgccagtagtccgctaatagggagggctgtgcgattaaaggcttccatcgattgggtagtgtccttcaagtgggtggcgaagagccagtcgggcatatgtcatgaaggtttctccgaccgattaatggtttgctgcttgactagcctagggaaataataataaaggtaaagtaaacttttttaatgacatatggggcacaaaataactggtgtcttgtaaatgttctgtttttttaaataaaacttctctactttagtctttactttaaaaatatgtactgtttccnnnnnnnnnnnnnnnnnnnnnnnnnnnnnnnnnnnngtactgagctcagcatagactaatactaccttaatgttaaaatctgaatttcttttagcattttgcttaaaagcaatatgctatttgcttattccgtgccctgacatagataatttttgaattctgatagaatacaagtgtggtaaatgccatgtttgtactttatctaacatcttctctttcagtagtcttgttttttttnatatcatgtgattgtttgtgtgtcccctttcctcttctttgcttaacacaattatcttgtgttaaggatctcaaagatttcatgagacaagctggggaagtaacgtttgcggatgcacaccgacctaaattaaatgaaggggtggttgagtttgcctcttatggtgacttaaagaatgctattgaaaaactttctggaaaggaaataaatgggagaaaaataaaattaattgaaggcagcaaaaggcacagtaggtcaagaagcaggtctcgatcccggaccagaagttcctctaggtctcgtagccgatcccgttcccgtagtcgcaaatcttacagccggtcaagaagcaggagcaggagccggagccggagcaagtcccgttctgttagtaatctcccgtgcctgagaagagccagaaacgtggttcttcaagtagatctaagtctccagcatctgtggatcgccagaggtcccggtccccgatcaaggtccagatcagttgacagtggcaatcaaactgtaaattaccttgccctgtgggcctttttttaaaaaccaaaccacataaatcccaaacatactttgctgaaaattctggt

SEQ ID NO: 240552 - DNA, 1057 bp, Homo Sapiens
  misc_feature (773)..(793): n is a, c, g, or t
actttgtacaaaaaagttggatctgaaaagaggctttggttttgtggaatttgaggatccaagggatgcagatgatgctgtgtatgagcttgatggaaaagaactctgtagtgaaagggttactattgaacatgctagggctcggtcacgaggtggaagaggtagaggacgatactctgaccgttttagtagtcgcagacctcgaaatgatagacgaaatgctccacctgtaagaacagaaaatcgtcttatagttgagaatttatcctcaagagtcagctggcaggatctcaaagatttcatgagacaagctggggaagtaacgtttgcggatgcacaccgacctaaattaaatgaaggggtggttgagtttgcctcttatggtgacttaaagaatgctattgaaaaactttctggaaaggaaataaatgggagaaaaataaaattaattgaaggcagcaaaaggcacagtaggtcaagaagcaggtctcgatcccggaccagaagttcctctaggtctcgtagccgatcccgttcccgtagtcgcaaatcttacagccggtcaagaagcaggagcaggagccggagccggagcaagtcccgttctgttagtaggtctcccgtgcctgagaagagccagaaacgtggttcttcaagtagatctaagtctccagcatctgtggatcgccagaggtcccggtcccgatcaaggtccagatcagttgacagtggcaattaaactgtaaataacttgccctgggggcctttttttnnnnnnnnnnnnnnnnnnnnnttcccaaaccatacttgctaaaaattctggtaagtatgtgcttttctgtgggggtgggatttggaaggggggttgggttgggctggatatctttgtagatgtggaccaccaaggggttgttgaaaactaattgtattaaatgtcttttgataagccttctgctcacatttttgtgaatgtctgaagtatatagtttgtgtatattgacagagctcttttataactaaagcaaatttaatttttttgtactagaaaaaatttgaa

SEQ ID NO: 240553 - DNA, 1086 bp, Homo Sapiens
  misc_feature (782)..(802): n is a, c, g, or t
actttgtacaaaaaagttgggagatattgatctgaaaagaggctttggttttgtggaatttgaggatccaagggatgcagatgatgctgtgtatgagcttgatggaaaagaactctgtagtgaaagggttactattgaacatgctagggctcggtcacgaggtggaagaggtagaggacgatactctgaccgttttagtagtcgcagacctcgaaatgatagacgaaatgctccacctgtaagaacagaaaatcgtcttatagttgagaatttatcctcaagagtcagctggcaggatctcaaagatttcatgagacaagctggggaagtaacgtttgcggatgcacaccgacctaaattaaatgaaggggtggttgagtttgcctcttatggtgacttaaagaatgctattgaaaaactttctggaaaggaaataaatgggagaaaaataaaattaattgaaggcagcaaaaggcacagtaggtcaagaagcaggtctcgatcccggaccagaagttcctctaggtctcgtagccgatcccgttcccgtagtcgcaaatcttacagccggtcaagaagcaggagcaggagccggagccggagcaagtcccgttctgttagtaggtctcccgtgcctgagaagagccagaaacgtggttcttcaagtagatctaagtctccagcatctgtggatcgccagaggtcccggtcccgatcaaggtccagatcagttgacagtggcaattaaactgtaaataacttgccctgggggcctttttttnnnnnnnnnnnnnnnnnnnnnttcccaaaccatacttgctaaaaattctggtaagtatgtgcttttctgtgggggtgggatttggaaggggggttgggttgggctggatatctttgtagatgtggaccaccaaggggttgttgaaaactaattgtattaaatgtcttttgataagccttctgctcacatttttgtgaatgtctgaagtatatagtttgtgtatattgacagagctcttttataactaaagcaaatttaatatttttgtactacaaaaaattttgaacattttagttcttgggtta

SEQ ID NO: 240554 - DNA, 1650 bp, Homo Sapiens
  misc_feature (346)..(381): n is a, c, g, or t
  misc_feature (622)..(633): n is a, c, g, or t
gaaaacagctaaaacttaattccaagcatgtgtagttaaagtttgcaaagtgggatattgttcacaaaacacattcaatgtttaaacactatttatttgaagaacaaaatatatttaaaattgtttgcttctaaaaagcccatttccctccaagtctaaactttgtaatttgatattaagcaatgaagttattttgtacaatctagttaaacaagcagaatagcactaggcagaataaaaaattgcacagacgtatgcaattttccaagatagcattctttaaattcagtattcagcttccaaagattggttgcccataatagacttaaacatataatgatggctnnnnnnnnnnnnnnnnnnnnnnnnnnnnnnnnnnnntgtaagtccactctcaatctcataaaaggtgagagtaaggatgctaaagcaaaataaatgtaggttctttttttctatttccgtttatcatgcagtctgcttttttgatatgcctttgggttacccatttaagttagaggttgtaatgcaatggtgggaatgaaaattgatcaaatatacaccttgtcatttcatttcaaattgcggctggaaacttccaaaaaaagggttggcatgaagnnnnnnnnnnnntcaaatcagaacctcttcaggggtttgtgttgtgatatggcagacaagatacaagtcccacgaggagatggagcaattcaaaataagggtaatgggctgacaaggtattattgccagcatgggacagaatgagcaacaggctgaaaagtttttggattatatagcacctagagtctctgatgtagggaatttttgttagtcaaacatacgataaacttccaagggaaaatctttcaggtagcctaagcttgcttttctagagtgatgagttgcattgctactgtgattttttgaaaacaaactgggtttgtacaagtgagaaagactagagagaaagattttagtctgtttagcagaagccattttatctgcgtgcacatggatcaatatttctgatcccctataccccaggaagggcaaaatcccaaagaaatgtgttagcaaaattggctgatgctatcatattgctatggacattgatcttgtgttgcaattttttaataagtaaaaattatgatttttacttgatcttagagatcatgaacctataagttatgatgaatcttgcttggaggacacattggagaaagacctatttagggatggtgaactcgcatatgtatctcttgctgctgcgacaggcctcatcactccacttgccctgagctgattgggagaacaggacacagttttctcgcttgccaccgttaggctgtgcacggtcccagttgaggaaggagatagcgattccgttgacgtcaacaaacttgccttccgtgaccatgtcattgatgcccagccaaaagtcattgacacctggcaggctccttttaccatagtcttggagggcgttgatttcgtcggagttcctggggataaccaggattcctcctttggaaatgcagtcttcattggcctcatggaaatgcttcaaaccttctgaagcaaggtagcatttcttgtgaactttagtgcctcggagacagactgtgaagatgtgaagtgtaacatatccaa

SEQ ID NO: 240555 - DNA, 637 bp, Homo Sapiens
  misc_feature (205)..(240): n is a, c, g, or t
gccaactttgtacaaaaaagttgggtatatttgatcaattttcattcccaccattgcattacaacctctaacttaaatgggtaaccctaaggcatatcaaagaagcagattgcatgataaacggaaacagaaaaaaagaacctacatttattttgctttagcatccttactctcaccttttatgagattgagagtggacttacannnnnnnnnnnnnnnnnnnnnnnnnnnnnnnnnnnnagccatcattatatgtttaagtctattatgggcaaccaatctttggaagctgaaaactgaatttaaagaatgctatcttggaaaattgcatacgtctgtgcaattttttattctgcctagtgctattctgcttgtttaactagattgtacaaaataacttcattgcttaatatcaaattacaaagtttagacttggagggaaatgggctttttagaagcaaacaattttaaatatattttgttcttcaaataaatagtgtttaaacattgaatgtgttttgtgaacaatatcccactttgcaaactttaactacacatgcttggaattaagttttagctgttttcattgctcaataataaagcctgaattctgatcaatgggaaatcttttaaaagg

SEQ ID NO: 240556 - DNA, 863 bp, Homo Sapiens
  misc_feature (595)..(608): n is a, c, g, or t
aaagttgggtcaagatgaagaaccatttgcttttctggggagtcctggcggtttttattaaggctgttcatgtgaaagcccaagaagatgaaaggattgttcttgttgacaacaaatgtaagtgtgcccggattacttccaggatcatccgttcttccgaagatcctaatgaggacattgtggagagaaacatccgaattattgttcctctgaacaacagggagaatatctctgatcccacctcaccattgagaaccagatttgtgtaccatttgtctgacctctgtaaaaaatgtgatcctacagaagtggagctggataatcagatagttactgctacccagagcaatatctgtgatgaagacagtgctacagagacctgctacacttatgacagaaacaagtgctacacagctgtggtcccactcgtatatggtggtgagaccaaaatggtggaaacagccttaaccccagatgcctgctatcctgactaatttaagtcattgctgactgcatagctctttttcttgagaggctctccattttgattcagaaagttagcatatttattaccaatgaatttgaaaccagggcnnnnnnnnnnnnnngggtgatgtaaaaccaactccctgccaccaaaataattaaaatagtcacattgttatctttattaggtaatcacttcttaattatatgttcatactctaagtatcaaaatcttccaattatcatgctcacctgaaagaggtatgctctcttacgaatacagtttctagcattaaacaaataaacaacgggagaaaataaaactcacggagtgaaaatcacgaggtgtaataaaatgttcctcgcattccccccgc

SEQ ID NO: 240557 - DNA, 858 bp, Homo Sapiens
ttggcaggtgattggggggaacgtggtgacagcagcccaggccaagaacctgattgatgctggtgtggacgggctgcgcgtgggcatgggctgcggctccatctgcatcacccaggaagtgatggcctgtggtcggccccagggcactgctgtgtacaaggtggctgagtatgcccggcgctttggtgtgcccatcatagccgatggcggcatccagaccgtgggacacgtggtcaaggccctggcccttggagcctccacagtgatgatgggctccctgctggccgccactacggaggcccctggcgagtacttcttctcagacggggtgcggctcaagaagtaccggggcatgggctcactggatgccatggagaagagcagcagcagccagaaacgatacttcagcgagggggataaagtgaagatcgcgcagggtgtctcgggctccatccaggacaaaggatccattcagaagttcgtgccctacctcatagcaggcatccaacacggctgccaggatatcggggcccgcagcctgtctgtccttcggtccatgatgtactcaggagagctcaagtttgagaagcggaccatgtcggcccagattgagggtggtgtccatggcctgcactcttacgaaaagcggctgtactgaggacagcggtggatgccgaggtggtggaagggatgcaccccaatgtccacttttgggcactgcctccctccataactgagtggtccacagatttgcactacgggttctccagctcctttcgagacagagagaaggggaggtcttgaggggaatgctgcccctcagtctgcatcccctgccgagtcaggactgctccaggg

SEQ ID NO: 240558 - DNA, 1471 bp, Homo Sapiens
  misc_feature (1398)..(1406): n is a, c, g, or t
ttggattttatttgaggaataactttgtcaaaaatacttgctgaccatagctgctttgttgtaggaggactgacaaatggtagtggtcgatatatctctgcagcacctggagcagaagcaaaatatcgaagtgcttcaagcacttccagtctatttagctccagcagccagctctttcctccttcccggcttcggtataataggtctgatattatgccttctggccgcagtagattattggaagatttcagaaacaaccgcttcccaaaccttcagcttagagacttgattggacatatagttgagttttctcaagaccagcatggttctagattcatacagcaaaaactagagagagctactccagctgagcgacagatggtatttaatgaaattctgcaagcagcctatcaattaatgactgatgtttttggcaactatgttatacagaagttttttgagtttgggagtctggatcaaaaattagccctggctactcgtattcgtggtcatgttctacccttagccttgcagatgtatggctgccgcgttattcagaaagcattagaatctatttcttctgaccagcagagtgaaatggtaaaggagctggatggtcatgtgctcaaatgtgtgaaagatcagaatggaaaccatgttgtacaaaaatgtatcgaatgtgttcagccacagtcactacagttcatcattgatgctttcaagggacaagtatttgtgctttcaactcatccttatggctgcagagtaattcagcgcatcctagagcattgcactgcagaacagaccttacctatcttagaagaactccaccaacatacagagcagttggtacaggatcagtatggcaattatgttattcagcatgtactggaacacggtcgacctgaagacaagagcaaaattgtttccgaaatcaggggaaaggttttagccctgagtcaacacaaatttgccagcaatgtagtagaaaagtgtgttactcatgcctcccgtgctgagagagctttactgattgacgaggtttgctgccagaatgatggtcctcacagtgccttatacaccatgatgaaggaccagtatgccaattacgtggttcaaaagatgattgatatggctgaacctgctcagagaaagataatcatgcacaagattcgacctcacattactactttgcgcaaatacacatacgggaagcatatactggccaagttggaaaagtattatttgaagaatagcccggacctaggacctattggaggaccaccaaatggaatgctgtaaattacaggagcaagagaaagaagataatttaaccatgtgaaaagaatttttttgtgtgtgaattatcaaaacaccactcaactatgaatcttcaannnnnnnnnaaagcaaaactatttattgactttattcatccatttgtaaattttttaaattcttgtgtatattt

SEQ ID NO: 240559 - DNA, 1030 bp, Homo Sapiens
  misc_feature (78)..(86): n is a, c, g, or t
ttgggataatttaaccatgtgaaaagaatttttttgtgtgtgaattatcaaaacacaactcaactatgaatcttcaannnnnnnnnaaagcaaaactatttattgactttattcatccatttgtaaattttttaaggttcttgtgtatatttggggggtgggggatgaattataaattatattcagccctgagtggagacctatcagattggattgctggcaaagcacagaatgcctgtatatgatgtaactgtatcaaaaataaaaagctgtcacatattttgtaaatttttaccttgtaaagtcacaaaaatagtttttaaaggaaaaagtacagtattcttttaataaactggctcacagtctggtaggtctacaaccccatagcacaacaggtttatagagatgtatatagaattatagtccttatttttttcctttgcgtgaaaccttttataacagattaacaatcaactgcataaatattattaatattttaaaaagagttgagttgtattttgataattcacaaactatcatgcaaataacgagtaagtagacaagaataaagtggtttgagatgaaaagaacctaacattatttacagtagatgtggttttaatacaattactgccctaaaatgtctctggcaatgtacagaaatattgtatatacttacatatgtaattgttgtaagagttaaatacaaaatcatggtgacacttccaattaagtgcactaaatgaaaagttaagtcacttattaacttttcagtttggtttgcaatgagaaagagtggaaatttgtattttgttttgcttatagaattacagacatgttgaggaagtgttgagctttattttgctttttcatagaggcagaaagtacaaccagatagagatgaaaaggggccactgaaaagtgaatttgatagctcagcatttaagcatgattacatattcagatagctctttttgctttctataatatatgcattgtgtgtgtagtaatagatgtaagtttacacttt

SEQ ID NO: 240560 - DNA, 1151 bp, Homo Sapiens
  misc_feature (977)..(999): n is a, c, g, or t
ttggcttatactagtaaggaaaatactgtactaagagcagcactgaatcctgaaatagtgtccgtcattcctaatgctgtagatcctactgacttcactccagacccatttagaaggcatgatagtataactattgttgttgtcagcagacttgtttacagaaaagggatcgatttgcttagtggtataatacctgaactctgtcagaaatatccagatttaaatttcataattggaggagagggaccaaagagaatcattttggaagaagttcgggaaagataccagctgcatgacagggtgcgtcttttgggagctttagaacacaaggatgttagaaatgtcttagttcaaggacatatttttctgaatacctcccttactgaagcattctgcatggcgatcgtggaagcagccagttgtggtttacaggttgtaagtaccagagttggtggaattcctgaggtgcttccagaaaaccttattattttatgtgagccttcagtaaaatctttgtgtgaaggattggaaaaggctattttccaactgaagtcagggacattgccagctccagaaaacatccataacatagtaaagactttctacacctggaggaatgttgcagaaagaactgaaaaggtatatgaccgggtatcagtggaagctgtgttgccaatggacaaacgactggacagacttatttctcactgcggcccagtaacaggctacatctttgctttgttggcagttttcaacttcctcttcctcattttcttgagatggatgactccagattctatcattgatgttgcaatagatgccactgggccacggggtgcctggactaataactattctcacagtaaaagagggggtgagaataatgagatatctgaaaccaggtagaaggaagcctagattgtaagattttaaacatttgtaatagttctataaagactatggaaaataaccttgcnnnnnnnnnnnnnnnnnnnnnnnagagttaatttagtaagttatgctacctctatatcattcaatattttctgttgaggaaagataaaaatgtatgcaattcctgagtgtagaaacttcttgcacttatttaaaatttagagagaacatttaagccactcagtatgcaatttttc

SEQ ID NO: 240561 - DNA, 1505 bp, Homo Sapiens
ttgggccaacgcaatgttcggtgcgggggacgaggacgacaccgatttcctctcgccgagcggcggtgccagattggcctcactttttggactggatcaggcagctgctggccatggaaatgaatttttccagtacacagccccaaaacagcctaagaaaggccagggaacggcagcaacaggaaatcaggcaacaccaaaaacagcaccagccaccatgagcactcccacaatactggtcgcaacagcagtccatgcatatcgatacacaaatggtcaatatgtaaagcagggcaaatttggtgctgcagttctggggaaccacacagccagagagtataggattcttctttatatcagtcaacaacagccagttacggttgctaggattcatgtgaactttgagctaatggttcggcccaataactatagcaccttttatgatgaccagagacagaactggtccatcatgtttgagtcggaaaaggctgctgtggagttcaataagcaggtgtgcattgctaagtgcaacagtacctcttccctggatgcagtgctctcccaggacctcattgtggcagacggccctgctgtagaagttggagattctttggaagtggcctataccggctggctctttcagaatcatgtgctgggccaggttttcgactccactgctaacaaagataagttgcttcgcttgaagttaggatcaggaaaagtcatcaagggctgggaggatggaatgctgggcatgaaaaaaggaggaaagcgattgcttattgtccctccagcctgtgctgttggctcagaaggggtaataggctggactcaagcaacggactcgatcctggtgttcgaggtggaggttaggcgggtgaagtttgccagagattctggctctgatggtcacagtgttagttcccgcgattctgcagctccgtctcccatccctggtgctgacaacctctctgctgatcctgttgtgtcaccacccacatcaatacctttcaaatcaggggagccagctcttcgtaccaaatctaactccctcagtgaacaacttgcaataaatacaagtcccgatgcagtcaaagccaagttgatctctcggatggctaaaatgggccagcccatgctgcccatccttccaccacagctggattccaatgattcagaaatcgaagatgtgaacactctgcaaggaggtgggcagcctgtggtgactccgtccgtccagccctctcttcagccggcccatccagcgttaccacagatgacctcacaggcacctcagccatctgttactgggctccaggcaccttctgctgccttaatgcaagtgtcatctctcgattcccactcagctgtatctggaaatgcccaatcctttcagccctatgcaatatgcaagcctacgcttatccccaggcatctgccgtcacctcccagctgcagcccgttcggcctttgtacccagcaccgctctctcagcctccccattt

SEQ ID NO: 240562 - DNA, 962 bp, Homo Sapiens
gagcagaaagggccagggcatgttgctgtgacccccccctttctctctttcagtaaacaaaagtgcacatgcagaaatctgggcaggtcctatcggaagctgctctcaccccagaggccccagggagagtggctggacctcgggagccagggcctctgcactacaggctctgccctcagtccagctgctgcagcacgatggagactggatgtgcccctagagtcagggacaatgtgggggagaggctgggagaggaccagggtgcagggatggaccaggaaagggaaagaagaaaatgtctcttctcctagaaagttacaggagagcagcccatctggggcttgaaggcggggaagtggcttcggattccaacatacccctatcagcatttgaagaaatgactgggatactggacctgtttcggctgagaaggaaccacagagatccagataaatccccatctgaggaggcacagaagttggtggggattctcttctgaaggctgacatgatcattacaagtaagtttttctaatgtggacatcagagccactctgggatccacctcttcagaaatatacaaggctggacactatccaggggcagagactagactaggggaccccttaaattcctcttccactcttgaatcctccagacctaagccctccaatcatagctcactgagaggaaggggctgcagaaaatgtccttgttttgcaaaaaaggaaacagggccaaagagagagaggccacacagctaatgtcctcctcacaaagaggcctctcatctccctcaagaggctccagctgggtcctacgttccccccaactgagggatgaacctagagcctggacccaaggcctctgcagctactcagaataggtgggaggaggggctggctttgaggctgccttagccatgaggctctttgcctaggaatagcgggagatgggagccaa

SEQ ID NO: 240563 - DNA, 983 bp, Homo Sapiens
ttgggttagccagcatcaatagcacggtgcggctctatgagtggacaacagagaaggagctgcgcactgagtgcaaccactacaacaacatcatggccctctacctgaagaccaagggcgacttcatcctggtgggcgaccttatgcgctcagtgctgctgcttgcctacaagcccatggaaggaaactttgaagagattgctcgagactttaatcccaactggatgagtgctgtggaaatcttggatgatgacaattttctgggggctgaaaatgcctttaacttgtttgtgtgtcaaaaggatagcgctgccaccactgacgaggagcggcagcacctccaggaggttggtcttttccacctgggcgagtttgtcaatgtcttttgccacggctctctggtaatgcagaatctgggtgagacttccacccccacacaaggctcggtgctcttcggcacggtcaacggcatgatagggctggtgacctcactgtcagagagctggtacaacctcctgctggacatgcagaatcgactcaataaagtcatcaaaagtgtggggaagatcgagcactccttctggagatcctttcacaccgagcggaagacagaaccagccacaggtttcatcgacggtgacttgattgagagtttcctggatattagccgccccaagatgcaggaggtggtggcaaacctacagtatgacgatggcagcggtatgaagcgagaggccactgcagacgacctcatcaaggttgtggaggagctaactcggatccattagccaagggcagggggcccctttgctgaccctccccaaaggctttgccctgctgccctccccctcctctccaccatcgtcttcttggccatgggaggcctttccctaagccagctgcccccagagccacagttcccctatgtggaagtggggcgggcttcatagagacttgggaatgagctgaagtgaaacattttc

SEQ ID NO: 240564 - DNA, 1577 bp, Homo Sapiens
  misc_feature (434)..(443): n is a, c, g, or t
ttggcaaacactttccatgagaagtagttactgtctccactttagcaataaggaaacctatatttggggatttagtacccaggagagttgtttcagctaagtacacaagactgaaaaacagcctacatgattttaactcccagacctattttagagtgcaaatacttttttagaatattaagataaacctaaatcaaattttttatatagaagcttatggtcgtgaaaagtttattggtcaattttattatacttcctttaaaaattcaaaagaaaatgtgttatttaatagttaaccagctttttcagataaacatctttctccttcagcagaacattgctaattactatttctgtaccctgtccctttctacaaaaaatttcccaaaattataccgtgaaaaagtgttcaagtaaacactgctattgtgccnnnnnnnnnnaaactgggggcctgccagtttttacgtgctacaaagaaagaaaaagaggggtgattgggtgttgtgggttactgcactggaaacagtggctcatacaactgtcttggtgccctgaaacaaatagctgagaccagaccatagaaatacacaggagcaaagagcagcctcttaaaccttcaggctaggtaatgacttgagacgattatgccctacattgtattacttgttcgcaccttcacaatgggtaagtacatttgtgtctagtaaactaaactcagtccgtttttgtatataaaagtagacttaatcattgttaaactatctttcctttttcctttagtctttccatctacagcccactggcactccaggcacctacctacttcaaacaagctcaagccaaggccttcccctaactctgactgctagtcccacagtaaccctgacagctgctgctcctgcttctcctgaacagattattgttcatgctttatccgtatgttacataaattacttgatttttgagtacctgttatagaccaggattagttgataaggaccaaaatagaaggtagttatctaaacagttcttcctactgctgctgttccaggcacagtgttatacaccatcactctgccttcactggagtgtatgtttcatcccttctctttatgtaagatggctatacattagaatagggacattagaagaacaaaggccctagcaagtaaaggacaagggttctagaaaaatagtgataaaagtatttacagtttgagaggtaagagatgtggggggagacagtgaggtacccccataaatgtcatttgatttacaactttaacaggttctttaatgttttatagccagaacatttgttgaacacaagtgataatgttacagtgcagtgtcacacaccaagagtcatcattcagactgttgccacagaggacatcacttcttccatatcccaagcagaactgacagtcgatagtgatattcagtcatctgattttcctgagcctccagacgccctagaagcagacactttcccagatgaattcatcaccccaagatgactgtggagccatcatttaatgatgctcatgtatccaaattcagtgaccaaaata

SEQ ID NO: 240565 - DNA, 1048 bp, Homo Sapiens
tacaaaaaagttggggtttatgtcacaggctgtgaaattcagggcatgctggatgataaaggacgtgtcattgaagatggacctgaacccagacccaatcttagaggagaatcaaggacatttagagtgtttttggatccaaaccagtatcaacaagatatgaccaatactatacaaaatggagcagaggatgtgtatgaaacttttaatataataatgaggagaaaaccaaaggaaaataactttaaggctgtgctggagactattcggaacctgatgaatactgattgtgtggtacctgactggctgcacgatatcattttaggttatggggacccaagtagtgcacattattcgaaaatgcccaatcagattgccacccttgatttcaatgatacatttctctccattgagcatttaaaagccagcttccctggtcataatgttaaagtaactgtagaagaccctgctctacaaataccccctttcaggataacttttccagtaagaagtggaaaagggaagaaaaggaaagatgcggatgtggaagatgaagacaccgaggaagcaaaaaccttaattgttgagccccatgttattcctaataggggtccttatccttataatcaacccaaacgtaatacgattcagttcactcatacacagatagaagccatccgtgctggaatgcagcctgggctgactatggttgtgggcccacctggtacaggcaaaacagatgtggcagttcagatcatatccaacatctaccacaacttcccagaacagaggactctaattgttactcattccaatcaggccctaaaccagttgtttgagaaaatcatggcattagacattgatgagcgccacctactgcgtcttggtcatggagaagaagagctggagacagagaaagatttcagcacgtatggaagagttaattatgttctggctcgaagaatagaacttttagaagaagtcaaacgattgcaaagagtctaggggttccaggagatgcctcatatacctgtgaaactgcaggcta

SEQ ID NO: 240566 - DNA, 1605 bp, Homo Sapiens
  misc_feature (1293)..(1302): n is a, c, g, or t
tttacgtatctgaagttcacgggcccttgaattttaggtctttcttgcagccatgaacagtcaaactatctaaaactgccttcatggtacacaccaatcttgatggcagtttgttttgtaggaccctgctgaagtttccagacacttagcattcaaaaggtaaggctgtagatcactgaaataaccagttgatatcctccacccacactagacatctagaggactccaccacattctttttactactaagtactagaaaatgagagctcttttagtcagatactatcaagtaacactattattctgtagcaatgaaactaccaatgccaaccttctgaactttttcttctgtgaagatgtttgcccttctgtcacaaagctgactgaagggcagatgagtacaggtaaaaactgcttctgtggactgacatgttcatacagctagactaatgaggcaggcctctgccctcacagtgcaagcacttcagatttttccctaagtctatgaaactgatttcacacttctctaagatcagttgagcgttctccccagaataggttaggaaatactttattcaaagcaaccccaccacatacacatcagttccttttgccaactaacttatgtgattcacatgtttttccagtgaaattctaagggcactatgttttgttcagtgttcagtctccaggcattgtaaatggcattttaccagagtaagacactcatcacggcattactctcatgcagcatgcccttacctccttcagctggactctgtgggaagagaagtggcttaaagtgcactgtgtttaccacttcaaagacacttctcttgggaattttaaaattatgaactagtatctccaacaagtcaaccctatatccaaaattaatctttaacacattaaatcaatgttagcaaatgctaaaatgtaaatatgctacaaagggtaaacaaaaattttaaaatatgcaaaattaaggtgaaatttgcactttatagtaggatgagaatatactattatcaactagctgcaccatttgcatttggaagaaaagaacagataactggttcattcccaacaacctattcatccagacaaatagataaaattctatttcaactacaatttgtaacaaaatgctttaagttgcagaaattccattttgatgtgtgatcaaagtacctatactgacaatttaggaacctagtaaatactaattctaacacattttaataaatgtttatttgtcatccagaataatggaaaagttaagattctgcaggnnnnnnnnnnctaaaatcaggtttttaaaaaatacttaaggaaatttgaacttcagtaactatgcccaagggagggagaatttgaattacactgtactctaacttgataaagctgaatctcttaagtcttagacaataaaacaggaatttcagagaataaggataaaaacaatctgaggaagacaaaactgtggagaatttttttaaatacattcaagtcagtgttaattttattactgaaaactgagtaaattataaagtgctttttctcaagaaaactacaaacagttttagaaatatatataggatccaa

SEQ ID NO: 240567 - DNA, 1210 bp, Homo Sapiens
aaaaagacagatcttagtcttaaatcatagcaattcttggctttataaactgtattgatacgttctcctataaactagtcccaatttccttcatgggcgttcactgagttacttgtagcattctaatggaagaagagagtttaagagatttaagagacagcagtttggattttgctggaagtaaggattttgctgcttgagcacttgtctttttggagtaattccattttcttccatcaagttacataaactgtatctgtgctcctgatacagggccaaaggggtttggaggtctcatgacaggctggctgtatattaaggttggttgcgtcattacaggaacacttcccatttgtggaggaattccatatcctatcatgcctgttggtgtagtagcaggataggccattacagggggtgcctaacatagtgaaaggaaaaatgaacaagaaagtataactcatgtgtgtcaactgagttcaaggaattagtagctgtagttccactaaaaagaattgctaagacagctgtgagtaagtgacacttgtgatcattaagaactgtcgattaatggtcagtgaaaaaaagtgttttgaaattagcagaaaagcagacttattagaaggataactataccacttaaacttagatacagcagtgatctaagatttcatcatgctttttacagctttaaaaatctttagatttaaaaaagtatcttaaatagttctaaatagttctaaaatttaaagcctatcactatcattaaaaaatgtctacccagaaaaagtattattgaatgttttcttacttaggtacctgattgctttagcattcaaagaaaaaaatgtaaagatctcaaatcaatcaataacctgatcttccaaaaagttagtttctaaggatcttactcactcttttcaaaaaactccaaaggtttcaaactactattgagtatgactatttctatgagccatagttcttatatagagtatgtacgttagctttctaatttattccaaaaattatttaagaggaacaatcaattaggtcagtttatgctttcatgtttaaaagaaccatctatcactatgatgtttaagttcccctcttcctactactttgattatctgtaaacatacaatttgagaacagaatcattttagatatagttgctgtcttaacaacatttcctgtgtgtgtttcccaa

SEQ ID NO: 240568 - DNA, 1798 bp, Homo Sapiens
  misc_feature (1597)..(1605): n is a, c, g, or t
aataagtagttgcatttatcaataagagtctacaaggtaacaaaaagtgtaaagagacatctttttgaaaattcatataaaacaaaccttccatgttattagatcaacaaatataatcacctgggtatattttattagggaaaaatgacaatattgataataaaaagagaaaggaaaaatgaaaatgcatctcagaccagaataccataacaaaacttttgtggaagctgcattttattgaaaatccacccattttgctaacatacattttaatattgtaaacaaaaatagaatctgcagagacaatgcaacaagaatgcttaaactcatgtacagaattgctttcctacaatgaactgtccttcttaaggcccctctccacccaaatgttaaagatgtatttacacaaagcaccgatcaacagtgcagtttaattcttcgtttactaaactcttggctagacattaactttaaagatactatttccccttatttaaaaggtatatgatcataacatggcacgagccaaagaaaatgttcaaggactttgccccccttccctcccccttgtaacaccttctagagttttagtgaaaagaaggaaagtcttgaagtgaaagcaattcctcacattcattttggaaaggccctaatgtcaaatggaaaataatgacatgccaagcacaaagcagtaaagatccttcccaatgcactaatgctgaatttaaaatgtagtgcttttcctagtcagtgaactgttccctggcaaaatcctaggcacagaattgactataaggattaatgcatttataatgcttccctaaatcccacagaggccgagaattcttaagagattcagacctatggacttgccttaaaatatttagtgctctgtatgtcagctgagaaaagcattctgaatcagattcattcttgtggataaaaatcaaacatactgtgcacatccatactcattttcataaggaggtctgatacaatattaatgttatgtaaaattgataatcataaataaatacaaatacttaaggaatgtctactgcaaactgaatataattttttttaaaaaaagaaaagttaatttcagttattgtttctgtatttgtgaggactggagaaaagaaagataatgcataattaggaattttaattttgatcccccaaaagagtcctgttgaaatacagtaaaggacacagttcttctctccaggcagcttttccaaatacaaatttcacactttccaaataagggcttttcttgataggttactgattatgggtattaacaggagttgaaagaattgaagggttagtcaccaaaaagacagatcttagtcttaaatcatagcaattcttggctttataaactgtattgatacgttctcctataaactagtcccaatttccttcatgggccttcactgagttacttgtagcattctaatggaagaagagagtttaagagatttaagagacagcagtttggattttgctggaagtaaggattttgctgcttgagcacttgtctttttggagtaattccattttcttccatcaagttacataaactgtatctggnnnnnnnnngtgggtatgttaattcattgtattgtaggatgtcttctcataaataaaaatgctttgtggtctttaccatttaactggcccagaagtgttcacaacatgcttatcacaaaccctgtttataaaacaaagtcagtattatcaacttatgtgccagaaagctcaatatttgacacatatagggacttccaaataa

SEQ ID NO: 240569 - DNA, 1533 bp, Homo Sapiens
ttgggaaggggatactcaccggctgaaggccgactgtgattccccctacccccacaaggcgattttgaccccctgagggctgctctagaggactcaggccccgaagctgtcccagggaggtccccgctgcatcccaccacccaagctgtgcctcatggagtcgatgtttagcagccctgccgaggcggcgctgcagcgagagaccggggtgccaggactgcttactcctcttccggacctggacggagtgtacgagctggagcgagtcgctggatttgtccgcgacctggggtgtgaacgagttgccttgcagttccctgaccagctattgggagatgctgtggctgtggctgcacgactggaggagacgacagggtcaaagatgttcattctgggtgacacagcctacggcagctgctgcgtggatgtgctgggtgctgagcaagctggagctcaggctctcatacattttggccctgcctgcttaagccctccagcccgcccactgcccgttgccttcgtgcttcgtcaacgttctgtggccttggagctctgtgtcaaggcctttgaggcccagaacccagaccccaaagcgcctgtggtgctgctgagtgagccggcctgtgcccatgccctggaggctttggctactctcctgcgcccacggtacctggacctgctagtctccagcccagcttttccccaaccagtgggttccctgagtccagagcctatgcccctagagcgttttgggcgccgcttcccccttgccccagggaggcgtctagaagagtatggtgccttctatgtagggggctctaaggccagccctgacccagaccttgacccagacctgagtcggctgctcttggggtgggcaccaggtcaacccttctcctcctgctgtccagatacagggaagactcaggatgagggtgcccgggctggacggctaagggcacgaagacgatatctggtagagagggccagagatgcccgcgtggtagggctgctggcaggcacactgggtgtagcccaacaccgtgaggcactggcccacttgcggaacctgactcaggctgctggcaagcgtagctatgtgttggccctggggcggcccacccctgccaagcttgccaacttccctgaggtggatgtctttgtgctattagcctgtcctctgggtgctctagccccccagctttctggtagcttcttccagcctatactggcaccatgtgagctggaagctgcctgcaaccctgcctggccacctccaggcctggctccccacctcacacattatgcggacttattgcctggctctcccttccacgtggctctcccaccacctgagtcagagctgtgggaaaccccagacgtgtcactcattactggagatctccgacccccacctgcctggaagtcatcaaatgatcatggaagcttgggctctgaccccacggccccagctggagctggctgaaagcagtcctgcaacctcattccttaattcccggaactggcaagggc

SEQ ID NO: 240570 - DNA, 1596 bp, Homo Sapiens
ttggcgccccacaaccaggctgacagggcccctttgtaaatttatgccacagataaattcttccttattgggggcccctggggttgaacttaaatgattgaagccacaaatattaattctcagataccaaggccttctgatgtgtcataaagaattccctccaaagtgagagagggtctctgtcaatcttatggagcatgggaaggggaagaccacctgacagtagggcagggagaggggctgccaggtaagcttgaggggcccttgatgcagcctggcaccccctagcctgccctgtgcctacagcctcgtgtgcatcaccggggccagtggggaggaggtggccggcgccacagcggtggaggtgccgggaagaggacgtggtgtctcagaacacgactttgcctaccaggatccgaaggtccattccatcttcccggcccgcggccccagagctgggggcacccgtctcaccctgaatggctccaagctcctgactgggcggctggaggacatccgagtggtggttggagaccagccttgtcacttgctgccggagcagcagtcagaacaactgcggtgtgagaccagcccacgccccacgcctgccacgctccctgtggctgtgtggtttggggccacggagcggaggcttcaacgcggacagttcaagtataccttggttggcaacatcacctctgctggccccaccaagagcttcctcagtggaggacgtgagatatgcgtccgtggccagaatctggacgtggtacagacgccaagaatccgggtgaccgtggtctcgagaatgctgcagcccagccaggggcttggacggaggcgtcgcgtggtcccggagacggcatgttcccttggaccctcctgcagtagccagcaatttgaggagccgtgccatgtcaactcctcccagctcatcacgtgccgcacacctgccctcccaggcctgcctgaggacccctgggtccgggtggaatttatccttgacaacctggtctttgactttgcaacactgaaccccacacctttctcctatgaggccgaccccaccctgcagccactcaaccctgaggaccccaccatgccattccggcacaagcctgggagtgtgttctccgtggagggggagaacctggaccttgcaatgtccaaggaggaggtggtggctatgataggggatggcccctgtgtggtgaagacgctgacgcggcaccacctgtactgcgagccccccgtggagcagcccctgccacggcaccatgccctccgagaggcacctgactctttgcctgagttcacggtgcagatggggaacttgcgcttctccctgggtcacgtgcagtatgacggcgagagccctggggcttttcctgtggcagcccaggtgggcttgggggtgggcacctctcttctggctctgggtgtcatcatcattgtcctcatgtacaggtgggtgcagccagatgtggctgggctggggcaggtcgtgggatctggctggactgggaagggacagaccgggccaggagtctgaaacattctctgtaaatggccagagagtaaataatttcgctttgc

SEQ ID NO: 240571 - DNA, 902 bp, Homo Sapiens
  misc_feature (804)..(845): n is a, c, g, or t
gttaaacatttattattaagaaatgtactacgtctctgtacttaaaaccaaaactgtgcaatctcttcagtcagtatcatgaaaaaaagaactccactagattgaaagggaattaaaggacacaaccatatgccaggtgcattctccagactggatgctggctttgacaaactggctctgaaaggcattttgctgaacttacagctaataaaggcttcaagtctaggactaactttcacttatgggaaatataagagatgaacaatttacatctgaatatagactaagtaagagaagaggtgaaaaattattttgacacggaaggatggaggttattaaatgaaaatggcaagttacaagacaatagttaaatatgatcctatttaagtcaaaagatagagctggggaagacttatggagatattaaaattggtcgcctgtaggtggtaagaatattttcatttaatattttatctgtattttctcttttttgggaaagttaccgcagatgattatctgtattttctaattttctacaatgtacaaataatgcttttgaagtaaggcttatgtttttgaaaagttatggatttaagtcattacttaccagcaaaactttatatgccaagtagctaaaaatcatagttcaactgactttgtggatatttcttagaactatggtcctcaaattgtgagttgctgtagaatggaacttttctgaactattatctcccatccaaatgccatcttttgcactatgagataagaatcactgtcacaaggctgggtgtggtagctcacacnnnnnnnnnnnnnnnnnnnnnnnnnnnnnnnnnnnnnnnnnnaaggtcagcagttcaagaccaccatggccaagatggtgaaaagccatctctacccaa

SEQ ID NO: 240572 - DNA, 2183 bp, Homo Sapiens
actttgtacaaaaaagttggcacacgctgcggtccccaagaagaaccgggccctccccttcgtgccaatgtcctaccagctatcccagacctactacaggatttttacgtggcgatttccaagcaccatctgcacggagtcattccagtttttggacagaatgcgggctgccggcaagttggaccagcctgatcgtttctctttcaaagaccaggataataacgagcccacaaacgacatggtggccttttcactggacggccctggaggaaattgtgtggccgtcctgaccctcttctctctgggcctcatttctgtggatgtcaggatcccggagcagatcatcgtggtagacagctcaatggtggagaatgaggtcatcaaaagcttggggaaggacggcagcctggaggatgacgaggatgaagaggatgacttggacgaaggtgtagggggcaagcgccggagcatggaggtgaaacctgcgcaagcctcccacaccaactacctgctgatgaggggctactactcccccggcatcgtcagcacccgcaacctcaaccccaacgacagcattgtggtcaactcctgccagatgaagttccagctccgctgcacccctgtgcccgcccggctcaggcccgctgccgctcctctggaagagctaacaatgggaacctcctgcctccctgatacgttcaccaagctgataaacccccaggaaaacacctgcagcttggaggagtttgtcctccagctggagctgtctgggtatagtcccgaagacctgactgctgccttggagatcttggaagccattatagccacgggttgttttgggattgacaaggaggagctgcgcagacggttctcggccttggagaaggcaggtggtgggcgcaccaggacattcgcagattgcatccaggccctcctggagcagcatcaggtgctggaggtcggtggcaacactgcgcgcctggtagccatgggctctgcctggccttggctcctgcactccgtgcggctgaaagacagagaagacgccgacatccagagagaagacccccaggccagacccctggaggggtcttccagtgaggacagcccccccgaggggcaggcacctccttctcacagcccccggggcaccaagaggcgcgccagctgggccagtgagaatggggagaccgacgccgagggcacccagatgacccctgccaagaggccagcgctccaggactcaaatttggcccccagccttgggcccggagctgaagatggggcagaagcccaggccccatctccacccccagctcttgaagacaccgctgcagcgggagcagcacaggaagaccatgagggtgtcggtgagttcagttccccaggccaagagcagctgagcggccaggcgcagcctccagagggctctgaagaccccagagggttcacagagagtttcggagctgccaacatctcccaggcagcacgggaaagggactgtgagagtgtctgcttcatcggccggccgtggcgtgtcgtggatggccacctgaaccttcctgtatgcaagggtatgatggaggccatgctgtaccacatcatgaccaggcctggcatccccgagagctccctgctgcgccactaccagggggtcctgcagcccgtcgccgtgctggagttgctccagggcctggagtccctcggctgcatccggaagcgctggctgagaaagccaaggcctgtctcgctcttctctacacccgtggtggaagaggtggaagtgccctccagcctggacaagagccccatggctttctatgagcccaccttggactgtaccctccggctgggccgtgtgttcccccacgaggtcaactggaacaagtggatccacctctaggacccctgtgggcgtcccctccctcccagccaccgcctgccacaccactcctgcctggtgctcggcagaccccactgtgccctggccttgggtctgccgagcctcctgcagcatgggacgggtgctttggccagagtcacagactgacacgtttcccactgtactggaactctggaaagaggggctccccgacctgcccatcccccaggctcttctgggccttccccttgggaactggcctcatcacactgggagttggtgcttcttgtctctgggtctc

SEQ ID NO: 240573 - DNA, 1438 bp, Homo Sapiens
  misc_feature (1077)..(1092): n is a, c, g, or t
atttctattattttggttgtagaatcaagcttcatagataaaaaatcttgttcaatcacaagtacactaaacccaagagtcatctggagcagccatcttatgctctatcactactctgttgtgaattccggggcaccacctcattgtgcaggtaaaactcaggaattcatccccatcacagtgttagatgacctttgttccttctagcttggctccactgaatcataaattgtcaggtacagagctgaggcataagaaaaaaaggtataaccctatataataggtataagtcttagaacagagttgtcatataaccttgtggtgacaatcagctctagttccaccaaagaatgtaaggttgattccacaaagtggcagataatgaagttcaactcacaaatagaagttatcttaattcagaaaaagtatgttgtatgtaggcaataaagataaattgttatacataattcttgacagatgactctggtgaggtgattcaaagtagaaaatatacttctgtttcaagcaaacttactccactcatatcctaccagatttatttgtataataattaattcctttccaatcacagttcttcctagacagacatttaacaagtaaaaataagacggcctgggtgcatatcaatcaaccaaattaaaaacaaacaaaaaagatagataaatggagaaaacgattggctttttaatacttatttttaaaaagccatattcaatgtaatattagaattatgctgtcccaatgcatggtagtatctaatttttttcttcctcaacaccaatgaaacaatatccatgtaagactgaaacagaatgtccaacctccattagcaagttccatgtaccacattagccttgactgacgttattatctccactaatctctgaattaaaggaaaagcctctagaataaaaagggacactttataccttatctaaaccatgtatcctatcaaaagagaaaattaactgggtctctgtccaaagtaactttatatgattacattacacagaaaaagaatacgaatgaataatgacgacttaaaaaacaaacatnnnnnnnnnnnnnnnncccagaaaaggctttgtccatattcatgacaaattaattaaaataaatataaatgaaattaacaatctggacagcagtttatggttaagtagctagtaaatataaattcaaagaattctgacaaaatcattattacctttttctcaagtcacatatttatttaggaggaaagatgcttgaaagctagctataagaaaaggacaactttagacactgggtgaatcttcagcttaaaaggcccagtgctggatgaatgactcacaacagcaatccaccaaatgcagagctgctaagcagaggcagaaggatgctgctcagaagcacagaggaatttatcaaggcccaa

SEQ ID NO: 240574 - DNA, 896 bp, Homo Sapiens
ttacatttttaaagacatttttattgagctaattttaaacaacattgctttagctggtgacagctgccccaaaccaaaacaaagccatcatgaatgctattcaacatcctcaatgtaatccagtatgtttttgtacttggaatatagttaaacttttgacattacataatcaagcaaatagcagtgcatactatattattcaaaaagactttatctatttcatttaaaaaatcaagttgcaagtggcctcagctttatcaacaatcgtagtgacacattccacacttcatgctctcaaaataaaaagtgccctaaaactaactctaagttttttagtcactgacattaatactaaccaggttacaggaattgaagtttaacattgtacaatataagcggcaataagttactgatatctgctgacaaattccactcaaactaaatatatccttgatacattcaaaaagacattttgtaaattttaataagctagttagtgtatatgctgcagtgcaaaaaaagtgacaccctagtttcctgagctttaggaaattaacaattttctgactactactttcaacttaaaataggctctttattatatgaagccatgacaaaactatacaattaaattgggcttttggagaactgaaagactggtcagagtcagggtgatttaggacaatgaaaaagttttcaaagcaaaagtatttacaacactacaaaggatactatggatctgcatgtagtgtaaagattaaagataacctactgatttcacaattgtccctcctctttcaaaaatattacactgggccaggcgctgtggctcacacctgtaatcccagcactaaaattaatctggtggtaaaacaaaaccaacttttttgtacaaa

SEQ ID NO: 240575 - DNA, 1558 bp, Homo Sapiens
ttggcccaactctccacaaactgcccaggagtgagtagctgctttcggtccgccggacacaccggacagatagacgtgcggacggcccaccaccccagcccgccaactagtcagcctgcgcctggcgcctcccctctccaggtccatccgccatgtggcccctgtggcgcctcgtgtctctgctggccctgagccaggccctgccctttgagcagagaggcttctgggacttcaccctggacgatgggccattcatgatgaacgatgaggaagcttcgggcgctgacacctcgggcgtcctggacccggactctgtcacacccacctacagcgccatgtgtcctttcggctgccactgccacctgcgggtggttcagtgctccgacctgggtctgaagtctgtgcccaaagagatctcccctgacaccacgctgctggacctgcagaacaacgacatctccgagctccgcaaggatgacttcaagggtctccagcacctctacgccctcgtcctggtgaacaacaagatctccaagatccatgagaaggccttcagcccactgcggaagctgcagaagctctacatctccaagaaccacctggtggagatcccgcccaacctacccagctccctggtggagctccgcatccacgacaaccgcatccgcaaggtgcccaagggagtgttcagtgggctccggaacatgaactgcatcgagatgggcgggaacccactggagaacagtggctttgaacctggagccttcgatggcctgaagctcaactacctgcgcatctcagaggccaagctgactggcatccccaaagacctccctgagaccctgaatgaactccacctagaccacaacaaaatccaggccatcgaactggaggacctgcttcgctactccaagctgtacaggctgggcctaggccacaaccagatcaggatgatcgagaacgggagcctgagcttcctgcccaccctccgggagctccacttggacaacaacaagttggccagggtgccctcagggctcccagacctcaagctcctccaggtggtctatctgcactccaacaacatcaccaaagtgggtgtcaacgacttctgtcccatgggcttcggggtgaagcgggcctactacaacggcatcagcctcttcaacaaccccgtgccctactgggaggtgcagccggccactttccgctgcgtcactgaccgcctggccatccagtttggcaactacaaaaagtagaggcagctgcagccaccgcggggcctcagtgggggtctctggggaacacagccagacatcctgatggggaggcagagccaggaagctaagccagggcccagctgcgtccaacccagccccccacctcaggtccctgaccccagctcgatgccccatcaccgcctctccctggctcccaagggtgcagtgggcgcaaggcccggcccccatcacatgttcccttggcctcagagctgcccctgctctcccaccacagccacccagaggcaccccatgaagcttttttctcgttcactccc

SEQ ID NO: 240576 - DNA, 1077 bp, Homo Sapiens
ttggccgggatggcggcggcggcgcgcgcggccccggcgagcaggggaagccggtggccgcggctgcggaacgggcggaggctgccggtttcgtaaccgtcgctcctcctcgctgactcgcgggctgtgaggcctgggtcggctcgggccgcaccgcgcggggccgctcggagtggaggccgcctgggggcaggcgggctagaggagcaggtacatgtgaagattttttggcagcttagcgtggaaaccattgatcaccctgctctcatttctacctgttctgtgttggcaagggagagtgcccaaatgagcaagatatcgcagcaaaacagcactccaggggtgaacggaattagtgttatccatacccaggcacatgccagcggcttacagcaggttcctcagctggtgcctgctggccctgggggaggaggcaaagctgtggctcccagcaagcagagcaaaaagagttcgcccatggatcgaaacagtgacgagtatcggcaacgccgagagaggaacaacatggctgtgaaaaagagccggttgaaaagcaagcagaaagcacaagacacactgcagagagtcaatcagctcaaagaagagaatgaacggttggaagcaaaaatcaaattgctgaccaaggaattaagtgtactcaaagatttgtttcttgagcatgcacacaaccttgcagacaacgtacagtccattagcactgaaaatacgacagcagatggcgacaatgcaggacagtagacctcaccctttccagactttagagcttgtggcttgaatgttaaaggtgtgaccaccgacaccactcatgtcaatggctgaaagttgtccatttccatgactcaaagacccattggaggctattttctgggatcagcactgaagagttgattagctaaaaatgttagccttgtaattcgaatatctggttttaaatgatagaggtttttgtgggaatcaaaatcccccaaatgttaaggtatatggtaaaaaaagaaatatctgggatcccgatgttcttaataaatcctgacttcccaagaaatgcttcttttttaa

SEQ ID NO: 240577 - DNA, 1368 bp, Homo Sapiens
ttttacattgttgatattatacgttttcaaataaatattcatataaatgtctataggtcttatagttctgttgtaggctacacatgaacagcaaccaaaaagaggaaaaatcttctttgtccccatgctttttcgttgaattctgcacttttcatattaacattagcccttgctttgtgatttgcctttgctttattttaccctgtcttaatcttaaccttcccaaatatttccatacagggtgcacctctcctagacaacacacagcggagagtgtgcttcccatgtattcaatcttcgtctcttgaaaggagaggtgccctcattacatttcactgtgacacaggatacccttggttttctgtcacaatgtgtcttgctgctgtctcctctgataagcaccacactttctttcccttctctgcccttagacagcagaaaggtatacatacccatttatagttctgaagctgttcacgtttttaagcttaactttgctattcatttcaagaataaaacttgacatttttacactgagagaaaaattcttgttttattctaaggggagaatctcaatactcaagataaagaaattcacacattttattttctacactcaacagcaacacaatgggaagagtcttggatttcaaatgctattgctcagactgtacatttcctaagaactgacgtgtgcactggctcctaaccacatgcacaacagcgaagtcttgactgtttctaaatgacccgattccattaacagtcctgttacactgcaactgctgttcttggacttattacaggtccatagtctctcaatcacaaatgttgaaaccaaaaaatcccaaacccaattttttttccctaaacttaatgccaaaagtaatttagcaacataactgacctgaactgatgtaaagctatttacagtctcatttgatcccacttagatatattttgctgaaaagtaccaatgtagtaactagtggtattaataatatatgtaccatattatctaaaatttgaaatagcctgaatccaaagcacagcgtgggttaacatacataaatactagcactgaccactgaaaccctagtataacaaaaccccagtaacaataagtccaccaagtgtctgcatgttggattctatataccatcctctaacaaaagaaaccagggctctctggaggaggagtcgattccagggcagggacagggataatacaagagcctggtggtgctaggaaggaaggaagtgctcaaaacaaaaagccaggatggagaatgttgatggggcacaagaatccaactgaaggattggccacagctggaagaactggagcaacaaaataaatggtgccaa

SEQ ID NO: 240578 - DNA, 1591 bp, Homo Sapiens
  misc_feature (56)..(64): n is a, c, g, or t
  misc_feature (984)..(996): n is a, c, g, or t
  misc_feature (1038)..(1182): n is a, c, g, or t
aaaccagcctgggcaaaacagccaagacaagaccctgtctcttttgtttccttttnnnnnnnnngataaactgagcttgacaaggtagggtgaaacatgcaaaattcaattacaacgaaagaggacagcacttggaacaaatctccccaatcgctaatctgacaaagtctgtcaaggccaataactcttacctacatcaagacagtttacgcccgtttagtgaacagaaccaatccctgagattgtgcaactccaataattaagttttccttatcaactaatctatcacacaaaagatggctgctgagtaagcccagaaggacagatgcaggtaaaacacagggaggccaaacgatgtctccaggaccctttaagagcccctggcaaacgcaggaagctctgccttacaccacagctggagggaaggttccagagcacacacctcatgcgtttcctcgctgctccagttttgcgacggtctgtctcaggctctttgccactttcaagttctgggttttttgtagataagaaacaaacttgtctgtctatatttctctaaaaacctgatgaatgcttactaaagttataaatgaaattcaaaatacttaccgatggaagaatttctctaatctttctttcagaagcttgacgcctccgtctccatggctttcagaaatgtaccattaaaaagctagtgaggtaaaagattgcaggaaaaaaaatcagtttcctatgctcactttttcagtataacaagttctttttttcctttagattattaattcagctcattaaatctcccagttctttccaacagagaatatttacatgagaaaacttgagttaaaaatgtaagttacaaaaaatactgttaagtgatgctgttttatttatgaaaccacctaattgctctaggcatctttcaaaaatttcaacttaccctgaagtttcaatttacatacataatatcacccacatttctgnnnnnnnnnnnnncagtgttctgttaataaatggaatcaccaaactttttatccnnnnnnnnnnnnnnnnnnnnnnnnnnnnnnnnnnnnnnnnnnnnnnnnnnnnnnnnnnnnnnnnnnnnnnnnnnnnnnnnnnnnnnnnnnnnnnnnnnnnnnnnnnnnnnnnnnnnnnnnnnnnnnnnnnnnnnnnnnnnnnnnntccctcactgaaacttttaaatcataaaattatctgcattctgtacattccttgagcacatagacacactttttcatcaatggggacacattcctactataaggctgagaaaagagaagggagttcaatacttactgaataaatgtaggcataaacctcactacctgtttcaaaggcctcattattttcttctctaagacaaatacagagtcactttgcagtcatttacagatttttctttaaacaaccctggagcctagagataggggtaagtggctggactctgagttgaaaaagaacgccacgcttaccttgtacatgctgtagcactgccgcagcaccgagctataaaccttgtcctgcagacgcgaaaacacagcacacagctcagttcaagggaaaaacccaa

SEQ ID NO: 240579 - DNA, 1004 bp, Homo Sapiens
  misc_feature (118)..(128): n is a, c, g, or t
ttggtttctttctgaggcatcgtgctttgcatgagagcaggccaaggttgaggggaaaagtaaagttaaagtcggttctctttcatagcaacacgtattgtctgacattcagccagcnnnnnnnnnnnctaataatttctgtgcctttctgtcctgtatttactgtatttagaaaaagcagctagaatatttctccattaactcttgagattcacaggactgtctagctctgagtcctagcaatagactccttagaggagtagtacgtttatctagattttctctagataatgcaggcggaagacctgggttcccgggtggggcattgcagttcttcctgtgtttggcttccaggaattacatgaacgacagccttcgcaccgacgtcttcgtgcggttccagccagagagcatcgcctgtgcctgcatttatcttgctgcccggacgctggagatccctttgcccaatcgtccccattggtttcttttgtttggagcaactgaagaagaaattcaggaaatctgcttaaagatcttgcagctttatgctcggaaaaaggttgatctcacacacctggagggtgaagtggaaaaaagaaagcacgctatcgaagaggcaaaggcccaagcccggggcctgttgcctgggggcacacaggtgctggatggtacctcggggttctctcctgcccccaagctggtggaatcccccaaagaaggtaaagggagcaagccttccccactgtctgtgaagaacaccaagaggaggctggagggcgccaagaaagccaaggcggacagccccgtgaacggcttgccaaaggggcgagagagtcggagtcggagccggagccgtgagcagagctactcgaggtccccatcccgatcagcgtctcctaagaggaggaaaagtgacagcggctccacatctggtgggtccaagtcgcagagccgctcccggagcagagtgactctccaccgagacaggcctcccgcagcgctcc

SEQ ID NO: 240580 - DNA, 1390 bp, Homo Sapiens
  misc_feature (861)..(880): n is a, c, g, or t
gcacagaacactcccagaacccagaatctgctgtcatctgagtgctgagcaacttacataaccatcagcttttagacgaacttacacatttcctatttgacagaaatctcttccacaatttggtcactacatttgacttgctatttcaaaagaagtccacatgtcatgaaacaccaaccaatttttatcaatcacttaccaatatgaggttaagaagttaagacaaccatttttacagataaaacacatgaatccaatgaccttcctcacagctgaaatgctgcctccgccgcagcaacttggccggcccgtgctggaagggtctgggtgtctccttgggaggatgtgcacctggaacacgggttgtgcacaaatcacaccaggcactgtatgcgcccatcctgtcagaaggaagctggcctcccccaccccatggaagcctcgacgccataccccagtgctggacacctgccaccctgaaccgaaacggcccctgacctcaggggctccctccaccacctcagctgggccttgctgcgggcaggtggcccggaccttggtgcctcgtgtgcccagcactgtgcctggcacatggtggatactcaggtcagcgtgctgcactgaagctgtgtgttcggggaaaggttgctcagaacacagatcgctttgtatttagagaaaaatggaaggttttggtcaattaaagagagaccatgaggtatgagagttgattttcactgacgtctaaaagaactttgcatagtggaaatggtttttctgccatatctaatacctaaaaaatggacacaatttcataaaacatcacgcattttaaaaatacaaatgaggtatagggattcnnnnnnnnnnnnnnnnnnnnaacgcactcacacaacctgaagttagacagttcccgacacttgagctcctcctcccttgggaagagccatccggaagcggctcttgttcaggacgtggacgcaaccagggccggctgggagcggcgttgtcaacacacacccttggccctcggcaggtatcagatacacaatgggatgaaggaggttttttcacatttggttcacaactaggcagtatgtgtgcaagtgacagctgaaagcaaatctgtttctaaatgtggcttatgaatgttctaatcaggtgtggaaggagctgacacacggagagtcacaggctatacagctgcttcgagcagcgggaatgtttgtcttgggattagatgctgacgtgtggtgaaatgttacagagagcccagaggaaggaggagttcagaggttcccagggaagaggccgggggcttgcactgcacccccagacagtgtccctgtgaacgctctcatcaaaggttcccaacttttttgtacaaagt

SEQ ID NO: 240581 - DNA, 969 bp, Homo Sapiens
actttgtacaaaaaagttggcgcgcgttgggcatgtgtagcgcggctctgaacgcgctgagggccgttgagtgtcgcaggcggcgagggcgcgagtgaggagcagacccaggcatcgcgcgccgagaaggccgggcgtccccacactgaaggtccggaaaggcgacttccgggggctttggcacctggcggacgctcccggagcgtcggcacctgaacgcgaggcgctccattgcgcgtgcgcgttgaggggcttcccgcacctgatcgcgagaccccaacggctggtggcgtcgcctgcgcgtctcggctgagctggccatggcgcagctgtgcgggctgaggcggagccgggcgtttctcgccctgctgggatcgctgctcctctctggggtcctggcggccgaccgagaacgcagcatccacgacttctgcctggtgtcgaaggtggtgggcagatgccgggcctccatgcctaggtggtggtacaatgtcactgacggaaacagcaataattacctgaccaaggaggagtgcctcaagaaatgtgccactgtcacagagaatgccacgggtgacctggccaccagcaggaatgcagcggattcctctgtcccaagtgctcccagaaggcaggattctgaagaccactccagcgatatgttcaactatgaagaatactgcaccgccaacgcagtcactgggccttgccgtgcatccttcccacgctggtactttgacgtggagaggaactcctgcaataacttcatctatggaggctgccggggcaataagaacagctaccgctctgaggaggcctgcatgctccgctgcttccgccagcagagaatcctcccctgccccttggctcaaaggtggtggttctggcggggctgttcgtgatggtgttgatcctcttcctgggagcctccatggtctacctgatccgggtggcacggaggaaccagga

SEQ ID NO: 240582 - DNA, 930 bp, Homo Sapiens
ttgggaacgcgctgacggccgttgagtgtcgcaggcggcgagggcgcgagtgaggagcagacccaggcatcgcgcgccgagaaggccgggcgtccccacactgaaggtccggaaaggcgacttccgggggctttggcacctggcggaccctcccggagcgtcggcacctgaacgcgaggcgctccattgcgcgtgcgcgttgaggggcttcccgcacctgatcgcgagaccccaacggctggtggcgtcgcctgcgcgtctcggctgagctggccatggcgcagctgtgcgggctgaggcggagccgggcgtttctcgccctgctgggatcgctgctcctctctggggtcctggcggccgaccgagaacgcagcatccacgagaatgccacgggtgacctggccaccagcaggaatgcagcggattcctctgtcccaagtgctcccagaaggcaggattctgaagaccactccagcgatatgttcaactatgaagaatactgcaccgccaacgcagtcactgggccttgccgtgcatccttcccacgctggtactttgacgtggagaggaactcctgcaataacttcatctatggaggctgccggggcaataagaacagctaccgctctgaggaggcctgcatgctccgctgcttccgccagcaggagaatcctcccctgccccttggctcaaaggtggtggttctggcggggctgttcgtgatggtgttgatcctcttcctgggagcctccatggtctacctgatccgggtggcacggaggaaccaggagcgtgccctgcgcaccgtctggagctccggagatgacaaggagcagctggtgaagaacacatatgtcctgtgaccgccctgtcgcccagaggactggggaagggaggggagactatgtgtgagctttttttaaatagagg

SEQ ID NO: 240583 - DNA, 1396 bp, Homo Sapiens
agtgaaagtgcatacactttattatgtacattgttggaaagggaggccacctggagaaacttctgcactggcactgtgttcctagagctccttctatgcgtccctcccaagtgatttaatttcagctgattggactacgaattcacaaggcagaaaagtcaaggtcatttggtatctggagacaggagaactcaaggaaccaaaagcactgttactctaagtctcagaaaaggttttcagtcaggatatggaggctcctggtcctcaagggtgaaccacttcacacaacagataaaaccatcattttaaaattcaaaatgtaagtgcaacttgagtttaagttgcactgctccatacctctaataaactcagctaggagccaggatacatggtagttcaaggcttcctaaaataagcttgaaattggggtacaggggaagggacatccattggctggatggacagagtggttgagctaaagagagctataaaggctcgtgctgggaaagaaagctgttatgcttagacttctctaggtgaactcagagtctcaaagaggaaatgttacaaatgtcacccgccagctttctggccagtaagcagaatgccaggttgctcagattcacagacatttgcaaaacagaagatgtctcctaatattatagactaagaatttgttgtccagaggagctgaccagttcctctttcagcatcaatatacatgatagaagaatgactaggtaaatttaaaaagacctacatctatatagatattgtaagtttgacagtatctgcccaagatcattagacactatatagtcaatatactgtgaattccttatactatgtaatgaatgggtttgtaatcaacatatttcacagtgtaccacagttaacagcatgcagatagtaaaatataatggtttcctgaagttatctcttaaaaaagtattttagtccttcagctattcaaatagatatataacaattgcatatagaacgtagagaaaattttattaaaaaattaaaactatttaaaacctgatatatgaaaataggcaacagtgagaaaaaagcacttttgtgacaaatatttagctggtttgaaagacagaacaaggaggaatcatttactcataaagaaggctcaaataagttaaaacatggatgtatttttaaaatgaccactctagtagtgaatttaaaagtcttttaagggttagagtaatctttttcattagtcttggctatttcctctagttctgacaagtacaggcaagaaaatggctactctcaagtaaggattattctgaaacacggtctggatttagaaaataaatgaacattagggaaatttccttaattaagactctccaaaccaggtgtggtagctcat

SEQ ID NO: 240584 - DNA, 923 bp, Homo Sapiens
  misc_feature (515)..(524): n is a, c, g, or t
tcaatttctcacaaaaacttcaagcagtagaagaggtaacatttcttaattcatctattggccaataatacccaaaggagacaaaagaatcacaagatgattacaaaacaacatcctatttaaatttagacacagaaattctcagaaatatttaaaaaaagaatacaaaaaggtataaggatgattacataccatgactaagcagggtattttcacaatgcaatgttcatttaatatgatacaatattacttgaacaaagtaaaaatgtaataattgaaatagaaaaagtttggtaaattcaacacctacgaatgatagaacaccaagaaaactattagaagaaaacttttgagacctgctaaaagtcctccatgaaaaaccaaaattggcccggcgcagtggctcacacctgtaacccagaactttgggaggctgaggtggaaagactgcataaagccaggagttcaagaccattctggacaatatagggaatccccatctttacaaaatattnnnnnnnnnnttatctgggcatggtggtgcatgcctattgtcccaactactcaggcagttaaggtgggaggatcacttgagcttaagaggttgaggctgcagtgagccaagatgaaaaactccacaccaaaagctaatatacttaatggtgaatgactaggggctttatctgcaagtttgaaaacaggacgagaatttctacttataccactattcaccattgtactggaggtatgagccagaaaattatactagaaaaatcaatacaatctccagattagaaaagaagtggaatagtcttttattgccataatgttgtattttaaaagtataagaaattcattaaaaacctacttgaggctgggcatggtgactcacgcctgtaatcccagcagaaaagaggagccaa

SEQ ID NO: 240585 - DNA, 1212 bp, Homo Sapiens
gaatgaaagcaaaacaaagatattttactttgacccccgatttcccagtcttgttaatgccagtcactccccaccagaatgctggctgaagaccaacccacagaggactaaggcaatggtgccaatatgaaagggttctttttaattgtttttaagagcaatactttacagactgtcttgttgtcaaacaaggaacatggcactgcttaaacaccaaactgggaaaggctgcaaagagagcctgggctctccctgtgggagctcttcctctccctggtttggggcaatgagtcccacatctagacaggcttccccaacccttggctcagaaataggctgtgcttcaaaggagaagaccaagagatggacttgggccacatcagcttggtggctggttgaggccacaggttctcaagagagaacagtcagcttatttatcaaacaggatctgatactgactgcagtttaaaatccatgctacacctaagtggtgctgtggtccttttgcctttgtacccttcagtggccaatgccaggaaggggttacaggtggtggaggctgcaatgggatgggacacctctgtttctgaccctgtccgagtttgtagcttagcagtgagcatattctgagcataggcacagtggcaaagaacagtgtaacagccgctggtcaattccatttggtggcagcgcggtagcagcaaggaaaattcccaaacagctccatgtgtatccagcttttggaaaggaaagatttaaaaatcaataaacagatttcttttatatccaagggttttagggtttcttgtaactgctctacccaaacaataacaacaaaaaacacaaatgtatggcagtagtgtgagagcagaagtgacaggatgtcacttttcaaggagaaaatgtgacctcaagacaaacttgtcaccatcagaaataataatataaaataatctattgtttcctaaagtgttgagccacacaattgcagatacattccaaactgggtcaaaaatgagtggagacaatgacatagtcatgaaatcctcctatcaggagcctgaccctgcagcatgccacaggttgtcagagcagtcacacctgttgggggacaggctcctgtgactcactcccctccctcagcaccccccgccacacacacacacgctaccaggttctagaaaattgtcatgttcatcttcttatagccaa

SEQ ID NO: 240586 - DNA, 566 bp, Homo Sapiens
aagtctttacttttaaatgtggtaacttgaagctctaaatatcaagaatttttgaacaagagacacttcagcacacatttagaagtaaaatataaccagtcgcctttggatttacctccactactcaaatactagaatactgaggaccgtagcctgaggaccatagccagctggtccttaatgtcagccaatccctggcaccctggaatcaatgtatcatattcactaatcttcctattgcccagaatcttagcactatttcaccaattcagtttggtgatgctgagagaattgattctagggataaagactactaagaatgcacaatgtactaattccaatttcaaatactagcactgaagaatgccattctaaatatattaatgttatgcttaggcagttttatccatagttttggtcactaaaatcgtccaagtagagcaatatcaaaaacttatttcattataaaaattagacttcgctaattctgtcttttaaaaaccccaattaaagttcatttactgtaattaacaaacaaatatatgacttaagaactaaagagccaa

SEQ ID NO: 240587 - DNA, 974 bp, Homo Sapiens
ttgggtttttaaaacctagttgttaaattttgttcaagacattaaattgaaatagtgagtataagccaacactttgtgataggtttgtactgtgcctaatttactttgtaaaccagaatgattccgtttttgcctcaaaatttggggaatcttaacatttagtatttttggtctgtttttctccttgtatagttatggtctgtttttagaattaattttccaaaccactatgcttaatgttaacatgattctgtttgttaatattttgacagattaaggtgttgtataaataatattcttttggggggaggggaactatattgaattttatatttctgagcaaagcgttgacaaatcagatgatcagctttatccaagaaagaagactagtaaattgtctgcctcctatagcagaaaggtgaatgtacaaactgttggtggccctgaatccatctgaccagctgctggtatctgccaggactggcagttctgatttagttaggagagagccgctgataggttaggtctcatttggagtgttggtggaaaggaaactgaaggtaattgaatagaatacgcctgcatttaccagccccagcaacacaaagaatttttaatcacacggatctcaaattcacaaatgttaacatggataagtgatcatggtgtgcgagtggtcaattgagtagtacagtggaaactgttaaatgcataacctaattttcctgggactgccatattttcttttaactggaaatttttatgtgagttttccttttggtgcatggaactgtggttgccaaggtatttaaaagggctttcctgcctccttctctttgatttatttaatttgatttgggctataaaatatcatttttcggtttattcttttagcagtgtagttaaaacgacctccactgaactgggtttgacctctgttgtactgatgtgttgtggactaataaaaaggaaag

SEQ ID NO: 240588 - DNA, 1504 bp, Homo Sapiens
ttggttgtctctaaaataattagaaaatgattaattatgtttttaatataatttaattgtaattttatgcaactgaattcttagtagtggctgtgtttgacaactgatttgtgaaattcatagaaatttgatggttggccttgcaagagagtacagccaactccattgcatcactgtaaaacctcctagctgacggttctactccttgattgaaaattctctcttttttgttttagttcaaagctggagactggatactgacatgttcatgaccttgtgtacaagctgaaagctgctgaaagctacaggccaatggggctctgctttacttctgccttccatatcttgtgtcctgcatcttaatggtggaatcagatttgcatccagaatactagctataaaggagtctggaaaagacagtttttagttttccaacttctgcgtttcaggaaggcatactacaaggaggaagtcgctgagtgatagctgatcctttcccaggcactcatcttcttaaacatagtatattaattacaatttagcccattcttgatggctcattgtcatttctgtgagcttctcttttcataatggcctgtagttggaataatcatagggccaagggattttaacatctgtagtaactttttgtcctaggttagcttgtatctctcccacctcccataactgctgctgagacatctatgtttgatatcatttgacgtcaacctcccctgcaagccacaggcagggagagcacctcacccaaagcaaccagtttattggctggtcagcaacctgtgatttctgtagcttaaaaagatgagtggggcttattgtcttttgaactgggacaaaaaggaaagaatttccaattgggggtgggagcttcagctgagaggttttgaagtgagttggctgtattcttttgcaggaccaattgttgaattttcgagaattttgtgagttgtcaaacagccatttttaagaattaagttgcataataatttaataaaaacaaagataaatactcaaaacaaattatttcctaattatttgcccacattttacaattatctatgcttttgaatttctttatatctactatatctgtatggtagaaacactatatagtggtttgctactgtgcatatcttcccagctcccttttcactgttatcacagttgactatggtggtagttgttggcatttcctgaacatatcacactgattgtgggggcggggagggagaatcaaagttggagaggtcatgagaaaccatgtacaaactaaaattatgggagaagaaactatgagtgaaacgatgagaaaaacctaatgcatgatgtagaactgagtggtgttaatagcagagcactggagggaagggccacaaaactcttcacctcaaggtctagaatcattctagaatcatcctacaagcctagttttcatgagattcagccctattttaatttcttgctcttggaattatatgaaatt

SEQ ID NO: 240589 - DNA, 1128 bp, Homo Sapiens
  misc_feature (1080)..(1099): n is a, c, g, or t
ttttaattttggctttgtccggtacatcaccagttacagctacagaccaggtagagaatattacgcatgttctgcttgccacccacctgaaagacgtaactagtcatttatcctattttatgttgtgaaggaacagctacagcagctctaaatactgtaacaatttaattttgccaacatccaacttacttacagtcgtaatagaggcttttaccagcacaatgacccctattcgtagtcattctgccaggtggttaggctatgtgggttacacagcttaaaaaaggtctgccttttgtaaaaagttctctgtacatagtttggtgtttcttcatatggaagaaatgagttacggggaaaattcaggtacacacgtaggctcgttcagttgctcaccacagccatctcaacagatgaaagtgctctttgttggaaacagcttcctcctcacaccagttctccacaggcagcctcatctacaaccctgcaattttgggccagaagtggtggcccctcagaggctctgaagtgcctccagccccgattcaggcacttgccacgtgtgctgcgtaagaagggacccccacccagtgagtcaacataggctcatgtcaagtttgaaaataactggggaaaagtgtatgacaacatcttccagaacaaagtaccttcaccgtattctcacagcagctgcgatctctgaagtctcagcagtgaccaccccgggtctgtcaaccagccaggcaagggggggccctcaggcttcagagggcaagaaaccaaattccgtgcaatttggccataatctctggtagagtgaagcagcactgaacacggtgcctagaaaaacctcctgcacgttcccctgcacaatcaatggaccccaactacagtggagaaatgaagaatccaaccaaatttgggtggtctggacttgctgccagccaggcaatctgcaacactgtgggcagggagttggggggggcggcctgaaatctacccagctgggacaaccacgccctacaatgaaaaagccagcctggctgctgggctcttgtgaaccactaagacctgaaggtnnnnnnnnnnnnnnnnnnnnacaaatgcacccaacttttttgtacaaag

SEQ ID NO: 240590 - DNA, 913 bp, Homo Sapiens
  misc_feature (275)..(283): n is a, c, g, or t
  misc_feature (814)..(823): n is a, c, g, or t
aaaggggaagattcccaaatcaaactggttttgatcttaagaaaggcggcagagttaattcatggcaacatatggtagacaaaatcctcagtaagaatgccatatgatagtgttcgcattgaaagaaggatgaggtgctttcaaatcaaagtctcaactgcttgactctcaggtgtttaaatatggccacacaccatatttagttctagattatatgggatatgagcaaggaattgaaacagataagatagtttttacagatactgtatacagannnnnnnnnccattcatgcaacttttttcttaaaaaaagttaaacatgtgaagccaaaatgcacaatacatttttttaaatattaactaatttttctggtcctccttcacatttgtttacatttcccatgtacataatgtgctaggacaagtatacaagagaagactgattgccaggcaatgagataattttagagaaataagtgaccagacacatagttcttaaaagcagccgcacacgtatttctggagtgtggcaagaggcctcatgaccaatcattcatcaaagaaaaatacaaacagatacaactaaacaagaggaaaatattccattcatttaaactgcataaaatgttacccacttaagatttagataaaatatactcttttatttgggcatccgcttcaagacctcatttgacaggcatgattccatcagaacttcacttcctctagtagtactctgcctccccggtctctgagagaggctagctttttcgtacctctttactggtgattgcatttctaccaaaaaaaaaannnnnnnnnnaacattatgcctaatcatacaatgttcacccaaatacagcaagaaaaataaaaccagagttcagagctgttagggtttcctttttgccaa

SEQ ID NO: 240591 - DNA, 431 bp, Homo Sapiens
ggcaccatggtgttgtccttcaggaagcccagtgagaagttggtgagggcgatgcaaaccagctgcattgcttggtagatcggggttaccagaataaaaaaacatccagcccctgtctggggcctgtgtgcttaccaccctgtaagacaaaggactcagaggcaacccacaagctgtctgcatgtccaggggacctctacccctgcccccaacaaccagcccagcctcttaccggtgggtattgtggggcagggccaggccagctgcataaatcgccagcagtgtcagcaccacagcctcagcctctgccactgggaagtgctgggtggcaacgtgttggcccagcactggcaggacatagagggccagtcccatggcctgtgagatcagcagaggtgggcacgagcgaggccaacttttttgtacaaagt

SEQ ID NO: 240592 - DNA, 1722 bp, Homo Sapiens
  misc_feature (345)..(365): n is a, c, g, or t
  misc_feature (898)..(1213): n is a, c, g, or t
caaatgacattaaatgttcctcattcaaaacatcttgtgggcgttgtggtgttctggtcactgctaccctctcaatgccacacatgagccctcagagtgagccctacagagtttcatccttgtggataagaagatgtgtacttgagaacaagactaaagccatggctgatttccccaaccttttatcgcgaagaactccagttgtaacttttgagagtttttttggcaaaaggaactacatttactcatgccaaatacctatggtcacttctcagtactctttggatacctttattaggagagcttgaattaacaccatggaagaaagcatgaagatgaatgagnnnnnnnnnnnnnnnnnnnnncccattcacactcaaataggaatctctggtagactcaaagagtacagctgatttgccatttcagagtgaaaaggctgcactgtctcaccctgcccccaaagtctaacctatcctattttaactggtattggtaaaaactatttttgcaattccttgccgaaaggaatcaaacggatccctttaacatgtacatatagttccattataatgcaatgcaggtaacactaacttgatttcaagaacattgtcaaaactggggtacacatccttctattagaaatggctgggggacagctgagaataaatttatggaattacaaattatgggaatactggactaagtcaagaatggttaccatgtagccatttttaccagctattctagagtcccttcacacataaacttgaccctgcattccgggaaaagtacctctgggttgtcactacagagtaaggctggggtcctgccaaccttccttcatcctttcttctagttcataatagggaaggtgagccatttcattcattcatgnnnnnnnnnnnnnnnnnnnnnnnnnnnnnnnnnnnnnnnnnnnnnnnnnnnnnnnnnnnnnnnnnnnnnnnnnnnnnnnnnnnnnnnnnnnnnnnnnnnnnnnnnnnnnnnnnnnnnnnnnnnnnnnnnnnnnnnnnnnnnnnnnnnnnnnnnnnnnnnnnnnnnnnnnnnnnnnnnnnnnnnnnnnnnnnnnnnnnnnnnnnnnnnnnnnnnnnnnnnnnnnnnnnnnnnnnnnnnnnnnnnnnnnnnnnnnnnnnnnnnnnnnnnnnnnnnnnnnnnnnnnnnnnnnnnnnnnnnnnnnnnnnnnnnnnnnnnntttggtgagattgtcacagacttggctgaaacttaacaagaaactgtttacagcaacaaaggaagcaattaaagttaacatgatcattcaactgtgccattcatcatgcacttattgacatgctcaaaataggggaatgttaagtaaggaaatgaagtgggaacaggaacaagggagctaagccaagaggacttccagggacttgaacaaaaacattccaaccacatactacttttcaagcattttgaaactcttcttttcctttagtgatgttttcagtaacaaacttgcaagtgttcttggtggttaaaaaacaaaacaaaactacaagtatcagctgagaaagacaaagaaaaaactaagaatttaaattagataattccatttaaagtttccaattcctcgtttaggtggagttggaacattagaactcaggggtggtttggatattaacaaggtactcctgcctcctcagaagctacagtcttttctgcagctctcttatccaa

SEQ ID NO: 240593 - DNA, 740 bp, Homo Sapiens
  misc_feature (583)..(603): n is a, c, g, or t
taagaagtatgcaaaaattgttaagattgactttcatgtttccccccctcctttctcttgttcacagcccgagattatgtgtacattgttttctgaggcctgatgacctcaatactccttctggctggagagacctcctcattcagtccattccaaatagtcagcagagggagttcacctcttctccacggaatgagcgtggtccttgtcctttattatttggtttctatctcctaacaaatgacattaaatgttccctcattcaaaacatcttgtgggccttgtggtgttctggtcactgctaccctctcaatgccacacatgagccctcagggtgagccctacagagtttcatccttgtggataagaagatgtgtacttgggaacaaggctaaagccatggctgatttccccaaccttttatcgcgaagaactccagttgtaacttttgagagtttttttggcaaaaggaactacatttactcatgccaaatacctatggtcacttctcagtactctttggatacctttattaggagagcttgaattaacaccatggaagaaagcatgaagatgaatgagnnnnnnnnnnnnnnnnnnnnncccattcacactcaaataggaatctctggtagactcaaagagtacagctgatttgccatttcagagtgaaaaggctgcactgtctcaccctgcccccaaagtctaacctatcctattttaacccaacttttttgtac

SEQ ID NO: 240594 - DNA, 1102 bp, Homo Sapiens
  misc_feature (865)..(907): n is a, c, g, or t
tttgtacaaaaaagttggagccgccctactgattttcctttaatttctctggagtaatactgtaccatactggtctttgcttttagtaataaaacatcaaattaggtttggagggaactttgatcttcctaagaattaaagttgccaaattattctgattggtctttaatctcctttaagtctttgatatatattacttgttataaatggaacgcattagttgtctgccttttcctttccatcccttgccccacccatcccatctccaaccctagtcttccatttcctcccgccagtctccattgaatcaatggtgcaggacatattttccagtcagactaatttccttctttcctcgcacttctccccactcgtcatcttttaactagtgtttcacaaggatcctctgaaaccctctctgtgccccaagtacagatcccattacttctgctttcgtatctcctcaggcaaaagtggagggtgccttatgggccctcctcataggttgtctctgcatacacgaacctaacccaaatttgctttggtgccagaaaaactgagctatgtttgaacaaagatgtcgtgcaaactgtactgtgaacaacagttggtttaaaatatgaggggcaaggaggaggatgcatttcaaaagcttgattgatgtgttcagagctaaattaagaggagttttcagatcaaaaactggttaccattttttgtcagagtgtctgatgcggccactcattcggctccccagaattcctagactgggttaatagggtcatattgtgaatgtctcactacaaaatgacttgagtccagtgaaatctcattagggtttaagaatatttcagggatccttaannnnnnnnnnnnnnnnnnnnnnnnnnnnnnnnnnnnnnnnnnnatcttataatttcagttcatctaaattgtgtgttctgtacatgtgatgtttgactgtaccattgactgttatggaagttcagcgttgtatgtctctctctacactgtggtgcacttaacttgtggaatttttatactaaaaatgtagaataaagactattttgaagatttgaataaagtgatgaagttgcattac

SEQ ID NO: 240595 - DNA, 902 bp, Homo Sapiens
ttggctgacgacgcgggtttggagaccccgctgtgttccgagcagttcggctccggggaggcacggggctgccgcgccgccgcggacgggagcctgcagtgggaggtcgggggctggcgctggtgggggctctccagggccttcacggtcaaacctgaaggacgagatgcgggcgaagtgggggcttccggggccccctcaccgcccctctccgggctccaggccgtgttcctgcctcagggcttccctgatagcgtcagcccggactacttgccctaccagctgtgggattccgtgcaggcgtttgcttccagcctctccggctccctagccacccaggcagtcttgctgggcataggggtggggaacgcaaaagccactgtttcagctgccacggccacctggctcgtgaaagattcaactggcatgctgggccgcatcgtctttgcctggtggaaagggagcaaactggactgcaatgccaagcagtggaggctttttgcggacatcctcaatgacgtagccatgttccttgagattatggctcctgtatacccaatctgtttcaccatgaccgtctccaccagcaacctagccaagtgcatcgtgagtgttgctggtggggccactcgggctgccctgaccgtgcaccaggctcggaggaacaacatggctgacgtgtcagccaaggacagcagccaggagacgctggtgaacctggcggggctcttggtcagcctcctgatgctccctctggtgtcaggttgccctggcttcagccttggatgtttcttcttcctcactgccctccacatctacgccaactaccgcgcggtccgagccctggtcatgggagaccttgaacgaaggccggctccggctggtcctgaaccactaccttc

SEQ ID NO: 240596 - DNA, 2486 bp, Homo Sapiens
  misc_feature (1404)..(1424): n is a, c, g, or t
  misc_feature (1953)..(1963): n is a, c, g, or t
aaaatcaaagagtagttattaaaaaagaatcaaacagaaactctaagtaccagtgtgtacattgtacacatttaaatgactcacgagaatgaagtttttttcaaatatattaagatcacaccaccttgttgtttatcgaaagatattcaaggagaaagatctgactctccaaactgcatctgagattgccactttaaacagacctcatttcaaacatgcaacaacgccactggtaataaagctttggaatgggtgctcattctattatttcactacaaacagcatagaaagcaagagaagttgggaatttattctaaaatagaatggaggttgtcatctacagcagcactcctcactcctctgttgccatttttagcaagtactccttgtcgatcttgaacagtctccaaccctcttcactggacagatcagaagcacctcttcttttatagaagttgatggatggttcattccattctgctaccaagaagtgcatgctgctgcagcgacacctcattgcaacctggcttagattcttcagaatttctgatcctatgccaaagcctctataatcactcatcacgaagaagtcctcaagatacaataacttgccaatccacgggtcataggtaaaatagtacatggcaaaaccaacaatgctgtgtcctgtaataagagcatcacatgagatgtggagaaggaaaacattccataaaagttgcagctgcagaatcagaggcctatcataggttttaaaaaacacacatgcatgtattacagaaacaagtagccatggctgtctcatgatttttatgtgagtgcagtccaggccactgctggatgatctcactgttctgagaacatgtatttgcaaaaagcacacatcagaactcactgaagtcaggctacaactgtggactggccactctgcagtctgctggagctcacactcaggaagcgagaacgctttcattacttgccagagcaaaactgctatggttttaaactcaacacacacattattcacatcctattggtatactggtatgttgacttgggaatacgtcaggtttacacggcagttcagaatagtaaatatttggaagtttacaaactcttgcttccttaaaggtcagaacatcaccaaagtacaacgtttaatttcagaactggccttccaatttacgcattttcaatttgctctccccatttgtggagtcagaagaagcagcattgcccagaaacaggtattacgtaacatgcacatactttaaaaagtactcatcccttgttttctgctcatttcttccagcctgaggaacagacgtcagaaaaaaagcaaccacccagacaacttccccttttagctgagctgttttctgaccaatcaacagggaccagccnnnnnnnnnnnnnnnnnnnnnggcatctgacaccctcttaactggtgtctactattccaaatggaggcaaaggtttcaaattaaactttctagccattttatattccttagcaaacagacaggaagcgagtatcatagtgggtttctgatctaccgtgtttgaagtgtgtgataataggaccttacctcatttatcatgatcatctactttattgtgtaaaggatcttttagttacctccccgcccatccatgtacacggaagggccatgtacatggcgaagctagagactgtaacctgaagattgggacaaattaaagaaaaaaatgtgatttaacacaattacaaaaactgttacgttagggtcaaacaagaaccattttatgaaactgaattacaacaaatgacattatatctaactcttccgggtctccacagcacttatacttacttaagcagcttaaacacttccgagtctccacagcactctgatacttacttaaacagctcttttaacctgccctagtattcttaagtgcagcatatctaannnnnnnnnnncctcagtagtttgaacacttgctggctattttttctgtccaagttctcagtaacttcggcctgtgtagtcagtggttctacacagccgacactacttcttacataacacttggtctctctggcttctggaaagggcgaggggttaccttccggagtccagtgctctttcggcacttctgcaaccaggcagtggtaaaaggggtgctctccaaaaccatcttctagcagatctttttcagttaagattacttgttcttccatgtattcatatttagccagctccttgatcagccgcagtatgtcactgcagtcggcggcagtggctgggcggatcacgaatttagccattttcgtcttttgcttttcttccctttgcggaccaggcccctgtacttgaacagtaggaggaggtggttcctcattcgtctcccgggagcgtcctcttctcagtcaggctggcaccatgacccaaggaacctcggcgagtgacggataaacaccagtcagcccgcgactaagccaa

SEQ ID NO: 240597 - DNA, 1228 bp, Homo Sapiens
  misc_feature (179)..(201): n is a, c, g, or t
  misc_feature (730)..(740): n is a, c, g, or t
gaagcagcattgcccagaaacgggtattacgtaacatgcacatactctaaaaagtactcatcccttgttttctgctcatttcttccagctgaggaacagacgtcagaaaaaaagcaaccacccagacaacttccccttttagctgagcggtcttctgaccaatcaacagggaccagccnnnnnnnnnnnnnnnnnnnnnnnggcatctgacaccctcttaactggtgtctactattccaaatggaggcaaaggtttcaaattaaactttctagccattttatattccttagcaaacagacaggaagcgagtatcatagtgggtttctgatctaccgtgtttgaagtgtgtgataataggaccttacctcatttatcatgatcatctactttattgtgtaaaggatcttttagttacctccccgcccatccatgtacacggaagggccatgtacatggcgaagctagagactgtaacctgaagattgggacaaattaaagaaaaaaatgtgatttaacacaattacaaaaactgttacgttagggtcaaacaagaaccattttatgaaactgaattacaacaaatgacattatatctaactcttccgggtctccacagcacttatacttacttaagcagcttaaacacttccgagtctccacagcactctgatacttacttaaacagctcttttaacctgccctagtattcttaagtgcagcatatctaannnnnnnnnnncctcagtagtttgaacacttgctggctattttttctgtccaagttctcagtaacttcggcctgtgtagtcagtggttctacacagccgacactacttcttacataacacttggtctctctggcttctggaaagggcgaggggttaccttccggagtccagtgctctttcggcacttctgcaaccaggcagtggtaaaaggggtgctctccaaaaccatcttctagcagatctttttcagttaagattacttgttcttccatgtattcatatttagccagctccttgatcagccgcagtatgtcactgcagtcggcggcagtggctgggcggatcacgaatttagccattttcgtcttttgcttttcttccctttgcggaccaggcccctgtacttgaacagtaggaggaggtggttcctcattcgtctcccgggagcgtcctcttctcagtcaggctggcaccatgacccaaggaacctcggcgccaa

SEQ ID NO: 240598 - DNA, 1363 bp, Homo Sapiens
  misc_feature (362)..(381): n is a, c, g, or t
  misc_feature (910)..(920): n is a, c, g, or t
gttgactggaatacgtcaggttttacacggcagttcagaatagtaaatatttggaaagtttacaaactcttgctttccttaaaaggtcagaacatcaggccaaaagtacaacgtttaatttcagaactgcctttccaatttacgcattttcaatttgctctcccccatttgttgagtcagaagaagcagcattgcccagaaacaggtattacgtaacatgcacatactctaaaaagtactcatcccttgttttctgctcatttcttccagcctgaggaacagacgtcagaaaaaaagcaaccacccagacaacttccccttttagctgagctgtcttctgaccaatcaacagggaccagccnnnnnnnnnnnnnnnnnnnnggcatctgacaccctcttaactggtgtctactattccaaatggaggcaaaggtttcaaattaaactttctagccattttatattccttagcaaacagacaggaagcgagtatcatagtgggtttctgatctaccgtgtttgaagtgtgtgataataggaccttacctcatttatcatgatcatctactttattgtgtaaaggatcttttagttacctccccgcccatccatgtacacggaagggccatgtacatggcgaagctagagactgtaacctgaagattgggacaaattaaagaaaaaaatgtgatttaacacaattacaaaaactgttacgttagggtcaaacaagaaccattttatgaaactgaattacaacaaatgacattatatctaactcttccgggtctccacagcacttatacttacttaagcagcttaaacacttccgagtctccacagcactctgatacttacttaaacagctcttttaacctgccctagtattcttaagtgcagcatatctaannnnnnnnnnncctcagtagtttgaacacttgctggctattttttctgtccaagttctcagtaacttcggcctgtgtagtcagtggttctacacagccgacactacttcttacataacacttggtctctctggcttctggaaagggcgaggggttaccttccggagtccagtgctctttcggcacttctgcaaccaggcagtggtaaaaggggtgctctccaaaaccatcttctagcagatctttttcagttaagattacttgttcttccatgtattcatatttagccagctccttgatcagccgcagtatgtcactgcagtcggcggcagtggctgggcggatcacgaatttagccattttcgtcttttgcttttcttccctttgcggaccaggcccctgtacttgaacagtaggaggaggtggttcctcattcgtctgcccgggagcgccaa

SEQ ID NO: 240599 - DNA, 978 bp, Homo Sapiens
  misc_feature (158)..(181): n is a, c, g, or t
  misc_feature (517)..(536): n is a, c, g, or t
ttggcttccaggcacggtttggaaatattcacatcgcttctgtgtatctctttcacattgtttgctgctattggaggatcagttttttgttttacaatgtcatatactgccatgtactagttttagttttctcttagaacattgtattacagatgccnnnnnnnnnnnnnnnnnnnnnnnnatgtgatcaattttgacttaatgtgattactgctctattccaaaaaggttgctgtttcacaatacctcatgcttcacttagccatggtggatccagcgggcaggttctgcctgctttggcgggcagacacgcgggcgcgatcccacacaggctggcgggggccggccccgaggccgcgtgcgtgagaaccgcgccggtgtccccagagaccaggctgtgtccctcttctcttccctgcgcctgtgatgctgggcacttcatctgatcgggggcgtagcatcatagtagtttttacagctgtgttattctttgcgtgtagctatggaagttgcatannnnnnnnnnnnnnnnnnnnaacaagtgtgtcttacgtgccaccacggcgttgtacctgtaggactctcattcgggatgattggaatagcttctggaatttgttcaagttttgggtatgtttaatctgttatgtactagtgttctgtttgttattgttttgttaattacaccataatgctaatttaaagagactccaaatctcaatgaagccagctcacagtgctgtgtgccccggtcacctagcaagctgccgaaccaaaagaatttgcaccccgctgcgggcccacgtggttggggccctgccctggcagggtcatcctgtgctcggaggccatctcgggcacaggcccaccccgccccacccctccagaacacggctcacgcttacctcaaccatcctggctgcggcgtctgtctgaacacgcgggggccttgagggacgctttgtctgtcgtgatggg

SEQ ID NO: 240600 - DNA, 2059 bp, Homo Sapiens
  misc_feature (180)..(218): n is a, c, g, or t
  misc_feature (1255)..(1291): n is a, c, g, or t
  misc_feature (1897)..(1920): n is a, c, g, or t
tagtatttgcataaccctgagcggtgggggaggagggttgtgctacagatgatagaggattttataccccaataatcaactcgtttttatattaatgtacttgtttctctgttgtaagaataggcattaacacaaaggaggcgtctcgggagaggattaggttccatcctttacgtgttnnnnnnnnnnnnnnnnnnnnnnnnnnnnnnnnnnnnnnnttcagcaaaccatttttaaagtagaagagggttttaggtagaaaaacatattcttgtgcttttcctgataaagcacagctgtagtggggttctaggcatctctgtactttgcttgctcatatgcatgtagtcactttataagtcattgtatgttattatattccgtaggtagatgtgtaacctcttcaccttattcatggctgaagtcacctcttggttacagtagcgtagcgtgcccgtgtgcatgtcctttgcgcctgtgaccaccaccccaacaaaccatccagtgacaaaccatccagtggaggtttgtcgggcaccagccagcgtagcagggtcgggaaaggccacctgtcccactcctacgatacgctactataaagagaagacgaaatagtgacataatatattctatttttatactcttcctatttttgtagtgacctgtttatgagatgctggttttctacccaacggccctgcagccagctcacgtccaggttcaacccacagctacttggtttgtgttcttcttcatattctaaaaccattccatttccaagcactttcagtccaataggtgtaggaaatagcgctgtttttgttgtgtgtgcagggagggcagttttctaatggaatggtttgggaatatccatgtacttgtttgcaagcaggactttgaggcaagtgtgggccactgtggtggcagtggaggtggggtgtttgggaggctgcgtgccagtcaagaagaaaaaggtttgcattctcacattgccaggatgataagttcctttccttttctttaaagaagttgaagtttaggaatcctttggtgccaactggtgtttgaaagtagggacctcagaggtttacctagagaacaggtggtttttaagggttatcttagatgtttcacaccggaaggtttttaaacactaaaatatataatttatagttaaggctaaaaagtatatttattgcagaggatgttcataaggccagtatgatttataaatgcaatctccccttgatttaannnnnnnnnnnnnnnnnnnnnnnnnnnnnnnnnnnnnaaccttctgcctttgatgttacagatttaatacagtttatttttaaagatagatccttttataggtgagaaaaaaacaatctggaagaaaaaaaccacacaaagacattgattcagcctgtttggcgtttcccagagtcatctgattggacaggcatgggtgcaaggaaaattagggtactcaacctaagttcggttccgatgaattcttatcccctgccccttcctttaaaaaacttagtgacaaaatagacaatttgcacatcttggctatgtaattcttgtaatttttatttaggaagtgttgaagggaggtggcaagagtgtggaggctgacgtgtgagggaggacaggcgggaggaggtgtgaggaggaggctcccgaggggaaggggcggtgcccacaccggggacaggccgcagctccattttcttattgcgctgctaccgttgacttccaggcacggtttggaaatattcacatcgcttctgtgtatctctttcacattgtttgctgctattggaggatcagttttttgttttacaatgtcatatactgccatgtactagttttagttttctcttagaacattgtattacagatgccnnnnnnnnnnnnnnnnnnnnnnnnatgtgatcaattttgacttaatgtgattactgctctattccaaaaaggttgctgtttcacaatacctcatgcttcacttagccatggtggacccagcgggcacgttctgccctgctttggcgggcagacacgcgggcgc

SEQ ID NO: 240601 - DNA, 1237 bp, Homo Sapiens
ttggaagattcatcatttgaacacattttggatttgattatgtagctgacttgactttgtgtgggacagggatttactgatggtaagactgtggagctcagcctctcttttaagatctatctccttggggctccataaggatcatcatggtgattttatcagtgtattcttatatatcagtgagcagacctgatcctaagacctgctaatcacctcctgctcccagctaccctaaatataaatgttcattggaacagttatacaactgatctcatgatacatggcagagttctctgaaaatcatcttagccatcccccatatctccagcccaaatgatgtagaagagtctctcctttgtttaaagatctgagctcattcagcttttctaccttgtctgtcaggaaagtctttaattttcactaaccacctcaccctcactcctacctccctgttctccacaccttctgcaatatgggatcctgattgtctctcacccctttcttctgatgctgaaaatgagatactgagtccctgcataaggagcatttgagggaggaaaggggcagagccctggctaaatgtagccaaggctcatgccggctttcctggcagatattaccagagtatttacgacactgctgagaacattaatgtgagctatcccgaatggctgagccctgaagaggacctgaactttgtaacagacactgccaaggtagcactgagccaggctgggtgggagcctggggcacacagtgaagatgctagcatttgaggataggagaggtgggccattcagccccctcctcacctaccacaggccctggcagatgtggccacggtgctgggacgtgctctgtatgagcttgcaggaggaaccaacttcagcgacacagttcaggctgatccccaaacggtaagcagatgggccctagctccttctttctatttacacagcaagctgtccctatcctcccttgccctagtgtcccaaaccttggaattccacatgactgttgatgccggtgagaatgcctcatgccccagagagctcttgggtgggcctcatctgcatcttatgagccagctactgtctcccaactccagtctatctggccagtctggttcctgccccatgactgggtctccactgataattctttccctgggctcccttcaagtcacagggttttctctctttactgttccatcctagttacccgcctgctctatggg

SEQ ID NO: 240602 - DNA, 1879 bp, Homo Sapiens
ccaactttgtacaaaaaagttggctggggctgacccgggaagtcggggtctccttcgccttctgtctttctgcgtcctactagcaggtttgtgcaggggaaactcagtggagaggaagatatatatccccttaaataaaacagctccctgtgttcgcctgctcaacgccactcatcagattggctgccagtcttcaattagtggagacacaggggttatccacgtagtagagaaagaggaggacctacagtgggtattgactgatggccccaaccccccttacatggttctgctggagagcaagcattttaccagggatttaatggagaagctgaaagggagaaccagccgaattgctggtcttgcagtgtccttgaccaagcccagtcctgcctcaggcttctctcctagtgtacagtgcccaaatgatgggtttggtgtttactccaattcctatgggccagagtttgctcactgcagagaaatacagtggaattcgctgggcaatggtttggcttatgaagactttagtttccccatctttcttcttgaagatgaaaatgaaaccaaagtcatcaagcagtgctatcaagatcacaacctgagtcagaatggctcagcaccaaccttcccactatgtgccatgcagctcttttcacacatgcatgctgtcatcagcactgccacctgcatgcggcgcagctccatccaaagcaccttcagcatcaacccagaaatcgtctgtgaccccctgtctgattacaatgtgtggagcatgctaaagcctataaatacaactgggacattaaagcctgacgacagggttgtggttgctgccacccggctggatagtcgttcctttttctggaatgtggccccaggggctgaaagcgcagtggcttcctttgtcacccagctggctgctgctgaagctttgcaaaaggcacctgatgtgaccaccctgccccgcaatgtcatgtttgtcttctttcaaggggaaacttttgactacattggcagctcgaggatggtctacgatatggagaagggcaagtttcccgtgcagttagagaatgttgactcatttgtggagctgggacaggtggccttaagaacttcattagagctttggatgcacacagatcctgtttctcagaaaaatgagtctgtacggaaccaggtggaggatctcctggccacattggagaagagtggtgctggtgtccctgctgtcatcctcaggaggccaaatcagtcccagcctctcccaccatcttccctgcagcgatttcttcgagctcgaaacatctctggcgttgttctggctgaccactctggtgccttccataacaaatattaccagagtatttacgacactgctgagaacattaatgtgagctatcccgaatggctgagccctgaagaggacctgaactttgtaacagacactgccaaggccctggcagatgtggccacggtgctgggacgtgctctgtatgagcttgcaggaggaaccaacttcagcgacacagttcaggctgatccccaaacggttacccgcctgctctatgggttcctgattaaagccaacaactcatggttccagtctatcctcaggcaggacctaaggtcctacttgggtgacgggcctcttcaacattacatcgctgtctccagccccaccaacaccacttatgttgtacagtatgccttggcaaatttgactggcacagtggtcaacctcacccgagagcagtgccaggatccaagtaaagtcccaagtgaaaacaaggatctgtatgagtactcatgggtccagggccctttgcattctaatgagacggaccgactcccccggtgtgtgcgttctactgcacga

SEQ ID NO: 240603 - DNA, 1083 bp, Homo Sapiens
  misc_feature (311)..(342): n is a, c, g, or t
gtttttaaatggggatgtaatactaataaccactactataaataaagcacacaattgttccggtgattttacaaatctttttttccaggtgtaaagtctacaaaaattccaaaaaattagagaacactgaaaacatattaaagtttgacatccaactttatagtatttccatgttaccctgaaagataacttaaaaaatatggccttcttagaacaggccactctgctattataaaaaattggtgacagcaagaaattgtatcactgatatgtggaatttttgtaaatagttttctctccaaatcattagnnnnnnnnnnnnnnnnnnnnnnnnnnnnnnnnatggtggtggtccctaaactattttgaaggcaggtagcttagtctaagctaaaatatttttttcattcatagcaataatcctcccctcaaatgccctttaaaaaaatgcatgaaaccgtacaatagcaaaaatcaaagagcacagactgtattttcaagaacagaaaaatctctaatgctgaaagatatagtagaaagcagatttctttggggacattaatcaattagtttataattcattatgaagatttctcttttttattccggggagagtctgctacatttgaagttaatgttccattcacaccattttctgcaaaaagaaaagaatccatgttactctcttttataaataaatgcaagttataatctttatatgtaaagataccttcagaaaagaaaatgtaaaatccaattcactcaggtgaaatttacttaccagtatttaaccaatcacaaaacctggtaacatttttaacacaatgaactgaaagtagcaaattaaaagaaaactactattaaaagcagaaaaaagtgacagcacagaaaactataaagtcacaagaatttaaaaatagtattcaagagaaataccttctgtagaaataaagaaacttttcacatttgacagcgaagtccttggggatatttgtttacaatatagtaaagttggtgtttaggataatttctatgtggaggcgtgtattatggccttctttttatttatttatgttactgttg

SEQ ID NO: 240604 - DNA, 941 bp, Homo Sapiens
  misc_feature (575)..(589): n is a, c, g, or t
gacaaggacattttttaacactaccaaaatcccagcttactttttggttttctggaagtagagttcaggaaaagcatgaagccagtaagcccagctgggatatgtagaaaaacttcatttgaaatctgtacaacacaagaaaatgaagagtaccttttaaagcataaattttttaaaaaaaagtaaaacaaatactggaaatcaggatatactaagtaactacctttgtgtcatcattccatacaatatctgtgcacctttaaacaactcttcaacaacctctttccccatctccctgtgacagtcccaccattggacaagacccctggattaaacagcaggcaaagatactatctgcagaaagctattgacatgtaagccagttgggaggagtcagagcccctattagttcattaatactgactagtatgtcatgttagctactgaaaacataacccacatgtctatacagtttcatcaagacaagaaggggaaaaagactgacacaaaagcaaaggctcatagattaataatcacctgaaactggaataatcccaatttcaaatatcctctgnnnnnnnnnnnnnnncttaggcaaatatggtaactgtacctggttggaacatggagaaagccccaaataaatggaggcagagctaggattaaagacagtcagaataaggcacacaagggctctccaggagctatatcataatcagtctagaaccaatactctcctcttgacattatatccctctagcccttctgcttcctctttattctccctgctccttctcctccagaagtctaaaatagaaaacacaaagccaacctaatttcttggtggtcggggtggagagaatacagtcccacataaatataatatttacaaagttcgttgaactaataaaactttagaaatcagagtatgattcagccaa

SEQ ID NO: 240605 - DNA, 1388 bp, Homo Sapiens
  misc_feature (489)..(520): n is a, c, g, or t
aaaaagggctatatgtcagattttcctgttcatagtaaatattttctgatttccagtttacaagtattgaaaatgcacaagaaagattttacttcacaagtacttttaagaatatactttgatttaatatgtatgttagtaaaactccacgtgttgtaaccattattatgtttttgtttttaaaatggggatgtaatactaataaccactacctataaaataaagcacacaattgttccggtgattttacaaatctttttttccaggtgtaaagtctacaaaaattccaaaaaattagagaacactgaaaacatattaaagtttgacatccaactttatagtatttccatgttaccctgaaagataacttaaaaaatatggccttcttagaacaggccactctgctattataaaaaattggtgacagcaagaaattgtatcactgatatgtggaatttttgtaaatagttttctctccaaatcattagnnnnnnnnnnnnnnnnnnnnnnnnnnnnnnnnatggtggtggtccctaaactattttgaaggcaggtagcttagtctaagctaaaatatttttttcattcatagcaataatcctcccctcaaatgccctttaaaaaaatgcatgaaaccgtacaatagcaaaaatcaaagagcacagactgtattttcaagaacagaaaaatctctaatgctgaaagatatagtagaaagcagatttctttggggacattaatcaattagtttataattcattatgaagatttctcttttttattccggggagagtctgctacatttgaagttaatgttccattcacaccattttctgttccttttttagaagatctgcctttagttactgttggtttcttcttcacagctggtgcctgaaaagcagaatgttccctccaccttcgaagctgaaaattaatgaacttccacatcataaatgcctgagtaacgcaaatggatgccagaacagcgattctaagaaatattaagacataaaaagttagtgtataaaaaacaatgccactgaatacattctatcatctttcatagtatttagtaataattcccactcagttgagaaaattgtattaataatcattgcattaataatttatcctaaaagttaaatgctttagtacttcactttagacatgtaaaatagcaacgggtatgaaataaaatcaaatgagtattttccccaacctcatattcatccttttttagatgattcaatgtagagaaactgataatatatattatctagctgtataaagtgaaaaaaatgttaaattgatcgtacctaacagctaacacattgaagtttccagtactgaaatccagcttctgattttctgctcttgcaagccaa

SEQ ID NO: 240606 - DNA, 1363 bp, Homo Sapiens
  misc_feature (252)..(283): n is a, c, g, or t
  misc_feature (1071)..(1086): n is a, c, g, or t
ttggcttcataatgaattataaactaattgattaatgtccccaaagaaatctgctttctactatatctttcagcattagagatttttctgttcttgaaaatacagtctgtgctctttgatttttgctattgtacggtttcatgcatttttttaaagggcatttgaggggaggattattgctatgaatgaaaaaaatattttagcttagactaagctacctgccttcaaaatagtttagggaccaccaccatnnnnnnnnnnnnnnnnnnnnnnnnnnnnnnnnctaatgatttggagagaaaactatttacaaaaattccacatatcagtgatacaatttcttgctgtcaccaattttttataatagcagagtggcctgttctaagaaggccatattttttaagttatctttcagggtaacatggaaatactataaagttggatgtcaaactttaatatgttttcagtgttctctaattttttggaatttttgtagactttacacctggaaaaaaagatttgtaaaatcaccggaacaattgtgtgctttattttataggtagtggttattagtattacatccccattttaaaaacaaaaacataataatggttacaacacgtggagttttactaacatacatattaaatcaaagtatattcttaaaagtacttgtgaagtaaaatctttcttgtgcattttcaatacttgtaaactggaaatcagaaaatatttactatgaacaggaaaatctgacatatagccctttttgatatgtttattaataatgattcttaatggggctcataataagtttaatatgcacagcatcttagaaaagtttaacctgcaaacacttttaaaacataatgcctacttgatttatatctataaaaagactgacaggtaattatatttggaaaacatttaatgcactaactttaaagaaattgaaaattcaggtggataaatagtcttacaaaagacaatgtgctttatgttatacctatagctttggtcccatctttaattgagaaacatttatctgtataaaacatatttttggataannnnnnnnnnnnnnnnttgtatcgctacagaaaggctctaaaaagcatttgaggaaaatatttggttcccttttctataatcatcctttaagattcttatagctacatttggtttattcatcatatttacagtatatatattgttcttttcagtgttcacatctagttccccatttctcacttgtgtcaccagctgtttgtgccatttttagtgtaaaagttgcagacctattatatctgcattttaagttgccatgctgctaggaaattgtccttttttctttctagctgtt

SEQ ID NO: 240607 - DNA, 1334 bp, Homo Sapiens
  misc_feature (311)..(319): n is a, c, g, or t
  misc_feature (590)..(613): n is a, c, g, or t
  misc_feature (799)..(811): n is a, c, g, or t
  misc_feature (1070)..(1078): n is a, c, g, or t
  misc_feature (1240)..(1253): n is a, c, g, or t
ggagtttggagaggaggccctgggcttggacccttattgctggctgggggttggatggcagaggggagagggactcaggctgaactccgaaagaaggaacatctcacaccaaaggcgagggcagttgggggcagggggatcacagtacattttccatgcagactaagggtgggagtgagagcttcagaggcttgcacccctacacaggaagagatgggtttgaggttgtttgacttaaagcccccaagttggtgtctggtccagtttcctaaaatagcagctcacctttcagggagaggtattggggaggnnnnnnnnntacagcaagaatatctgctttggagatcaagcaaggggtagggggaagacagtggtgctctttaaatctgactcagaaaagcaggaactggaagagggccctgggtgagatggcggccaacaccttcggagaaggcattgagtcagaagctacaggtgctcctgggggatcaggacagggaggtaccagtgttcacagacggcaggaaaacaattgggaacaataaattaggacttcatgttgctatcatttggcataacacaatcaggcnnnnnnnnnnnnnnnnnnnnnnnnaaatataaggcaacttgccaacacataacttaaaactggtcttcagtcacattgcttcagatcactagagaatttctggctaacgaacagtagtggatagtgaacaaaatgcaaaaccttaaataagaaccatcagctgacattccccagagacaagaggaaaggtaagggcttatttcatctgtnnnnnnnnnnnnngcccaattctgcatctttaacagaatggtgcaaaaatttgtaacaaaacagtctaagtttaaaattacagaaaagtgtttctagccaactaattgtcgcttgggatgagacgtgctgagcatggagtggatgaaggtatgctctaagaatggacagagggcaggaggggcttgtttccaatgtaggcccagctccaggtgttagaaccatgctcatttggtaaaggaagtactcaaagagcttaaggctttgtgtttgnnnnnnnnnccttcattaaactgaggggctgcactagagggtgaatgtacctgtggggccactcacacacaatgctactcaaacccacactacattcatacagaaacgtaacgtttaaaacttacagtgtagagcaatattcttagccagtgtagagagaaccaaatgcannnnnnnnnnnnnnggtgtttttaatcccaaactccaatgtgatcattccttacctacctaattcctcaagtaaggtagatggtgtttttgccaa

SEQ ID NO: 240608 - DNA, 1203 bp, Homo Sapiens
  misc_feature (252)..(260): n is a, c, g, or t
tcacaggtccactgccacacccatcaatttccccagggctgctgcctctgaagccacttacagatgcagccaccattgtctgcagacacagctccatgcttttctttatcactgcaagtcagccgtggactcactaacaaacactgtggatggcatggggaaatgaccctgcatctccactacaactttgctcttttgggcatcttaacagtgtcagatattacatttggtgcctttcaatatgtagagggnnnnnnnnncccctcctgtccacagcagcacatttaatctatgaagaggattttctctgctggggctatgaaaacaaatgcacatttcttttaagttctatcatacatacaggagataaggtaaaaacatttccttttctatgctgacatacatggcgagtaactgccaaatttaaacactaggagatagtcacacacttcagagaagagaagaggtactagagaggaagtgacacccgcttccagaagcagtatctcaggagtgaagagaggaacagtggcactcccgtcttggctgcgaatgagaaagagtttccttcagtgggaagaaattcatttctccatcccagtgcagtcagacttcatggggcctgtcttgaactctgattgcatcattaacacgatcaagagagacagtgaaatggggtcccggatccactgggacaattcaaaagcctacaatactgctttgatggatcctacataaatacttacaaatcattcatggcaggcatttgaaatcaatcatgacctagagttacgctactttattgtaaaaagcctctaaaatctgagttttcctttgctgctgggattctgataggttggctcctctggtgtttaagagcatcccagtgaagcccatgcagcatgaccatgatgcaaatcacctccctcttgtgcacccagcaatgacctgttaccagtaggggtgagagggcctggctccctgtcttttccagagcgcccaggaggcctgacacttacaaggcaataaagtgaagtagactgctaggctgagcaaaagtgagggggcaagacgtgcatggcaagacaggagtgcagcaggaagtaatctccagataatggtagggtttgtgaccaaacccttttcctttattactcttaactgcctgattggctctagaggaggctaaaaaatcaaatccaa

SEQ ID NO: 240609 - DNA, 903 bp, Homo Sapiens
ttgggaaaaagaaaatgcatttgtttctcagccttctcctttgtgattagagagggatttttacagtaagcccagaaacctccgtcagctcatgaagaagaaagtgggcccagcactgaggtgggagatggggcaggcaggcttcattttgcatccttaaatgtggagcccagggaatgcatgttgggtgtcaattatctgagccaaatggacagaagactgcataaacctttgccctccacactggctggcggagcaggcgtggcaccggctgagcccgctgcagcccgctcatgaatgtgcctgctcatggtgatggtggtgtgcactcagtgggaacttaagtaaggccatcgcttatgaataagacccactaattgaacgattccatgttttctagggggggctgtcggggggctgttaggtgcctggatgacaagtggacagtttaagccggttcctcagatcctaatggagctgccccctgccgagcaacagaggctctttaacgaagccgcagccatcatcaggcacctggagtggacggacgccgtgcagctgaccgcgctggtcatgggcagcgaggccctgcagcagcagctgctggccatgctggtgaactacgtcaccaaggagctgcgggccgagatccagtatgatgactaggccgcacctccggggaggtggggggcccctttaaatgactctgtgattctgaagaggtggcttgggagttgggagaagcccagcggatgccccctggggaatctccacatcatcagtgtattactagtaatgtcccgctggagaggccaccgctgtgcagtgtcatgttccagaaattactgatgaagcagcatgtgttggtggcatgtgcactggcctgccatgacagccctctga

SEQ ID NO: 240610 - DNA, 1017 bp, Homo Sapiens
tttgtacaaaaaagttggcaagtggacagtttaaaaccggttcctcagatcctaatggagctgccccctgccgagcaacagaggctctttaacgaagccgcagccatcatcaggcacctggagtggacgggcgccgtgcagctgactgcgctggtcatgggcagcgaggccctgcagcagcagctgctggccatgctggtgaactacgtcaccaaggagctgcgggccgagatccagtatgatgactaggccgcacctccggggaggtggggggcccctttaaatgactctgtgattctgaagaggtggcttgggagttgggagaagcccagcggatgccccctggggaatctccacatcatcagtgtattactagtaatgtcccgctggagaggccaccgctgtgcagtgtcatgttccagaaattactgatgaagcagcatgtgttggtggcatgtgcactggcctgccatgacagccctctgactggccccccagtgaagagtaaaggcctgcctgccgcaggcttcggaggcgtctgctgagtcctctcacccgcatgggtctggggaagtgatcacgctcagccgacggtctgaccacacttcatcctccccccggggccttctcatcttgggagatgactcctcttcagagcacctgctgcaggactggatcccacccccctgcaggtcctggggtctcagggccttggagcagcccatgctggaatcatgtttacctcctagtgcaaccgtcccctacccagggactgtcgaatggccccacggaggggacgggcggcctgctgagtgaagccacaaataccgagtggacttgaccccgcccccactaagctgcacacctagactcgccctgccagggcctcgctcttcccatctgaaaagtcctggtagttcttgaggtttacttctcaaatgaaatatttttagtaaaaagtacggtatatctcggagatattgtggggtcagttcagaccacctcggtaaagccaac

SEQ ID NO: 240611 - DNA, 1398 bp, Homo Sapiens
ttggcggcggaaaaccgaagttggaagtgtctcttagcagcgcgcggagaagaacggggagccagcatcatggcagaacaggatgtggaaaacgatcttttggattacgatgaagaggaagagccccaggctcctcaagagagcacaccagctccccctaagaaagacatcaagggatcctacgtttccatccacagctctggcttccgggactttctgctgaagccggagctcctgcgggccatcgtggactgtggctttgagcatccttctgaggtccagcatgagtgcattccccaggccatcctgggcatggacgtcctgtgccaggccaagtccgggatgggcaagacagcggtcttcgtgctggccaccctacagcagattgagcctgtcaacggacaggtgacggtcctggtcatgtgccacacgagggagctggccttccagatcagcaaggaatatgagcgcttttccaagtacatgcccagcgtcaaggtgtctgtgttcttcggtggtctctccatcaagaaggatgaagaagtgttgaagaagaactgtccccatgtcgtggtggggaccccgggccgcatcctggcgctcgtgcggaataggagcttcagcctaaagaatgtgaagcactttgtgctggacgagtgtgacaagatgctggagcagctgggctcccctccctgaagcgtggctcgaggcgcacgggcacggctgctccgcgccagcgtgtaagtggattgcagctcctcccgcgcctgcgctcgctggccaccccccagcccctcaggcaccaggactggccactcccgcggctcactctgccctcgtcacggtgccactggctccctggcacagacatgcggcgggatgtgcaggagatcttccgcctgacaccacacgagaagcagtgcatgatgttcagcgccaccctgagcaaggacatccggcctgtgtgcaggaagttcatgcaggatgtgagtagggcgagagtggcagctttggccttccccaggggcctggagcctggggccccaggacacccgcacggcccacatggcacggaggatgctgggatgctgggagccggcggagcctcctttcctcccctcggtcttgtcaaactgggagtcaagcttggtccacacctgagtcgggccagagcttacatccagcttttgagcgatgtttactgaggtctggtgcagcacgtcctctgggaagtgtcgcacaaaggagtcgcccactggaaggttctgggcaggcgagatgcccagaggtgatccctgcccgcccctcccacctcccttctcacacagcccatggaggtgtttgtggacgacgagaccaagctcacgctgcacggccctgcagcagtactacgtcaaa

SEQ ID NO: 240612 - DNA, 1126 bp, Homo Sapiens
  misc_feature (966)..(1009): n is a, c, g, or t
ccagcgcctctttctatgtctcaacctgggaagccttgtacccgtggccccttccttgtcttctcctcccacctggaaggcctctctctccttctaggtcttccctgtcacctgacttcacaacacatctcacaactcaaaatgactgtgtttgtatcacaatcacaatctgtcccgcccagaatagcaggggctttgtcttgttcaccatccctgtgaatatttgctgaatccaccccttttactatgtgaatagtgaacaattactgagcccttgctgggggctaggcagtgaaatgcacattagatgcattaactcatcccctggtagacatccctactgccattttacagatgaaaatgaggaacaaagaagctaaggactggggccacttgggactcacgcccaggcagccagctgcagcgtctgcaatttcaaccctcccctaagtgtgctgcctcctggagttgtagaaggctacagactcatcccccagagtggccagggctcctggagggcaggcatcacatcttaggtttctccaggctcaggccctccaacaggaggtcctgaataaaagctcaggaataactgcagttcaaggaagccttggctagaaaaccctacaataaaaggcaggcaagactggccatgagtagcgccatccctgcagtgctgataattcacacctgcactcacaggtaggctaaggcagtccctcaggtgggctgaagaatgaaatgctggccacgtaagatgtaaaccccaaagagcaagtttgtcccatcaggtcccctatgttaccccataatatctgcatcctgatctttaaaactcttttccagagaaagtcaagcaaatgatatttggagggctttcctgctgcttttattttggaaagttatataagagtcctaagagtcactcctgagcgcttagagtagtggcacatttatgcacattcnnnnnnnnnnnnnnnnnnnnnnnnnnnnnnnnnnnnnnnnnnnncccaaatgacaattgtggaaaccgaggctcagtgacctgagggacttgcctagggccacagagctgccaagcaggaaatctaggctgcctgagtgcaagctcgcagtctgtacccaa

SEQ ID NO: 240613 - DNA, 760 bp, Homo Sapiens
ctttgtacaaaaaagttggggccttaagtgcactttagcactaccccagcctcccaaagtgctggaactacaggcatgagccaccacacccagccctttctatctttttgatgtggacattagtgctataaatttccctcttttcttggtttccagtgattattttattctatcttggtgagtcatcagggaaataatcttaaatttacaatcaacatatagtttaaatccatataattgtgtgagaagaaccctttgttatttgaaggtgatgtttgaaagattttctaactgtgccttttagttagtcttaaatttctaattgtagtaaaacccagccattgtcatttctgacattttaagtatagggtttaaagtggttagtatagttctattgttttgcagtaggttttagataatttgtgtcttacaaaagtaaaagtgaatactcattacttatgaaagaagttagttagcttgccttaggtagataggaagagaagagtccctggaaagtccctggtcagtgcctcatccctgcataacatataaagaagcctggaaaaatcaagctgcagacactaacaagggaattaacatatgttgttgtgcttggagacatgcccgtggctgcacagatagaaaaacctctggcccattgggataaaaacttgtacaaacctccagctcactcagataaaggaacaagaacgacttagcccagaaatgcctttgttgggccggccggggtggataatgc

SEQ ID NO: 240614 - DNA, 1442 bp, Homo Sapiens
ttggacatcaacccggcacctgccaacatggaaggtggcggcggcagcgtcgctgtagctggcctcggagctcgaggctctggagcggctgcagctacagtccgggaacttctgcaggacgggtgttatagtgactttttaaacgaagactttgatgtaaagacttatacttctcaatctattcatcaagctgtaattgctgaacaactagcaaaacttgcccaaggaatcagtcagttggacagagaactacacttacaggttgttgcaagacatgaagatttactggcacaagcaactgggattgagtcgttggaaggtgttcttcagatgatgcagacgagaattggggctttacagggagctgttgataggataaaagcaaaaattgttgaaccatacaataagatagttgcccggactgcacaactagcaagacttcaggttgcctgtgatttgcttcggaggattattcgtatcttgaatctcagtaagagactccaaggacaactgcaagggggaagtagagagataacaaaagctgctcagagtctcaatgaacttgattatctttctcaaggaatagatctttctggaatagaagtgatagaaaatgatctactttttattgcaagagcccgacttgaagtggaaaatcaagctaagcgcctactagagcagggtttggagactcagaatccaactcaagtcggaacagctcttcaggttttctataatcttggaactttgaaggatactattaccagtgttgtggatggatattgtgctactttagaagaaaatatcaacagtgcattagacataaaagttttgactcagccttcccagtcagctgtgagagggggacctggacgatctaccatgccaaccccaggaaatactgcagctttgcgtgcctcattctggaccaatatggagaaacttatggatcatatttatgctgtttgtggacaggtacaacatctacaaaaagtattggccaagaagagagatcctgtttctcacgtttgtttcattgaagaaatagttaaggatggacaaccggaaattttctacacattttggaattcagttactcaggcactttcttctcaatttcatatggcaacaaactcttcgatgtttttgaagcaggcatttgaaggagaataccctaaattattacgtctttataatgacttatggaagcgtcttcaacaatacagtcagcatatccaagggaattttaatgcaagtggaactacagacctctatgttgacctacaacacatggaagatgatgcacaagatatattcataccaaaaaagccagattatgatccagaaaaggctttgaaagactcactacaaccctatgaggctgcttatctatcaaaatccttatctcgactcttcgatcctatcaacttgggtttttcccc

SEQ ID NO: 240615 - DNA, 2365 bp, Homo Sapiens
ccatgcccaaaaatttgctaggctgctactttaaacatttaccttaatatgattcttgcgtcaaattcaattaaattttataagtatcagttgagcacctaactatgtgcaaacgtctgtgctaggtactatgcagagtacagggatgagcagagttctagccctactttcaaaagtttacaaacgctacactcacatccaacaaatacatatgggctatatgctaattagtactttaaacattactaatttttacatttttacaccttgcattagattatctgtccttaactggtatgtaacatggatatcttaagggaaaaaaccctatggcattaaaatgtaagaatactgtgatacttcaattaacctagtttgaaagtctagttaaaagtcttctttctttcaacataaatactaaaaatacatacataccctgcaactaaataacttcatgttagtgaattggcacaataacatttaaaagttttataaagaaaggatctcactatctatttaacttcctctttacaaaggtaattattcatatgctaatgaagcagctttggcaagtggttacaaaaactcatgaaaatataaaaataatgttacatttatgggtcactgaagaatgtatctaaatttaacatttaaaatgactcataaaataaaatgctgatccttacaaatgtatctcattgtttatatttttattttcagaaaaacagagttcacttgaatacaattctcactagttaaatcacaattcaccttatagttaattaacttatgttcaaagatagtcctttcctgctatataatttcattttcttaaaaagcaaaacactttcagtagaaaaaatttacatatgaaagtcaaaaacaattatttcagcaaaaatggaaatcaaccaccgtatcttttcttgagttcttcgacagaactatccttcaatcctgacttgtctatgtgattaaataatgcacgtgcaatctttttctctgtttctgacataaacatcactgccatatcaaacctttttagttcagaaagtctttgtaagatttcaaagatgagtaatggcttttctttctcaatgtaaaagtcatgcagaattttaacgatctggttgaatacatctggatccagatttttctgaaacaacttaggatacaaagatggttcaatttgctttaaatactgatacaacatatctggagaacttttcaattgtctgaaatcagattcgagctggaacgagtttgcaggaattggaggaagaacagttgtggcaaactgagcaggtttttgttctatctctatgggcattttctcgctgtaagactgacatacatcctgcttcaaactggcttgaggttgcagggatgaagtatcactgacttcttctattttcaatacttttgctctggagtatcacttgtgggaaaaaggtcatcttggcttgaattcttcttacttgtggtgcctgtggctgctattacatttgctagattaataggattattctctggagcagcagcagtagtgctatctggcacatcaatagtctgtatcaaattaccagtttcttcaataataaccttcttgagtggtttctaaaacaattaaaatcaattccttaaatcaaaatattaaaggtttcctattttagggtcacaagttaaaaggctgcaatgatcttacagctaatatcccagtgattagtaaattcaatttggtggctagacagacttagaagtctgagaatacaaaaataaaaagctatacaaagcacttatcccaggtaggtcgaaacaagggagagagacatgtatacgtaaatatataaggccatggtcatgtttaagagatgaaagcacaaaacgctaagagaacacaggaaggaagataaacactggcatgagggaagccttcacagaaaaagcacacaggaatggcaaagttgaagggtgcagcacagtcagtggaaaggtgagaagtccagtggggctggtgcacggcacggcatggtggagatgaagcctcaaaggcagtttgaagacagcttatgaagggacttggatgccatgaaaggagtctggactctattctaggggcaatacagcaaagaaattaccaaaccaacagcagtattgtggactaactgaaggcaagtggaataagggcagacaataaccagcattatgtatgggatagactatcattaaaacctaaacacattgtctcaatatatagcagctggataaaactagcccaggattaaaaatctgccaagtaatattcacaaagttggtaaaagtaaacccttttttccaatttaataaaataaatggctttcaccaa

SEQ ID NO: 240616 - DNA, 1955 bp, Homo Sapiens
  misc_feature (1077)..(1092): n is a, c, g, or t
ttggcttctaagctatcaaaacagtcacattttaaatgagtaaactaaacaattgactgtggatacttaagcatatttctggctacgttttatagttaaagtgttttatagtttacatttagactggtactttttaaagaaaagttctgtttataactgacatccgcaaaccccagtgaatgcctcttagttggaggttgtgtctcccccaaggcaagtgtgttgtcccagactcttctgtagtccagcatgcgcacttccctctggattattactttccacgtgaactcaagagaacatgaaaggcaatccagatggagggaaaaggtgtgagtccgcagcccgggccagatgcgaaggtctcatgcgtgtcgtctaaacacttgtcttcaaggccttctctctgacatcttggaagagtcattgagaacagataacctggttcattgatttttgtcttgatttgaatatttaacttattaatagatccactgatttccaggcaccaggcagtagaagagactgggattcaggtgaccatgaaggcacagctgctacttctgggccgggggtgatattttgatcagcgttttgtaggggaggaccatatacccctattcccatggtcgctggctgggttttccatatatctgctgtcatttattcgttttccccttaaaagcaaaatcaatgtaaaaggctatgtttacgttttactcattgtccagcttagactcaaagtctagttcggtgggagggggaccttagcatcctctcagagatggtcagggctgagcaggaggaggcagagacagaggggcagctcagcctggtccattgagacccactctaaacagacatcatatttggaacaagaagatgcttcgagacaggaatgggccccactgtcatgcagaaacagactgggggaatggcagtttccctgagtcttggtttcttttatgttttctcttgtgccaccaccaaactgcagaggacctgctgtgacctaaagggcattcctttagcagataagaccttgaaaactgcaaaacacctgggaccagggagcttttnnnnnnnnnnnnnnnntaccacatttgctttttccctgtgaactgtattgacagcgtgttcttaggacagtcttttggtggaaatgttactgtaaaatagttttcatctcacccctcctaatcatactcccactttcctgtttgtgtggtggtgttgctgttttttcctttacatgaattaaccaaatgaattttgtgtcattgtttttggggcttatatttttaaaacatagaaattgccttttgttcatttgaaaagtaagtatgttgtatctgaaaaagggctctgcctctgctctccctcgcttccttgtaaccaatctccaaacgaatctctcctggcactgcccccttccttatatagggtcactgtccccggggccacctctgcctccaccctgctgtcaccactgccctgggccaaggcacccaggactcccagaaagcgcgagagccagcaagaaggccccactcagccttgagactggtggtcacacctccctgtcagagtcgcctgctgggctgaaggggcaatggattgtcattgttgaaattgtttggctcaggttataaggaggaacttgggaagtagaaagtgacttgaccatgtgcatccttggtagcttcctgtaactaacaaatggaacagagagcacacccccgccccgccccaccccaagcagatgttcccgtcagcgctgccctgagtcagtcggtcccccgtttctgctctcctcccttttgtgttcctgctcacttcaagcttcttccatggactttccagggcacagtcatctctagcccccaaatcatctcttcatcctctgtgtgtgcattttttaaccaaatgaaatagacaagaaagtcatactttggggc

SEQ ID NO: 240617 - DNA, 752 bp, Homo Sapiens
  misc_feature (371)..(458): n is a, c, g, or t
ttggcactgctaggggcttaagcggagggagtcgagccagcgtcgccgcgatggtgttgttggagagcgagcagttcctgacggagctgaccagacttttccagaagtgccggacgtcgggcagcgtctatatcaccttgaagaagtatgacggtcgaaccaaacccattccaaagaaaggtactgtggagggctttgagcccgcagacaacaagtgtctgttacgagctaccgatgggaagaagaagatcagcactgtggtgagctccaaggaagtgaataagtttcagatggcttattcaaacctccttagagctaacatggatgggctgaagaagagagacaaaaagaacaaaactaagaagaccaannnnnnnnnnnnnnnnnnnnnnnnnnnnnnnnnnnnnnnnnnnnnnnnnnnnnnnnnnnnnnnnnnnnnnnnnnnnnnnnnnnnnnnntaaagggcatacatttcctgctttcaccaattaaccactgaattgctattttttccttttggccagatagctaggtttctggttcccccacagtaggtgttttcacataagattagggtccttttggaaagaatagttgcagtgtttataggatagttgtggtaagaatctagtttattttgcatttggctaattggtctgtgctgcatggttatatactcctggattatagattaaaagtctccgtagacatctctgtgaagagcaagctatcattaaacatgtctgtttatc

SEQ ID NO: 240618 - DNA, 742 bp, Homo Sapiens
  misc_feature (380)..(467): n is a, c, g, or t
gccaactttgtacaaaaaagttgggcttaagcggagggagtcgagccagcgtcgccgcgatggtgttgttggagagcgagcagttcctgacggagctgaccagacttttccagaagtgccggacgtcgggcagcgtctatatcaccttgaagaagtatgacggtcgaaccaaacccattccaaagaaaggtactgtggagggctttgagcccgcagacaacaagtgtctgttaagagctaccgatgggaagaagaagatcagcactgtggtgagctccaaggaagtgaataagtttcagatggcttattcaaacctccttagagctaacatggatgggttgaagaagagagacaaaaagaacaaaactaagaagaccaannnnnnnnnnnnnnnnnnnnnnnnnnnnnnnnnnnnnnnnnnnnnnnnnnnnnnnnnnnnnnnnnnnnnnnnnnnnnnnnnnnnnnnntaaagggcatacatttcctgctttcaccaattaaccactgaattgctattttttccttttggccagatagctaggtttctggttcccccacagtaggtgttttcacataagattagggtccttttggaaagaatagttgcagtgtttataggatagttgtggtaagaatctagtttattttgcatttggctaattggtctgtgctgcatggttatatactcctggattatagattaaaagtctccgtagacatctcttgtgaaagagcaagctat

SEQ ID NO: 240619 - DNA, 1948 bp, Homo Sapiens
ttggctgggctaacgggctccgatccagcgagcgctgcgtcctcgagtccctgcgcccgtgcgtccgtctgcgacccgaggcctccgctgcgcgtggattctgctgcgaaccggagaccatggccaaaccagcacagggtgccaagtaccggggctccatccatgacttcccaggctttgaccccaaccaggatgccgaggctctgtacactgccatgaagggctttggcagtgacaaggaggccatactggacataatcacctcacggagcaacaggcagaggcaggaggtctgccagagctacaagtccctctacggcaaggacctcattgctgatttaaagtatgaattgacgggcaagtttgaacggttgattgtgggcctgatgaggccacctgcctattgtgatgccaaagaaattaaagatgccatctcgggcattggcactgatgagaagtgcctcattgagatcttggcttcccggaccaatgagcagatgcaccagctggtggcagcatacaaagatgcctacgagcgggacctggaggctgacatcatcggcgacacctctggccacttccagaagatgcttgtggtcctgctccagggaaccagggaggaggatgacgtagtgagcgaggacctggtacaacaggatgtccaggacctatacgaggcaggggaactgaaatggggaacagatgaagcccagttcatttacatcttgggaaatcgcagcaagcagcatcttcggttggtgttcgatgagtatctgaagaccacagggaagccgattgaagccagcatccgaggggagctgtctggggactttgagaagctaatgctggccgtagtgaagtgtatccggagcaccccggaatattttgctgaaaggctcttcaaggctatgaagggcctggggactcgggacaacaccctgatccgcatcatggtctcccgtagtgagttggacatgctcgacattcgggagatcttccggaccaagtatgagaagtccctctacagcatgatcaagaatgacacctctggcgagtacaagaagactctgctgaagctgtctgggggagatgatgatgctgctggccagttcttcccggaggcagcgcaggtggcctatcagatgtgggaacttagtgcagtggcccgagtagagctgaagggaactgtgcgcccagccaatgacttcaaccctgacgcagatgccaaagcgctgcggaaagccatgaagggactcgggactgacgaagacacaatcatcgatatcatcacgcaccgcagcaatgtccagcggcagcagatccggcagaccttcaagtctcactttggccgggacttaatgactgacctgaagtctgagatctctggagacctggcaaggctgattctggggctcatgatgccaccggcccattacgatgccaagcagttgaagaaggccatggagggagccggcacagatgaaaaggctcttattgaaatcctggccactcggaccaatgctgaaatccgggccatcaatgaggcctataaggaggactatcacaagtccctggaggatgctctgagctcagacacatctggccacttcaggaggatcctcatttctctggccacggggcatcgtgaggagggaggagaaaacctggaccaggcacgggaagatgcccaggtggctgctgagatcttggaaatagcagacacacccagtggagacaaaacttccttggagacacgtttcatgacgatcctgtgtacccggagctatccgcacctcccggagagtcttccaggagttcatcaagatgaccaactatgacgtggagcacaccatcaagaagagatgtctggggatgtcaggatgcatttgtggccattgttcaaagtgtcaagaacaagcctctcttctttgccgacaaactttacaaa

SEQ ID NO: 240620 - DNA, 1516 bp, Homo Sapiens
gggatattttatgaaaatgtttaattcaactgtttctttggaatgtagtagtcatagtttggaatttaagttacagttcagttctatgtggtttttatgctactcagtgtctgagaatacaaatgtcatttaaagttaaggcttcgctgttcattttgaaacaacaatttacaagtgtcatattgtcatagaaaataataatttctgtaaaaaaaatctgcacaaaatcttatgatggtacaaaacatgaagcaataatataccagtaaaatgaaaacattttactacagaaagttttatagatttccataaagaaaaaatatgttattttacacctttaaaaattacaaaacaatctaaaacaatataaactgaacattttgtaacactgcctttacaaattaataactttataaacatataatttttaaatatatttatcagtgcaagatactttaaattttaaagttgcagtatcatttttccttggctgaggacaactttaagtctgttgcctttaaaaacaacaaacgagtgtttcttagtgctttccttctggtaggattatatcaactaaatgaatgtctctggggacaaaaaactattcttctttcatggtgatcaatattttcctggaaacaaaaggcattctcaatccaatttaactaagatgaatggactgtctcgtctatgatgcaaatgtgactcccaacaaatgtctttgagtgagacgtctagcaatgtgggaaggaagatctaaaaaatctcatgtccaacatggcatgataaaaatccaccaaaaccaaccaaagcttctttgggttaattcataggctgcctggtaagatatttgcttccctgtgctgttagaggcttagatgttgccagccctaaggcaggcttattctttgtgagccgctggaagtttctagaagcattcatttaagtctattttttcaaggttgctgttatgaatttttaaaacatttgttttgactttatgtgtttttccccctcttatcttaaaatacttgacccccaggcatcaggatttatagtttcattcttaaattaactgttcttccttccacttcccttgtgtgactcagtagcaaaataagaaagttctcttgggtcatttttgcatatttggatagaaaaatctcatgcttttggatttggaagattttatccagttcttcctttgggtctcacttgaaagccaatttatattatttctttcctcaacttatcactatttctactaaatgccaacatttctatcaaaggtcattttgaatagaatagataaggaaaaaagatactgtcactttaaccagttaacaagaaaaccaaagttagactttggagggcaaagttaggaatttcccttatttatttatttttaaacataaagtctagtaaaatcgtttgccattcccagcaggttaaagctgcaagtttctttcctggacaatggcaaatcctccaattctaagagagaaaaaagacccaa

SEQ ID NO: 240621 - DNA, 1633 bp, Homo Sapiens
  misc_feature (207)..(220): n is a, c, g, or t
  misc_feature (592)..(849): n is a, c, g, or t
  misc_feature (871)..(891): n is a, c, g, or t
gaaaccaacataaaggtaatcagaagttcaaactttcttctaattgatgaaaagataccccggctccaactcccccaaacataaagcactgcacattcccattccaaaaccagttacgtgcattgcattcactaattttaatttacataaaataccattctgtgactaaataactgatactgcaatagagggaagcatgattttaannnnnnnnnnnnnnagattttaaaaatcaaaatcatgtttccatgcacttgagttccggatcaaatatattatctacagaaaaaatccacaaactcttatcgaaatgttcatataaagtttaaattatttcaggttggcttttctcctttagttttatattcattaagtattgaaaacaaacctaaaatcttcaagtggaaagatattaaattaaattttgttggaaaaaaacccatctttgccatgatgttaaaaaagggaaaatcaggaaaaatggttcccacagatatttaaagttttaatgggtcctcttctccaagatgtttttctcctcacccttcaattttttttaaaagtatttctgagaaagaaagtacattttctnnnnnnnnnnnnnnnnnnnnnnnnnnnnnnnnnnnnnnnnnnnnnnnnnnnnnnnnnnnnnnnnnnnnnnnnnnnnnnnnnnnnnnnnnnnnnnnnnnnnnnnnnnnnnnnnnnnnnnnnnnnnnnnnnnnnnnnnnnnnnnnnnnnnnnnnnnnnnnnnnnnnnnnnnnnnnnnnnnnnnnnnnnnnnnnnnnnnnnnnnnnnnnnnnnnnnnnnnnnnnnnnnnnnnnnnnnnnnnnnnnnnnnnnnnnnnnnnnnacaagagtgaaactccatctcnnnnnnnnnnnnnnnnnnnnntacatttttcttattatataattagatataggtcaaatatcccttatccaaaatgtgtgggaccagaagtgtttcaaatgtttttggatttggggatttttgtatatatataatgaggtatcttgggagtagacccaagtctaaacacaaaattcatttgttttatatacaccttatacaacatagcttgaaggtaattttatccaatatttttaataatcttgggcatggaacaaagttttgattgcactgtaactgccacctgtcaaatgaggtcaggtgtaaaattttccacttctgacggaatgctggaactcaaagtttaagattttggagcatttggggttttggattgttggaacggaatgttcaacctgtactatttggggtccggttggaaattggctttacatttttaaaagccagtgtagactgtatttctgccttaccttctctctagtcaaatactccactaaaaaaatgaatatttcagtttgagagggaggaattatatagaaaagccaaactatgaaaccattcttattccataatacctctgaacctgagtttactgttctttgagaactctgtttcagctgattataagagaaagaaatccagtgacacgagggcaggcaggccccgctctgctctgatcgagaaaagcttcctgatgtcagggagatggaactgccaccatcagaaccatggcactttgggtgaaggtgccaacttttttgta

SEQ ID NO: 240622 - DNA, 3303 bp, Homo Sapiens
ttggacttgaactgcaagaacagccgccgctccggcgggctgctcgctgcatctctgggggtctttggctcgccacgctgggcagtgcctgcctgcgcctttcgcaacctcctcggccctgcgtggtctcgagctgggtgagcgagcgggcgggctggtaggctggcctgggctgcgaccggcggctacgactattctttggccgggtcggtgcgagtggtcggctgggcagagtgcacgctgcttggcgccgcaggctgatcccgccgtccactcccgggagcagtgatgttgggcaactctgcgccggggcctgcgacccgcgaggcgggctcggcgctgctagcattgcagcagacggcgctccaagaggaccaggagaatatcaacccggaaaaggcagcgcccgtccaacaaccgcggacccgggccgcgctggcggtactgaagtccgggaacccgcggggtctagcgcagcagcagaggccgaagacgagacgggttgcaccccttaaggatcttcctgtaaatgatgagcatgtcaccgttcctccttggaaagcaaacagtaaacagcctgcgttcaccattcatgtggatgaagcagaaaaagaagctcagaagaagccagctgaatctcaaaaaatagagcgtgaagatgccctggcttttaattcagccattagtttacctggacccagaaaaccattggtccctcttgattatccaatggatggtagttttgagtcaccacatactatggacatgtcaattgtattagaagatgaaaagccagtgagtgttaatgaagtaccagactaccatgaggatattcacacataccttagggaaatggaggttaaatgtaaacctaaagtgggttacatgaagaaacagccagacatcactaacagtatgagagctatcctcgtggactggttagttgaagtaggagaagaatataaactacagaatgagaccctgcatttggctgtgaactacattgataggttcctgtcttccatgtcagtgctgagaggaaaacttcagcttgtgggcactgctgctatgctgttagcctcaaagtttgaagaaatataccccccagaagtagcagagtttgtgtacattacagatgatacctacaccaagaaacaagttctgagaatggagcatctagttttgaaagtccttacttttgacttagctgctccaacagtaaatcagtttcttacccaatactttctgcatcagcagcctgcaaactgcaaagttgaaagtttagcaatgtttttgggagaattaagtttgatagatgctgacccatacctcaagtatttgccatcagttattgctggagctgcctttcatttagcactctacacagtcacgggacaaagctggcctgaatcattaatacgaaagactggatataccctggaaagtcttaagccttgtctcatggaccttcaccagacctacctcaaagcaccacagcatgcacaacagtcaataagagaaaagtacaaaaattcaaagtatcatggtgtttctctcctcaacccaccagagacactaaatctgtaacaatgaaagactgcctttgttttctaagatgtaaatcactcaaagtatatggtgtacagtttttaacttaggttttaattttacaatcatttctgaatacagaagttgtggccaagtacaaattatggtatctattactttttaaatggttttaatttgtatatcttttgtatatgtatctgtcttagatatttggctaattttaagtggttttgttaaagtattaatgatgccagctgtcaggataataaattgatttggaaaactttgcaagtcaaatttaacttcttcaggattttgcttagtaaagaagtttacttggtttactatataatgggaagtgaaaagccttcctctaaaattaaagtaggtttaggaaaacagaccctcaaattctgacattcattttcctaagcaactggatcaatttgctgacttgggcataatctaatctaagcatatctgaatacagtattcagagatagatacagtagagattccccagactttttcgctctttgtaaaacctgtttgtttaggttttgcgaggtaaactcaacagaggttgggagtggaagagggtgggaagcttatatgcaaattaacagacgagaaatgctccagaaggtttattattttaaagcacattaaaaacaaaaaactatttttaaaatcctgctagattttataatggatttgtgaataaaaaatacccagggttctcagaatggaataaatatcccttttaatagttatatatacagatatacaactgttagctttaattggcagctctcttcttttttcttcttttcactggctttttacttggtgctttttcttgttttgcactggtggtctgtgttcttattttctttggattcttgtctggttccaaaatgatcatttcttcttcttcactatctgagagtattatgggagcatcttggcttccaatatcagagacttctactccagtgtccatttttataccatcaagaatgatagcttgatcaccaccgccttcatcatcttccttctcagagtcttcaagatcaccccaggagttttctactccctctccaatttgggcagttccaggagtccatagcacaggtgtagaaacaacttctgaaggaggttctgcttcagcaatgatttcttctgctttttcttctacatccgaggtatcaataggggccttttccattttaaatgctgtgatcctttgatttgctatagactctgcaaaaccaaactttccaccttctttccttactttttggtcattctccaaagctttcaatattagctctgtaatttctgctactttcacaccagcgattttactgcatctcagaacttgatcttttagtagcattatcccaccactggactggatagtacaaatctctcgatgtttgttcatggcaatcaccagcaagccatccatcacacgttcttctcgttcattgggatccaccaataaatatgttccttgctggaaaaaggcaaaactgacacaaatgggcatgtggtggatacttaatggtacaggatcacgctcttcaggtgtatacagtgttacttcatctccttggacagagacatcaggtcttcggaaatgacataaggccacgattgcagcaatgctggcagcatcaataatatttccatcatgatggaataaatgtagccaacttttttgtacaaagt

SEQ ID NO: 240623 - DNA, 850 bp, Homo Sapiens
ttgggacaggcctagtgtgagccggactggggcacctggtgctgagggtgattaggacaggcctggtgtgagccggactggggcacctggtgccacccacagccagcctttgaccttcagggactggttggggctctggttgcctggggaggggtctccagggcttcctgccctttgagcctgggccagcatcccagcacttggcaggcaggagggggttcttggggcttgggccagcctgtcccttcctgcctcctgtgtccctctgtccttgctcatcacttctgtgctggggacccttctctcttctctgctgtccctcaaggctgtgtctggaagtctcggagggcccggttggtgggccagtgatctttgtgcttgctgagctggaggacaggcgcaggcatgctgtttgcccatcccacactctgatgggcctgctagccatgcctccctgctcacacagctgcgttcttccctctgcaaaaagcttagagatggattttgacaggagggacgtaaacataatcctggttggcatcagcttgggtctgcagtggctgtgactgcccaagggcctcttggtccccaggcccacctggctagggtgccagtggggtctgctcctggcttctcccagtgggccaggcaaagcccatgcaagagtgtgtggaagtgagctggagccctcttcagggctcgtgtggcccgagagaggcctgtgttctctgggagggcacagactccatcaagatggagaacgggcagagcacagccgccaagctggggctgcctcccctgacgcccgagcagcaggaagcccttcaaaggccaagatgtacgccatgga

SEQ ID NO: 240624 - DNA, 892 bp, Homo Sapiens
ttggcctagagatggcagggggaagacctgggcgctcttaaccacccccaacgcccttgtctgcatgtctttttctctgtctcctccttttctgtttcttctcccagacaggtgaagaaacaagaaaactaagaaatccgagcggttggagggggagtctgtgtggatgggatggggacgccgggggaggggctgggccgctgctcccatgccctgatccggggagtcccagagagcctggcgtcgggggaaggtgcgggggctggccttcccgctctggatctggccaaagctcaaagggagcacggggtgctgggaggtaaactgaggcaacgactggggctacagctgctagaactgccacctgaggagtcattgccgctgggaccgctgcttggcgacacggccgtgatccaaggggacacggccctaatcacgcggccctggagccccgctcgtaggccagaggtcgatggagtccgcaaagccctgcaagacctggggctccgaattgtggaaataggagacgagaacgcgacgctggatggcactgacgttctcttcaccggccgggagtttttcgtaggcctctccaaatggaccaatcaccgaggagctgagatcgtggcggacacgttccgggacttcgccgtctccactgtgccagtctcgggtccctcccacctgcgcggtctctgcggcatggggggacctcgcactgttgtggcaggcagcagcgacgctgcccaaaaggctgtccgggcaatggcagtgctgacagatcacccatatgcctccctgaccctcccagatgacgcagctgctgactgtctctttcttcgtcctgggttgcctggtgtgccccctttcctcctgcaccgtggaagtgggg

SEQ ID NO: 240625 - DNA, 969 bp, Homo Sapiens
ttggggaagaggctgactgtacgttccttctactctggcaccactctccaggctgccatggggcccagcacccctctcctcatcttgttccttttgtcatggtcgggacccctccaaggacagcagcaccaccttgtggagtacatggaacgccgactagctgctttagaggaacggctggcccagtgccaggaccagagtagtcggcatgctgctgagctgcgggacttcaagaacaagatgctgccactgctggaggtggcagagaaggagcgggaggcactcagaactgaggccgacaccatctccgggagagtggatcgtctggagcgggaggtagactatctggagacccagaacccagctctgccctgtgtagagtttgatgagaaggtgactggaggccctgggaccaaaggcaagggaagaaggaatgagaagtacgatatggtgacagactgtggctacacaatctctcaagtgagatcaatgaagattctgaagcgatttggtggcccagctggtctatggaccaaggatccactggggcaaacagagaagatctacgtgttagatgggacacagaatgacacagcctttgtcttcccaaggctgcgtgacttcacccttgccatggctgcccggaaagcttcccgagtccgggtgcccttcccctgggtaggcacagggcagctggtatatggtggctttctttattttgctcggaggcctcctggaagacctggtggaggtggtgagatggagaacactttgcagctaatcaaattccacctggcaaaccgaacagtggtggacagctcagtattcccagcagaggggctgatccccccctacggcttgacagcagacacctacatcgacctggcagctgatgaggaagtctttgggctgtctatgccacccgggaggatgacaggcacttgtgtctggccaagttagatccacaga

SEQ ID NO: 240626 - DNA, 2092 bp, Homo Sapiens
  misc_feature (249)..(265): n is a, c, g, or t
  misc_feature (836)..(844): n is a, c, g, or t
ttggcgcacctgcgtccaagtttgaatttttatgatatgtaccacttaattactggcactgagtatcactgaatttcttagttttctagtggggaaacattattgagaagccctcccttattttaagtaagttgattaaatcttatgtgagttgccagttgtaatttttcaaaggaaaaattttgatggggtggaggaatgaattgccagataatctttctggaattccgagagaattccaaagagggnnnnnnnnnnnnnnnnnaggacatcttttgatacctttaaaagaaccactgtcaagtaatccttaaaagaatatcttggaaaaggaaacagattttttcctgtgtgtaagcaataagtgaagttacatttgccctaaccctagggatgattctttacccagttttaaagcccatcatggtattctaaggtgttgacaccctccatcctcagagcaggtcgaaaatattaaatagactggggactctatgatgggcagcctgtgctttttgacttcagtttgctatttttctgtgatcacattagtactgattcatagattctatcttttataattctggagaaaaagatttgttagttttgtaatttttttgtaagaccaaatgtatgtattttagtagctccattgcatgagaagagtgtaactcacactgacttgtgatatcagccttctctgggccttgtgtgtggagagctttctatcttaccaagtggtagggctaaaagaacaacagcctttttggtagtcacatagcagaatgatcagagttacattgcttattccaaaacattggttctttttaaaacannnnnnnnnacccaaagaaaagaataatagaaattactaacaataaatataaattcagagtgttgatataggattcagtatccagagtttatttttaatcttaatcctcagcttcttgggagttgctgggcttcagtgtctctgtggtttcaccagcttagcttgagctctggttattttggatcttttctgcttttttttaagtaactgagtcatttttaccacacagtccagtttgcatgtatagctaggaaacatgtattgctctagattgggcagtttaagtcattttaaagaaagttagttcatagttgttgccttttaactcatagtcaagcttcagtctttcaaagagaaatgtgtgattttcatttacttgctgatattttgtagtttggagatccttgtgggcattattctaactgatacgtagacacttacttggaaatttttggacattatattaaatgagtgctatctgtgaaattggttatattaggtggcttgactaatgttttttctataattgtatatgaactgcatttttaaaaaaaccgcatttgcctttatgctagattgtaaaaaattatattagaatgcataagacatgtttttccttcatatgctagacttttcctagcatttcgtatttctgtgttgtcagtgtgtgatttttaaaccggaatttggtttaaaaaaaatctggtggtaatatatgtgagaaatactttggtgtttaccttatgaaaataaaggattgtaagtaaagtttcctgcgcaccttataccagaattcagtataatacactactttctgttttcaaacagataaatcataatatagtctgtattatctgtaagatctgtcttgtaaaccacattcttgacaactatttgcttttgagtagtttgtattttaatatgtgacttttgtcttgaaaagtagtaaagccatagacttgtgcaaaacaagtttcaagtttatagatattaagtttgtaatgtgagcatcaaatgtgtatgtaaaaatactttttaccagtctggaacttgggaaaatccagggaatttgaaacatagattttaatgagctggtaaacacaaatcatgtcaataaaggtagtcaggatattttatccttagcattgcttctgcatcctgtgtaggattccaattcttgaatatgttcttttcaaaatcttaagaaaagaaccttttttctttattaacatcatgtgtttactttcagcaaatatt

SEQ ID NO: 240627 - DNA, 896 bp, Homo Sapiens
ttggcgaagcgtcggactaccgttggttggcgcaacttcctggattatcctcgccaaggactttgcaatatatttttccgccttttctggaaggatttcgctgcttcccgaaggtcttggacgagcgctctagctctgtgggaaggttttgggctctctggctcggattttgcaatttctccctggggactgccgtggagccgcatccactgtggattataattgcaacatgacgctggaagagctcgtggcgtgcgacaacgcggcgcagaagatgcagacggtgaccgccgcggtggaggagcttttggtggccgctcagcgccaggatcgcctcacagtgggggtgtacgagtcggccaagttgatgaatgtggacccagacagcgtggtcctctgcctcttggccattgacgaggaggaggaggatgacatcgccctgcaaatccacttcacgctcatccagtccttctgctgtgacaacgacatcaacatcgtgcgggtgtcgggcatgcagcgcctggcgcagctcctgggagagccggccgagacccagggcaccaccgaggcccgagacctgcattgtctcctggtcacgaaccctcacacggacgcctggaagagccacggcttggtggaggtggccagctactgcgaagaaagccggggcaacaaccagtgggtcccctacatctctcttcaggaacgctgaggcccttcccagcagcagaatctgttgagttgctgccacaaacaaaaaatacaataaatatttgaaccccctcccccccagcacaacccccccaaaacaacccaacccacgaggaccatcgggggcagagtcgttggagactgaagaggaagaggaggaggagaaagggagtgagcggccgccc

SEQ ID NO: 240628 - DNA, 1221 bp, Homo Sapiens
  misc_feature (801)..(845): n is a, c, g, or t
atgccaactttgtacaaaaaagttggcgcaacttcctggattatcctcgccaaggactttgcaatatatttttccgccttttctggaaggatttcgctgcttcccgaaggtcttggacgagcgctctagctctgtgggaaggttttgggctctctggctcggattttgcaatttctccctggggactgccgtggagccgcatccactgtggattataattgcaacatgacgctggaagagctcgtggcgtgcgacaacgcggcgcagaagtaagtagccggggctgccgccgcctgaggatgcagacggtgaccgccgcggtggaggagcttttggtggccgctcagcgccaggatcgcctcacagtgggggtgtacgagtcggccaagttgatgaatgtggacccagacagcgtggtcctctgcctcttggccattgacgaggaggaggaggatgacatcgccctgcaaatccacttcacgctcatccagtccttctgctgtgacaacgacatcaacatcgtgcgggtgtcgggcatgcagcgcctggcgcagctcctgggagagccggccgagacccagggcaccaccgaggcccgagacctgcattgtctcctggtcacgaaccctcacacggacgcctggaagagccacggcttggtggaggtggccagctactgcgaagaaagccggggcaacaaccagtgggtcccctacatctctcttcaggaacgctgaggcccttcccagcagcagaatctgttgagttgctgccacaaacaaaaaatacaataaatatttnnnnnnnnnnnnnnnnnnnnnnnnnnnnnnnnnnnnnnnnnnnnnacgaggaccatcgggggcagagtcgttggagactgaagaggaagaggaggaggagaaggggagtgagcggccgcccccagggcggagatccaggagctggcggccgccgatccgacggagaaggggggacccaggccagcaggagacaggacccccgaagctgaggccttgggatggagcagaagccggagtggcggggcacgctgccgccttccccatcacggagggtccagactgtccactcgggggtggagtgagactgactgcaagccccaccctccttgagactggagctggcgtctgcatacgagagacttggttgaacttggttggtccttgtctgcaccctccaacaaaaaccccactttgggacttg

SEQ ID NO: 240629 - DNA, 870 bp, Homo Sapiens
  misc_feature (33)..(58): n is a, c, g, or t
ctttgtacaaaaaagttggatatatatataccnnnnnnnnnnnnnnnnnnnnnnnnnntatatctctaaatgtgtgtatagaaccttttatcagtataacattgatttataattaaatgtgggtgaggaagaatgtgtggagtgtttcagaaattttgatcctaaaagccttttcagaaactcaaagctttcagaaattaatagttatattaatagccttctaaacagcattaagttttcaattttaatatatctatataaaatatagtgtcaaagaaagtaacatcaatatagtgggtctgtaatggaaatctgtcaatgaacatgaactgagttcttcaactacaggttgaaggataattaaacttttcattaggagtgttcagctacatggattcatggaatggtggttcatagtaagtgatggtaatctttttattcatgggtgtaaaccctttataacttagtgcttaaaatattaatcttttgattatataatgtcccatgaattatagtttaccaatagttctaaaacatgctaacctgaccttttccttctaatttgtttttaacttcattcgagatagtacctctcactcacagatatttatttggttatcaagtgaagataggtgtgtctaaaagtgatcttctgaatcctgtctccctagaggtactagtatctagagtttacccaaaaaattttatgattgtaacaaaaggaagtagtgacttatgaaggttttgtttcttgaattttacttttgctacttgtccaatagtggctagtttatgtttatcaatatagttattcactgtgccttaagtttatactttgtttatgcaaactataaaatttccccataaatg

SEQ ID NO: 240630 - DNA, 770 bp, Homo Sapiens
atttcattaagaaactcctctggaaagacttgtgcacaatagtttcccatcggtactcagcctctcttgccccgatccccgactttttctactcaaggccagggaaggcctccaaggtgatgggcggcaggtaacgagtcattgcctctcacgccacctggaaggctggactacttcctcctcccaactgcggggtcccagaaatcctcgggtcccagtggctgacttacaatattcaattcactctgaccaaacttcctatgagaaaatccacggtgagccaaaatgaaaagtacaaggcagtagtacaggaacctggcagccgcactggccgcccagaaacgtcagtggtgctgccccattcggcgaaaggttagggagcaggaaaagaggaagcaggagagggaaggaaagtcccatggaatatgtattccagaatccaaacattttctcagccaccgctccccacgtgagttcccacccccaccccgacaagagcaaagagttctgaggatccaagaacgtgaccgggtcagacaggttcagctactgagttcacgttccagcccagctgtcgaagattgaaaactggatttaagccaatcacacaaaattcctggaaccaagctgggatccacagaaatcacaactgcactggatctcaacacaacaacaaggaatcccttacatcgagtaaccccaattccacccccaccccagtgctcctactccggcccctgcaaggacactcccaacttttttgtacaaag

SEQ ID NO: 240631 - DNA, 899 bp, Homo Sapiens
tcaggggtgggaggtttggggctgtggaggagaggcagaaagcagaactaaagccttcaaaaaccatgatgccccaacgtttgctgaaatatttttgtctgtaaagccaggagattttgtcgcctgcttttgctgcacattaagaggatgctagaaaaatcaagcttgtttgcttctgcattcaaagctttctagatgcaccaactttaaaaatcggtttcttcaagttaactacgtagatttgttgttccaaatgcctctagcctcgacatgaatcccaccttttcccccttcctgttttgcctgtttaaaagaggtgcctgcatgtcactattacccccctccccaaatgagaaaaggattttgtttccggaaactggatcagcttctcctcagttaaagaggaaacgggaagtgggcggctggccttctgaccaggcacccgtttgaaccaggatgctcagggcggcctaggcttggctttgtgaagtgtgtgctgctacgcgtcttgtttttggcagtttggtgtctctgagggaggggaggagagtggcaaccggccactggttaatggaagaggatgcgatgcggagatgcttgcttccttcctttggtccaccgccaccccgcctttggagagggcacccacgtaatagacctcatttgtctccaccagagctcactcttacaaaataagctttggattaataccgagttaggcgcagtatggcaggcagggggcgaaaaggggccggggaggagggggccactacagagatcagagtccgggggcggcagctgggcaggccgcctagcaggagacctccatgtatcaggggtgggaggttggggctgtggaggagaggcagaaagcagaactaaagccttcaaaaacccaa

SEQ ID NO: 240632 - DNA, 1544 bp, Homo Sapiens
gtttaaggaaatgataaaagggatcagaagttcaataacttcctagtaagggaagacacacgattatagttccaagcagtagggtcagaagagccactagtcatgtcagggccggaccatggctgacaggcccacagcactgagtgtggctgctgttcagccgagttacaactcgccagggtctgtcctagtcctgggacagcacttctggaaaaaaggctgtatgtgtctaacaaactataactgcaaaataagaacgagtgagttcctgaatgatgcttccaatgtatcctccacttcccaaagctcatgacttgactatggcatgctccaccttgaatgtaagcaactttgttagccacttccacagagcttcacagtcttcaaagaatttccacagatccgccctctgctccctgcttacaaccccgaagcctcagcttcatcactgataagatgggctaagaatatgtcaaaggagtactgtgatggttcagtgagataaaataatgtgttagtaatctttcatcatcatcgacaccatcttcatcatcactgtagctagtggtctcttaaaacttgtgatcaaaatttttaaaaatgttattgtttcactgttggtcattgtcttggtgcttaaagggacagtcctcatctaaaccccccaaaatccctggtgtgaaacaacttctgttcaacaaaggaggaaaaatgagcctcactgataaatgagaggctagatcctccaggctgccacatgccctccacacacctaactgtttcctcccagaaagctgaagctggccagggggacacagaattgctcatccaaacctggctcaggacagagcacttccaattccgacacatgccccgacccactgcacacggggaatgccatactcactgtatcccatgccctgcacgaagtacttgaaggcctcagcgagcttggccggctgcgagagacaaggagagaaaatgcagtcagttgctggggagccagatcacccgaggccatggggggctgtgcctgtggtcaccttcatttgagagtttggctcaagacaaaagccatcacgtgttgacaggacaaaacacaaaagtaagagtatgggacaatgatgggaaattcaccccacagctgtggaacttggacaagttacatgacctgtctgagccagtttcctcacctgtaatacagggcagagtatcacagctatttctgtgtgtttctgaggagattaccatccacaaagggacatgtctaacccagcaagtggaacataactgcatcggcatcatgagccactcccaatgcaaggggctttgctgcgttcattcatttactcctgacaacccctcacgaggtcagtgctaccttagatacatttcatagctgaacagatttggacaggtaaatccactcagggtcccagaacaagtaagtggtgggtcctgtacattaacccagggctctccaaacctaaaacacttgttcttgaggcaaatcactgtcagcctcaatagcaggctggctgaaa

SEQ ID NO: 240633 - DNA, 2172 bp, Homo Sapiens
ttgggttatattttaatgtgatgtaaaggcaacattgaaatttcttctttaaattaaccacctaatttatccctaaaattacaaagaatcagtcttttacaggtcaagtgcagtaaactaaaatgttctctcagcacaaagcagcactagaaaaagtaacagttatagatgggagttgactagttttgcagtggctgcgccatcaataacaaacagacatcagacggtatccatcccagagcacagacactactacagactagatgcgaagaatgcgtcacactcttggctgataaatgtcctttgtctttgactctttctagtttgaatgaagtggattttttaaaagtttaaatcaggtcacataagttggctgcttaaataacatcatgatgaggtatgaaaagctctgaatatcccttacattcagcaggatttaccagagatgtataatagcttgtcaggggcaacttccaaatagtttttacactttggggttataatgaattctagaagaggacaagtctaaaaaggtttaaaagggtatgctctgaaacagaggtgagcaaccttttccttcagaattcactttgaacagcacatcaacaaaaaaatcttctctggtagtgtatcccaacattgagtcaagatggccaactagcaccgagaagtcgtattgaactcatttgcagttgtcttggcaattaagcgtattttttcattccagtccaagcacaaatgtggatcactgaacacagtactggaagcgccatttgcaggtacagattgcagtcatcattaaatgagccagaaggcagatactgtttttattttgtgtggggggagggggaagcggcacagtactagcaggagatgaaataaaatgattaggaaacaatgaggttataagatcactgttcttatttgggttaagcaggtcatgttgagaagatggttatttctttcagataaggatgctacattaaaggaatcgtgtgcagcatgaaaagattagaatcgagctgcacctaagaaaaaaatcccaaagttactttcaaaagtatgtgttatctgccagtcacagaggggaaaagcacctagggtgaactccaattttttaatgaggaccttgatcaggaccacaaagcctgaaacatttattttaatgcagaaacacagcccctagttacactgattgcatttgggaaaattggagggttttttcgtccttagttttttttattaaattacaggatatggttttcgattactaagtattcgaaatcctcataccagcaacagaaatgaaccacttccaaattctaagacacaaaagaccaaagagaagcaaaagcgatacaaattaatatgtgcccctctcctttctgctctaagggaatctacaaaccagtatcacatttaggagtcaaagtgttaattcttcagcattcctgacaactagaaagcacattcactgaaggctgaaggtgagggagtggatggtttaactttaatatctgaagaatggcgccaatagaggaaagaaaaccatccaatctcagtaaggattaatgcaaatctggctagaaaaagccaccaggtaatccaagggttcactgtggaagaactcatgaaaagtactctgaagtatacacaacaggtctaaacatctcccttgtcgtaagtagttgtgtaaaattcaagataaagatttagtctcatcttttaatgtcagttttttcccccatgttaaagggaatgaggaggagtcctcttttattcccccacaagaaaaagggagccacattaatatgtgtatattcccataactctaatgtaagtgcggatctccaaagcctagggatttttccgtaaaagagagtgggccgttctggttacccttttattagaagggtattccaccacagagagccggaggttttccagatgtgtgtaagagagcaggtgcgcaaggcaagcaaatgagcgcaaacagtattatggaaaacatttgagaagttagctccatgaggactgtgggctccacaagaggactcgactgggtagcctggtctgacacaggaacgtgaaagcagagtattgcttcaaagctggaaaccttccataggagctctcacaatgctaggaagatccaacttttttgtacaaagt

SEQ ID NO: 240634 - DNA, 981 bp, Homo Sapiens
tttgtacaaaaaagttggctctcacacgttctccaacccaaggaggccagacagagggacgtggtcactctctgaaaagttcaacttgagagacaaaatgcagtggacctccctcctgctgctggcagggctcttctccctctcccaggcccagtatgaagatgaccctcattggtggttccactacctccgcagccagcagtccacctactacgatccctatgacccttacccgtatgagacctacgagccttacccctatggggtggatgaagggccagcctacacctacggctctccatcccctccagatccccgcgactgcccccaggaatgcgactgcccacccaacttccccacggccatgtactgtgacaatcgcaacctcaagtacctgcccttcgttccctcccgcatgaagtatgtgtacttccagaacaaccagatcacctccatccaggaaggcgtctttgacaatgccacagggctgctctggattgctctccacggcaaccagatcaccagtgataaggtgggcaggaaggtcttctccaagctgaggcacctggagaggctgtacctggaccacaacaacctgacccggatgcccggtcccctgcctcgatccctgagagagctccatctcgaccacaaccagatctcacgggtccccaacaatgctctggaggggctggagaacctcacggccttgtacctccaacacaatgagatccaggaagtgggcagttccatgaggggcctccggtcactgatcttgctggacctgagttataaccaccttcggaaggtgcctgatgggctgccctcagctcttgagcagctgtacatggagcacaacaatgtctacaccgtccccgatagctacttccggggggcgcccaagctgctgtatgtgcggctgtcccacaacagtctaaccaaacaatggcctgacctccaacaccttcaattccagcagcc

SEQ ID NO: 240635 - DNA, 926 bp, Homo Sapiens
ttggcacacgttctccaacccaaggaggccagacagagggacgtggtcactctctgaaaagttcaacttgagagacaaaatgcagtggacctccctcctgctgctggcagggctcttctccctctcccaggcccagtatgaagatgaccctcattggtggttccactacctccgcagccagcagtccacctactacgatccctatgacccttacccgtatgagacctacgagccttacccctatggggtggatgaagggccagcctacacctacggctctccatcccctccagatccccgcgactgcccccaggaaggtcttctccaagctgaggcacctggagaggctgtacctggaccacaacaacctgacccggatgcccggtcccctgcctcgatccctgagagagctccatctcgaccacaaccagatctcacgggtccccaacaatgctctggaggggctggagaacctcacggccttgtacctccaacacaatgagatccaggaagtgggcagttccatgaggggcctccggtcactgatcttgctggacctgagttataaccaccttcggaaggtgcctgatgggctgccctcagctcttgagcagctgtacatggagcacaacaatgtctacaccgtccccgatagctacttccggggggcgcccaagctgctgtatgtgcggctgtcccacaacagtctaaccaacaatggcctggcctccaacaccttcaattccagcagcctccttgagctagacctctcctacaaccagctgcagaagatctccccagtcaacaccaacctggagaacctctacctccaaggcaataggatcaatgagttctccatcagcagcttctgcaccgtggtggacgtcgtgacttctccaagctgcagtgctgcgcctggacgggaa

SEQ ID NO: 240636 - DNA, 1421 bp, Homo Sapiens
  misc_feature (1238)..(1257): n is a, c, g, or t
gattacttacatatggttcaatttgtcattatcctggaaccaatagagagtagtttgagccctaggagaatatgaatcaatacactgttgagattgcattgcgttcactgatggtgaccttccctcttgcctttaaggcaaccataagtgaggcaaatgtaccatatagagatggatgagactggaccttttgtctttttctgtctccaaactgactttgtcatttttgaaactgctgtaaacattcctctcaatggaacagcctctgcccaacaaataaagttctcactcttgaaagaaactacaccagggttaggagatcaaatgtggcatgtgactgtgactttgtagatgagtggaacctctgccataactctttctgctccccaaattgtcctgagaatttggctaggacagaacattagtcattgactgctcctagccagatctggagaactgagctaggcacaaaattccatctcagttactataatcaaaaaccttctgctgctttgatacttagttttttggccatgcatcttggcaggaatgtaagtttgattgactgtgttaaccttcatgttgagagccttttgaagcagaaatctcttttattggtacacatacaacttgatttcaaaaatggaataaattagaatataatggcatagtataattaagcttggtttcatctgagatctgcaaccacattaaagggtgtcagaaaaattttttaaaatgtatttacttagagttctttcatctggggaacaaaagtaaaacaaagtgaattatataatataatagtccttttagaacagcagagtggtatccaaaaatcaaaccaatgacctactaagaaaagcagaggatcacttttctaacaacagtccaagaaggcctgaagtacctagtgagccacacttgaaatttcaccacttcataaatatctgcacacactgagtaaataaccctctatcacatagccttaaattgcacccctgttgcaatactgcattaatattattacatttttcaaaatctgtagaaaatattatctggaaccccaaaggaaaatcaattaatttttaaaaagttcattacaaagttgactgtataaaatgctaaaacataatccatatatacaaaatgctgttgtttaagaaaataatgggacccagttttagaataaaataattttatacaaaaaagcctactgcattcaaatcaatattttnnnnnnnnnnnnnnnnnnnngaatattgacatgtcttagttcagaagaataactataaagtgttgatttgcttttatgccctctgcacatcttgcaggtagaacaccagtcagctgagggaaagtatcctgcttctccctaggaagagattcatcaccaaggcagacagtcatcgccgagccaa

SEQ ID NO: 240637 - DNA, 608 bp, Homo Sapiens
aaatgttcaaatccttcctttgatgaggttcaaggaattgattctgtttctggaacagataggcacataacagagaaagataaatggctttggctacaaaatcttcatttttcccttggctctttggcaagttaagaaaaaactataacttctatttgttgagcagttgctatatgccaggaagtttacatactaccctctattattaaatactcatgacaactctgtttttaaggtgggaaaaactaaagattagttctcttaagatcataccattattaacagtactcagcagagtgagggtttaaactcagtctctttgacctcctgaccttctactcagttcttttcaccattatacccattggtctctctataatgaataaaaattgtagaaattactcatcctctagcgatttcattgttgatgtctacactaaatggaattccaagttgtttccaaacatgagaatatattattagaattattcaactctgaagcaactcactctaaaacaatcttagaatgtcatgggacagatgaattgtacagtaatggatacagggaaaaatatgagacccctgcctagacaagtattatcaacagc

SEQ ID NO: 240638 - DNA, 2638 bp, Homo Sapiens
  misc_feature (145)..(165): n is a, c, g, or t
aggtagatatgttgatacattggcatgtgtgttcgtattgctactatacacagtgaaaatttatcctaatatgtatcatttcattatatccaggaccaaagtggaaaaaacaaccccactcaagttgaatatcatcataaaggannnnnnnnnnnnnnnnnnnnncaataacataagagtcaggagagttgggaggtatgtcctagggatgtgattgactcttgacatttaacaactttgaacaactgtgtgtaaagtcacagacagaggaagcaaggatttttgttatcggaggacgtctctctctctggttggaagtttggtgcttgggtgcatagtcttccagagctgagacaggaaatgtactgtgctgagaaatgggccccttgccagatgctcccctctccttcctctctgcgaggcagaagtcagaaggtagagattgctggcaaaactgtgaagtcccaccctggggtctcaaccccaactccactgagggcagcctccctgacgtgtgtgactaggcagtaagggtggcggttgatggcggccgggaaaccgagtttcgaggttcacatggccaagtctggcttctgattctgctgccctgcaaagaaattgtgctccagataactgcaccggtgtctctaatgcctctgattcactctcaggcccctcaaaggcctgcagtgatatcactaaaaggtgaacacacctccattagcacctaacttccaccaggaagcggctgaggcactggggaagcctacgagctctctccacgtcaggtgcaacaacgccgaggaagttgctgagagtcagagttattgtaggcttttgatttttaaaaatcaaaattgatctgcattacatctcaatagactcagataattctcaccaaaatttttgtaatgtgtttaagtagcactggaataattcaacttcatttaaatatattcattctatcatgaaaatatttcatacaaacatctatttacatacaaacacattaaaatttgtgaaaagggttcccacccctgtggttgtatggcttgaaatagtttcattgctttgaatatgtacgcacacatttggcaaaagaaaactattacaatttagtatttttaaaattaaaaaaagtgacaacgagtttccaaattcctgaagggaaagataaaagaaaaacaataataatctatcaaggtaccccaagtagatgtaaatttgatatactttgtgaacctttgatctgtggcaaataaacattacaactgtcagtcttgcaacatagttttgcttgtttttctaaaacaaaagatatctggattctaagtcactactcttaagacagaagcttgaggcaactgttttaaaacaaagcaaaacagaaaatgatacctctaccttcttggaagattttaaatgcatgttgcagtgagtgatttaaatttttatatattaaatgaaatttacgaaaagtgccacatactgtctcctggagaagacaaccctttaattcactgttcacaattaatgcaattttaatagttatatttaaatgttaaaaattgttacatttggcctcattggcctttctgggtgggtcgttggtgataaggaaatagtttttcgagtgtgaagaacccccatagggcaaataggtttaactacagtcctagacaggttcaaagagctcttggaaaactaatttccttcttagtgtctcaggtagatcaaggatgaagcaagttaaaataagaataggtactacaagactcaagaactcctcactgctttctttttgatcccatcattcctttgtgtcggaaattcagtctttccagttgtttttgttagtccattcaaatgtccatttggggacatgctcctacaggttagttcctattcctaactctaacacaagataatatttcatcacagaaaagatgctaagggaagatctggtcatgcaggagttggactgagacagctctgagtgaatctccttgagattacagtgtcgcacacacacataggctcccgctgtttttcaggagagcataaagttatttctttattccccaccacatggaatcttccacgtctgctgtgattctgatgcgatgaaatgaccagatgcagcggcttcctgacacatttccttccccagcagatgtaaagtagaaaaatacattctgagtattcttttccacttgcgtttaggttcaaacgggaaacaaacccttccgtcctcagctgttaattccttatagaacctccactcccttgacttctttccctacctacagaactcagtgaatctcaagccttactccgattccaacctgccacagagccttacatttgggagtatgtgtgtgtgtgaggggaggggtggggaagacagagccagagacataagcaaacagagaggcacacacagaggaaaagccagatgagcagagtcccaaagacatgcacagagccagagagactcaagaaaggtcagtgcaggggacttggaacagggaacaggagagggcagctggggctgctgttacccaggatgcccaggcgttctcacatatgcagagagaagaggaaagagagccggccagagaaagaagagctggaccaa

SEQ ID NO: 240639 - DNA, 1210 bp, Homo Sapiens
  misc_feature (290)..(301): n is a, c, g, or t
ttgcaactacatatatttaaaatacaaggagataaatacccagaacacattaagcctactgatttaaacagaacatttcaagactgctacacagaaagggaaggaagctgttaacccagcacagcagcacacctcacatatttacgtctcagagattaaatggaaagaaaggatcaatcaaaacctttaatgctcagttttcacaaacacagtcaagtctatcaaatttccagatttacagcaaaatgtgccctctaaaaaagtgtacattcttcagtttctcctatacnnnnnnnnnnnngcctatctttcaaaactgagcactgggtatttttaacataagccatgtcatatgtacagtttaactatgtaactatgtttcaggaataaacaaaatccatgatattttagtaactcatagtgtatttatagaatgaaaagttctctatcaaaatacacttttcactgggaaaaataaataaaatagacaaatggatctacacaaagtaaacattaactttggtagatttcagtgtagttcataacaagcatatttgcccttattcccccagagctgctcaactaccaagaatttttaaaatatttttaactgagattttattatgttgacatttgtttctcattccacatcatcttcagccaagctctgagcacttacaattctctgactaattgttgggagcttagtcagaagcatctggaacactggtggtggaagagtttgctgtaagacctgcagtaactgctgtggctgtccacacacagcaattgcatttgtcagatggtctacgcccttctcatattcaccttgagctagtaactcttcaccaagctgtatttcttcaaggaagaacttctgaacagcttcagcatctttaaggtcaggtaacttggaaagcccagctctctccttggcaagcttctgtttctttcttcgttctcgaagcctgttcttgaagttggggtcacttcgtcttttgcggtcgaagtagatgcagtacccaatgaaaagggccccgcatacaccggcggcgatggcgctgttccgacccaccatcttctctacaacgctgagcgtggacggtggcggcagggaccgcgaaggagcggtgggccacgaaccctcagagcggtcggcgcagctcacccccgacggccgcgggccaggaacacagaaaggccgagccaa

SEQ ID NO: 240640 - DNA, 823 bp, Homo Sapiens
tttgtacaaaaaagttggcaagcagggctacaagagagatggcctgcgctttctgcagcggaacggcctcctgaaccggcccaaccccttgctggcgttgtcccccgcccgcccccacggcccagaggacaaggaccaggcagtggagagcgcccaagcggaggattactcgcagctgcccggagaagatcacatcctggagcacctgcccgcccggctcaatgaggccctgctggaggcctgcgtggagcccacggacctgctgaccaccctctccaacatgctgcctgtgcgtctggccacggccatgatggtgccctacacgctgccgctggagagcgctctgtccttcaccatccgcttgctggagtggctgcccgacgttcccgaggacatccggtggatgaaggagcagacgggcagcatctgccagtacctggtgatgcgcgccaagaggaagctgggcaggcacctgccctccaggctgccggagcaggtggagctgcgccgcgtccagtcgctgccgtccgtgccgctgtcctgcgccgcctacagagaggcactgcccggctggatgcgcaacaacctctcgctgggggacgcgctggccaagtgggaggagtgccagcgccagctgctgctcggcctcttctgcaccaacgtggccttcccgcccgaagctctgcgcatgcgcgcacccgccgacccggctcccgcccccgcggacccaacatccccgcagcaccagccggccgggcctgcccccttgctgagcacccctgctcccgaggcccggcccgtgatcggggccctggggctgtga

SEQ ID NO: 240641 - DNA, 951 bp, Homo Sapiens
ttggagaagaagcttgaaggttcctgatgctataaaatctcagtaccagtttccaccccctctcattgcacccgcggccattcgggacggggagctgatctgcaatgggatccctgaggaatcacagatgcaccttttgaactctgagcacttagccacccaagcagagcagcaagagtggctctgtagtgttgttgcgctccagtgcagcatattgaaacatttatctgctaagcagatgccttcgcattgggactctgaacagacagagaaggctgatattaagcctgttattgtgactgacagctcagtcaccacctccctgcaaacagctgacaagacacctacaccttcccactaccccttgtcctgcccctcagggattagcacccagaattccctgagctgctctccaccccaccagtccccagccctagaggacatcggctgcagttcttgtgcggaaaaatccaagaaaaccccttgtgggactgccaatgggccagtgaacacagaggtgaaagctaatggcccacacctctacagcagccctactgattccacggacccccggcgacttccaggcgctaacaccccactaccaggcctctcacaccggcaaggctggccccggcccctcacgccaccagcggctgggggccttcagaaccacaccgtcggcatcattgtgaagacagagaatgccactggccccagctcttgcccccagaggagtttggttcctgtcccaagcctgcccccttccattcccagctcttgtgccagcatcgagaacaccagcactttgcaaagaaagactgtccaatcacagataggacctccgttgacagattcaaggccactgggctcacccccaaacgccacccgggtgctcactctcccgcaagcagcaggagatggtatcttggccacaacagccaaccaacgatt

SEQ ID NO: 240642 - DNA, 1489 bp, Homo Sapiens
  misc_feature (567)..(580): n is a, c, g, or t
  misc_feature (676)..(799): n is a, c, g, or t
  misc_feature (835)..(903): n is a, c, g, or t
ggaaaagcacacgaagtatagggacatggggaataagttaaaaatcaaaaggactcactcattgctttctaacatcttttacttcttgaccttttgaaacatccaaaaattagtagtagtataatctatgtcacaatcataatataacagttaagaaaaaacataaaatgaaggcctaaaaagatctttgttactcatctagaattatttggtataacagtattttcccatggaggaagacttggatttcaggcattaaacaacgcagaaaaaaatctcaaggcatcacagggagagggagataacttttgactctggtttcccgtgtttcaggccaggaagagcaaggggagaaaaatatttgtccatgggaacaagtaatcatgctctaaaggacaatttcattcgaatccattcatttccttttcatgcaaaatttcaaagataaagcaacataaaatatggggccacataaaagggagaaggtcttcaaggagaatttgtgcctttaagtttttactggtacaacagtctttcagcctggaggtactcaaagacgaatcatgnnnnnnnnnnnnnnctttatttcaaacaggttcagtgatatatgtgtgtgctacagcaaaggctggttgtggcaaagtttcatttcaaactgtatgatgtgggctgggcnnnnnnnnnnnnnnnnnnnnnnnnnnnnnnnnnnnnnnnnnnnnnnnnnnnnnnnnnnnnnnnnnnnnnnnnnnnnnnnnnnnnnnnnnnnnnnnnnnnnnnnnnnnnnnnnnnnnnnnnnnnnttagctgatcacggtggtgtgagccaatagtcctannnnnnnnnnnnnnnnnnnnnnnnnnnnnnnnnnnnnnnnnnnnnnnnnnnnnnnnnnnnnnnnnnnnnaccctgcctctaaaaaatataaaataaataattaaggaagtagatagtgggtaggggtgatgtgaataattatggggacagttagggcacaaaacagtctaatttagagggtttatataagacaatgcagaaggaaagcttaaatgggttgaagcaggtttctagaaaagtcccaaatatcaaaaagtagtgagaagactctagaaattattaaacacagcatgatgaaaatgttttaagaagactaattttgaccaagttaagaggcaaactaggagtctttcgcactaactgtgaagtgtaaagtgatggtggtatggactgtgatgaggtgacgaggaatggaaagcaaggggcaaactcaataacctgggaaagagcaaaaagtcaggagccaaaaatgtgtgtatgcttcctggctctatgctctcaaaagacctagaagcaacagcaccctaagagccatgagcacacctgaacactcagcttttcatttataagagaaatggccagttctaaaactggaacagagaaggtacaagatgagtctggaagattttgtgccagaaaataaggaaatgttcca

SEQ ID NO: 240643 - DNA, 2337 bp, Homo Sapiens
  misc_feature (1808)..(1837): n is a, c, g, or t
ttggctttccccagtgtgagtgctcccagcaagaaagtggcaaagcagatggccgcagaggaagccatgaaggccctgcatggggaggcgaccaactccatggcttctgataaccagcctgaaggtatgatctcagagtcacttgataacttggaatccatgatgcccaacaaggtcaggaagattggcgagctcgtgagatacctgaacaccaaccctgtgggtggccttttggagtacgcccgctcccatggctttgctgctgaattcaagttggtcgaccagtccggacctcctcacgagcccaagttcgtttaccaagcaaaagttgggggtcgctggttcccagccgtctgcgcacacagcaagaagcaaggcaagcaggaagcagcagatgcggctctccgtgtcttgattggggagaacgagaaggcagaacgcatgggtttcacagaggtaaccccagtgacaggggccagtctcagaagaactatgctcctcctctcaaggtccccagaagcacagccaaagacactccctctcactggcagcaccttccatgaccagatagccatgctgagccaccggtgcttcaacactctgactaacagcttccagccctccttgctcggccgcaagattctggccgccatcattatgaaaaaagactctgaggacatgggtgtcgtcgtcagcttgggaacagggaatcgctgtgtgaaaggagattctctcagcctaaaaggagaaactgtcaatgactgccatgcagaaataatctcccggagaggcttcatcaggtttctctacagtgagttaatgaaatacaactcccagactgcgaaggatagtatatttgaacctgctaagggaggagaaaagctccaaataaaaaagactgtgtcattccatctgtatatcagcactgctccgtgtggagatggcgccctctttgacaagtcctgcagcgaccgtgctatggaaagcacagaatcccgccactaccctgtcttcgagaatcccaaacaaggaaagctccgcaccaaggtggagaacggagaaggcacaatccctgtggaatccagtgacattgtgcctacgtgggatggcattcggctcggggagagactccgtaccatgtcctgtagtgacaaaatcctacgctggaacgtgctgggcctgcaaggggcactgttgacccacttcctgcagcccatttatctcaaatctgtcacattgggttaccttttcagccaagggcatctgacccgtgctatttgctgtcgtgtgacaagagatgggagtgcatttgaggatggactacgacatccctttattgtcaaccaccccaaggttggcagagtcagcatatatgattccaaaaggcaatccgggaagactaaggagacaagcgtcaactggtgtctggctgatggctatgacctggagatcctggacggtaccagaggcactgtggatgggccacggaatgaattgtcccgggtctccaaaaagaacatttttcttctatttaagaagctctgctccttccgttaccgcagggatctactgagactctcctatggtgaggccaagaaagctgcccgtgactacgagacggccaagaactacttcaaaaaaggcctgaaggatatgggctatgggaactggattagcaaaccccaggaggaaaagaacttttatctctgcccagtatagtatgctccagtgacagatggattagggtgtgtcatactagggtgtgagagaggtaggtcgtagcattcctcatcacatggtcaggggannnnnnnnnnnnnnnnnnnnnnnnnnnnnnaagccataattggtgatactgaaaactttgggttcccatttatcctgctttctttgggattgctaggcaaggtctggccaggccccccttttttcccccaagtgaagaggcagaaacctaagaagttatcttttctttctacccaaagcatacatagtcactgagcacctgcggtccatttcctcttaaaagttttgttttgatttgtttccatttcctttccctttgtgtttgctacactgacctcttgcggtcttgattaggtttcagtcaactctggatcatgtcagggactgataatttcatttgtggattacgcagacccctctacttcccctctttcccttctgagattctttccttgtgatctgaatgtctccttttccccctcagagggcaaagaggtgaacataaaggatttggtgaaacatttgtaaggtaggagttgaaaactgcagttcccagtgccacggaagtgtgattggagcctgcagataatg

SEQ ID NO: 240644 - DNA, 829 bp, Homo Sapiens
ttggctccctgtctccccgtctccacgccattctcttccacatgtagccagagggacctttctaaaacgcacatctggctacttccctccactccacaaatccttcgggacgccctgtggcctgcaggacaaagccccacctctgcgggagtggcgtgtgaggctcttcaccaacgggccttgcccgccctgtgttctcctcctgcccgcccccacacatgccctgtgctccagccacacccagcgccttgcagtctaaggagagcccatgcctttggacatgctgttccttctgcctggaatttccttgtccgcctggtgaactcctcgttctgcaagactccgctcaaaacagcaccttcgagaagactgccctgccccttccctgccttgccccatgtccccctcccttgggtccccagagccacgcacatccagccctgcttcccacacacggggccgtgcgtgcctttcttcaccactgagctccttcaagggcagggactgtctttatctttgcatcccccgctgcaccctgtgcctgcccactgggcactcggtggatggtgtgcgggcggatgggtgagtgagcggacaaaggtgggtctgaggctggccctgtgtggtgtgaggtttggtggtcaggacctgggcgggtggtcctgagtgctggcccgtgtgcttgaaagggtgtggtgctattgggtcctactgtgttccccaggtcccgcagcccccggaagccaatagactctctcagggactctcggtctctcacctactcacctgtggagcgtcgccgtccctcgccccaccctccccacgggga

SEQ ID NO: 240645 - DNA, 1097 bp, Homo Sapiens
  misc_feature (1009)..(1018): n is a, c, g, or t
ttggctcaggccttgcccaaacctgcaagacaaagccccacctctgcgggagtggcgtgtgaggctcttcaccaacgggccttgcccgccctgtgttctcctcctgcccgcccccacacatgccctgtgctccagccacacccagcgccttgcagtctaaggagagcccatgcctttggacatgctgttccttctgcctggaatttccttgtccgcctggtgaactcctcgttctgcaagactccgctcaaaacagcaccttcgagaagactgccctgccccttccctgccttgccccatgtccccctcccttgggtccccagagccacgcacatccagccctgcttcccacacacggggccgtgcgtgcctttcttcaccactgagctccttcaaggggggggactgtctttatctttgcatcccccgctgcaccctgtgcctgcccactgggcactcggtggatggtgtgcgggcggatgggtgagtgagcggacaaaggtgggtctgaggctggccctgtgtggtgtgaggtttggtggtcaggacctgggcgggtggtcctgagtgctggcccgtgtgcttgaaagggtgtggtgctattgggtcctactgtgttccccaggtcccgcagcccccggaagccaatagactccctcagggactctcggtccctcagctactcgcctgtggagcgtcgccgtccctcgccccagccctcaccacgggaccagcagagcagcagcagtgagcggggttcccggagaggccagcgtggggacagccgctcccccagccacaagcgcaggagggagacacctagccctcggcccatgagacaccgctcctccaggtctccataaattgtctttgggggattccaccacacccaatgctctggagccacaaggagtgtcccttcttccccagcagagccgtgggagggtccttgtctgctctcctttgaaccttggcagcccttggatggagggctccctttccctccccnnnnnnnnnnctttgttcctgtgaaatgttaatctccgtgagttcttcctggttcatgtgttctggggggtttggggtgggagggaatg

SEQ ID NO: 240646 - DNA, 1716 bp, Homo Sapiens
  misc_feature (1055)..(1099): n is a, c, g, or t
ttggctcctcttcctctatccacttaaaggcacaagtgtattccctattttccctaccaaaagttgggaccccttcttaactaattccactttctcatcctcctaatctacttgttggaagataattctggcatttcttcagaaatgggtaaaagagattgatagaattgttaaggatgtttccaaaactattttggaaagaatgtatgtatgtctacatttaaggctaataagcgtgagcctttctactctagacattccagggtcctaaaaaataatgtctaagagtgacatcagcaaaaatggtggattaggaactgtccagggccatcccttcccaaagcaaaaacaaaaattatctggcaaaaactgttatagtcaactttagcagatttctggaagacagttaattgtttacagcaaccaggtgcacacttaatcagaagaaaggccactgaaaaaggatagaaaagattggtggcattgcaatttagctttgccccacatccctctccagtaccatggcaatcttgaagatggcagcctgcattctcagtgggttctgattcctggatcctagagaaagcagagtggtccttgttctcaaggaattttgtttgttttgacttctgtgtgggttttctgaaggagaggggctttcctatgttttacctaactcagaattctctcagggcagggaagtgttcctcaaaaacattgagaggcaaaagaactagcactgattcctgggacaaaaaagaacaattgaggcaataataaacacaccaaaatctagaaggaaaagctgggaatgagaattttgttttggaatcaatgctttaaaaagttctcacatataacagggaacctacacatacccagggtaggatgcatggttggaaaagacctgataagaccacaggctttcaactttgactagtccttacacaaagtgcaagaagaaagagaaagctaaggcaaacttgtaaatgccccgattaaatattagaggtgtgccccaacccagaaccaaccaggaaagacctggagagtannnnnnnnnnnnnnnnnnnnnnnnnnnnnnnnnnnnnnnnnnnnnttacataacatttaaaatgttcagttttaaacaaaaaaattacaaatcatgtaaaagaaacaaggaagtatggcctatgcacaggaaaaagaaatgaaaagaaaatgttattgaggaagcatagacgttggacttactagacaactttaaatcaactgtcttcaatatgctcaaagacctacaataaaccatggccaaagatgaaacaaaaccaaaatactcatgtatgaacaaatagagaatattaacaaagacatataagttgtaaacagaaacaaataaagttctagaactggagtatacagtaactgaaataaaaagttcataaggtttcaacagttgatttgagcaggcagagaaaaaattatcaaagttggagataggtcaattgagattgttgaatctgaggggcagaaatagaaaacagaatgaaaaagtaaatggtcctaagagacctgtgagacaccatcaagcatactaacatatgcataattggagtcccagaagagcaaagagggaaaactaagttgaagaaataatggttgaaaatttccaatagctttaagatattaattttaatctcacgttaatcactatgaaaataactgaaaatccaa

SEQ ID NO: 240647 - DNA, 1295 bp, Homo Sapiens
gagcaatgctttactatataaaggggactttgtacaaaaaagttggattgatccagacagagcagctaccctcagctctagctgatactacagacagtacaacagatcaagaagtatggcagtgacaactcgtttgacatggttgcacgaaaagatcctgcaaaatcattttggagggaagcggcttagccttctctataagggtagtgtccatggattccgtaatggagttttgcttgacagatgttgtaatcaagggcctactctaacagtgatttatagtgaagatcatattattggagcatatgcagaagagagttaccaggaaggaaagtatgcttccatcatcctttttgcacttcaagatactaaaatttcagaatggaaactaggactatgtacaccagaaacactgttttgttgtgatgttacaaaatataactccccaactaatttccagatagatggaagaaatagaaaagtgattatggacttaaagacaatggaaaatcttggacttgctcaaaattgtactatctctattcaggattatgaagtttttcgatgcgaagattcactggatgaaagaaagataaaaggggtcattgagctcaggaagagcttactgtctgccttgagaacttatgaaccatatggatccctggttcaacaaatacgaattctgctgctgggtccaattggagctgggaagtccagctttttcaactcagtgaggtctgttttccaagggcatgtaacgcatcaggctttggtgggcactaatacaactgggatatctgagaagtataggacatactctattagagacgggaaagatggcaaatacctgccgtttattctgtgtgactcactggggctgagtgagaaagaaggcggcctgtgcagggatgacatattctatatcttgaacggtaacattcgtgatagataccagtttaatcccatggaatcaatcaaattaaatcatcatgactacattgattccccatcgctgaaggacagaattcattgtgtggcatttgtatttgatgccagctctattcaatacttctcctctcagatgatagtaaagatcaaaagaattcgaagggagttggtaaacgctggtgtggtacatgtggctttgctcactcatgtggatagcatggatttgattacaaaaggtgaccttatagaaatagagagatgtgagcctgtgaggtccaagctagaggaagtccaaagaaaacttggatttgctctttctgacatctcggtggttagcaattattcct

SEQ ID NO: 240648 - DNA, 838 bp, Homo Sapiens
  misc_feature (342)..(367): n is a, c, g, or t
  misc_feature (561)..(570): n is a, c, g, or t
taatatgacttcaaaatgcaggtgggggtgtgagcagtgcacctgggctcttgctgtctggagctttgttagtctaatttcaaagcttcaatccggtcttacctggatcccagctgccccacagcacacaagtgtcaccagctccctggctcctggctccctatttgagtgctccttggttctatgtatcagttactaatgttgacaaagaatctttccagaaaccaaaaagggacacagaggaatcactgaagccagctggtaatgtaggcacattgttcagaaactgtggccaagttccacaagagaaaaagtaagagggggagggattcccatacacannnnnnnnnnnnnnnnnnnnnnnnnncatgctgatgaaaagacagaacacgaagcctggagagccagagatgtgtgtgcagcgagccccgaagggcctgctttaggcaggaagcagcctgctctaacagcagcctcccgcttagcggagagtgggatgagcacatgcgcggccgacagggaagagtgaatccagagcagaagtcaagggcaagactcgtnnnnnnnnnnaagaaagggacagaagccagctcccagcaataaaggtcgggttattttgttcttttgtgacatgccctatatccactccctcgccaaagtgacagcaattcgggagatgacattcttcaactgcattttaactgagttcctgcacttgccaaccaagtaagtggcctaatacataaatcctcaatttgaattggagccagctagaaaattaaattttaaaaaggcattttacatggcttatttacaattatacttcttcaagaaccaa

SEQ ID NO: 240649 - DNA, 1088 bp, Homo Sapiens
  misc_feature (175)..(211): n is a, c, g, or t
ttgggactacacttgctgctttgaaggatgaagttgtatctgttgaaaatgaactctcagaattgcaagaagtagaaaaaaaacagaaaacccttattgaaatgtataaaactcaggtacaaaagttgcaagaagcagctgaaatagtaaaaagcagatgtgaaaatttgctacnnnnnnnnnnnnnnnnnnnnnnnnnnnnnnnnnnnnntgtagagaaggttgatggaaatcacaatcttctgacaaagctttctctggaagaggaaaactgtcttattcagctgaagtgtgaaaaccttcaacaaaaattagaacagatggacgcagaaaataaagagcttgagaagaagctggcaaaccaagaagaatgtcttaagcacagcaatcttaagtttaaagagaaatctgcagaatatacagcattggccagacaactggaagctgctttagaagaaggaagacaaaaggttgctgaagaaatagagaaaatgtcatctagagagagtgctttacaaattaaaatattagatctggaaactgagcttagaaagaaaaatgaagaacaaaatcaacttgtttgcaaaatgaacagtaaagcacaacatcaggaagtgtgtttgaaagaagtacaaaatagtcttgagaagtcggaaaatcaaaatgagagtattaagaattatttacagtttcttaaaacttcttatgtaacaatgtttgaataaattgtcaaatttattttctctaagtagtagatttttattatgagtctaaaatgtgattgggtaaaaaaataaatatactaccagttacattttatgatttatgagtggtagtattagaggtttttatgtaaagatttttgaaacataatttatctaactgaaactttaaaataggatagttgttactattcctgtttgctggataattcttatttatctttggtttaatttcttttaaaattaaattggttgttagaatatttttctcacacatagacatggaagtcagattcattctttgtgatgtttgtagccaccattcaagtgaatttgtagtaagtcttggtcaatatgattttaaat

SEQ ID NO: 240650 - DNA, 604 bp, Homo Sapiens
ttttctaaagataacctttgaatttacttttcgtacctaaattggccaactaaatgttggatatttgttgtaagcttgttttgattaatagaatttagatatatgaaatatatgtatatttcaatagtataggcacgtaagtaccaatttcttaagaaaaatatgcttatcataagaaatgattgacattttctcagcatttttctatttgttattcctaaaacaaatacaatatagttattcctatattctatttctatatatctataactatattcctaaatatagttattcctaaacaaacaaatataaaaataaaataactgtatttctaaaacaaacaaatacaaaaagtagggcctttttggagatgggtatcatctcaaaggagactaattgaacagttgttattcaaaatcagaaatatttttgaagtaaaactctaattgtgtattgtgttgaaattaatatgtgttgtttctttcagtcagtggaacctagtgaagtgaaacaagcaacttcaacatcagaccagcatcagcagttgctgatccacccagtactgaaaaagaaatagatcctaccagcatccctactgctatca

SEQ ID NO: 240651 - DNA, 1081 bp, Homo Sapiens
  misc_feature (891)..(936): n is a, c, g, or t
agttcaagtaagtcatcaataaaacaaggaaagcaacatatatatgcttatttaaagaaaaaatatgacaaagccttttagcaaggctttaaagcattccacaatgtctaatgatatgcagagtaaaaccacctgcaggttgggttttgccaacagcatctgagttttcaattttggcctagagaggcacatttgataatacagttattctctgaaaaagtcatgtattttcacaacattctacctttgctcatgttgcaacttttgccctaaatgtttttcctactacttttataactaatgaactcttggtccccttaaagttcatctaaattgttacctcctttatgaaatatatctaactaatccctctatgtcttgcatagacttataacattaatcacacactatgtatttatttagcttgcaagttagatggtgatatctatgaggtagaaatgttattcataatacatggcacatacttatgtaaacacattcttcccttaatttccccaacctaccaggcagatccatgtggttcccatgggccaagacacacccagcaaaactctgctttacaattctggttacgacagaccatgtgattacaaccaccatccttctcaattgtgacatggcatttgggacattcctatgaagagaaactataaagttggtgtcaatgctacactaggttgcattactaacattaaggaaaagccagttctagatttggtttgtttttaaacattttatttattgtggttaatacatataaagcacttagaacagtgttgaacacttaagcactatttaaaatgagctgttaccattattaccactggcttttaagacatacaacaatttaaggacttgtttttttaaacnnnnnnnnnnnnnnnnnnnnnnnnnnnnnnnnnnnnnnnnnnnnnntattcagaggcccaatcataggtcactaaagccttaaacttctggagtcaagtgatctttccacttcagccttcctaggatttctttttaagtagggctgagagacaaatcattttaagtacttttagtcatatatatagtccaa

SEQ ID NO: 240652 - DNA, 551 bp, Homo Sapiens
ttcaatatgaaggcagcagctgggggaggggcatttacaagggaaaaaaatgattgagttcggtggtgacagcagcaagttgggactacaaaccccaatgattttgtcaatgggcccttacaccccttcttgccccctgggacagcccccccactctggagctggcaagggagtcacactctctttggtctgcgggaacgcacccatcaaagaaaaagggggcacctggggagggtgggagatgttgggcacttccttttcctctggtcacacccagtctcgagggaaaggcgccctcacccttggtgtggagttccccgaggtggctggggggtgattttcccctcctattatggcagaacccccaaatcctgtctatccaaattgccaactcctcaccccacgggctcaaagtgcaatccagcggggcacagggctgggggcctctgtgatgtccccactctgccccggaaaatggggaggcggtgtccctggggttgggagttctttttttatgagtgagtactgcgggccaacttttttgtacaaag

SEQ ID NO: 240653 - DNA, 1559 bp, Homo Sapiens
  misc_feature (623)..(632): n is a, c, g, or t
gtacagacagtcttgccatgttgcccaggctgattattcatatctttttaaatgtttgcacacattagggttttcaaacacatattaacagtaaggatggcttacactcagaaatttcaacattacaaaacaacattttataacaagccaattggatcacacatttcctgaaggaaggggcttttgtcttaaactgctggtattcttcccggagtctggcacgtaacatcgggtacacaaatatttgactggcaggagggagggaatggggagaataacacaacagggtcagcaaaagctgaagaatggaatttgccacaatatattttcttggaggataggctgggcaagtgggttattcatttgttcaaaccatcctgagatttattttcatggtgatggtccaaatgaagtaaattaaaaatagaccacattaccatcaacagcttttctagcatattataattcagtaatagtggtatttttcactttatataagattcactgtgatcatgcagttaggattacacatcttctggaatttcaaaagtaatcaggcagtaatataaactagtctatcctgattaaagccatatatccaaaataacttctccccccccacnnnnnnnnnntccctgaacttcattcgagagaagatctaaaaaagttaactgattttcatattcaggaacaatcttcgtgggcctggatgtagccaaaatgtgaaaaggatgctaaattgcttatcactcacactgaaatggatagcatgaatgtaatttacttattcctggtcattcaatcttatcctaacaatgaacctttacgtaggttcaatatcatgtatgtacaaaaatctgaggctacaaagctttccctaaaattttgaaattaaggggggaaaatctgccccaatttcatattaaatttaatcttacagtatatctacctatctcttgataaatttattagaattaaaaatgtcttctaattctagtaactgttagaagctaaaagtttccatataatttgaatttttgtgtttgattattctttccttaagaatatgtaaagatcagatctcctgttttaggatcatgtaaagacataagaaaattgcagctttgaaatttatatgggtcagtaaccatgcacacaaagagaaaaaactgaagaccgtgctcttcagtttcagtaacatgtctgcacctattttcaagattagcttctcaataaaagtaaggaaaacgatgactcatcgtcagccatgcatgctataaggagacagcctctactcttccatagctcagtttttccaaacttactgttttcctgcaccctggccacgaagcctgtgagaggtatctgtggagtcaactgaggcatagggggagggggtggagcaatagaaactggtagcaacaacacagtatgggggaagtaaaacagataaaggaaagaaaaggaaacaaacaaaaagcagaagtcagttacaaggaccacaaacataagtatgcaaagaacagtttgcaaatgaaacaaaacaaaacaaaaaccaa

SEQ ID NO: 240654 - DNA, 2239 bp, Homo Sapiens
ttcattctgaaaataattttattattttacagttgttcaggaaacttcccaggatgttgtacccaagatttaatcaccacagtagatttagagcagatcagtcagcccactgtcttctctcttctttagggagaggctaggcagtgaacacatcacgtatgcaatgagaaaataaccaactggtaggatgggggaggggaggggaggcagggaataggcacaaatggaattctatcctggctgtccttctcaggtctatctatatttaattttgtcttctctatattctccttccattgccacagagggcagagacaatggggctgagaaactgtaataactgtcactaacagcaaagtagcttagtacttcaagaggtcaggagttgcagtgtggtgttagaccagtcagactcctggctgagagtcaatgcctaatattggctcccagtggcccctgagcactgtctcagggtccacattccaggaatattcagatattcctggaatgacaagaattggaaccctgctgtccatagacacttctccctgccctttggtgaaaggaaagacttgggccacttaataccttagtatacatgtgatcaagggcaaaagcaaagggattctatccttatagtctaagacctgaaattctccctccaattatatctgaaattggcagggaagaagatgctgtcctcccatgtgatctaacagctaaaacccctagggagttccttcagctttcaccaccctattctgcaagagacctaaatcagatgtcctatgaggtgacatgttcatttccctgaactctgtttatggcagagccaccttccccctgaaacaggagaaaatacaggcaaacaaggcaaagaaagttatcaatcaaaatgatactgaacttcagattattaggtttattgaaaccatcctcttggcttggctgaaagacattcctcagtatcttttacaggaccacaaaagatcagggtcctgcaaaatctcaacaaatattaggctcaacaaaccaaatgtgattctcagattaagcagaagcgttcaggctcagggcagtagaagaaagcagactcgccagtccctgcagctccaacctgtcctcgtatccacctctgtttttgcaggcactttccgtgaagagttggagagaagacctgtaaatgggaagactgttccactggaattgatgttctgatgttagaggtgagagaattccaagttttgaggggagtggtccaaagagtaacaactaagtctatagatggcccgtaaaacacagaatgagcaggacatgaatcattagaaagtagatggctgctagaagtggcactcgggtccgtgaatgacagagtgaacgcaggactcgcttccatccaacgccactccgggtccttcgacaactgttgcttgtaagatctattaacagtgcctgctcctgagtgccacaggagccaatgataggagtccgggaagagtcccattcactgtgctctaaccgtctgatctgctcctcggccacagagagagcattctcagcagccactctttggtctcgttcttcttccagcagcttccttaattcattcacttcctgtctggtgttgcatagctgctgctgagcttcagaaaagctttgctgcggttcccttagttcctcagggtcactctttctgtgaactccattcttttcctggggagctcctggagcaacatctatatttagtggccccgcctgcagctcttgaacctgcttctccaagactgcacagtgatttaaaaggtcaccatagtgctgctggttctcacgaagactctgactggtatcgcagagctgaatggaaagggtgtttttctcttccagtagctgagagaagttgctgttcagttgctgaattcttaactccttttggtgaatttcctttaagctgtcattgagctgggtcctgagaagttctgtctcataaaccagattttgtgacccatctggggaagctgatgtctctggggatgcctgtctttggtattgcactttgagaggctgagtctgggaggaagaagacctcaattcccttataagattctgcagatgactgagctgctgatctttatctgagatagccataaggtactgttccttcattctcctctcatgtatttcccaggaactcttctccatcctgagctgatgcagctcatgctgccaggagaggttccaa

SEQ ID NO: 240655 - DNA, 1243 bp, Homo Sapiens
  misc_feature (163)..(175): n is a, c, g, or t
ttgggtaccgttctgattagaaataggaagtctccccacccccgccctggccaagaacgtgcaataaattggaagtttgccccggggcagcaagaatttatgctgccattgaaaagcaggtaccagtgccccttttcagacagtttttgattcgctctagacnnnnnnnnnnnnnaatagggaaaaaatttgataattttcttttttctacatgcacttaagactaaaacacaggtttggattaattttatttgcttcctttttccgcttttcttctcgcagagcctgatgggagaatgtccagggcagggaaaccacattttttgtaggtgataactcaatgaaaattggtgcttattttttacacttctctcttgtggctctcttgtggtgctatctatctgttttaaggtctccttgaaggcgcactggggaccctggccatgcctcgttctccctgctttctttatcctgttattgcctccacagtctgttgccaaggactctaagatcaatgcacgtcactttcctttccactgggcaggatagccaagcacactccctcctgcgctctcccgccccggtgcgtccactcccgagggctgttatgaggactgggttgtgcctacttgatttgaaaacacacacaagcaataaaaagcctcttcctgcattgtctgtggtgtgaccatagcagattatatttggttcctgaatgtttgtggtgctaatttctgtgtttgttccaagccgttcagtcatgccatgcgctgcctcggtagatggagtaatgtacaatgaactccatgagtctctccagggctgcctgcagcacgtcttttccaagtagcctatttggattcccatctcaaatgtcctggatgcgagcgtcagcggctccagagctcggggcgggtgaggtcccctttggggaaccctttcctggccatcgaggtcggggggctgccgtctgtgggcaggaggacccgaggggcagccaggaaaggcgatctcttcactgtgaaaagttgcccgggtgcagcgccttttccttctaccatgggaaatgcaggctgggcccttggggtgagcctgcggggctctggtgctgtccccgacccccaccaccaccagaatgcagttccagcttaggaagccacaaacaagccacccaggaggaacaaaacaccgccagcgtggattttccaaatttccctggaaagtaagtctcgctcttgccaaa

SEQ ID NO: 240656 - DNA, 1467 bp, Homo Sapiens
  misc_feature (275)..(287): n is a, c, g, or t
  misc_feature (1249)..(1297): n is a, c, g, or t
actttgtacaaaaaagttgggttataaatgttaagtgtgcctggctttcaatcatgcacggaaacccagtctcagtcccacggacagaatgggcgaggcatggattctgggttgcagtaccgttctgattagaaataggaagtctccccacccccgccctggccaagaacgtgcaataaattggaagtttgccccggggcagcaagaatttatgctgccattgaaaagcaggtaccagtgccccttttcagacagtttttgattcgctctagacnnnnnnnnnnnnnaatagggaaaaaatttgataattttcttttttctacatgcacttaatactaaaacacaggtttggattaattttatttgcttcctttttccgcttttcttcccgcagagcctgatgggagaatgtccagggcagggaaaccacattttttgtaggtgataactcaatgaaaattggtgcttattttttacacttctctcttgtggctctcttgtggtgctatctatctgttttaaggtctccttgaaggcgcactggggaccctggccatgcctcgttctccctgctttctttatcctgttattgcctccacagtctgttgccaaggactctaagatcaatgcacgtcactttcctttccactgggcaggatagccaagcacactccctcctgcgctctcccgccccggtgcgtccactcccgagggctgttatgaggactgggttgtgcctacttgatttgaaaccacacacaagccataaaaagcctcttcctgcattgtctgtggtgtgaccatagcagattatatttggttcctgaatgtttgtggtgctaatttctgtgtttgttccaagccgttcagtcatgccatgcgctgcctcggtagatggagtaatgtacaatgaactccatgagtctctccagggctgcctgcagcacgtcttttccaagtagcctatttggattcccatctcaaatgtcctggatgcgagcgtcaacggctccagagctcggggcgggtgaggtcccctttggggaaccctttcttggccatcgaggtcggggggctgccgtctgtgggcacgaggacccgaggggcagccaggaaaggcgatctcttcactgtgaaaagttgcccgggtgcagcgccttttccttctaccatgggaaatgcaggctgggcccttggggtgagcctgcggggctctggtgctgtccccgacccccaccaccaccagaannnnnnnnnnnnnnnnnnnnnnnnnnnnnnnnnnnnnnnnnnnnnnnnnacaccgccagcgtggattttccaaatttccctggaaagtaagtctcgctcttgccaaagaaaagtctggcttggaaagtctctggagcctaggatgccagcatgtgcccatgactgtcactttcatctcttcaaaagaaagctatatctgaagactgtcccccgaccccc

SEQ ID NO: 240657 - DNA, 1860 bp, Homo Sapiens
  misc_feature (348)..(393): n is a, c, g, or t
  misc_feature (1666)..(1695): n is a, c, g, or t
aattgtcattttggagaagcaaattttcaattccgagatcaggattttggtaaccactgggaggctgggaagctcatcttctacctcctgggaaactagtttagaatggaggattaaatcaccttattttcgctcttgcagttaaaaattgtacaatcctttgatccaggatacttaaggtatttcctggtagttttgaaaatagcaaggatgtgctgaattgtctgcagcccatgtcataaaagggttttactctttctggtctctgtcttcaagtttccctttgattctaaaacaacatttcataacagggttgaagtaatgaattttcagtaaaatcaatttttnnnnnnnnnnnnnnnnnnnnnnnnnnnnnnnnnnnnnnnnnnnnnngcaaccagctgttaagaaattaatagttcacagaaggtatctttcaagaatgtttacatttcttgttgactattttcaaaatactattctaattctaaacggaaacagactgcaggcttcagtatgctcatattatagaaaagcaaccactcttttccgtgaactcattaataaaaaagcaaggactttcacaaaagtatacccactgcgaaagaacctcaaaagttagccaatctttaaatcctgtaagattctagacatcagctaggtactgccagtatcacttacgatttcatgtaatctttgatgtacttctggtaggcttcttttgtgaaacttgtttcctgcaggtgatggttcatgacaatatcgacaccagtgattactgtgctttcggtaccttcgccctcggggccttcagcggaggcatttccaccaatgagcgagtcatcaatgttaccttctgtcctactgaccatctgcattaagaaaaagcagtataattgcaaaagacacaaacgcatccaaagcaccttccacgccaatagttcacggataagaagtattcttagttcttgctgaaaataaaaaaagcaccattttgggaataaagttgtgacccgtggatttctcaaaacgacctaacttaaaagagttgtctgttggccggaacaaaaaatggggtcattaaaaagttgtttccagttgcgggcatgtgatgcctcccggttggtaagtggggacaggacaaacacgaaaggactccaggctcctaagccggaagcatcatgtcccggacaaccccgggaggaggatgggcgccgaggcggcgggcctatttccaggatcagctccgcctccagttttctagaaaaacccaagcccggaaagagcgtctcctccgccaggaggcggcggggaggattgcacaacctcaggcgggggagcggaggaaacccgagcccgctcggcccggactcccccacgcgcaggcccgaccgactcaccttcccctccacctccaggcacaacccgtccgcgatctcccggatcttgtagatgtcggagaacatctcatcgtctgccggatacacagagccgcccatcaccgtgcgcccggcgccgccatttcccgcatttcccgcgccggcggccgcacgcgggatctgcccctccgtagcacaccagagctgggcgcgagccccgggcaccgacccctccgcgctcggctaagaccgccggcgtcccctaggcccgcgacggctgcgccttnnnnnnnnnnnnnnnnnnnnnnnnnnnnnntgtgcggcagtaaggatagtgcagtgaggactcacggctgatgaggtcccggtagataatcatgatggcgactgaagggagacgacgacggcgctagcttagcacgagcctgaaactcggagcgagcgcggtgcagccggagcggcgctcggggggaggggccaa

SEQ ID NO: 240658 - DNA, 712 bp, Homo Sapiens
tttttcaaacatacatgcaaaaggtacattaccattaacatgcagctacatttccaggctaaagatgtattcccaattcaatctgggccgccacaaagacagacagaaagcgcagggatttctttcttttgcatctagtgcaaaccaaaagaacaacagtaaattgttcaaggtctatcagtggatgcagaacacccttaccaaatcagcggtagctcatttttcagaaggctgtggcatgtaccacccacaccctgctctaccaacaaaaactcagatactgtctgaataacccctttggtaagtcatcttatactgttctaagtaatttctgtctactgttgactctaatcttgttcagtatagctttatgtttctcttcttccttatacagaagcctatgaaaactaggataatgaatgcctttgtttctgtacagcttccagcagttccttccatagaagacaccaagttatttattattagtaaaacaatttgcataccagttcagcagtcagctctatttactaagctagtactgcactaggcttttcaatgatcagctgcccattatcagtaaaccaaagtgaaaaccactgatactgatccatacgtatacagcaaaatatgattatgaagtgaaagtgaggccatatctagaggaagatcaatggtgttctctgatctccttcagcatttaaactctactgta

SEQ ID NO: 240659 - DNA, 1270 bp, Homo Sapiens
ttgggagaggagttgtgaagggcgcgggtggggggcgctgccggcctcgtgggtacgttcgtgccgcgtctgtcccagagctggggccgcaggagcggaggcaagaggggcactatggcagacaaagttaggaggcagaggccgaggaggcgagtctgttgggccttggtggctgtgctcttggcagacctgttggcactgagtgatacactggcagtgatgtctgtggacctgggcagtgagtccatgaaggtggccattgtcaaacctggagtgcccatggaaattgtcttgaataaggaatctcggaggaaaacaccggtgatcgtgaccctgaaagaaaatgaaagattctttggagacagtgcagcaagcatggcgattaagaatccaaaggctacgctacgttacttccagcacctcctggggaagcaggcagataacccccatgtagctctttaccaggcccgcttcccggagcacgagctgactttcgacccacagaggcagactgtgcactttcagatcagctcgcagctgcagttctcacctgaggaagtgttgggcatggttctcaattattctcgttctctagctgaagattttgcagagcagcccatcaaggatgcagtgatcaccgtgccagtcttcttcaaccaggccgagcgccgagctgtgctgcaggctgctcgtatggctggcctcaaagtgctgcagctcatcaatgacaacaccgccactgccctcagctatggtgtcttccgccggaaagatattaacaccactgcccagaatatcatgttctatgacatgggctcaggcagcaccgtatgcaccattgtgacctaccagatggtgaagactaaggaagctgggatgcagccacagctgcagatccggggagtaggatttgaccgtaccctggggggcctggagatggagctccggcttcgagaacgcctggctgggcttttcaatgagcagcgcaagggtcagagagcaaaggatgtgcgggagaacccgcgtgccatggccaagctgctgcgtgaggctaatcggctcaaaaccgtcctcagtgccaacgctgaccacatggcacagattgaaggcctgatggatgatgtggacttcaaggcaaaagtgactcgtgtggaatttgaggagttgtgtgcagacttgtttgagcgggtgcctgggcctgtacagcaactctccagagtgccgaaatgagtctggatgagattgagcacgtgatcctggtgggtggggc

SEQ ID NO: 240660 - DNA, 1216 bp, Homo Sapiens
  misc_feature (447)..(455): n is a, c, g, or t
  misc_feature (820)..(870): n is a, c, g, or t
actttgtacaaaaaagttgggaggaagcatctgcagtcagcacagcggcagcccagttcaccaaacttcgccgaggcatggatgaaaaggagtttacagttcaaatcaaagatgaggaaggattgaagttaacattccagaagcacaagttgatggcgaatggagtaatgggagatggacatccactgtttcataagaagaaggggaacagaaagaagctagtagagctggaggtggagtgcatggaagagcctaatcaccttgatgtggacctggagacccggatccctgtcatcaataaggtggatggtactttgctggtgggtgaggatgcccctcgccgggctgaactggagatgtggttacagggtcatccagagtttgctgttgatccccgatttctagcgtatatggaggatcgcagaaaacagaagtggcaaagatgtnnnnnnnnntaataaggcagaattgaactgtttgggaatggaaccagtacagacagctaactctagaaatgggaaaaagggtcatcacactgaaacggtgttcaaccgggttttgccagggcctattgcaccagagagcagcaagaagcgggcccgtaggatgcgaccagacctttctaagatgatggccctcatgcagggtggaagcactgggtctctatctctgcataacacgttccaacacagcagtagtggcctacagtctgtgtcatctttgggtcacagcagtgccacttctgcatctttgccttttatgccatttgtgatgggtggtgcaccatcatcccctcatgtagactccagcaccatgcttnnnnnnnnnnnnnnnnnnnnnnnnnnnnnnnnnnnnnnnnnnnnnnnnnnnggcttgagagcccctggctacccctcttcaccagtgactaccgcctctggtactaccttgcggttgccaccactgcaacctgaggaggatgacgatgaggatgaagaagatgatgatgacttatctcagggctatgatagctcagaaagggacttctcactcattgatgatcctatgatgccagctaactcagactccagtgaagatgctgatgactgaagccccagcatgggccccattgcttgggcggctgctgtattttcatttactctggcccttggactatggaaacgtgggaggggcaggggagatgtggggaagtccaggactccaggaggtgaaaagg

SEQ ID NO: 240661 - DNA, 1112 bp, Homo Sapiens
atttagggcaaacagtcttcaaatccaatacagacaattcttaaaggttaccgtatcattcacatgtgatatttgcaactctgagctatttctttatagaacagctctccgcagatatggcaaagttgatatgccatgaagttcaaggcctgtatagtcaagccaaggactcaaagttgcaccatctttaaaaaggtttggcatttctggaccacaacaatgcacaacatgtaaagaaggtaggaaacagttccccctccttgttaaatggttaaaaaaagttacatggtagcttggaattttgcataaaaccccataatataccttggaaaagtccaagggcaatttgatggcaatggattggggccctatatatatatatttttaatagaacccatgagatttaaatgggcattaatcaaatcaaaaaatattaagcacctactggtttaagagatttaaatttattagagattcatgatcaatttctttccacctcgaaatcaaggtgtaaaaaccagctattaagtgcattccaaacttctcctatgtagcacaggtagaattttctgtccattggcaccaaagtgaagtcacatttcctcttgggagacagaaattccacacctgaacacagagtaagttaggaaaaaatgacccctgttgtttattactattgtgattctgagatctaggatttctaatatactagcagtaaacaaagcaaattcctggcaacaactgtcaggttagtgatgctaactcccttcccccaaccaccataaaattttagtaagaaaagaattaaaagtaatgactaagcagaacaaattggaaataacaagaaactaaggggacagttcaaaccaacaacaaaaaatcctaaatttgaaatcactgcaactgaagataataagtgtgcttcaccccaacccccatcccaactctgaatttaaacattccgtgcaaaagagcaacaggtttctggataaagatgtagcccttctttaagttttagtgctctgcagttttctgcaattttatttccctccccccaagtttattcaaagtatttaacagaatcttccatttcccaacttttttgtacaaag

SEQ ID NO: 240662 - DNA, 630 bp, Homo Sapiens
aaaaaaataaaaggacattttctgtggatacaggttaggatgttttaggtaagaaacccaccattgcagggtaattgtttgcggaattcagtagcacttggaaagttctgttttcaacctgaaatttttgctgtttttccagaaaataacttagtaacaaaatgaaggccgtgaagctgcaggcacactccagaaattagtgtgttcttttaactcgtgtcccaaagagacagcagttcctaacatgcagtgatgagtggacacaccgtggtgcgttggaaatcccacgttcacgtctttgacaaggaagcctcctacaatgatcttgtgctttaattttacttgatggtcaccctggttacttcattatgcctttgaatgaagtcctgttcttagtggctgcattaccaaggccatcttgccccaaagacccctcagggtcctgaggcagaattccccccaccccaccaggggactcaggaaaatgaatgatcgcagtttgccaaaagaggtcagatttcccactgacgctggttggtctggaaaattactctgaaaactcgaacgcacctctaggaatctcaatgagaagctaagaagcaggctacagtctcagaggtttatgacacc

SEQ ID NO: 240663 - DNA, 1349 bp, Homo Sapiens
ctttgtacaaaaaagttggcttttatatggatatcttataaatatataatcattgctaagtaagaagttaagttgttgctatcgcaacaatcctggcagacaattgagtaatattttgatgatttattttgtttgtaattagttattataagaagatctagatcctagatattagaataaaatttattttctactgtatccatttcaaatgttaaaatattgtttaatatttttgaaatccctgagtatcaggccttgttataaataagctgcataatcaataaatagaacaagggactttttgttgataatccaaatactcaaagtttacgtaatgaaaattatagcgtgtgtgcaaactcttgagggttgattatgctgcaatttagcatgttggaacgtctagggagaaggttgactttttgcacttctgtatatagtcaaaagagagaaacctgtataatagtaagatcttattttgaataaaaacgtctataattacaaggagttttgttaaggctaatacaatgacagactgagcaaaattgcttgcaaaagtggcacagagttagcactccataccccttcaaacatgttgctttgctttcttgtggacagcttgtagtttgccaggattttttcagctggaaagatacgccatcctttcaaaccctcatgactgacaaaaactccatggggccaaatctgcctgaagatcattaccaaaaatagcaggtacttctaccattaaggtgaaatcatggatcagatattccttacatttttcaaaactactgcatgtttaaaacttcaacaaaaaaagagagaaagaactatactaagaacatatattattcagatcagtttctgccaatttcagtggtttattgttcacaaaaaaatcttcaaaacaagtattgactttcacaaaatttaaatcataaacaggcaaaccaaacagcacactgtagctatagttgttatgtgattgttttttaattgctgtaggatcctgttctttcagcaggtgaaaaataaaacgcagttcaaatttcatggttttaattttcaactcagaagcactcaaaaatgcaaaatgtgataatgggcacttgtttaaaagaattagtgtatccagccttcactccagctggttaaaaatgttgcacttatcagcaaccctaccactttcatctgctgaaaggacaaatgtgcttggttttactattatgtaatcacaacttactttctgcttggagttgcttaaaattatgtattttgtcttgggctgcaatttgttttatgcttattttattaattactgcagtagttgactttgctggtatggg

SEQ ID NO: 240664 - DNA, 1538 bp, Homo Sapiens
ttgggagaaaaaagagaagccaaaatctgataagactgaagagatagcagaagaggaagaaactgttttccccaaagctaaacaagttaaaaagaaagcagagccttctgaagttgacatgaattctcctaaatccaaaaaggcaaaaaagaaagaggagccatctcaaaatgacatttctcctaaaaccaaaagtttgagaaagaaaaaggagcccattgaaaagaaagtggtttcttctaaaaccaaaaaagtgacaaaaaatgaggagccttctgaggaagaaatagatgctcctaagcccaagaagatgaagaaagaaaaggaaatgaatggagaaactagagagaaaagccccaaactgaagaatggatttcctcatcctgaaccggactgtaaccccagtgaagctgccagtgaagaaagtaacagtgagatagagcaggaaatacctgtggaacaaaaagaaggcgctttctctaattttcccatatctgaagaaactattaaacttctcaaaggccgaggagtgaccttcctatttcctatacaagcaaagacattccatcatgtttacagcgggaaggacttaattgcacaggcacggacaggaactgggaagacattctcctttgccatccctttgattgagaaacttcatggggaactgcaagacaggaagagaggccgtgcccctcaggtactggttcttgcacctacaagagagttggcaaatcaagtaagcaaagacttcagtgacatcacaaaaaagctgtcagtggcttgtttttatggtggaactccctatggaggtcaatttgaacgcatgaggaatgggattgatatcctggttggaacaccaggtcgtatcaaagaccacatacagaatggcaaactagatctcaccaaacttaagcatgttgtcctggatgaagtggaccagatgttggatatgggatttgctgatcaagtggaagagattttaagtgtggcatacaagaaagattctgaagacaatccccaaacattgcttttttctgcaacttgccctcattgggtatttaatgttgccaagaaatacatgaaatctacatatgaacaggtggacctgattggtaaaaagactcagaaaacggcaataactgtggagcatctggctattaagtgccactggactcagagggcagcagttattggggatgtcatccgagtatatagtggtcatcaaggacgcactatcatcttttgtgaaaccaagaaagaagcccaggagctgtcccagaattcagctataaagcaggatgctcagtccttgcatggagacattccacagaagcaaagggaaatcaccctgaaaggttttagaaatggtagttttggagttttggtggcaaccaatgttgctgcacgtgggttagacatccctgaggttgatttggttatacaaagctctccaccaaaggatgtagagtcctacattcatcgatccgggcggacaggcagagctggaaggacgggggtgtgcatctgcttttatc

SEQ ID NO: 240665 - DNA, 1497 bp, Homo Sapiens
  misc_feature (349)..(358): n is a, c, g, or t
  misc_feature (1049)..(1066): n is a, c, g, or t
  misc_feature (1129)..(1145): n is a, c, g, or t
aacttttattaaaaggttaggatacaagattgactttctttcgtaaaaggactgttttacttttcctgaagtaggacatatatgcactgtgataaaacagaatgagaggtcataattcatgggaattcctatacaaggtgctgatcctgggtttggagctgagctcctcacagcagcttctttcagctatcttataggaatagtgttccgtggggcaagaaatacattggttctaactgattttcaatcccctttctccagtggaataaaccactttcacaaagagctgccctatgtataacccacagatttctagcttgcaacaaagtgacaagggacaaataggggnnnnnnnnnnttaagaaaactaacactgaagtaatcatacttctcatgtctccgaacagagaagtatgggggacctttaaccaaaggaaattaaaaatatgcaagttatattacctagttcattcactgttagctagatttgttcacttaaggctttaacccctttccaaaccaacaactttgtcttaatccagctatgtttgctaataaacgaaatgcatgcacttcccacatatatacttcactgagcctctgcattcagtacctggcagtgaaaaagtatgctttccccacaagtcagtactggagaataagaatgagaactccaactaaagaacaatgcctccctcaccccagtaatgttatccacattttccctaccctcacattagaataaagacatcctcccaacttttcatctcctatctccaatctgttcataggagatatatcttttgatcttttattataagggtagaatatagattaagatcatcaaaatccaatttcacatgtggcactaggaaaatggaatgctataaaattaatccccatcacccaagtagggatgccggtgcttttatactgagtctttactgccaataagtgatgctgcctccaaaggaacagctctacagaaagtttttgggttagtgtttccctagcttatttctgcaatggagaaagacaatttcatatcnnnnnnnnnnnnnnnnnncctggaaaagctacagatgttaacctttactttaaacaccaataaaataggtgtcaaaggagnnnnnnnnnnnnnnnnngagctcccaaacagcctgagagaccaaattctgcaaatggaaattttaaagcccactgaatacatttttcatggatccaaacaaatgctacaatacttttaagtcctcaactcacagaattaagagcccttaagctgttaactttgtcctgtcttcctattcagaaaaatgtccccctagaatctgtgcaaaagtaactgatgcacctgcagtatgtgacacgagagatgttctcaactcttttatgaggtcaaagtcacttttgataactgaaaacgaaaaaggaaggtgctatagagagaaattaaatttcacaaaagtataaaagcaaagactggctaaaatctgccaa

SEQ ID NO: 240666 - DNA, 2080 bp, Homo Sapiens
  misc_feature (260)..(272): n is a, c, g, or t
  misc_feature (810)..(821): n is a, c, g, or t
tttccaaagatggtaaagctaacaacagcaaagtagtaaggacaaatcggtcacttttggtaatgacacacaaattaaactttcaaaacatgtgcatagctttattcatctacttagatctaaccttttcacggagcttcggcaaaattcgagtgtgcaaaatgcatttctaaaacgtaatgcaagcaaagctttcacatttacactggcaggaaatacagagagaaactaacaagtcacattagggaaaattcagatcnnnnnnnnnnnnnaatgacaagaattgcacagtttattattttgagacaattgttgcagacataaatatttaaaattttctaagcaaggtgcttttaacaaaatttttaaagttggaaagagctgataacttggatcatagctcacacagaattccaaattaaagtggactccattatctccctatattttgcaaacaatgctttgtataacacttctttaaaacactaaaagagacagcaagctgaaacttttttcaaagcacacaagaaatgtttacttgaagaaggtgctgaggggagaagggagtgaagaatccttttactatttcccactacaggacagccactaacagactaagaacaaaaaagatacaacaaaaaaagtaaatcacttccccagcttataaaatagttccagtttcgcaagatctgtaactttaaacagagagcaccagttgggcaatagaatgagcatttcatactgcataaaaattagtgaggtggtaagaaccatcgactatctcaggcattactacatggcgtttccaannnnnnnnnnnnaatatacatgcaaggcacattgatataaaaatagatctctggccaacaaatatattaaataagcaaattaaaattttggctttgcgatattggcaacatcaaaatataaccagatagctttggcccacacatctttctcattcctccacctcatttggtgtttcccacccattattttgggttcaatcaccttcaagtttgggtatgtgcttgagaaatgacttttcttcttgtcaagtagcattcactaaagttttcctttgctaagtaaaaagacaagagaaacagctggagttttgattgatttgatttaaactaaatctgattggttcagggcagcactatttcccctctatatacaaacaaaaaataagtccccagcttacatagacaaatgttttctaaaagatcagcaacaaatcaatgacaccacgtcctttaagccattcttcccaattcctctttctgaggcagagagagggaataatagaaacaaagctaagatttaaactattttcagtagtagaagacatttaaggccaaaaagtgtactattaacagaattcttatattcctaagttattgtccttcataggacaatatcagctaagaattagttacttgtattgattccctcccaaaaagaattttataattcattcactcttgttagtggctgtgctacaggaaaggtatcaaagcaacctatggtatatgtatggtatatagtaatgtaaaaagtgcatcacattcttgattttcagtttctcatagcagcaggattaatctaagacagaaaacagttgtattttcattcttaaaatgcaacaatatctaatgaaatgtattcaagatcatgaaaggatcctcctctatgaaggataaatgaaaacagattaataatagacaaacagggtaaactaaaggcattcattcatatttacatattaaaaccacttttgttaacaccaaatctttacatctagcaaaagaaataagcattttaagaataaagcagacatcactaaagcagtatccattttcagagcctttgattagcacctgaggaaaaaagggtacatggaaagctatgtaatttgccctcaagttaatttgttggtctgaagagtacaacaactttgatatgcactgaaagtaaaactaaattggaaaataaatgtttgtagttagtttaataaggctgtagaaaagagatacttggccgggcacggtggctcacacctgtaattccagcactt

SEQ ID NO: 240667 - DNA, 1056 bp, Homo Sapiens
  misc_feature (715)..(726): n is a, c, g, or t
taaacttgttctaatcagcttgggcaatttgttagagatacacgttatcttcaaaacaaccagtgcgttgatcttacaaacaactgaataattctaatctcaagccagtcaattcagtaaaccaaatttatgctaaagcaataaaggtaaaagcctatcctacctttaaaccagctttaagacaaaaaatcgtcaccaagttccatatgacaaaaaagggtctttcagtttgaattactttccatttctatttgatcaaataaaccaaaatattactaaggaagagcatccaatgatttgtaaagctgataaaactgccctgtttcaagaaaagctctttaatagatacaagtcaagctctcgtttaaattgaactttattaaaataggtgccagttttcctctctcctagttccactgatgagctagcccagaactatgtaactttgagccaagtttccaaagatggtaaagctaacaacagcaaagtagtaaggacaaatcggtcacttttggtaatgacacacaaattaaactttcaaaacatgtgcatagctttattcatctacttagatctaaccttttcacggagcttcggcaaaattcgagtgtgcaaaatgcatttctaaaacgtaatgcaagcaaagctttcacatttacactggcaggaaatacagagagaaactaacaagtcacattagggaaaattcagatcnnnnnnnnnnnnaatgacaagaattgcacagtttattattttgagacaattgttgcagacataaatatttaaaattttctaagcaaggtgcttttaacaaaatttttaaagttggaaagagctgataacttggatcatagctcacacagaattccaaattaaagtggactccattatctccctatattttgcaaacaatgctttgtataacacttctttaaaacactaaaagagacagcaagctgaaacttttttcaaagcacacaagaaatgtttacttgaagaaggtgctgaggggagaagggagtgaagaatccttttactatttcccactacagccaa

SEQ ID NO: 240668 - DNA, 1276 bp, Homo Sapiens
atactgcagtattataaaatggctttagaactctgcacataacaaaattgtatggaaaatagggaagtctgaatcagcaatcccatcacatatgaggacggccattccatagtttctagcccataactgatttaccattcccaataatgcaagagcaacataccaatcatgctgcaatgggtgtttttattatgcagacaaccgaaaattctattcgcactattgctggcatcctttaactactttaagacctttcttgagcggcaaaacagcgtgaaatttaaaactcagtaaagcaatgcttttgagtggagccaatgattcatcactctcccaggtggtcctggttctcacacaggtgatgtatattttaaaagaaacattttaagataccaaaacagaagcccacccttttcaccatgaaagaatcttggtgctctgttgattaattacattagtaaaaataacatcgatattaagaactaatgttaagctatgtgcctctggcaaacctaaagcagctatttatgcttctagtcttttcctctgcctctcccttttaaacaaattatcaaaattttgtggcgggtaaggggacaagagcaaatcctacgttttcctttcaaatccaacagttaagtcatgggtagggttattaagatactgccctatcagactctaccttgactggtgtggcatcaaccaatctgaccataatgaccattatatttgtcccataacataactgttctgcacagttaacatatttatacaagagggatcagctgttgttgaggatgtggcccagcggcataactatactaataatacctggaaattggacttttaatctatttctctgaagagagccttgtaggaatgactccgtccttatttacagtggaattaaaattgagtaaagtccatttccaatagccatttgatacatgacaatttcacactaaatggcttatttaaaaaagttcacagcaattacaaaagataaatcattagatgcctctgatgtggggaagcaacaagcctaacaaccaagtatgatattatcactatgtaatgttttttcaaaattttgtattgtggacaactcccatagttgaggtttgtcatattttccctacaaactgttatttgtaaaaacaatgcagcacttttcctttatgaagtttctgcagattgagtaatgactaggtaagcagatgattaaggaggacaacaaaattctaaaatggagaaactctggccatttatttcaaag

SEQ ID NO: 240669 - DNA, 1488 bp, Homo Sapiens
ttggatagtgtcaccccgctagccagccccgaacccaccaaaaagcctcgcatcaacagctttgaggagcatgtggcctccacctcggccgccctgcccagctgcctgcccccggaggtgcccacgcagctgcctggacaaaacatgaaaggctcccggagcagcgctgactcctccaggaaacactgaggcagacgtgtcggttccattccatttccatttctgcagcttagcttgtgtcctgccctccgcccgaggcaaaacgtatcctgaggacttcttccggagagggtggggtggagcagcgggggagccttggccgaagagaaccatgcttggcaccgtctgtgtcccctcggccgctggacaccagaaagccacgtgggtccctggcgccctgcctttagccgtggggcccccacctccaccctctgggtttcctaggaatgtccagcctcggagaccttcacaaagccttgggagggtgatgagtgctggtcctgacaagaggccgctggggacactgtgctgttttgtttcgtttctgtgatctcccggcacgtttggagctgggaagaccacactggtggcagaatcctaaaattaaaggaggcaggctcctagttgctgaaagttaaggaatgtgtaaaacctccacgtgactgtttggtgcatcttgacctgggaagacgcctcatgggaacgaacttggacaggtgttgggttgaggcctcttctgcaggaagtccctgagctgagacgcaagttggctgggtggtccgcaccctggctctcctgcaggtccacacaccttccaggcctgtggcctgcctccaaagatgtgcaagggcaggctggctgcacggggagagggaagtattttgctgaaatatgagaactggggcctcctgctcccagggagctccagggcccctctctcctcccacctggacttggggggaactgagaaacactttcctggagctgctggcttttgcacttttttgatggcagaagtgtgacctgagagtcccaccttctcttcaggaacgtagatgttggggtgtgttgccctggggggcttggaacctctgaaggtggggagcggaacacctggcatccttccccagcacttgcattaccgtccctgctcttcccaggtgggggacagtggcccaagcaaggcctcactcgcagccacttcttcaagagctgcctgcacactgtcttggagcatctgccttgtgcctggcactctgccggtgccttgggaagggtcggaagagtggactttgtcctggccttcccttcatggcgtctatgacacttttgtggtgatggaaagcatggggacctgtcgtctcagccctgttggtttctcctcattgcctcaaaccctggggtaggtgggacggggggtctccgtggccagatgaaacccatttggaaacttcggcagcagagtttgtccaatgacccctttttcag

SEQ ID NO: 240670 - DNA, 2049 bp, Homo Sapiens
ttggggcggcggcggccgggaggccgtgaggagagcggcggctgcgagggcggccgatggcggccgggaggcgccctcggacacttgcgggtcgttagggcgcgacgctgggaggcatgtcggagcacgtggagcccgcagctccggggcccgggcccaacggcggcggcggcggcccggcccccgcgcgcgggcctcgcacccccaatctcaaccccaaccccctcatcaacgtgcgcgaccggctcttccacgcgctgttcttcaagatggctgtcacctattcgcggctcttcccgcccgccttccgccgtctcttcgagttcttcgtgctgctcaaggccctgtttgtgctcttcgtcctggcctacatccacatcgtcttctcccgctcgcccatcaactgcctggagcacgtgcgtgacaagtggccgcgtgagggcatcctgcgtgtggaagtgcggcacaactcgagccgcgcgcccgtcttcctacagttctgtgacagcggcggccgcgggagcttcccgggcctggccgtggaaccaggcagcaacctggacatggaagatgaggaggaggaagagctgaccatggagatgtttgggaacagctccatcaagtttgagctggacatcgagcccaaggtgttcaagccgccgagtagcacagaggccctgaatgacagccaggagttccccttccccgagacgcccaccaaagtgtggccgcaggacgagtacatcgtggagtactcactagagtatggcttccttcgcctgtcgcaggccacccgccagcgcctgagcatccccgtcatggtggtcaccctggaccccacgcgggaccagtgcttcggggaccgcttcagccgcctgctgctggatgagttcctgggctatgatgacatcctcatgtccagcgtgaagggcctggccgagaacgaggagaacaagggcttcctgcggaatgtggtgtcgggcgagcactaccgctttgtgagcatgtggatggcgcggacgtcctacctggccgccttcgccatcatggtcatcttcacgctgagcgtgtccatgctgctgcggtactcacaccaccagatcttcgtcttcatcgtggacctgctgcagatgctggagatgaacatggccatcgccttccccgcagcgcccctgctgaccgtcatcctggccctcgtcgggatggaggccatcatgtcggagttcttcaacgacaccaccaccgccttctacatcatcctcatcgtgtggctcgcggaccagtatgacgccatctgctgccacaccagcaccagcaagcggcattggctgcggttcttctatctctaccacttcgccttctatgcctatcactaccgcttcaatgggcagtatagcagcctggccctggtcacctcctggctcttcatccagcattccatgatctacttcttccaccactacgagctgcctgccatcctgcagcaggtccgcatccaggagatgctgcttcaggcgccgccactgggccccgggacccccacggcgctgcccgatgacatgaacaacaactcgggcgccccggctacagcccctgactctgccggccagccccccgccctgggccccgtctcgcctggggccagcgggagtcccgggcctgtggcagcggcgcccagctccctggtggccgcggcagcctcagtggcagcagctgccggtggtgacctgggttggatggcagagaccgctgccatcatcacagacgcctccttcctgtccggcctgagcgcctccctcctggagcggcgtccagccagcccgctgggccctgctgggggcctcccccacgccccccaggacagtgtccccccgagtgactccgcagcttctgacacaactcccctgggggctgcggtaggcgggcctagcccggcctccatggccccaacggaggcgccctcggaggtggggtcctgagccgcacagctgagccgcctctgacccctgctggctgggcctgaccttcccgagcccgtgggggtggggg

SEQ ID NO: 240671 - DNA, 653 bp, Homo Sapiens
tggccgacagagtcaagggctgtagccggggcgcccgagttgttgttcatgtcatcgggcagcgccgtgggggtcccggggcccagtggcggcgcctgaagcagcatctcctggatgcggacctgctgcaggatggcaggcagctcgtagtggtggaagaagtagatcatggaatgctggatgaagagccaggaggtgaccagggccaggctgctatactgcccattgaagcggtagtgataggcatagaaggcgaagtggtagagatagaagaacctgcggggcggggtgagggcgtcggggctgcaggtcccaccctgccaggcccagcccctggggttcccgcgtggcgcagccaccacccccgcctccagcgcccctccctctggcagccccctacccctgcccaccagcacccactccaccctgcccccgcgccacgctcaccgcagccaatgccgcttgctggtgctggtgtggcagcagatggcgtcatactggtccgcgagccacacgatgaggatgatgtagaaggcggtggtggtgtcgttgaagaactccgacatgatggcctccatcccgacgagggccaggatgacggtcagcaggggcgctgcggggaaggcgatggccatgccaacttttttgtacaa

SEQ ID NO: 240672 - DNA, 1119 bp, Homo Sapiens
  misc_feature (779)..(820): n is a, c, g, or t
ttggctcaggaaggcggcattaccgctgcctttctgcagaaaaggaaactgaggctcagcaagaaccaccgcccagccagagccaaggtcacagagcacgtccgtggcacgcgtccaggtcgtgccacagcagggccggcggcttcgacgcgggcagccgggtcccttttctttgacagatggggaaaccgaggcccggccggctgccggggctcctcgcacctaccccagcaactcaaattcaccacctcggactcctgcgaccgcatcaaagacgaatttcagctactgcaagctcagtaccacagcctcaagctcgaatgtgacaagttggccagtgagaagtcagagatgcagcgtcactatgtgatgtactacgagatgtcctacggcttgaacatcgagatgcacaaacaggctgagatcgtcaaaaggctgaacgggatttgtgcccaggtcctgccctacctctcccaagagcaccagcagcaggtcttgggagccattgagagggccaagcaggtcaccgctcccgagctgaactctatcatccgacagcagctccaagcccaccagctgtcccagctgcaggccctggccctgcccttgaccccactacccgtggggctgcagccgccttcgctgccggcggtcagcgcaggcaccggcctcctctcgctgtccgcgctgggttcccaggcccacctctccaaggaagacaagaacgggcacgatggtgacacccaccaggaggatgatggcgagaagtcggattagcnnnnnnnnnnnnnnnnnnnnnnnnnnnnnnnnnnnnnnnnnngacagaggcacggagagaaaggaatgtttagcacaagacacagcggagctcgggattggctaaactcccatagtatttatggtggccgccggcgggggccccagcccagcttgcaggccacctctagctttcttcctaccccattcccggcttccctcctcctcccctgcagcctggttaggtggatacctgccctgacatgtgaggcaagctaagcctggagggtcagatgggagaccaggtcccaaagggagcaagacctcgcgaagcgcagcagccccggccctttctcccgtttt

SEQ ID NO: 240673 - DNA, 832 bp, Homo Sapiens
ctttgtacaaaaaagttggtggagcctgtaataacatgtgataaaaaatttcgtactcaattttacattgactggtgcaaaatttcattggttgataaaacaaagcaagtgtccacctatcaggaagtgattcgtggagaggggattttacctgatggtggagaatacaaacccccttctgattctttgaaaagcagagactattacacggatttcctaattacactggctgtgccctcggcagtggcactggtcctttttctaatacttgcttatatcatgtgctgccgacgggaaggcgtggaaaagagaaacatgcaaacaccagacatccaactggtccatcacagtgctattcagaaatctaccaaggagcttcgagacatgtccaagaatagagagatagcatggcccctgtcaacgcttcctgtgttccaccctgtgactggggaaatcatacctcctttacacacagacaactatgatagcacaaacatgccattgatgcaaacgcagcagaacttgccacatcagactcagattccccaacagcagactacaggtaaatggtatccctgaagaaagaaaactgactgaagcaatgaatttataatcagacaatatagcagttacatcacatttcttttctcttccaataatgcatgagcttttctggcatatgttatgcatgttggcagtattaagtgtataccaaataatacaacataactttcattttactaatgtatttttttgtacttaaagcatttttgacaatttgtaaaacattgatgactttatatttgttacaataaaagttgatctttaaaat

SEQ ID NO: 240674 - DNA, 1234 bp, Homo Sapiens
ttcaccactgtggttggaaccgcgaggcaggccagacggacagccagtgggcagtgggttggatgtggccccacctcaggtcggaatgaagccaagccataaagagaaacaagccagttagacaccggaaacaggcgagagccagcacacacagccctagtctgagcagccgcggagggccagctcccggcagtcctaggttaaaatccatttttatctccaggactcacgcctggaaggtggctatttccgtctctcctgcctgaatcttgctgaaggcagcccccgaaccaggcagccacttcagactagagtcgctgatttgtttcccagatcctggctacccctggtaggaaccctcaggacccaccacaaagctgaatcctgtcccctgtcccctctgccctcctccttccccaacacatttactggaagcgtgcccccttgtgtattctcaggggtttgtgcctctaatggtaattctagcttctgtgacacagtgcgtttggaacagacactagaattatgtctgcccaagttcaatgccattctaagtggagttcacaggacaagaggcaaatgagactaactgtggtaccttaggctcagggttttaatggcctcatgtattgccaaataaatacatacaatgtgctttacttttaaacaaataaagactgtaaaccaatagttatgacaaggagaaagagagagtttgagcctcacttttttctactttaaaaaagataaacaaaacccttgcttggttacacgaagttaactacctgtttactgactgggtccctgaatgaactgtcataaaaagaagcccaagatatataatatgtaagcgaatgtttatttgggcatttttaggtttttcattgaactacttcctagaagggtttcctctccaccccaccccatcccccaccgccgcttacctaagaatgcctctttcctgtccccaaaacactgtcttgaacgcattcattacaggacaagccatgaaggcaggtcagtttacttaaggacatcacatctcttgagaaagataatgtgtacaaaacaaaacagaacatgagctgtctttctcagctctctactttgtaaataaaaagggggaaaggtgtgtgtcccttcagcatgcctcgtgcggcacacgataaagaaatcaaggggaatggagaaggtgattttcttcacctgcccatcgggtcaacctcagcaccaa

SEQ ID NO: 240675 - DNA, 1432 bp, Homo Sapiens
  misc_feature (250)..(308): n is a, c, g, or t
ttggctgcggcggtggagctgctcggccgggagcccggcggcgagacggagaggcggcggaggtgcccgcgcgcagggtctggtgggcggccgcgaggctcgggagaggcgaaccggagcgcgggaccgcggtcgccccgaccagagccgggagaccgcagcacccgcagccgcccgcgagcgcgccgaagacagcgcgcaggcgagagcgcgcgggcgggggcgcgcaggccctgcccgccccttccgnnnnnnnnnnnnnnnnnnnnnnnnnnnnnnnnnnnnnnnnnnnnnnnnnnnnnnnnnnnaccgggcgcccaccctgtcctcctcctgcgggagcgttgtccgtgttggcggccgcagcgggccgggccggtccggcgggccgggggatggcgctgctggacctggccttggagggaatggccgtcttcgggttcgtcctcttcttggtgctgtggctgatgcatttcatggctatcatctacacccgattacacctcaacaagaaggcaactgacaaacagccttatagcaagctcccaggtgtctctcttctgaaaccactgaaaggggtagatcctaacttaatcaacaacctggaaacattctttgaattggattatcccaaatatgaagtgctcctttgtgtacaagatcatgatgatccagccattgatgtatgtaagaagcttcttggaaaatatccaaatgttgatgctagattgtttataggtggcaaaaaagttggcattaatcctaaaattaataatttaatgccaggatatgaagttgcaaagtatgatcttatatggatttgtgatagtggaataagagtaattccagatacgcttactgacatggtgaatcaaatgacagaaaaagtaggcttggttcacgggctgccttacgtagcagacagacagggctttgctgccaccttagagcaggtatattttggaacttcacatccaagatactatatctctgccaatgtaactggtttcaaatgtgtgacaggaatgtcttgtttaatgagaaaagatgtgttggatcaagcaggaggacttatagcttttgctcagtacattgccgaagattactttatggccaaagcgatagctgaccgaggttggaggtttgcaatgtccactcaagttgcaatgcaaaactctggctcatattcaatttctcagtttcaatccagaatgatcaggtggaccaaactacgaattaacatgcttcctgctacaataatttgtgagccaatttcagaatgctttgttgccagtttaattattggatgggcagcccaccatgtgttcagatgggatattatggtatttttcatgtgtcattgcctggcatggtttatatttgactacattcaactcacgggtgtccagggtggcacactgtgtttttcaaa

SEQ ID NO: 240676 - DNA, 763 bp, Homo Sapiens
ttggcactctgcagagaaagctaaggttgctaaccaaacaaaataactttacactgacaatgccaatttttacatttctttcagaacaagggacactcaaactaccagagaaacggaccaatggactgcgaagaactcctaaacaggtggatccaggtttaccaaagatgcaggtcattaggaactattctggaacaccacccccagctctgcatgaaggaccccctttacagctccaggccggggataccgttgaacttctgaaaggagatgcacacagtctgttttggcagggcagaaatttagcatctggagaggttggattttttccaagtgatgcagtcaagccttgcccatgtgtgcccaaaccagtagattattcttgccaaccctggtaagtattaaaaatgtttatgtagctaggttgaaataccatacccttagctccaggatgccttaaatgtgggggtagtaaaccatattccatttccatttgtctcggctaaaggtgttttcagatgtaacaaaacaccataatgaattcatgtattgctgacctttccatatctttatctgcgaggggggtgtgtgtgcatgcgagtgcccagtgccctagactgataatttaaagtttataccagccacagaaaggaatggaacatacgcatatgtatcttatattttacagatttaataaagcagagagaaaaatatgctttcattgtctaaaaactaaaaattagctcaaaaaggacagtagtag

SEQ ID NO: 240677 - DNA, 1115 bp, Homo Sapiens
  misc_feature (160)..(201): n is a, c, g, or t
actttgtacaaaaaagttgggtgttagttaaacgcagttactggataaaaacataaagctttaccttggaggtgctggttagattactgggccatcaataggaagtgtatgatgaaattattttagaatctatctccttagatacttagatattaacgannnnnnnnnnnnnnnnnnnnnnnnnnnnnnnnnnnnnnnnnnataaaaactagtccttactttgattgaggttcttatgaagaatggaaaaacaggacaatggttctttaaacttatgaagcgaatttgcttgcacctgattgaattgaaacagcaattctgctgctttcaagctcctctgccattatcgctggtctgtaatgaaatcacgactgtgcatttgatagcatcaataacattcatctgattaggttgttatggttgttaacgaactgcaaacctactgtcattgcttgtcatttcttgacagtgttaagtccaaaagtgctgggcattgccatcgctcggtatgacttctgtgcaagagatatgagagagttgtccttgttgaaaggagatgtggtgaagatttacacaaagatgagtgcaaatggctggtggagaggagaagtaaatggcagggtgggctggtttccatccacatatgtggaagaggatgaataaattcaaatcccgtgttgcaccctgcaccaaaaatttcagagaagggataaatagaagcctgcacagcatcgtgaattaactgaagtgtttaaaaagctgcatttctggctgttcaacatcctccctccttagcccctcctaagtcttaatgctgagatttctaaagatgctggtactgacagattaatggcttgcctagagctgtgcaagaaacagcctgccagtctgtcattgtcagggaccagggcaaaaccaagagctgttcttcccagaagagccctgcaaacacattggttcgtgcttccctttacttcttctggtcagataccatgaatgccagtcatcagtaaatcttaatacacttttgctttattctcacatgccattcaccagattatttgatggtacaaagaagcagaagtgtaattttccttttcccagcatgacgaaaa

SEQ ID NO: 240678 - DNA, 1110 bp, Homo Sapiens
  misc_feature (491)..(517): n is a, c, g, or t
  misc_feature (519)..(775): n is a, c, g, or t
caagagacacagaaataatagccaaatagaagcccagaggggtgcacagacagacagactgtgggtctgtctgacctgccttcagcagccacttgctcatttaacacttgccggcctgtgctcacgcaaggccccatgctggctgtttacccagcagctggattaaatgaagaaggcagaatgtaaacaggtatgaagttagtgttctggagcacgcaggaaggagtatttaaatctccttggaggtgggcaaggaagatgctgacccttttagagtgtcaggccaagtgtcttgacttctccagactccgcttgaaggtgaccaattcattctagtttgcaaggcccaagttcctagaaacccccttagtcacaggcaaacccagacaaccagtcaccctacctgcatcctgcccaggtcttctccctacgaggaggaatcatcataatattaagttggcctgtggtgcactggctcccatactccccannnnnnnnnnnnnnnnnnnnnnnnnnngnnnnnnnnnnnnnnnnnnnnnnnnnnnnnnnnnnnnnnnnnnnnnnnnnnnnnnnnnnnnnnnnnnnnnnnnnnnnnnnnnnnnnnnnnnnnnnnnnnnnnnnnnnnnnnnnnnnnnnnnnnnnnnnnnnnnnnnnnnnnnnnnnnnnnnnnnnnnnnnnnnnnnnnnnnnnnnnnnnnnnnnnnnnnnnnnnnnnnnnnnnnnnnnnnnnnnnnnnnnnnnnnnnnnnnnnnnnnnnnnnnnnnnnnnnnnnnnnnctcaggataaacagcttaagtttaacaacaaacccagagtcctcacccaggaagtctagatttgaaccttgggccccactgctgttgggctaaggggtcttacatagtcatttatgctctcctagtcttccttacctaattttaaaatagggataattatcctacctcacagggctgttgggacaattacaaggtaaaagataaatgaacggttcgggcaagcaggaatccctaaatctgaacacaaataccaacttagttgaatggaaagcagtgacatcaatacgtcctccctttttgctaagaaaacaagtctgttgataaaagaaatccaa

SEQ ID NO: 240679 - DNA, 1073 bp, Homo Sapiens
ttggctttccaaaaccctggatcacgtgttcctggtgctgcccaaccactgtctggggatggcagtcagcagtttctacgagaactacgagacgcggaggtactgcacctcctccgaggtcgccgcccactactgcaagaaatataacatccagtaccaggagaacttctatgcctggagcgccccgggggtcggccggtttgtggcctccatggccgcctcagggtgcgcctacctcatcctgctcttcctcatcgagaccaacctgcttcagagactcaggggcatcctctgcgccctccggaggaggcggacactgacagaattatacacccggatgcctgtgcttcctgaggaccaagatgtagcggacgagaggacccgcatcctggcccccagcccggactccctgctccacacacctctgattatcaaggagctctccaaggtgtacgagcagcgggtgcccctcctggccgtggacaggctctccctcgcggtgcagaaaggggagtgcttcggcctgctgggcttcaatggagccgggaagaccacgactttcaaaatgctgaccggggaggagagcctcacttctggggatgcctttgtcgggggtcacagaatcagctctgatgtcggaaaggtgcggcagcggatcggctactgcccgcagtttgatgccttgctggaccacatgacaggccgggagatgctggtcatgtacgctcggctccggggcatccctgagcgccacatcggggcctgcgtggagaacactctgcggggcctgctgctggagccacatgccaacaagctggtcaggacgtacagtggtggtaacaagcggaagctgagcaccggcatcgccctgatcggagagcctgctgtcatcttcctggacgagccgtccactggcatggaccccgtggcccggcgcctgctttgggacaccgtggcacgagcccgagagtctggcaaggccatcatcatcacctctcacagcatggaagagtgtgaggccctgtgcacccggctggccatcatggtgcaggggcagttcaagtgcctgggca

SEQ ID NO: 240680 - DNA, 1139 bp, Homo Sapiens
tttattttaaataatgggaaactgtaccttggttacactgtgctctaaaattacttgcattaatgaggaccattaattttagcatttaaaaaaagagatttaaaaatacccatagaaaaacttgaaaaccctgacaagccgactacaaagagaaattcctctctggaaattttcagatgcgacggtatgagagagttgggtgggccgctgactctgagagaagtcccggtgacctgaacctattccagtgaagccagtcagcagtgaatgtggggcaagtgcatgcggctggtctacagctcccattgcctggtgaccaaggagcatcctgaagtttcagagaagagactgtgtgacagcagcattgttccagctactgagcaagatccttcagcaggtaagaagtggcagagacagtcacctgctgaaggagcgggcagggagttggccgtccacgcggagcctggcctttccgttaggggaccctgaagtctgcgaccgccccgccaacacctgagagtgtaacacagtgcccgttacacattcacactccatcacagataacacacagggcctcagggactgcaacacgtgcatgtgtagtgacgcacgacaaattaagagtgagtgagaatgaaagctcatgcttagccctgtgaaaaataaaaatcagatagcaaaacgcaaagttaaatcacagacacctggaccacaaataatctaccccagttgtaatatgtattttaatggagaccataaatttttccaaaaacccgcttgaattagaaaacttaaggccatttatatgaaatgagggttttaagcacagctgtacagtttaggacagtaagagctccaaagatgtctacatagctttccaaatctcgtatcagtcagtctctccgtgtgtcgtgggagctgcctgcgcttccgtgaacgggacactgagaaatgcttcaatatgtgccacgccattccagaaaactccctgcagaagcagctcttcctgcagcactcaaccttctgctgagatgcaaaatatattttaaaatgtattttaaagtcatacaggatctgatctagtaagaatggcaaaacaaatacttcttttttgtacaaagttggcattataaaaaagc

SEQ ID NO: 240681 - DNA, 1021 bp, Homo Sapiens
ttggaattgctgctatctagaacgtcacaccttcctaaatatcgcagaacattttgaaaagcacaacttccagggaatagaaaaatcacacagattttaatccagtgatttcagctcccagtactgcatgtgagaaatctgacgtcggaccagttctttcttctttgttagcatggcctcattgaaagaactagatcaaagactctttgaaaattacatcgagttgaaagcagatcccatcgttggctccttagaacctggaatttatgcaggatattttgattggaaggactgcctgcctccaacaggtgtcagaaactatttaaaagaagcactggtgaatataattgccgtgcatgcagaggtgttcaccatttccaaagaactggtccctcgggtactatccaaggtgatagaagcagtttctgaagagctcagtcgactgatgcagtgtgtttcatccttcagcaaaaatggagctttacaggcgagacttgaaatctgtgctttgagggacactgtggctgtttacctgacacccgaaagcaagtcaagttttaagcaggctttggaagccctgccccagctttccagtggagcagataaaaagttactggaagagctcctgaacaagttcaagagtagcatgcacttgcagctcacctgtttccaagcagcttcttcaaccatgatgaaaacataaatatctgccacataaaagaagtccaggaaaataacacgtaataagactgttcactctctaagtaccctaaaggtatttggtgtattaaacattgggtttgccatttttctcttttttcttcctctgacttcgaaaattgttggtatacatttcaaccaaaatgacctcatttgaaatgcccaggaagtatttgttttgccattcttactagatcagatcctgtatgactttaaaatacattttaaaatatattttgcatctcagcagaacgttgagtgctgcagaagagctgcttctgcaggagttttctggaatggc

SEQ ID NO: 240682 - DNA, 954 bp, Homo Sapiens
ttggcaattctgcaatttggcaatggatcagaaggctgatgaacaggagagactttcaaggaaagcctaattttgaagaatactttgaaattctgactccaaaaatcaaccagacgtttagcgggatcatgactatgttgaatatgcagtttgttgtacgagtgaggagatgggacaactctgtgaagaaatcttcaagggttatggacctcaaaggccaaatgatctacattgttgaatccagtgcaatcttgtttttggggtcaccctgtgtggacagattagaagattttacaggacgagggctctacctctcagacatcccaattcacaatgcactgagggatgtggtcttaataggggaacaagcccgagctcaagatggcctgaagaagaggctggggaagctgaaggctacccttgagcaagcccaccaagccctggaggaggagaagaaaaagacagtagaccttctgtgctccatatttccctgtgaggttgctcagcagctgtggcaagggcaagttgtgcaagccaagaagttcagtaatgtcaccatgctcttctcagacatcgttgggttcactgccatctgctcccagtgctcaccgctgcaggtcatcaccatgctcaatgcactgtacactcgcttcgaccagcagtgtggagagctggatgtctacaaggtggagaccattggcgatgcctattgtgtagctgggggattacacaaagagagtgatactcatgctgttcagatagcgctgatggccctgaagatgatggagctctctgatgaagttatgtctccccatggagaacctatcaagatgcgaattggactgcactctggatcagtttttgctggcgtcgttggagttaaaatgccccgttactgtctttttggaaacaatgtcactctggctaacaaatttgagtcctgcagtgtaccac

SEQ ID NO: 240683 - DNA, 985 bp, Homo Sapiens
ttggcccttttctttcccccttggaggcttccagaggaattgactactatgacaggaacctggcactgtttgaggaagagctggacatccgcccaaaggtatcgtctcttctgggaaagctcgtcagctacaccaacctcacccagggcgccaaagagcatgaggaggccgagagtggggagggcacccgccggagggcagccgaggcacccagcatgggcaccctcatgggggtgtacctgccctgcctgcagaatatctttggggttatcctcttcctgcggctgacctggatggtgggcacagcaggtgtgctacaggccctcctcatcgtgcttatctgctgctgttgtaccctgctgacggccatctccatgagtgccatcgccaccaacggtgtggttccagctgggggctcctatttcatgatctctcgttcactggggccagaatttggaggtgctgtgggcctgtgcttctacctgggaacaacattcgcagcagccatgtacatcctgggggccatcgagatcttgctgacctacattgccccaccagctgccattttttacccatcgggtgctcatgacacgtcgaatgccactttgaacaatatgcgtgtgtatgggaccattttcctgaccttcatgaccctggtggtgtttgtgggggtcaagtatgtgaacaaatttgcctcgctcttcctggcctgtgtgatcatctccatcctctccatctatgctgggggcataaagtctatatttgaccctcccgtgtttccggtatgcatgctgggcaacaggaccctgtcccgggaccagtttgacatctgtgccaagacagctgtagtggacaatgagacagtggccacccagctatggagtttcttctgccacagccccaaccttacgaccgactcctgtgacccctacttcatgctcaacaatgtgaccgagatccctggcatcccctggggcagctgctg

SEQ ID NO: 240684 - DNA, 1720 bp, Homo Sapiens
ttggcctctttattcagaggttgacccacatcctagcgacgtagaagagagccagcctgtttccttcattctctgaacgtatttcagaaatcactgtgttcatcatcaaattagaatgttggttcttttccttctgcctttttgggagagagacaggaaagattcacttgaaaacataaatgaacgtcaagactgaaggcaatagaaattaaagaatgtgagaaagttctggtgggccggcaggattgccgcacaagtttatatgatggtcgtatatatatccctgttaaaaactgggatgaagatgtgcaaagtcacagaatgtaatggaagtcctgatggttacagagtaagtgaaagggtgcctgcgctgacgtgagagaaaggaatctgtaaacagtggaaacactgtgggagtttcccatggtgttttgaagagtggaacgaaggcgatatgaactgaaggggtgaagacttgattttggagagggcaacaaaacaagggtgtgtgtgcataggagaatggcccactccaaatacgaagtgagatcctgagtctttgggtgcttcatgatttcctaccatattcaggcctaaagacattgaaaaagcatcttttcttgagatcatggtcatatgaggtcctaatgaagtactacagttttcattctttcaagggtagactaaaatatagtttataaatcggcagtacagtattatgaaaccaagaaagggtttcttgaaaagcttgtcggttcaaagaggaaagatgaatttcaatgtgaaaacacgttttgttggggctgtactttttaccccctttaagtgctttaacaggatatacgtttgattttcctcatatcttatttacctaggagcatgtcagagaaagaagggagagaaaaggttgcatctgcaggatgccttgataactacacagtcccaaataaaaggcctttttctaacctacctctaatggggttatcagatatgtttttaaatctctcgccctgagtactcttcttgggagttgctgctgtttacagccacagtctcatctatcactaaatatgaaactgggccaaggggaaaattcagtaagttagcgttaaatggaagtaaatatatgtatacctaagagaatgtcaaaataaacaccaaaccaaaagaaggtaggagtgccatttttagaaaagacacaactttaattcctgtcaagagacctaggtctactgatggcagtcactgcattgtacattattccagttcttcagtaattctgtttaaactgtgattttctttattgtgttggtgcaatattttattatcatttaacctcaggatattcagaccaacaggattgtgttgctgctgaaagtctgagcagtgttttaccgtccccagcccccctcccacatggtcacatgttcacttgcttttccttccatctgttggttttgtgagctgagagcatctctggacacatggaagggagccagggattcctgtgatacagattttgaaccagcagagtactttggttttcttcatgtcctaagggtttgatccagaaaaccctggtgcttcccctgcagaatactgtacttcatttaacagaatgattgatttttctttcaatcagcatgttcaccaaaaatagaaaagttcttctaagttaaattttgtatttaaaagttagttgggccatttgatcagggaa

SEQ ID NO: 240685 - DNA, 954 bp, Homo Sapiens
  misc_feature (828)..(851): n is a, c, g, or t
ctttgtacaaaaaagttgggacatttttgctgcatcaaggaagccgttaaactcctgctaagctaactagctcttttttatgggtccatgcacacgaccgaactcctctttcactgaccagagattatttctgacaacccaggatatcccgaaagcttggaggcatatggctggaaaatgaaacgacccaggacatcgtttctggctgcatcattattttgtgtcgcgtagtaccagatgggcagtcagtgagcggcgcagggatgtgaacggacggttttataatgtgaaaattttcccttggtaaagctaaaacagatttaatttccctctcttttctttcactacttccccctctttattccccctctgtctgcaatatcagtgaactcaactttgcagtgaggtggccaaaaagagagagaatgaggagatcttgatcatcttagtgtcagaggagtcgcagcggactgggaactgcagctgcgaccccccgcgtcctgtgcggatttcagggctgataccgcataggcggttatggaaaggacggtacaccggagcggcggaggatagagaccctggcccccggagaggtctgctgatttcgcagcagccttcgaagccgtggctgcctttcatctgctgcgttttattactattatcgccgttccggaaaagtcatggaagacagcccgctgccagacctcagagacatcgagctgaagctggggcgcaaagtacccgagagtctagtgcgctctctccgtggggaggagccggttcccagggaaagggacagggacccctgcggggggagcggtggtggtnnnnnnnnnnnnnnnnnnnnnnnnagctgcagtagcggcagcagctactgcagcttccctccctccttgtcgtcctcctcttcgtcctccccaacctctggctccccacgaggtagccactctagcg

SEQ ID NO: 240686 - DNA, 943 bp, Homo Sapiens
actttgtacaaaaaagttggctacttcagaagcggaggcactgggagtccggtttgggattgccaggctgtggttgtgagtctgagcttgtgagcggctgtggcgccccaactcttcgccagcatatcatcccggcaggcgataaactacattcagttgagtctgcaagactgggaggaactggggtgataagaaatctattcactgtcaaggtttattgaagtcaaaatgtccaaaaaaatcagtggcggttctgtggtagagatgcaaggagatgaaatgacacgaatcatttgggaattgattaaagagaaactcatttttccctacgtggaattggatctacatagctatgatttaggcatagagaatcgtgatgccaccaacgaccaagtcaccaaggatgctgcagaagctataaagaagcataatgttggcgtcaaatgtgccactatcactcctgatgagaagagggttgaggagttcaagttgaaacaaatgtggaaatcaccaaatggcaccatacgaaatattctgggtggcacggtcttcagagaagccattatctgcaaaaatatcccccggcttgtgagtggatgggtaaaacctatcatcataggtcgtcatgcttatggggatcaatacagagcaactgattttgttgttcctgggcctggaaaagtagagataacctacacaccaagtgacggaacccaaaaggtgacatacctggtacataactttgaagaagtggtggtgttgccatggggatgtataatcaagataagtcaattgaagattttgcacacagttccttccaaatggctctgtctaaggttggcctttgtatctgagcaccaaaacactattctgaagaatatgatgggcgttttaaagacatctttcaggagatatatgacagcagtacaagtcccagtttgaa

SEQ ID NO: 240687 - DNA, 1197 bp, Homo Sapiens
ctttgtacaaaaaagttgggtaccctagccaccgctgttgtattctgctcttctttcctttttggtgagcttcatgggtggagttatcagtggtctgtactttgtggatattttgcccagcaggaagtattagacacatcagtctagaagcattgtgaaaaggttccaaaacgggagacaaaatttaattcattcctcagttctgaaagtttgtgctttcttaccatgaatagatgaaaacttgaaaaaaatcttgacagtttactaatgtgaatcagatgtaacgtactactaattctacaatgcctttctctttagtcagtattaaaaatcttttttaaagtattggtatgaaaacaaatttttgttgccctgataatggaattttaaaactacccacagtttaagagaaaacataacttggtaaaaaaggtagccaataaaaccacaatttgaaattgataccattttctactcacaatggatgatgaaaaatttcacctttaaatgggtcagaagttgtctttgacatttaccatgaaaaaactacataaaatggctccctggtgaggttacagacacggccctggtgatgggcgttgcaaagttttcactgagcacacagcaatggtatcacctagagaagttcacgcaactttgttgaatgtagttgacttttccaaatttataaaggaaggaagaaggcaaatgttaatttgccaacaacgaatatcctttttctaaatcagatcattccttttttgttagtggcagtttatcctgtaatttcaaatgacgttaagaggtgggattatttgggggttttttttgtttgtttacagatgatctcatttgctgaatgattgatttaagagtaaaattagccactgcgtggctttgtgtatagtaaccggttttgttgcacttgtctgtggctgaaacacttacctgcagtggaaagccgagcaaggaggaggtaaacattggagatgtttgtgaaaatattactcttgctgtgaggttttagtttgttttgaatgagaaaagactaagtaacttaatccatctcaatgtagtgttttaataaaaaaggaacctaatatttgaaatgggtttcagacatgtttacaaatatgggtactatttttatgcccgtgtattttcacatttaataaaaatatttatggtcatatcagt

SEQ ID NO: 240688 - DNA, 1272 bp, Homo Sapiens
ttggggtagtgggggctgcagctgccggacccaggcactgacccttgacctccggtggctcccccatctctcaggcgcgatggctacgggcgcggatgtacgggacattctagaactcgggggtccagaaggggatgcagcctctgggaccatcagcaagaaggacattatcaacccggacaagaaaaaatccaagaagtcctctgagacactgactttcaagaggcccgagggcatgcaccgggaagtctatgccttgctctactctgacaagaaggatgcacccccactgctacccagtgacactggccagggataccgtacagtgaaggccaagttgggctccaagaaggtgcggccttggaagtggatgccattcaccaacccggcccgcaaggacggagcaatgttcttccactggcgacgtgcagcggaggagggcaaggactacccctttgccaggttcaataagactgtgcaggtgcctgtgtactcggagcaggagtaccagctttatctccacgatgatgcttggactaaggcagaaactgaccacctctttgacctcagccgccgctttgacctgcgttttgttgttatccatgaccggtatgaccaccagcagttcaagaagcgttctgtggaagacctgaaggagcggtactaccacatctgtgctaagcttgccaacgtgcgggctgtgccaggcacagaccttaagataccagtatttgatgctgggcacgaacgacggcggaaggaacagcttgagcgtctctacaaccggaccccagagcaggtggcagaggaggagtacctgctacaggagctgcgcaagattgaggcccggaagaaggagcgggagaaacgcagccaggacctgcagaagctgatcacagcggcagacaccactgcagagcagcggcgcacggaacgcaaggcccccaaaaagaagctaccccagaaaaaggaggctgagaagccggctgttcctgagactgcaggcatcaagtttccagacttcaagtctgcaggtgtcacgctgcggagccaacggatgaagctgccaagctctgtgggacagaagaagatcaaggccctggaacagatgctgctggagcttggtgtggagctgagcccgacacctacggaggagctggtgcacatgttcatgagctgcgaagcgacctggtgctgctctacgagctcaagcaggccctgtgccactgcgagtatgagctgcagatgctgcggcaccgtcatgagcactgg

SEQ ID NO: 240689 - DNA, 1174 bp, Homo Sapiens
tgcaaaggagagcagttcccacgccaggaaccaacgtgaaagcattggaatcagcacaacagccatggaatcaggcaggcaggggaggacgggctgtgtccttctgagctctatagtacagcaagatttcaagcagtttccagaaaaacaacaacaacgacattttctttccttatcgacgggatattttatggttctggaagcttcgtgttgcacataggaaaaaaaatttctctgaaacgtacaattcatagggacgaccaatgaggacagggaatgaacccggctctcccccagccctgatttttgctacatatggggtcccttttcattcttgcaaaaacactgggctttctgagaacacggacggttcttagcacaatttgtgaaatctgtgtagaaccgggctttgcaggggagataattttcctcctctggaggaaaggtggtgattgacaggcagggagacagtgacaaggctagagaaagccacgctcggccttctctgaaccaggatggaacggcagacccctgaaacgaagcttgtccccttccaatcagccacttctgagaacccccatctaacttcctactggaaaagagggcctcctcaggagcagtccaagagttttcaaagataacgtgacaactaccatctagaggaaagggtgcaccctcagcagagaagccgagagcttaactctggtcgtttccagagacaacctgctggctgtcttgggatgcgcccagcctttgagaggccactaccccatgaacttctgccatccactggacatgaagctgaggacactgggcttcaacactgagttgtcatgagagggacaggctctgtcctcaagccggctgagggcagcaaccactctcctcccctttctcacgcaaagccattcccacaaatccagaccataccatgaagcaacgagacccaaacagtttggctcaagaggatatgaggactgtctcagcctggctttgggctgacaccatgcacacacacaaggtccacttctaggttttcagcctagatgggagtcgtgtacaaaccttggcaaaaaaaggttggaggagcaggagtaacctcaccaagctaggcacctccctggtagagacagggtgaggacgcgcgaggatgatggggtgtctgaaaagccaa

SEQ ID NO: 240690 - DNA, 1240 bp, Homo Sapiens
  misc_feature (1008)..(1016): n is a, c, g, or t
ttattgaagtttcattttatttcagtctataagtattgctatttgtttaaagcactcacataaatccatttcacccaaaaaggaaacataaagtgcttctagcagtacaagcacggttggcatggcctttccaaaggtcttccactagagtctagagaaatctaaatatagtcatccacaaactggatgtttttattttctgagccattagagattttcaaaatcactttgatttttaaaaactcatcaaatgtgaatcatggcggggaagaccactgagctgatttctgataactaagttatcactgaacataatttatcatatatggctactggcatcatgaagaccttgggatagggaagactctttatgagaaatataaacatcacttgtgtaggaatcaccaggtgtccctagagcagttttgtactaaagacttctagtgtttactccctcaccacggtactccagcccaagagccaagagcacaatggtcaaactcactgaaggtttttacaacaggaaaccagtggaggtattgtgaggtactacaactttgaggcacaatctaaatactaaaaatgattatgaaatcttgagttgagctgattgatgccctcttaaatccattaataatccatgaaagtgatttcacatgcctagcctgctttctttctcacatgacagctgggagtattaaatgagataaagttgcagcctagcccagtgtctgggtaccatatcatttccttcctcctcccctttcccaaataaataaggttagtccttgaactttaaatgtactttataataagaagaaatcactttttctatcagtatccttgtcagcatgatttgaattgctctcaagagtacctactcttttgtaaaataaacactttgtactttactgaaagaacactagtgttctttcctttccgttgtgaaaaaagttgtttctgaggaattgaaaccccagaagataactacaacaaaaacatgttaannnnnnnnnaaaaatgatgattcaaaggcagatttgaagggaagtaatatttaggtggcagaagaaggcaaatgcagcctctgaagggaactgttctaattattacctaaaaaataaagttacacaactatattcaaggacatgagataaagcactgcttgaaaaccagaatgactgaacagttaggtgaaaaggaacagctgaaataggaaggggaaatggactgaagccaa

SEQ ID NO: 240691 - DNA, 1726 bp, Homo Sapiens
ttggcactggttgatttagctcccttggtaagagcactgagcagaaagaagttccctatcaaatgggtgtgtggagcagccctgttctccccatcccgtagagctccaggaagttaaccagggacttcagctgcgacctgcagatttctaagcccccctgttatttctctgtcttttacgggcctgtgtatttcagacttggtggtggcagtcaacggggtctggatcctcgtggagacatttatgctgaaaggtgggaacttcttctccaagcacgtgccctggagttacctcgtctttctaactatctatggggtggagctgttcctgaaggttgccggcctgggccctgtggagtacttgtcttccggatggaacttgtttgacttctccgtgacagtgttcgccttcctgggactgctggcgctggccctcaacatggagcccttctatttcatcgtggtcctgcgccccctccagctgctgaggttgtttaagttgaaggagcgctaccgcaacgtgctggacaccatgttcgagctgctgccccggatggccaggtactgccagcccccaccctggcctgcaggtccaggtgccgtgtggcagtgccccgtgggggcgggagccgagtggcagtcgggggaaaggagttccacaaaggactgcaatcgagggcctgacggggctccaaggagcctggaatcttgaccaccacaggtctcctgggcaccatttttctccactgacctgtctgacatatttagtagggagggcagggagctgtcaactcgcttaccacctgtgtctacattcacaggtaaggggtcacctgtgagtctaccttcacaggtaaggggtgaatctctgggaaaggggcatttgttcatagcgtcctgacttgagctgtttttcaccccagagctgccccacgaggccccttccccgcaggcactttccagttggtgaaccgaccaggggcatggccctgcagtcagccccacgggtccgaggaggccggggctgcagaggagccgttccctcctgccggccccgcgtcaccctgcccctgtcgccccacagcctgggcctcaccctgctcatcttttactactccttcgccatcgtgggcatggagttcttctgcgggatcgtcttccccaactgctgcaacacgagtacagtggcagatgcctaccgctggcgcaaccacaccgtgggcaacaggaccgtggtggaggaaggctactattatctcaataattttgacaacatcctcaacagctttgtgaccctgtttgagctcacagttgtcaacaactggtacatcatcatggaaggcgtcacctctcagacctcccactggagccgcctctacttcatgaccttttacattgtgaccatggtggtgatgacgatcattgtcgcctttatcctcgaggccttcgtcttccgaatgaactacagccgcaagaaccaggactcggaagttgatggtggcatcacccttgagaaggaaatctccaaagaagagctggttgccgtcctggagctctaccgggaggcacggggggcctcctcggatgtcaccaggctgctggagaccctctcccagatggagagataccagcaacattccatggtgtttctgggacggcgatcaagaccaagagcgacctgagcctgaagatgtaccaggaggagatccaggagtggtatgaggagc

SEQ ID NO: 240692 - DNA, 1246 bp, Homo Sapiens
  misc_feature (1064)..(1072): n is a, c, g, or t
aaactatttaattttttcagatccaatttatacccccccttttgtctaaattttgagaacttgacattttcagaaatgttaaatcattgaagaaaaatactagacacacacaagttttaagctagacaagaaaagattttacactgaattttataatagcattcatataaaattgattggaactacaagatataaaagcaaaattttaaaaagtcagaaagtaaaaaagcacgccaacatttatccactgtgaaccgtagcttgtagttagccagggcaattctgtccattcttcagagacactctgcaaaataaccagagccctattatttgagattgagtaaaaacccagccatgatagctaaaactccatacctcaaaaaattggactcaaattgtgcttcacaggcaatctgcttttaagttagtcaggtatgtcacaatgcttgctctctcaggacacatgaacaaaacaggcacttttataacaaaaacccaagtcagaaagccatgcaatgtaattttctattaaagtatacataagcatattttagatcaatctgagtgatttattaagtgttcagggtcaaaatgacaaagacgtggtggtgaaaagggaaaattaatgtaagtcaatgttcaatatgcaaaaatacttaataaattatctgtatggtacgcatgcatttaatctggtagctgactctcttctacgctgtaatttgttagtctaccctaaactcaaggaataggaagagtttataggctgtatataagggaaaataccatattttttatactacatgcttttacagaccactgtttattacacatctataaatcaagcactgatatttgcactttttagagaatatcatgagaacccttcaacatacagttatcaacttatctcctttaacaacaacaaaaaatcaggaaaatatgctactgactgccaaatgattcctttaaatgcaggaaagctaattccttatatagcctaaaactcaaacattatacattatctcaattgaaaatcataaaacttaaaggtcttaccaagnnnnnnnnngtatacaccaataatcatgggaccataagaaaatctacagactaaaaatatgacacagaaatatatttaagagaaaaaaatataacccacgatttgtaaatcatgaaattgctaaaatctgaaggtcacttaacttaaactcaccaactgttaaacaatctttgcctaatccaa

SEQ ID NO: 240693 - DNA, 902 bp, Homo Sapiens
ggtttataagggtattggcttagagaccagcttggagtcattgcccctacccgggaaatgcaggccaggaaacttaagattttgcgggccttttctgtttctaggtaaaatgcagagagctccctgaaggtcttgaaaaccatcaaccattcaaatatgtatactggagacctttcctcttgagtaaaggaagaaggaggtttgtgatcttcactgaaaacaaagtgaaacttcccacacaagtcttctaagagactctgaaatatactagaaatttcaaaactagaacaatgccatcaaagattaaacctcttaatgcttggagccaccccaaaataataaaatcgggaactccaggaaaacaggtaccaaacgaatcaaaataatgattgcactgaggattctcttatctgaaggctgtttaaagaggtaggattttaaggtttttcttttgtttatcttttggcctctgaacatttaaaagatgctttgcccagctggtccttcaggcaaaatttggaggtcacaatgaactccaagcctgacacaaagatattctacagtttcacagctatcatttgtacatattaagttgattcactctttttgagcaaatctacctagaaaacggcaaattaatatattcctttacatacaactttgtgtctcaaaattcttgaaaaacaagagcagatgactttgtattcaaagactaccaaagtatgtatttgattttcacatgcaaacaacttaaaaccttataaatctcatgtcaactctgcatgatgccttgaaggaaatgacatacaaagtttgctaactgtgcaaaatattaaattgctaaaacattttacataatgaaataatacatgtaaatgttgaagttgacacatgaaatccaa

SEQ ID NO: 240694 - DNA, 1744 bp, Homo Sapiens
  misc_feature (1216)..(1438): n is a, c, g, or t
gaatttaaccacttaattcaggttgttgtagcttaacttgccccacaggtgtgggatataacaattttaaaaatcaatttaaacacctgttttctcttaacaggaatctctgaaggaagaagatgaatcagatgatgataatatgtaacatttactccagcatctattgtattttaaatttctactccagtccaatgtaactatttagccctggattatacatactgtccaattttcattaaatttttgtcttataactattgaagtttggttaatatctgctttacaaaattggtgggggtaaatgaggacatttactcagtattaaaatatagatttatgactactgaaaattccctggttaaaatgctgcagaattaattccaagactgtagattaattcaaagccccatcttcatcactcaactagaatttacagatcatattctcctgggcttttgtacaaaaagcacctaccaacttagtggacaaataactgatacggtttcccactttcatatgaagtaactggtggtcatcagtcactgttaatctttagatgtgatacagatgacagatgtttcagttttggataatttttcaaaaactgacccttctcaaaaaagacccttcaatacatgagtcaaggatgtttttgcttttttcctttattgtggtgaggggcggatttaaggatcaataaagtccctattctgtcactaaaaaaatttcttgatctctaaagattaaaataaaaataccaacatcagacagctttcatgttaaaaatcagaatttatgttaaagtgctctgtaaacagaactgttactaagtggaataaacagtactgtggccgataagaataacttgaagctgaaaagcagtactcacagcaggaacaatttgaactcaggccatgtatacacaccctctagtggactcatgccagtgtcactccattgaagtgttgtgctttcctaagaaggtaatctagccactgaatttgggtgcagggtatcgctggactttgagcatttgtgtagtttaaatagcaaatcattatacctgaatattaatagctaactactacacaaacaactcaaaaccagtaatgtcatgtcattaccatggcttcttttatgtaacattatctgctacattttaccactcaaaatatatttaaaatatgtattttaaaatatattagagcatatnnnnnnnnnnnnnnnnnnnnnnnnnnnnnnnnnnnnnnnnnnnnnnnnnnnnnnnnnnnnnnnnnnnnnnnnnnnnnnnnnnnnnnnnnnnnnnnnnnnnnnnnnnnnnnnnnnnnnnnnnnnnnnnnnnnnnnnnnnnnnnnnnnnnnnnnnnnnnnnnnnnnnnnnnnnnnnnnnnnnnnnnnnnnnnnnnnnnnnnnnnnnnnnnnnnnnnnnnnnnnnnaactgtgaatgacacaagtgttggtcttagaaaaatacaggaacaatactaaattggatccatttacagacaggtaaattgactatccctaagccaatctatggtcattcctatactttcccaaagttccaaagtatgaatgtcacatgaatgttgaattcttctttgaatgtatctattcttaaaatttacaccagcatagttaaaaccctctttgaaagacactggttctaaagagacccaaatatgagcagctaagctactatagatgccataatataagcagatatacctagttcttcccaa

SEQ ID NO: 240695 - DNA, 925 bp, Homo Sapiens
ttggctagtttgcggcatcctgtggataggggaagcgctccgggcctggaatccctacgcgtccctttgggtttagcacgatgagctcaatcggcactgggtatgacctgtcagcctctacattctctcctgacggaagagtttttcaagttgaatatgctatgaaggctgtggaaaatagtagtacagctattggaatcagatgcaaagatggtgttgtctttggggtagaaaaattagtcctttctaaactttatgaagaaggttccaacaaaagactttttaatgttgatcggcatgttggaatggcagtagcaggtttgttggcagatgctcgttctttagcagacatagcaagagaagaagcttccaacttcagatctaactttggctacaacattccactaaaacatcttgcagacagagtggccatgtatgtgcatgcatatacactctacagtgctgttagaccttttggctgcagtttcatgttagggtcttacagtgtgaatgacggtgcgcaactctacatgattgacccatcaggtgtttcatacggttattggggctgtgccatcggcaaagccaggcaagctgcaaagacggaaatagagaagcttcagatgaaagaaatgacctgccgtgatatcgttaaagaagttgcaaaaataatttacatagtacatgacgaagttaaggataaagcttttgaactagaactcagctgggttggtgaattaactaatggaagacatgaaattgttccaaaagatataagagaagaagcagagaaatatgctaagggaatctctgaaggaagaagatgaatcagatgatgataatatgtaacatttactccagcatctattgtattttaatttctactccagtccaatgtaactatttagccctggattatacatac

SEQ ID NO: 240696 - DNA, 960 bp, Homo Sapiens
aaaagaaacaaaatcacacacagtgggaggcaacacataagcaggtgtaccatagagttttatctactacagtggtctatatgaataataatttacaaatgaaccagtattaatatgtccctttatgtatacggaagtcgctaaactacaaaacatgtccatttgaagtttttagacatctctgtatcatagaagcaaacaaacagcatcagttcctcagttctctgtgtgactgattattaaacaacctgtagacattgagcatgattacattagataaagcaggcaggtctagagttgtcacaataatcaagatgtctaatggcaccagtcaaaagagtgccaaagcttacatcagtaagagagaaaaataaaaattttttatttgtttataagtatcttttgtgctgaaagtcaactttatgactggatataaaaagtcaggagttaagagtgtcatgcagcagcactgatttaatgactggagatagaacaaacagatgtttgaacaaagactgacattcttaacaggttttattatattgggtggaatgctctaaattcatgaacgcttttggaaaatcttcaattctcaaccccttaaaaaagtatcctgaaccaggaagaaaaaacaagagacagaaataatgatctggacagatacaaaacaggatgctttagttcctcccatatcccaactgccatctggtgatagagttctcagaaagcaggatatctttaatattcatcaggcagaatctcaccagtgcaaagaaccaacattgatctggtgcctccgctcactctctgcagaccattttggattcctaagatgtaattatacatttcacatgcatttgtgagataaaataaacattatgtttacatatatcccacatgagtcattcacgcctaaaggttttctaaatactgtgtgccaacttttttgtacaaagttgg

SEQ ID NO: 240697 - DNA, 1411 bp, Homo Sapiens
aaagctgagaagagcagtaaacagacaaaaaatgcatccacctaaataaaaaaattcacatatttacatagttcagtaactgttaaaagttttcacatgcagaggtttaatgcacaggaaaatgttggtaatagcgtctggatgtcttgaaatgcggaaagcaatgtatagacacacaaacacattaaggtttagctataggtcaattaacaaacctatgcagtccccacagagtcacacattctagttccaattcctccttttaggcacaagcaagttgccacattctttgtaatggttcacactgaccattaatggtgttgaacaacagtagcaagtttaaatatcccttcatttacagaaccatccatcccaccagggtagtatgcaacatgcttcaaagaataagaagagaaatttaaaagcccagattctactcataaaaatatgaatggagaaaagcaagtagtgtctgtgcaacacagtgcagtatattgtacagaatatttttaaggccatggcagtctataaattaaaactgatattcattaaaagaacttactgttgactacactctgagtgctcaacacatttggaaatgcagtctacataagtgctgcttaacaaaagaaacaaaatcacacacagtgtgaggcaacacataagcaggtgtaccatagagttttatctactacagtggtctatatgaataataatttacaaatgaaccagtattaatatgtccctttatgtatacggaagtcgctaaactacaaaacatgtccatttgaagtttttagacatctctgtatcatagaagcaaacaaacagcatcagttcctcagttctctgtgtgactgattattaaacaacctgtagacattgagcatgattacattagataaagcaggcaggtctagagttgtcacaataatcaagatgtctaatggcaccagtcaaaagagtgccaaagcttacatcagtaagagagaaaaataaaaattttttatttgtttataagtatcttttgtgctgaaagtcaactttatgactggatataaaaagtcaggagttaagagtgtcatgcagcagcactgatttaatgactggagatagaacaaacagatgtttgaacaaagactgacattcttaacaggttttattatattgggtggaatgctctaaattcatgaacgcttttggaaaatcttcaattctcaaccccttaaaaaagtatcctgaaccaggaagaaaaaacaagagacagaaataatgatctggacagatacaaaacaggatgctttagttcctcccatatcccaactgccatctggtgatagagttctcagaaagcaggatatctttaatattcatcagggagaatctcaccaacttttttgtacaaagttgg

SEQ ID NO: 240698 - DNA, 1331 bp, Homo Sapiens
  misc_feature (1011)..(1026): n is a, c, g, or t
acccagtattaatatgtccctttatgtatacggaagtcgctaaactacaaaacatgtccatttgaagtttttagacatctctgtatcatagaagcaaacaaacagcatcagttcctcagttctctgtgtgactgattattaaacaacctgtagacattgagcatgattacattagataaagcaggcaggtctagagttgtcacaataatcaagatgtctaatggcaccagtcaaaagagtgccaaagcttacatcagtaagagagaaaaataaaaattttttatttgtttataagtatcttttgtgctgaaagtcaactttatgactggatataaaaagtcaggagttaagagtgtcatgcagcagcactgatttaatgactggagatagaacaaacagatgtttgaacaaagactgacattcttaacaggttttattatattgggtggaatgctctaaattcatgaacgcttttggaaaatcttcaattctcaaccccttaaaaaagtatcctgaaccaggaagaaaaaacaagagacagaaataatgatctggacagatacaaaacaggatgctttagttcctcccatatcccaactgccatctggtgatagagttctcagaaagcaggatatctttaatattcatcaggcagaatctcaccagtgcaaagaaccaacattgatctggtgcctccgctcactctctgcagaccattttggattcctaagatgtaattatacatttcacatgcatttgtgagataaaataaacattatgtttacatatatcccacatgagtcattcacgcctaaaggttttctaaatactgtgtgtggcactagaaacttcatgctgtatcaagtcagtgtcagtattaagctactggactctataatgaaatattatagatagacatttactgaaaaccaatataaaaatctggcccagaaagaccagaatggaaatatgcaattttcttgatttaagatggtcataagtatatggggnnnnnnnnnnnnnnnnaaagctctacacatggtttaagacaggtatgtgtaagaagcctttttgtgtgtgctgactttatcatgacaactctagctgattctttatgaaggattagggatattcatcttcagcagtgcacatgagaaataaactctgaaaaaggcaatttctggggtttaggaaggaccgtattctgggaattacttcagaggaacggacaataattctaggattatagccaagaaggactggaagacttcaggagatgcttcagcttcttctagattttgaatgctgaataagccactgaagtgtgccaa

SEQ ID NO: 240699 - DNA, 966 bp, Homo Sapiens
caatttacctatctgtgaaggtgaggagggtagtactagtgatctccagggccctttccaattctgacaatcctcaattatataaaaatgctataaaatccgtggtataaaatccaactcccaaacaggaagcgtcaaggggactgggcttgaggcacttgaaccttaggctctggcctgggggtcagggatgagaggaggggcctcctctttgccctctgctttcccactcctgggctctggcctgggggtccggaataagaggggcctcctctttgctctctgcctttccaccccgaggcaggggctggaccacgctgcccaggcatctcttcctccagacccaaccctcaagttccacccactagcctccccgccccggctttaggaccgcgggaactgttcctgcagcagcctggctttgtgaagagcagacagtagggcccggagtctcccagcgggattaacatcagcacagctagttggggtcctcccgtccccgcctctgccctcgctcctccttccttcaggtcctccctccaccacctcacagcttatctctgatacacgcataataaataagacatttgcacataagggtgactgggtcagctctgtccccgcccctccccctttcatataaaagcattaaatacagtttcaaaataaaatacaaagagcaaaaaagggcctgatctcggggccacctgttctccacaggagaatgaatctacacatccctctcggacctgcctgggagatcgcggggccccatccctgccacacagggcctgcggctgccacggggaaaagaggccgaggcccggccccaggccctgcgggttgagaacggacgccgcatccaccgccaacaaagggggatggggatggggcgggaatcgaaggctgactgccgggaccgcctgtgccccgggctcccacggacttgggttaggggtaagccaa

SEQ ID NO: 240700 - DNA, 863 bp, Homo Sapiens
atcaatattttttgagactcaaagcatccccaaaacattggagatccagcttattcctgagacatcaaccatcacaaaaggttttcactctgaactattcacatttttgtggcagaaaacagaacaaagttctgcagacatccttcctctctttctaaaatatattcacaaacagggtcttttcatagttcaaaagaaaaacaaacaggtttctttcttggccaaatggcctgttactctcaccctgggatctgatttcttaataaaaaagttcagggcaccaaatccaaccagaaattcccaggacaccagtggctacttaactatgaggggatggatgcttttgtctttctatgaggggaatcattctcccgggattattatgctgctcaacagccccaggacaggtaggtgggaaggagggtgaatgcaaaagcgaaagggtcacagaaaagaatgaggctttcttgaacaacccatagcaaggcagaatggtccagttttacaaaccacccactacaaactccaaacatgcacacccaaaactagaggggaaaggaaagagctcctgggggactaggggagacaaaagatggtgacatagaacagcagacttgcctatgaacgtttctcaacttcctaacactggaagatgtttaattaaaaagttgctgttcaaaattgtactgaaaacatatctaaaaataggtctgtagtcatcttaaaaataaaaggtcacttctcagataagaggagtgacagatattctcagataacaacacttcaggtatctttgatgtaaatttgaaaaatggcctggtagagaaaaaggaaggaaaggaaggagggaggaagaaagccaa

SEQ ID NO: 240701 - DNA, 1462 bp, Homo Sapiens
  misc_feature (508)..(531): n is a, c, g, or t
  misc_feature (864)..(894): n is a, c, g, or t
  misc_feature (917)..(931): n is a, c, g, or t
gttgaagaggcagagcctgaagaatttgtcgtggaaaaagtactagatcgacgtgtagtgaatgggaaagtggaatatttcctgaagtggaagggatttacagatgctgacaatacttgggaacctgaagaaaatttagattgtccagaattgattgaagcgtttcttaactctcagaaagctggcaaagaaaaagatggtacaaaaagaaaatctttatctgacagtgaatctgatgacagcaaatcaaagaagaaaagagatgctgctgacaaaccaagaggatttgccagaggtcttgatcctgaaagaataattggtgccacagacagcagtggagaattgatgtttctcatgaaatggaaagattcagatgaggcagacttggtgctggcgaaagaggcaaatatgaagtgtcctcaaattgtaattgctttttatgaagagagactaacttggcattcttgtccagaagatgaagctcaataattgttcacattgttctttnnnnnnnnnnnnnnnnnnnnnnnnaaaattgggtcttagattttgatttactagtgtgacaaaataactacatcctaatgaaaatcaagtttgatatgtttgttttgaaagtagcgttggaagagttgttgggggttttttgcatccatagcactggttactttgaacaaataaataaaagctttctgtagttgcttcctttatcagaaaagaacatttgataccatggtatatcatttcctcttcattaaagaacagcttttctaaatgttgggggaaatgtccatagtcattactcagtcaaaacttgtgttctcatgagcctaaggaccattctagatttattacgtgtttttnnnnnnnnnnnnnnnnnnnnnnnnnnnnnnnatccataaaatgcatatgtaaannnnnnnnnnnnnnnaagcattcacccaaacaaaaaaatcacaggtaaacccatgtttctgagatgccattattccaagcaaaataagagataatcccttcaagttaaattgaaaattttcctgaaaccatacatttcaagtgaaataagtaattctagataggacaatttaaattggataattttaaagtgtctataattgcagtggtttatttgcaaaattcctaaaaggaaaaattttatcactgccatcacagcaggtttcctcatccagatgaagaaactagacaaatgctagtgtgttttaactagctaaacaaaactaagttaaatgaacatttaaaagtttccctagcgggccattccttagcaaaatgttggaatcccctgttgctacattgactaaaagggtcatgatgaatggaatatgtaagacttggcttatagaaacctaatcagatggttagaggtgttggcaatttaggacctgctgtcataatgtgtgaacacccttttgtaactaacctaattgacctgcatgttttt

SEQ ID NO: 240702 - DNA, 1438 bp, Homo Sapiens
ttggcttttcctgaggtagattttaaacagtatttttaaagtccaagacataggtttttctagtttattccctgaagatctgttgccacagttgggagatttcttcttaatcctgattttcttggtaagcttttttactttattatctctataatttattatctctatccatatttgtggatcgggtagtgggaaaagagattataatacttgtctttctctcctctccctccatccctcaaaagatctttatgcatttcccactactcccttactgtcttttagcattcagagaaaaagccaacttgcttaaagaggaatcacttaaaaggtaggcatatctaagatgctcatagaagaggaagaatgggacatggccccatgcttatttttgtttacaacgtaacatggcatgagagagggcagagaaactaagttgctggggaaagttagaggaactgaaagtttgggaataggctgaccacatattatgccagtgaccagtatgacaggagatggggccctgctgccagtcatctccactgaataaagaataatgctcctctttcagggtaataaagtggggaaaaggaacgtcttctcatgcaagaacataagctttctcgtatatacctgtatgctacagtttttcacatggaattccgttttctgaggtacagcacattttaggtaacagtatttaacttgaaattcatcatgggagtctgctgctataccaggcacaagataaaactccaaaatttctgtttacattgacctttacatttaaagctgttcatccatggtgcctccccaaatcataagaccaaagaccaccaaacgcagggtggactctgctcattattctttgacccagaaagactggagaaggtatgtgctttaagtgctgctctacctgaaaagaaatcctttaaattacctatggaagtgatgtcctcagataatcttaatgactattttggcatttataaatagaaatgattatggactttgatctgccatacggaggttcggaacctggagaacggctgtgataagtaggttttgattgagtgaaagcatgagcttgttcagagtgaggggcatagtgaaaaaggaacagccatgcctcaaaatcaaatcatttgcattcccacagcatcctgaataccgactacctcttcacttgctaaagcagctaaactgtgaagctctaagtggtttgggtttgttgtttaaccttagcgagatcctttaactgcagcaatattcaagccagatatttggaagcaaatgatatttcctcttgcagtgtccacaaatctgaatattaggggcatgaaattaggcttaccatctgatttgtaattacaattttggaattctctgttttagttgctgagcctgagttttctggctcttaaagcatagatcattt

SEQ ID NO: 240703 - DNA, 921 bp, Homo Sapiens
actttgtacaaaaaagttggacctgtatgccacagtttttcacatggaattccgttttctgaggtacagcacattttaggtaacagtatttaacttgaaattcatcatgggagtctgctgctataccaggcacaagataaaactccaaaatttctgtttacattgacctttacatttaaagctgttcatccatggtgcctccccaaatcataagaccaaagaccaccaaacgcagggtggactctgctcattattctttgacccagaaagactggagaaggtatgtgctttaagtgctgctctacctgaaaagaaatcctttaaattacctatggaagtgatgtcctcagataatcttaatgactattttggcatttataaatagaaatgattatggactttgatctgccatacggaggttcggaacctggagaacggctgtgataagtaggttttgattgagtgaaagcatgagcttgttcagagtgaggggcatagtgaaaaaggaacagccatgcctcaaaatcaaatcatttgcattcccacagcatcctgaataccgactacctcttcacttgctaaagcagctaaactgtgaagctctaagtggtttgggtttgttgtttaaccttagcgagatcctttaactgcagcaatattcaagccagatatttggaagcaaatgatatttcctcttgcagtgtccacaaatctgaatattaggggcatgaaattaggcttaccatctgatttgtaattacaattttggaattctctgttttagttgctgaggcctgagttttctggctcttaaagcatagatcatttcacctgatgtttttgaagcatcctaagtacagtagagtagaaaactgatttccttgttaattgtacactgaataatgccttttaaaaatcaaa

SEQ ID NO: 240704 - DNA, 1506 bp, Homo Sapiens
  misc_feature (79)..(105): n is a, c, g, or t
  misc_feature (608)..(636): n is a, c, g, or t
  misc_feature (976)..(1023): n is a, c, g, or t
ttggtataacttttcctctttttttaagaaaaatgaaaaaagtaattcttttgtctgaaggggaaaggcattctttcannnnnnnnnnnnnnnnnnnnnnnnnnnatgacttgcaggcacaatatctagtactgcaactgccagaacttggtattgtagctgctgcccgctgactagcagctggactgattttgaataaaaatgaaagcattaaagggtttccctacaaaacatttttctttaaaatacttttgaaatggctataagcagttgactttcacccttggagagcatcacactgtgtgaggttcagtgattgttgaccctccccagcccctcctgcttctttaagttatctgtgtgcgtgcgcttcctctcaatcttctttgcacgctcatttctttttctctgacccatgagaaaggaaaacttactgatgataatttttaaatagtgtaatttattcatttatagcatgtcaggataaattaaaagaacatttgtctggaaatgctgccgggagcctattgtgtaaatgtaggtattttgtaaaataaccttgaaattgtaaattgacacgtgtttggtcagattgtgtcaagtttaannnnnnnnnnnnnnnnnnnnnnnnnnnnnatttgaaaactactttagcaataattaattccatgattatcacattctgccattaagggatattagtaccgtaatactgaagaaattttattaagtctgaacttctggggtaggcagcttctttgtttcttttctatccacccttgtcggttgaggtatttgtttcttgactaataaaccctttgatacttttagccagaaatcagtctcataaagctatttttgagtatagtttgtgtaaaataaaaatgtttagctttggtaataacttccaagctgaactccctctagcaagatatttttcagtgcttttatttactatgcacttagactatgcacnnnnnnnnnnnnnnnnnnnnnnnnnnnnnnnnnnnnnnnnnnnnnnnnaaaggttgtggtgtagttggtctgtaattaagttgcagatttaaaactgctgttagctttgtaaatcaaaatataggtgttttttgtcctggtatatcgtcattccatctgcagctggagctggaatcccattgatcttctagctaccattcattttcttcactgttcacaaaagaagagtgtgaaattcagtgaatgctgttactaatcctgttacgagatgaatctcatttcaccaaaattaaattatgtttttccgctaaaatgatgatacaagttgaagacacatcactctgaaattggaagacctcaccacttaaggctccacagtggcttactcagctgaactctaggttactactctttactttgttcacccattggggggtgcagtttttttaaaatgttgggagatggccattctaactactgttgaatgtctctgttttgggaaggtataacaagaaataaaaaagaatccaa

SEQ ID NO: 240705 - DNA, 927 bp, Homo Sapiens
aaagccaactttgtacaaaaaagttggcttgtgggctagaagaatcctgcaaaaatgtctctctatccatctctcgaagacttgaaggtagacaaagtaattcaggctcaaactgctttttctgcaaaccctgccaatccagcaattttgtcagaagcttctgctcctatccctcacgatggaaatctctatcccagactgtatccagagctctctcaatacatggggctgagtttaaatgaagaagaaatacgtgcaaatgtggccgtggtttctggtgcaccacttcaggggcagttggtagcaagaccttccagtataaactatatggtggctcctgtaactggtaatgatgttggaattcgtagagcagaaattaagcaagggattcgtgaagtcattttgtgtaaggatcaagatggaaaaattggactcaggcttaaatcaatagataatggtatatttgttcagctagtccaggctaattctccagcctcattggttggtctgagatttggggaccaagtacttcagatcaatggtgaaaactgtgcaggatggagctctgataaagcgcacaaggtgctcaaacaggcttttggagagaagattaccatgaccattcgtgacaggccctttgaacggacgattaccatgcataaggatagcactggacatgttggttttatctttaaaaatggaaaaataacatccatagtgaaagatagctctgcagccagaaatggtcttctcacggaacataacatctgtgaaatcaatggacagaatgtcattggattgaaggactctcaaattgcagacatactgtcaacatctgggactgtagttactattacaatcatgcctgcttttatctttgaacatattattaagcggatggcaccaagcattatgaaaagcctaatg

SEQ ID NO: 240706 - DNA, 1548 bp, Homo Sapiens
  misc_feature (219)..(233): n is a, c, g, or t
attaaaataaaaactataaaatcttccttaggttacaataagtcagacacggtctggaacaccagtggttaacaacagtaatgcccaactatcagtgctaacataaaaacattttagaaggtcaaaaacaattaaactggaaaccaaagccttattttccctagatgagcaaaactgaaaatgaaaggggtcccacctcccagtaggagtgaaggggannnnnnnnnnnnnnnaaactgaaggtggggtacatggtgcagctggttctgtcattgctcagcctagttggcgtccagcttggccatttcctgcacatagatgcctatactctcgctgtcaaaaagcacgaagtacaccgttttgatggaagaggacattgtagacacgaagtaactggagatggccttcagaatcagctgagctgctgtctgctttggaaaaccgttcctgccgctgccgatggatggaaatgcaatggatttcagcttcttatcatcagccagggccaagcagtttttcactgtcttttccagaagttcttcacacttgtctgcaccccaaactggactattacagtggatcacaaacttggcaggcaggccatggcctgcgctgacagcagctccagctacttccaagggcccgttctttttccggagttccaggacagcttccacaaactccttgccacctttcttctccagcgtgtttcctagacaaggacagggtggggtcaggttgccattctgtgtctccggcacacacagacacttagcatgtcaggtgattacatacttcaaatgatctattaaatttccatcaggctgcaaaacaggaactaagccttggctaagttaataaagtaaaattgagaagggctttgtcatcaccagttactaccctcaaattgctgcttcatctggctgtctctgctgccccttatttgggtctgactcagggtgatcatggatgtgccagagatgtgaaagagacaggacatgcttgttttttgcaaacatgcttgtcctggatgcttttcattggcatgagatactagctggtactggtttccaagactaatgcctgccttaggttttcttctctgtctctggggagaacccccaagtaaggaggtttcagcagcatacaatgctcccatcaataagccagctctcctcctggcagcaggcctagaaggaagtgttcatacctggccacctttggaccagcattattaccatgcttagttcctgttttgcagctttggtgtcatatgcaaatacaaaataaaaatggcctcagacggtattttcttaattacactaatgattcagaattgttttcagtaaagaagggcaacatcagaagcagagcttaaagattaatctgtgttctataaaaagcttggaaaggaggatgtctaactgctcaggaccagatttttcacaaaagccaatggagattgggagcaatgtgttttcttcaattagggcacttgctaagtaatcagttcctgctgtgaaaaccaagttcccaaacaagatccaa

SEQ ID NO: 240707 - DNA, 1067 bp, Homo Sapiens
  misc_feature (196)..(239): n is a, c, g, or t
ttgggttttatttgcctaaatagccgttattaaatggaataacaaccacattagaccaaattaattgcaaacacagcggcaacctggggagaagttgaaactccagttttgtggattacagttttgagttttatgattgacatttttaagtcccctatttaaggggtcaagattataacaatgtgtgtcttactannnnnnnnnnnnnnnnnnnnnnnnnnnnnnnnnnnnnnnnnnnnttgtttttttgaatgaacataagatagaaacaaaaacttctcatccagttaactagagtgaatgtagggagaattgttttgcttgtaacatggagagtttattttcaagtgaggaaagagaaaaaaattactcagacttgttcctggtgaagtgcattctctgtttgtatactttttgatggagaaattgatctatagaactgcttaattttttgaggcatttagacagcaatgaaaggtagttctccacaggacaccgaatcaaaaggagagaccagactctggcctcatacccagcctatttgaaacaagctatctagtttctcctgcagacaccttgtcaacaacatgcaacagtgtcaggtgccttgcaggaaaataatctgagtcccaagctagcctgtgctcatccacaatcacaatgaacatgtcaaggaagaatttgcagagactcaagggaagcacaatgggataaggtaatcactttcagtgaaaaactgttttcttgaaaacaggcttggacacaattgaaagctggcttcctgcaaacacaccaagagtctgtaatctagcctatccattatatgtcctttattattcatgatatcctattcttctaccttgttgcctggtaactttttctgaggactgagtttctgcagcgatgtggtgcactcttcctgtgatgaggaaacatctgggcccccttctgcacgctttggaagatgatgtgtcttgtcacgggtaaagggcaaatggatttaatttctgcttaaaactatcatagacgttccaaatagatatgtaaatttctctgtattagaaaaa

SEQ ID NO: 240708 - DNA, 1384 bp, Homo Sapiens
ttggcagccctctatatccttggggacaaagcccagctcaagggtgtgcggtcagaccccctgcagcagtgggagctggtgcccattgaggtattcgaggcacggcaggtgaaggctagcttcaagaagctgctgaaagcatgtgtcccaggctgccccgctgctgagcccagcccagcctccttcctgcgctcactggaggactcagagtggctgatccagatccacaagctgctgcaggtgtctgtgctggtggtggagctcctggattcaggctcctccgtgctggtgggcctggaggatggctgggacatcaccacccaggtggtatccttggtgcagctgctctcagaccccttctaccgcacgctggagggctttcgcctgctggtggagaaggagtggctgtccttcggccatcgcttcagccaccgtggagctcacaccctggccgggcagagcagcggcttcacacccgtcttcctgcagttcctggactgcgtacaccaggtccacctgcagttccccatggagtttgagttcagccagttctacctcaagttcctcggctaccaccatgtgtcccgccgtttccggaccttcctgctcgactctgactatgagcgcattgagctggggctgctgtatgaggagaagggggaacgcaggggccaggtgccgtgcaggtctgtgtgggagtatgtggaccggctgagcaagaggacgcctgtgttccacaattacatgtatgcgcccgaggacgcagaggtcctgcggccctacagcaacgtgtccaacctgaaggtgtgggacttctacactgaggagacgctggccgagggccctccctatgactgggaactggcccaggggccccctgaacccccagaggaagaacggtctgatggaggcgctccccagagcaggcgccgcgtggtgtggccctgttacgacagctgcccgcgggcccagcctgacgccatctcacgcctgctggaggagctgcagaggctggagacagagttgggccaacccgctgagcgctggaaggacacctgggaccgggtgaaggctgcacagcgcctcgagggccggccagacggccgtggcacccctagctccctccttgtgtccaccgcaccccaccaccgtcgctcgctgggtgtgtacctgcaggaggggcccgtgggctccaccctgagcctcagcctggacagcgaccagagtagtggctcaaccacatccggctcccgtcaggctgcccgccgcagcaccagcaccctgtacagccagttccagacagcagagagtgagaacaggtcctacgagggcactctgtacaagaagggggccttcatgaaagccttggaaggcccgctggttc

SEQ ID NO: 240709 - DNA, 914 bp, Homo Sapiens
  misc_feature (92)..(104): n is a, c, g, or t
  misc_feature (655)..(746): n is a, c, g, or t
  misc_feature (750)..(762): n is a, c, g, or t
  misc_feature (800)..(809): n is a, c, g, or t
acttgttttttgtgcgtataaaacccaagtgttagctactttctaactataaaattctatccaaaaagacttgcagtcaaaacaccgagccnnnnnnnnnnnnnggcaccaaagcagtgccgacttcaatgtgcaaaggccttttacgtgctgatattgtaagcaatctgtgtgcatgtgtacatatgcatctgttttcagggaaagaaaagctgttaaagccaattaaggttatgaattcttgctactactttaatattaaacctttaagtgaaaatttattgaacactattacaaatgtggcaaactgacatagctggtttactgcacaaactttaatgtcaaagggattagatcagagctccagtctcacttactgggcctataacattgtgcagggcacttatctcacctcaggaaaatggaagtaactgcttcattttacagaggtattaaatgaaagaaatgagaaaactataaaccaacattgaagcctgaattattgcttagtatttaaagtctagtacaattgcaatgtttttaataaaaaaactcattgataggtgtatttttacagtgtatctaaaagcagcatttaacattaaaaacttagtatttaaaagagtacacaaccaggcagggtgtggtggctcannnnnnnnnnnnnnnnnnnnnnnnnnnnnnnnnnnnnnnnnnnnnnnnnnnnnnnnnnnnnnnnnnnnnnnnnnnnnnnnnnnnnnnnnnnnaacnnnnnnnnnnnnngagacagtttcgctcatcgcccaggctggagcaagtcnnnnnnnnnngtacagattgatttttatcctatttccaaaaaaagatttgagctagcttacaataaaatcacaggaatatgacctaaaactattaacatgactctaaggacccaa

SEQ ID NO: 240710 - DNA, 909 bp, Homo Sapiens
aaaatctctgtgccaattcttctgtgcactttcacatagtgactgcatgcttcagtgtgatggtgttctccaagatatgacactcttgtgctgggctctacctgaaccactttttccattgtcttggctggaggagagctgccaggtagctgccaggctgggcatatggccacacaggatatgcaacacacaagcgcaggagtgccatgcataggctacatggaggatctgctggcagatagggaggtagcaggacccaacaagttgggcccagggggtactaagaggtagggggtggaagctcatgtgcccagagagaacagcctcacctctgcagaagtaggcggttctgaagagctccacgcactcgttgctgggcagcagatgcgggcctggcccaggtggagcctggggtgcattccaggagatggggatggggcaaaggcgctgcacgaagaggcctcgggggttgctggccactaggatgcccctctcaagctggctcagcaggcgctgcgtgggctccagtgggccaggcttggggaacagcacctgctccatgctgctctcagagcctgagggctcagccacaaggcggcaatccaggctttgcacctgggcctcgcccaccacgcgcccgttgtagatgaaggtgagcagcagtgagtagtctggggatagaacagccctacctggtgctggaggagcatgcaggctggcagcagcccctccccaggggaacaactccacctcccctccccacaccagccagggggcttcctctcaggttttcctatcactgaggcaagtagctagtatgtgattcaccatgaggcctcagggctcaatgcccaggggcttgtagtttactagaaggtcccttgagattgggcctctgtttggccccaa

SEQ ID NO: 240711 - DNA, 962 bp, Homo Sapiens
  misc_feature (98)..(107): n is a, c, g, or t
  misc_feature (685)..(715): n is a, c, g, or t
ttggcagaagagcggaccagggctgctgccagcacctgccactcagagcgcctctgtcgctgggacccttcagaactctctttgctcacaagttaccnnnnnnnnnngagccaacatgttggtattgctggctggtatctttgtggtccacatcgctactgttattatgctatttgttagcaccattgccaatgtctggttggtttccaatacggtagatgcatcagtaggtctttggaaaaactgtaccaacattagctgcagtgacagcctgtcatatgccagtgaagatgccctcaagacagtgcaggccttcatgattctctctatcatcttctgtgtcattgccctcctggtcttcgtgttccagctcttcaccatggagaagggaaaccggttcttcctctcaggggccaccacactggtgtgctggctgtgcattcttgtgggggtgtccatctacactagtcattatgcgaatcgtgatggaacgcagtatcaccacggctattcctacatcctgggctggatctgcttctgcttcagcttcatcatcggcgttctctatctggtcctgagaaagaaataaggccggacgagttcatggggatctggggggtggggaggaggaagccgttgaatctgggagggaagtggaggttgctgtacaggaaaaaccgagatnnnnnnnnnnnnnnnnnnnnnnnnnnnnnnnaggtcaaatcccaaaccattactgaggggattctctactgccaagcccctgccctggggagaaagtagttggctagtactttgatgctcccttgatggggtccagagagcctccctgcagccaccagacttggccctccagctgttcttagtgacacacactgtctggggccccatcagctgccacaacaccagccccacttctgggtcatgcactgaggtccacagacctactgcactgagttaaa

SEQ ID NO: 240712 - DNA, 1687 bp, Homo Sapiens
ttggattttaattgctaattcccattattgttgcctttttgttcttagaaagtctttgcttcgcgcaaagagttgttggaatatgacctacagcagagggaagcagccactaaatcatcccggacctccgtgcagcccacattcactgccagccagtaccgtgccttatccgtcctgggctgtggccacacatcctccaccaagtgctatggctgcgcctcggctgtcacagaacattgtatcacactacttcgggccctggccaccaacccagccttgaggcacatccttgtctcccagggccttatccgggagctctttgattataatcttcgccgaggggctgcggccatgcgggaggaggtccgccagctcatgtgcctcctaactcgagacaacccagaagccacccaacagatgaatgacctgattattggcaaggtctccacagccctgaagggccactgggccaaccccgatctggtgagccggcctagcaggcccagctgtcctctctgacttcccctcacatgacttgtgtttctcagcttcccctcccaggtcctgcggtgactgaggagggaaggagcagaacattaccccagaatggttttcccagggaagagcctggagcacaagggtctccgtctgtcctttgtctctgttggagccacctaggaccagaaattgtattaatagttaagagtcgctggaccggagctgaccctcttgactcatgtctcttcccattgccttctatgcaagtagcctgcagtatgaaatgctgctgctgacggattctatctccaaggaggacagctgctgggagctccggttacgctgtgctctcagccttttcctcatggctgtgaacattaagactcctgtggtggttgaaaacattaccctcatgtgcctgaggatcttgcagaagctgataaaaccacctgctcccactagcaagaagaacaaggatgtccccgtcgaggccctcaccacggtgaagccatactgcaatgagatccatgcccaggctcaactgtggctcaagagagaccccaaggcatcctatgatgcctggaagaagtgtcttcctatcagagggatagatggcaatgggaaagcccccagcaaatcagagctccgccatctctatttgactgagaagtatgtgtggaggtggaaacagttcctgagtcgtcgggggaagaggacctcccccttggatctcaaactggggcataacaactggctgcgacaagtgcttttcactccagcaacgcaggccgcacggcaggcagcctgtaccattgtggaagctctagccaccattcccagccgcaagcagcaggtcctggacctgcttaccagttacctggatgagctgagcatagctggggagtgtgcagctgagtacctggctctctaccagaagctcatcacttctgcgcactggaaagtctacttggcagctcggggagtcctaccctatgtgggcaacctcatcaccaaggaaatagctcgtctgctggccctggaggaggctaccctgagtaccgatctgcagcagggttatgcccttaaaagtctcacaggccttctctcctcctttgttgagtggaatccatcaaaagacattttaaaagtcgcttggtgggtactgtgctgaatggatacctgtgcttgc

SEQ ID NO: 240713 - DNA, 966 bp, Homo Sapiens
cccagaaagtcacctgatgccgcacacaccaggttagtgagcccattgagcaggagtgccaggctgaacaggtacttgcggtggctagcaaaggccggccgtcctgccatcagcccggctaggggcttcaggaagatgttgctgaagccgatgatggagatgaggagggctgcttgctgctcgtccacgctgtgccacatggcatatggcaccaggaagacttgtggcagtgggaagcccaggacggaccacatcacacccagtatgtacacgcagtagcctgtgttgtgccgcaggatgtcgaaggccaggtggcgctggatggtccggccgcatgcagccaggcagccaagtgcaggtgtctcgggaggtggcgggggacattctttggtctcaggggccacactggtggccacaggccttatgatggccccgcagatgcagcagtggagaaagatcccgccgaagacaaggaaggtacccctccagcccaggttctccagaaggtagcgggagagcagcggccagagggtgatgcccagggagacgcccatcgaggccagcgcgttggccagcacccgccggcggacaaagtagaagcccagcaccgtgatgcttgactggaagctgaagcacatgcccaggcctgcggggcaagaggggaaaccagcctggaggcgcactggggccttccacctgcacccaggggtggggtcagtggtcatttcacacacctgccctcctctggttctagtccatacccagctccaagtccctggggactgaccatggaatcagctggcctcgccacctccctgtaggcaccccaccccagatctgccctcccaaggctgccagggcatccctgttcccctaggtgtagcacgagagttatcttttaaaaacccaaattgggccgagcgcggtggctcacgcctgcaatccaacttttttgtacaaagttgg

SEQ ID NO: 240714 - DNA, 457 bp, Homo Sapiens
caattaaatctaaaattaagaaccattcccaaagaaaatccaggcccaggtggcttctctggcaaattctatcaaacatctgaggaaaatcagtactaatattacatgaaccttcacacctcttgggctggtatgagaattaagtgaaaatttgtaaagaaattagcacattgtgttatatgtacacagtaagcaccatgtaaacatttgttaaataaattccagtcaatggacccatattttaaaaagtcttagctcttcatctaaagattagctagcctcttttgtgtgttttatgttaaaataagatgtttaaggcatgctttatatctttttccctcggtttaacaattctgattaatctgtttcaatctcactgcaagacaactgtttcttacatactgcctagaacggtatgtcacccacacactgcctagcacagtgttttgtacaaagt

SEQ ID NO: 240715 - DNA, 965 bp, Homo Sapiens
  misc_feature (196)..(205): n is a, c, g, or t
  misc_feature (889)..(898): n is a, c, g, or t
gcccggccagctaagcgagagctcacaggggctcttctagatgtaaagacagtgagtggggacagccaggtttcagatatcaaataatattttaatttctgaatactttcaattttccttggaatataacacacaaagactcgaccaaacagttcagttattataacttttacagtatacagaaatgttgcacttnnnnnnnnnnccttcagtttttttaaaacacaaactgtaaactctaagatactgaatcaatcacgttacctataagtgccaacagtgttatttttgtcatgctgatttcaatggtattttttaaaaagggaaaatatcaacaattataatacaaagggtttgcaaatatacaaacagatataggattttcataacaattcaagaactaagcgggacccaattcaaattacaaaagttcactttttattcaaaacctcagcatgtgtcttggacacattccttggctgccaataaattccacagttcattctctttcttaaaatattttttaaaagctaggtttgtcatggtttcttttggggaggggcagggtaggggaagttaagtgttatatgtggttcctccagttctctaattagagtgctcgacttcacctaaaaattttggtcaccacttgtaagtgcgtttccatcatctttgagttgccttttaaagttttatgtcttcctatggtattttcatggactcagttttaattcttgcagaacatatattttaatgatacacagtttttaagaagccaagattatatcaaaacttattatagaaccacagaataaactggtttggaaccagaaaagtacaaaaaagaacagctagaggtacatagacacaggacaattaataatttggnnnnnnnnnngacttactttctccattctgctaattgtctcccaatctccttaaatgcacttttagcaatatttttc

SEQ ID NO: 240716 - DNA, 1167 bp, Homo Sapiens
  misc_feature (459)..(468): n is a, c, g, or t
  misc_feature (536)..(560): n is a, c, g, or t
  misc_feature (620)..(636): n is a, c, g, or t
  misc_feature (668)..(682): n is a, c, g, or t
ttcactttttattcaaaacctcagcatgtgtctggacacattccttggctgccaataaattgccacagttcattctctttcttaaaatattttttaaaagctaggtttgtcatggtttcttttggggaggggcagggtaggggaagttaagtgttatatgtggttcctccagttctctaattagagtgctcgacttcacctaaaaattttggtcaccacttgtaagtgcgtttccatcatctttgagttgccttttaaagttttatgtcttcctatggtattttcatggactcagttttaattcttgcagaacatatattttaatgatacacagtttttaagaagccaagattatatcaaaacttattatagaaccacagaataaactggtttggaaccagaaaagtacaaaaaagaacagctagaggtacatagacacaggacaattaataatttggnnnnnnnnnngacttactttctccattttgctaattgtctcccaatctccttaaatgcacttttagcaatatttttcnnnnnnnnnnnnnnnnnnnnnnnnnactaatttcctttttatacaaaaatgataagtagcaagttgttttgaccgacacaggagnnnnnnnnnnnnnnnnnaatgcattctgtaaaagttcatttgacagtcnnnnnnnnnnnnnnngaaattcacagtccattaaattcttcccctctcttcttttagcaaacttgtaacatccttttatatcctttcttaacagaaggaaattaagcaaacaaaccagccttttgccttttctttctctgtttcactcccccttcttattttatttatttattgaattgccatatacggccagttaaaactgctgccggacagtaacatatcccggatgagggtttcgatgggggttttaccccaaacggacgaaaaacaattgctctatgactgaggaggagacggtgcggagggaagggaggcgaagcaaaagctttccgaatctcgtcggctggttggggtactggctcctaacgtattcttccaaagcacactgagacttttcctgcaagctttccacatgggctacatcagagagaccacaggcatctggaagaaagtttaaaatcttgtaagggagaagaagaagccaacttttttgtacaaag

SEQ ID NO: 240717 - DNA, 1154 bp, Homo Sapiens
  misc_feature (1038)..(1067): n is a, c, g, or t
gaaggtaataaacatttgaaatttttattgatttttaaatttaaaatccagttttaaccacaaaattgtttgaatcacaagtggtaatacaatgtcttcaatatttttctaaagttatttttctatataataataagacaacagcatagcatataggaagttttcattccagtggcttttttatatatttatccttcttaggaaggacaaattaaattttttaaattaaacttttaaaatataacaacatctaacagaactgtacaaaacaaagagacattttttaaacaacttgccaaacttacttatgagtgtgttttaaaaacaactttgtaaatgtctgggcaaagaagcaagctgtcgtcctccctttaccttcatagtgagtttgtaaggctttgtctttgtaagcagaaagagtagactgtgttgttttttgccaaaaactgtttatacttaatctcactgaagtattgctatatggagaacccatactctgatcaacttgattttttgtgtgtaatgcttgatctaccaggtaacttcccaactgctcctaatgctagcgggctaatcccacattattattccactatcatccctgcagaaaggtcttggttttgatgaaaatcagccctttccttacctgctactgcctcaaaaagggaccaggaagattctagctggctaattcactgttccctttgagcaagaaaacggcacagggagaaaaggacttatctggtgagagatttggcatataccttcaatgtgtgccctataacacaacattgtctccgatctcatctttctatcaaatgacttccaacactcttaagtctcaggtattcttaaatctgtatcatcaaacatgaagcttctcttgtttgttagagtaattaatctttctttggattaaagtttccctttgaaataaaaccacctacctaatctgactgctaaatttctagcttctttgttttaaatatgctcaggagtcaacccaaattctgcagcaaataagtttgcttattaacnnnnnnnnnnnnnnnnnnnnnnnnnnnnnngatgactaattctacagatagctgtaaggatgaattactcaagttcaaaatcaaattctgattctaaacacataacaattgttccaa

SEQ ID NO: 240718 - DNA, 1414 bp, Homo Sapiens
  misc_feature (1156)..(1185): n is a, c, g, or t
ttggacaaaacaaaaagagagaacttgcagcaggagcctttggaactaaaaaaccaaatgctgacgaaatgaaacaagccaaaattaatgaaatcagaacattaattgacttataatttgtgggattttagtaaggtcagtttgattggatacttaagttttagaaatgagaaaaatacagagttttagaaatgagatctagagaacacgtcttctaaaaggggcatattttatattagtgaagaggtattactgacacaatttcttctatatatgaacctatttttaatgaaacttcaaatagcaataagttccgttatatactgtggcctgaaataatttgagaaaaaaggttactttgttattcagcttttcataatatctatgctgagtattttcacgtatcttccaagtactcagctttttcgtatttcaaataaggtcagaccttttatacttttgaccaaatagttattttctatgttggacacttagttatttgccaaagcctccgatttgtgatgcagtgtttgtagtccttgtaaacaatatatacagactatacaagaattaattttattgggctttcaaaaaccatatttgcattccagaaccaaatcttaaatgagaccaaagtccaggttagcacaggtttttatttttcctacagctacattgagatatagttcacataaatgacttggagttttatgttcatgaaaaaattagggattatgttaagagtactattttttccattttagttaagtagtactacactcattgtttaaatgtaacttgctgtgtctgaggtataaatatagtctgtgggagtgagaggcaaaccagtcctacccaatttgatttgaatattttaaattatggaactgctaaatagatatttctataaatagataatttttatttatgtagctttttttggaagtaactttataaatttttataattcagaagactactatatgtgagaggcgtgatatctggatggaagttgggctggatgatctccaaagtcgtttcaactcttaaagacatcttaatcctgaatgtaaacaattgttatgtgtttagaatcagaatttgattttgaacttgagtaattcatccttacagctatctgtagaattagtcatcnnnnnnnnnnnnnnnnnnnnnnnnnnnnnngttaataagcaaacttatttgctgcagaatttgggttgactcctgagcatatttaaaacaaagaagctagaaatttagcagtcagattaggtaggtggttttatttcaaagggaaactttaatccaaagaaagattaattactctaacaaacaagagaagcttcatgtttgatgatacagatttaagaatacctgagacttaagagtgttggaagtcatttgatagaaa

SEQ ID NO: 240719 - DNA, 1675 bp, Homo Sapiens
aaaagccaactttgtacaaaaaagttggcagaattctccggactgaggctccagttctggcctttggggttcaagatcactgggaccaggccgtgatctctatgcccgagtctcaaccctcaactgtcaccccaaggcacttgggacgtcctggacagaccgagtcccgggaagccccagcactgccgctgccacactgccctgagcccaaatgggggagtgagaggccatagctgtctggcatgggcctctccaccgtgcctgacctgctgctgccgctggtgctcctggagctgttggtgggaatatacccctcaggggttattggactggtccctcacctaggggacagggagaagagagatagtgtgtgtccccaaggaaaatatatccaccctcaaaataattcgatttgctgtaccaagtgccacaaaggaacctacttgtacaatgactgtccaggcccggggcaggatacggactgcagggagtgtgagagcggctccttcaccgcttcagaaaaccacctcagacactgcctcagctgctccaaatgccgaaaggaaatgggtcaggtggagatctcttcttgcacagtggaccgggacaccgtgtgtggctgcaggaagaaccagtaccggcattattggagtgaaaaccttttccagtgcttcaattgcagcctctgcctcaatgggaccgtgcacctctcctgccaggagaaacagaacaccgtgtgcacctgccatgcaggtttctttctaagagaaaacgagtgtgtctcctgtagtaactgtaagaaaagcctggagtgcacgaagttgtgcctaccccagattgagaatgttaagggcactgaggactcaggcaccacagtgctgttgcccctggtcattttctttggtctttgccttttatccctcctcttcattggtttaatgtatcgctaccaacggtggaagtccaagctctactccattgtttgtgggaaatcgacacctgaaaaagagggggagcttgaaggaactactactaagcccctggccccaaacccaagcttcagtcccactccaggcttcacccccaccctgggcttcagtcccgtgcccagttccaccttcacctccagctccacctatacccccggtgactgtcccaactttgcggctccccgcagagaggtggcaccaccctatcagggggctgaccccatccttgcgacagccctcgcctccgaccccatccccaacccccttcagaagtgggaggacagcgcccacaagccacagagcctagacactgatgaccccgcgacgctgtacgccgtggtggagaacgtgcccccgttgcgctggaaggaattcgtgcggcgcctagggctgagcgaccacgagatcgatcggctggagctgcagaacgggcgctgcctgcgcgaggcgcaatacagcatgctggcgacctggaggcggcgcacgccgcggcgcgaggccacgctggagctgctgggacgcgtgctccgcgacatggacctgctgggctgcctggaggacatcgaggaggcgctttgcggccccgccgccctcccgcccgcgcccagtcttctcagatgaggctgcgcccctgcgggcagctctaagaccgtcctgcgagatcgccttccaacccactttttttc

SEQ ID NO: 240720 - DNA, 1708 bp, Homo Sapiens
tacaaaaaagttggcatagagttcccatcactccacactgtccagtgacaactcccaacatggaagatctgctagttctacagggtgctctctggctgccccagtaacatgtgtttttaaatttttcacatgcatgtttgaccccgactccccgaagtcaggtactgtaactagcagtgtcatttaagaaaaagccctttaacctctctttgccaaaggattcttatcagcaaaacagtgatgaaacaacaatcccataacagctagctggctaccttctcaagcacttattaaatgaggcataatgattttgcttaatcctcaatcctgagaggtgggcgatccctgtggtgatgaggaaaccgaggcttgggggttaatggcttgcctagattcacactgctagccaaggaatgaactggaatttacaccctgaccctgactgcttttcacattttctacacagccttttcaagatccctgccaattctaaaattaaatgattctatgattaactgtgtttcattcttctgcatcagttcccaaaacaaattatatcaagagacagcaaaaatatttgtaaagaaaggatgtccaacaatctgtgtggttgtttttctgtgttcctccaatggtagggcctctgttcaccagtgccgtctcttcttttagctgtaagaaaagcctggagtgcacgaagttgtgcctaccccagattgagaatgttaagggcactgaggactcaggtgaggagaggtgacctggtgcccatgctcacctgccctctccctcttcttgcccccacccgtccatccctcccacccatccatctatccctgcggcccccctctgcccgctcctctgaccaacacctgctttgtctgcaggcaccacagtgctgttgcccctggtcattttctttggtctttgccttttatccctcctcttcattggtttaatgtatcgctaccaacggtggaagtccaagctctactccattgtttgtgggaaatcgacacctgaaaaagagggggagcttgaaggaactactactaagcccctggccccaaacccaagcttcagtcccactccaggcttcacccccaccctgggcttcagtcccgtgcccagttccaccttcacctccagctccacctatacccccggtgactgtcccaactttgcggctccccgcagagaggtggcaccaccctatcagggggctgaccccatccttgcgacagccctcgcctccgaccccatccccaacccccttcagaagtgggaggacagcgcccacaagccacagagcctagacactgatgaccccgcgacgctgtacgccgtggtggagaacgtgcccccgttgcgctggaaggaattcgtgcggcgcctagggctgagcgaccacgagatcgatcggctggagctgcagaacgggcgctgcctgcgcgaggcgcaatacagcatgctggcgacctggaggcggcgcacgccgcggcgcgaggccacgctggagctgctgggacgcgtgctccgcgacatggacctgctgggctgcctggaggacatcgaggaggcgctttgcgggccccgccgccctcccgcccgcgcccagtcttctcaggatgagggctgcgcccctggcgggcagctctaaggacccgtcctgcgagatcgcccttccacccccacttttttctggaaa

SEQ ID NO: 240721 - DNA, 1515 bp, Homo Sapiens
aacatggagatagtttagcaccaccattgattctggaaatatttcagcactcaaatcgactgcactgagtttaatgtcctttctccagtttctctgctgaggaggaaagaaggaaaacctggaggaagggctcctcctgacccccacagagcccactaagagctgggaggggaattccatgaggaattctccaaggttctggagctccagagacatccaccagtccccacccagccatgcagtccacatgctcacgcttcagggattactgaagtctgccttgcccgggagtcacttcctgcagacctctgagtacctggtggggaaacccatttcccatcctgtgtcttggatttaaagaaaacctgttgcagataatgagttgtaaattcaaggagggtggctgttttgctgttctttctctgcagtaaactcttatggggagtgtgccttggttataaggcaacgcaaaatggtagggtatatccatggatgaatgttcatcacacccaatctaattcataccaggtggcaggctcagcaaactgaaccaccacaggtgtcagagatacttgagaatgactggtaccaacaagacgacaaaggaggttgccttcctcccagatgtgcccaatggagtctgaactctggttctaatttgtggaggtgggtccctactgtatgacccattgtggtcactgctctttgagccatacaacttgagagactggctttggattggacagtcaaagggaagtgggcaaaaccagctgagaacccgggagctggatgcatatattctggaatcagggcctgcaaactcaaagattggtttgtggctggtgacttctctctgctaagtaaatcaatgccattcattgagaactgatggggacccagcgtgtggcccaatgagtggcagttttttcctagccagtttctgtggccaaatttggaggattttccaacctgctatggctggacccttgggtgttaaatcactaaattccctttctacctgctctcttcttcctgaaacactcagagctgacttcttccttctttctaatcaacaaagacaaaactccaagccccttttcagccttcacacaatttttctttctagaagacatccgcttctggaagcctccttccctaatgaagggacagtaggccccagctaccccaaacatgcacatgctcttctcaccaacgtgcctctcacttgcctctaacgtgctcgagccatccttttgttctaaataattcttcctccctccctcccttttttctctttcacctcttgaggcgcagcctattggccaggatggaactgggagcaaggcggggaccttcagtgcaggggaccccattctctaaggccactgagttctaggactggagtaggagagggtgctgttgtcaaggttaagtgcaaacttgagattttaaaaagacaggattggggaagggggattgcatgctaatcccaaccttataggcaggctgggccaa

SEQ ID NO: 240722 - DNA, 333 bp, Homo Sapiens
ttgcacaaattgatgagcaatgcttttcccctaacgccaactttgtacaaaaaagttggagaagacttcaggggagattgtctactgtgggcaggtgtttgagaagtcccccctgcgggtgaagaacttcgggatctggctgcgctatgactcccggagcggcacccacaaaatgtaccgggaataccgggacctgaccaccgcaggcgctgtcacccagtgctaccgagacatgggtgcccggcaccgcgcccgagcccactccattcaaatcatgaaggtggaggagatcgcggccagcaagtgccgccggccggctgtcaagcagttcca

SEQ ID NO: 240723 - DNA, 738 bp, Homo Sapiens
gaatttcaacaagttttctccctctaggctccactcccaaaatgttctgttgacattggattgtcttcaaggcgcaggtcacacggcaccgcctcgcagggaagctgttcctccccacaccccggtggatggctgtcccgtacccccagtctgccccatggccaaggcaccacccatactggctcactggggtcctggcagaagccctctgctctccacagcccctagcacagccccacgtccacagcagcgctacatccagggatgagcagggagaatctgagaccgaaagctctggggcctgcccgtgcttggtgacctcgggcaggttcctgcccctctctgggcctgtctcctcatccacagtgaataacagccagggctgatggtgcctgagtccctgtctagctatgacttagaggggaccatagactccacgaagggtccctgcttaatcagccacggtggggagatcacagtcctggaagtcctccagggcttggctgggaagagccctgtccacacggtgtctacagaactttccaacgagactgccaggcacagcgtgagacgaatcacgcttgacctcagcagtgtgtccatcacggccccacagagaacgccagtgccagacagaaaccggcatttgatcccaaaacacattccaagcctgccttgctagctagttccctccgtcgtcctaagaaatcactaaagtacgctaggcgcagtggctca

SEQ ID NO: 240724 - DNA, 487 bp, Homo Sapiens
ttggccatttcaaactaataaaaaaaggataaagtaaacaataggaaaggatttggtggggtgagggtggggtgttgagggctgggccccctcttgtattctgaaagctgagaaacggctggtcagctggaaggctggtggatgggcaggagtgagccaagctgaggcgttctgcaagaagcaggtctgagtctgtccaaccaatttgtatcctgtggggagaacaacttcattcttaacataccctacaaaccagaaaacaagtttttaaggaagatgctgggcatgctgatagcttttctggtctcctaaggaagagtttttaaaactaaatccaaggaagaaaaatgtaacaacacgtggaagtgaacactggatgaataagcttgtttcccaaattagaatcctaacgtccatatttagcttcatgtattcccctttggcttccacagttcaactccttttattttgagacagggtctcgctg

SEQ ID NO: 240725 - DNA, 1755 bp, Homo Sapiens
gaaaattaggtttatttacttagaaacaagaaatagaaagtcatagctataacactccactttcagggccccatgaagtagcccttcaatggagattccccatagttgtttcacagcacagtgttaaaattttattacaagccctgtgtacaatcagtcctgtgaaaatatttataaaagacaaatattacagtacagttctgcaaggggcagcttcctctacacctgtccgtggatgccacaaaaccctataatatagagggaaagtttaaatatataacaagaatggaagttcagacatactaggctaaaggacacagaaatggatcagttagagcttaacatttcagagcaagaaatctccattttctacatagaggtttatacaatcatgctacaaattcactctgggtggggtggggaaggaaggtcactgacaagaggggtagtaaaatacacaggaaccaaagcaagtgagtcagactcaactaaatcgattcaaagcttcagctcaacaattttcataacacatggtataccacaatcaacccaaggtgagaacatttcttttaaatagtagatatcacatgttcataatcactgggttgtcccaaaggtgggtgcctataaactttccagctgttacatagactgtcaacatctttcttcttgagtttaaactttctttagcttatttgtttctcgttggatataccagtccaagcctctttgggaaggcacctgcatgtttccatattttaaaaatgacatccagaaagtagcctgagaggacctggcccatcccatgtggccacacatttgactttgaccattagcagcagtgacactgtgagagggggagaaggtgcaggtgggtgaagtgggcaagggtctgcaacacgagacgctctcaggagctggcccagccagggcctggcccagggttcacagtgactttgctctgctccgccctcttccctgggaaaaccaatctaagtatcaagcatgatcttccttcttcgtcctggagtacacacagtaaagggaaaagtctgctttgaggcttctacttcaatggtctcccctaccccaagccaggaatgaaaggggctgccatattctcaaagtggggaaggcagagggacagtactgggctgccctcccacgtgtggtaaaccctgcagctgctacatgtcttcacagcccaggaattcaaggcccaggtggcagcaggaagaaacagtggaaaagcaaggggaagagaaaagagaaaaaggagggggaaagtctgcataactgtcataacctctgcttctcctgctctgtaacaaacccacaaccaggaagagtcatggtctggaacaatcatgggaccccaaacgcctgtaggttttttaccaccaaacatcacccatggctgctctaagctgtcattttgttcccacagttacctagcatcacggatgcccaatttatggcccaggaaggctgacccaggctaagggcagtctcactccacagccatgcaatggacagtctgaatgtttccctaccccagaccttcactgacctctactatttcctcctctgatataaagaaaacactttaattttctcctgcatcctacatctcctcctaaaattttggccctaattgtcatcaaaaccttgtaggattctgaattttttgtttcttcctgaatcttagccagttctctcagagccaatcctggatttataaggaattttcaccta

SEQ ID NO: 240726 - DNA, 484 bp, Homo Sapiens
tgtacaaaaaagttggcttcgccgcccccttggtcagccatggccaccgctctcgcgctacgtagcttgtaccgagcgcgaccctcgctgcgctgtccgcccgttgagcttccctgggccccgcggcgagggcatcggctctcgccggcggatgacgagctgtatcagcggacgcgcatctctctgctgcaacgcgaggccgctcaggcaatgtacatcgacagctacaacagccgcggcttcatgataaacggaaaccgcgtgctcggcccctgcgctctgctcccgcactcggtggtgcagtggaacgtgggatcccaccaggacatcaccgaagacagcttttccctcttctggttgctggagccccggatagagatcgtggtggtggggactggagaccggaccgagaggctgcattcccaggtgcttcaagccatgaggcagcggggcattgctgtggaagtgcaggacacgcccaatg

SEQ ID NO: 240727 - DNA, 790 bp, Homo Sapiens
  misc_feature (665)..(707): n is a, c, g, or t
tttctgattttatcttgtgtttattgggaaatggtggtgcccatctctgggccagtccagacagcttccccctaggaagtgagccaagttcccacggcgtgtcagagttaaaaacaaggacaagagacagcgtgagagacataagagagggggcacagagaaagacagaaaagcagagagagggacacacaggtcccctgcttcctcttctgtttgttcattaatcaggctgatgtcaggtggcacaaggggcattggacatcatttcatggctcaagatcattgtccttaagtctgttttcccaggctgtccccttaagagctgggctgccgcggccacaccctgcagtccatgtcaccctccagccattgctctcctgtgggtgtgcccggcagagcctccagttctgtgcctgccccctggaatgcccctaaagccctcccagccccttacccagccttcaaggccacacctgtgcccctccttcatgcagcccccagatgggatcaggaggcagggtgtgcctctctgtcccttaggggctccctggtcatctctgtgcatgtctagatgccactgagatggactggccttgatggccgggactttatgttttagcatccagcatggctagctgaagtcagtggctgcagagtgtgggaannnnnnnnnnnnnnnnnnnnnnnnnnnnnnnnnnnnnnnnnnnatgaatgaatgaatgggggagaactgagtgacccgagggaggcccagacctggacaggagcttctggtgcctcttgtccctcc

SEQ ID NO: 240728 - DNA, 913 bp, Homo Sapiens
acaaaaaagttggcaacatttttaccttttaaacctagagaccttttttctaccaaagatcacagaccagaaaaagttccatctaaaatatcatgcccaggaaagcacatgggatcaaaagtaaaatagcatcatgtgtgatctcgtcttccagcgtgccactcagttccccgaatccgtgtgcacacgtgtgatctcgtcttcagtgtgccgctcagttccctgaatccgtgtgcacactgcgtatgtgtacgcgcagcatgctgtactgaactcaacaagatcttggctgtacataaatatttgtaaaagagaccctttgcacctttttactgtaatgttgagacttcattacttaaatgttctacggaaggttctggtgtggttgttggagccggagggagcgtgtcagcacgtgctgagggcatggggcctgccccctgggcacccatccacaagctgggccacggagctccagcttctcaggacaaagccccggggctggcgcatcctgagggtctctgggggtgtttgccaggctcctgggatgggccgctttcagaagccctgcagtgcctccagatggaaaggcgggcccggcctccggttgggtctgcattttggagagtccacaccacggaccaggttttcccccaaggcttggctttgtgtagctactaacttcttggggcattctgagagtgtgggcagagagaattatgtggcctcatcctcccccaaggctgtgcttgcagcccgggcaccttcccactttctagctctggagaggttggattttgcttttgtaaacacatgaatccttatgataaaagtctgtcagtcaaaaatacatttataaattatttaatgccagtcctcatgtaacctcaggtatatggcagcttgtggccaa

SEQ ID NO: 240729 - DNA, 1211 bp, Homo Sapiens
ttggcttggcgcgtaccgtgcggtccctgtagttggaggacgggcggtcgcgcggcctttcccactagccggagtagcctctagttcgttagtcaaaacgtgaaaaaaaagacctgctttgccctgggaaatagtaaccctgccaaatacatcagcttgtaggagacagaggatgtgatggagctgcttgaagaagatctcacatgccctatttgttgtagtctgtttgatgatccacgggttttgccttgctcccacaacttctgcaaaaaatgcttagaaggtatcttagaagggagtgtgcggaattccttgtggagaccagctccattcaagtgtcctacatgccgtaaggaaacttcagctactggaattaatagcctgcaggttaattactccctgaagggtattgtggaaaagtataacaagatcaagatctctcccaaaatgccagtatgcaaaggacacttggggcagcctctcaacattttctgcctgactgatatgcagctgatttgtgggatctgtgctactcgtggggagcacaccaaacatgtcttctgttctattgaagatgcctatgctcaggaaagggatgcctttgagtccctcttccagagctttgagacctggcgtcggggagatgctctttctcgcttggataccttggaaactagtaagaggaaatccctacagttactgactaaagattcagataaagtgaaggaattttttgagaagttacaacacacactggatcaaaagaagaatgaaattctgtctgactttgagaccatgaaacttgctgttatgcaagcatatgacccagagatcaacaaactcaacaccatcttgcaggagcaacggatggcctttaacattgctgagctttcaaagatgtgtcagaacccattgtatttctgcaacagatgcaggagtttagagagaaaatcaaagtaatcaaggaaactcctttacctccctctaatttgcctgcaagccctttaatgaagaactttgataccagtcagtgggaagacataaaactagtcgatgtggataaactttctttgcctcaagacactggcacattcattagcaagattccctggagcttttataagttatttttgctaatccttctgcttggctttgtcattgtctttggtcctaccatgttcctagaatggtcattatttgatgacctgggc

SEQ ID NO: 240730 - DNA, 1568 bp, Homo Sapiens
ttggattgtttttactttattattattcatagttaatttgtctctgtgcataattgtccccatccttttgtgtgtgtttttgtttctgatacgttttctttggaaaggttctcagaagtagaaacatttggaaaagggatgggaatacatttaagtcccttgctgcatatccagactgctttccaaaggattgtacacattcacttttcatggtgggagcatacttttcacccgcttatttatatatattcttgatccttaggaggttttcagaggcttagttgaagtctgtctatggcttatagtggggctctgttcttctgcttgattgctggtggtggaaggtctcctgctttacactggagtcatctttgctctttcttctttgtagatcccaaccttgattgaccggatgcttgtgtcatccaacacaaagactggggctgcaggagctgaggccttgtctctcctactgaagaggccctgggaccctgctgtgggtgtgctttctcataacaaaccaagcaaactccctggctctccgctgattctcatcgcctcctctggtccctccagctctgtgtttcccacttcacgccgccaccgcttctggcaatctcagctgtcctgcttgggcaaggtcatccctgtagccacccatctgctgaacaatggcagtggggtaggagttctacagtgtctcgagcatatgattggggcagtgagaagcaaagtgctggagattcacagccatttcccacacaaacccattatcttgattggctggaacacaggagctttggtggcctgtcatgtgtcagtaatggagtatgtcactgcagttgtctgccttgggtttcctctgcttactgtggatggccccagaggggatgtagatgatcccctcttggatatgaagactccagtcctctttgtcattggtcagaattcccttcaatgtcaccctgaagccatggaggacttccgggagaagattcgagctgagaacagcttggtggtggttgggggagctgatgacaatctcagaataagcaaagcaaagaagaaatcagaagggttgactcagagcatggtggacagatgtattcaggatgagattgtggactttctgactggagtgctcactcgtgctgagggtcacatgggctctgaacctcgggatcaggatgctgagaagaagaagaagccccgcgatgtggcccgcagagacttggcctttgaagtccctgagcggggcagtcgacctgcctccccagctgccaagctgcccgcctcaccctcaggctcagaggatctctccagtgtgtccagcagccccacctccagtcccaagaccaaagtgaccacagtgacctctgcccagaagtccagtcagattggaagttctcagctgctgaagagacatgtgcagcggacagaagctgtgctgacccacaaacaagctcaagttctcatttcatcagaaccaccagaggaaggagagaaagaggatcttatggttcagctgaagcgacaccatccctcgagtctctttcctggcagtaaga

SEQ ID NO: 240731 - DNA, 1286 bp, Homo Sapiens
gaaagggtgttaaaattctaaatcacatatggacccgggaaggttttctcaccctctgttagtgacatcgagtctcccactaaacaaaaataggtggaaaaatctctcgagggctcacattgttttgtcatcttcaggaaaaacaccaccaggccataccacagcctgcccagtgaggcggtctttgccaacagcaccgggatgctggtggtggcctttgggctgctggtgctctacatccttctggcttcatcttggaagcgcccagagccggggatcctgaccgacagacagcccctgctgcatgatggggagtgaagcagcaggaaggggctcccaagagctcctggtggtgcagcctgtgctcccctcagaagctctgctcttcccagggctcccggctggtttcagcaggcgactttcttccaatgctgggcccagacttcttgcctgggtgctggcctgccctctccggccgcttgctgcctgtctgctttccttggtggctttgcctgggtgctgggcctgccctctccggccgcttgctgcctgtctgctttccttggtggctttgcctgggtgctgggcctgccttctctggctgcttgctgcctgtctgctttccttggtggctttggcttctgcactccttggcgtcagcctctcaggtcctccattcacacgaggtcctcctcgctctggccgctcttgctgctcctgtctgaagaaatcagactgatttcctcttaagactcctagggatgtggtgaagagctgggactcaagtgcagtccacggtgtgaaacatgagggaggtgaggtgtccgtccacttcccccataaaggtgtgcatttcagttaggctgccccgccacagagcaggcttcatctgctctgccatccagccccatctggatgtgaggtggggtggagacatcatggggtgattgcagaaagggggagtggcggcccacgcagcttctgctgaggagctgaccgctctgagctgttctgtttcgtattgctgctctgtgtctgcatgtattgtgaccgtgcggctccacctcttccagctgctgctacagctgaggcctggatcccggcctttccctgtgacttacgtgtctgtcaccggcaggcagccctacaaatcctggtgacctgctctcccaagaacagagcctgtccccagatgtcccagtagcgatgaataacaaaggtggctgtggacttcctctacttctccttgctggatcagggccttcctgcctcccgctgggcaagtc

SEQ ID NO: 240732 - DNA, 1028 bp, Homo Sapiens
tggttcaaaaaagttggcaggaggtttgacatctacaggaaggtgcccaaggaccttacgcagccaacgtacaccggggccattatctccatctgctgctgcctcttcatcctcttcctcttcctctcggagctcaccggatttataacgacagaagttgtgaacgagctctatgtcgatgacccagacaaggacagcggtggcaagatcgacgtcagtctgaacatcagtttacccaatctgcactgcgagttggttgggcttgacattcaggatgagatgggcaggcacgaagtgggccacatcgacaactccatgaagatcccgctgaacaatggggcaggctgccgcttcgaggggcagttcagcatcaacaaggtccccggcaacttccacgtgtccacacacagtgccacagcccagccacagaacccagacatgacgcatgtcatccacaagctctcctttggggacacgctacaggtccagaacatccacggagctttcaatgctctcgggggagcagacagactcacctccaaccccctggcctcccacgactacatcctgaagattgtgcccacggtttatgaggacaagagtggcaagcagcggtactcctaccagtacacggtggccaacaaggaatacgtcgcctacagccacacgggccgcatcatccctgcaatctggttccgctacgacctcagccccatcacggtcaagtacacagagagacggcagccgctgtacagattcatcaccacgatctgtgccatcattggcgggaccttcaccgtcgccggcatcctggactcatgcatcttcacagcctctgaggcctggaagaagatccagctgggcaagatgcattgacgccacacccagcctaatggccgaggaccctgggcatcgccagccttgcctccagtgccctgtctcctttggccctcaatctggtcccaaatctggctgtgtcccaaaggtgtgtgggaagtggggggaaagtagaggatggctcgatgttt

SEQ ID NO: 240733 - DNA, 1387 bp, Homo Sapiens
  misc_feature (50)..(59): n is a, c, g, or t
ttggttaaaatgaaaccatttggaaaagtttcttctagccagtaatagannnnnnnnnnaattgctctgccttgtgccgagagatgttcttttaagatgaatcttttgatgtctgataccaccaaatataggtggtagggagagttggaggctggccctttgagcaggccattagcttacttgctgggcatttccgatagcttattgcctacctttttgctggaaacaaactgatttgaaaaacaaaatctatgaagactgcagctaaggattttatcggtagacttaagagcttttgtccttgtggatattttagtggaaccacatcagtctcaatactgtcattttacactgactcagagcagctgacttcattccttgccatgatatatatttaaggcaggcattgtaacagacataaagacaacttatctgtttcagcaggaaggattcagtttatgaactctcagaccagatcatgttgaacaaggagactttgatgtgtgtcatgagaaaactcattctttacttcccagtcaatttaaaggccagctatcctgagctactcgaatgaatgcactggttaaacattggaaatagtttgtttatatccttgtctctctctaggccaattgtgattacatgactcgactctacatctcgtcaaacaaggcctaggtctggttgctgtagactgctcgccctcaacaaataaaatctggttgactagcctccttgtatatacaactattatttgttaagaagaaattatcgtcaattttctactaccttccaattgtcagctctttttttcctctctggtttttcctatactttacagaaaaagacattgatctatactgccattccctctaatcctgccatactcagtcaaaaggaatgacttaagatgaagatgatcatctgctcgagtctaaaatatacattgtatataagaattggtgattagaaaagcaaaaaacctaaaacttaaatctaggagtctgtatactgtctccatgtctccatgcctcagatctcatctaaatctttgaacagcaccattcaaccaatctgaggccttgacttgcttgtaagatgattctcagagatcggctgagttaaaaaagatgacgacttgattaccaaagaaagtagggccaactttgacaaatctggctctgctgaccctgtcactcccagatgtagcatagactcctaaacagaacctcaagtctgattgaggatagggctttctcctgagctgaaagttctttggcagatgagcaagaaactgaaagctgatgtacctgactggctctgtaagatcagaaaactgtatccagaatagccctatggattaacccctgagtacccagagtaaaaa

SEQ ID NO: 240734 - DNA, 1215 bp, Homo Sapiens
  misc_feature (213)..(272): n is a, c, g, or t
ttggatttgtatgaaccacccgaggaactgctggcagacggggagggcgggggcactgatgaggggatctacgatgtgcctctgctggggccagaggctcccccttctccagagccccctggagccttggcctcccatgaccaggacaccctggcccagcttctggccagaagccccccacccccacacaggccccggctcccctcagctgannnnnnnnnnnnnnnnnnnnnnnnnnnnnnnnnnnnnnnnnnnnnnnnnnnnnnnnnnnnagtgccctctcctgccccaggccggaagggcagcatccaggaccggcctctgcccccacccccaccccgcctgcctggttatggaggccccaaggtcgagggggatccagagggcagggagatggaggatgacccagcaggacaccacaatgagtacgagggcattccgatggccgaggagtatgactatgtccacctgaagggcatggacaaagctcagggatctaggcccccggatcaggcctgcacaggggatcctgaactgcccgagagggggatgccggcgccgcaggaggccctgtccccaggggagccactggttgtgtccaccggagatctacaactcctgtacttctatgctgggcaatgccagagccactactcagccctgcaggcagccgtggcagccctgatgtccagtacccaggctaatcagcccccgcgccttttcgtgccccacagcaagagggtggtggtggctgctcatcgcctggtgtttgttggggacaccctgggccggctggcagcctctgcccctctgagagcacaggtcagggctgcaggtacagcactgggccaggcattgcgggccactgtgctggctgtcaagggagctgccctgggctacccatccagccctgccatccaagagatggtgcagtgtgtaacagaactggcagggcaggccctgcaattcactaccctgctcactagcctggctccatgaaggtcctttggcacagctctgctcctcccctgcctgccaaagcccccctttatgccttggggtggctggaaaggctttgttaagggactaggagaaatgggggtatctttccccttttctgccctttctgctcatctcaaccctctcacagaggtgtcttctccccctaacctacagctttttgtacaagccattttgtgtaaattaatgtatatt

SEQ ID NO: 240735 - DNA, 887 bp, Homo Sapiens
cccaacaaacaccaggcgatgagcagccaccaccaccctcttgctgtgagcacgaaaaggcgcgagggctgattagcctgagtactggacatcagagctgccacgagctgcctgcagggctgagtagtagctctggcattgcccagcatagaagtacaggagctgcagatctccggtggacacaaccagtggctcccctgaggacagagacctcctgcgacgccgacatccccctctcgagcagttcaggatcccctgcttagaacccttcggagctccgcatttccctcaagctaaaaaacctgaactctggatgcagctttctgcctgggccctagcttctctccagcttcaccgcttgcattctccctcttcctttcagttccttcaactagaccagctctcctcagagaggccgattctttactcttctccccgccccattctctgtttgtctccacctattgtttccatcctcgtactttatactatttgtctatttgcttcttttgtatcgatttcttcccttatactgtaaaccctatgaacataggaacggctatatttctagtccttgcaataaggcctgacctggaattggtcattacacatgttgaatgaatgtcttccaaaacatgtgaagccctgctacagtctctcatagaccttctctctgttcccaagtcattatccctcactagcaaaaggttagattaagcagccacagagacctctcattctgagagactgggagaggcctagtccagacagtgtgcctaggcataataagaaagaaaacagaaacaaagcaattgttttgctctcagtctgagcaaataagtttctaccagaagaggctgaggttaccatggagaaaagtgtgccaa

SEQ ID NO: 240736 - DNA, 930 bp, Homo Sapiens
actttgtacaaaaaagttggctccacagtttatagaccagcaacagttctacctggctctggacaacaagatgatagtggaaatgcttagaacagacctctcctacctctgtagccgctggcggatgacaggccagcccaccatcaccttccccatctcacacagcatgcttgatgaagatggaacaagcttgaattcaagtatcctggcagcactccgaaaaatgcaagatgggtattttggtggggcaagggttcaaacaggtaaattgtcagagtttttgacaacatcttgttgcacacacttgagcttcatggaccctggacctgagggtaagctgtacagtgaagattatgatgacaactatgattacctggaatctggcaactggatgaatgattatgattcaaccagtcatgctcgctgtggtgatgaagttgctcgttatttagatcaccttttggcgcacactgctccccatcctaaactagcccctacctcacagaagggagggctagatcggttccaagctgctgtgcaaacaacctgcgacttaatgtccttggtgaccaaggccaaggaactgcatgtacagaatgttcacatgtatcttcctacgaagttatttcaggcttcccggccttcattcaacttacttgattcacctcatccccgacaggagaaccaggttccctctgttcgtgtagaaatacatcttcctagagaccagtctggggaggtggactttaaagcactggttttacagttgaaggagacctcaagcttacaggaacaagctgatatcctctatatgctgtatactatgaaaggacctgactggaacactgaattgtataatgaacggagtgctacagtgagagagcttcttaccgagctgtatggcaaagtgggagaaattcgtcactgggg

SEQ ID NO: 240737 - DNA, 1247 bp, Homo Sapiens
ctttgtacaaaaaagttggctctacttaagtattctctgtgttttatgaagagaaaatgatctgattttcccttatacttcattttacaatacatattcccttttaacttaaaaaaaattgtaaatgtgggagaaaaaaccctgcaggatggaaacaattattaagaatgtagatcaataagtactttttagtgatgtggcagaaatccctgttgattctaagttttagagtgtcttttcccctatttctgacctacaactataaactactctctattaggagaactagaccactttcttcattcttttctaaactgctgcagattgccgtgaactctatcaatagtctcttttccgcaggcaaagtggcattttctaaacatgtttgcttactgccaggtggtttgaaatctatgatttactgcagtagtatgtgcttaaaacaactgttgaggtcttttaagcaggaaagttcaaaaggaagtgtcctgataatggtactggtttttctacaaatataagtagtcatttagaagtttgcaaccaccaccaagtctgagagaactctgggatattctgtgggttttggcatattagatagagaaaatgacagatctagatgaagggagcttttggatgtgtgcctttaaaaactgattatgtataaatactgatatttcacatacggagatatttgaagacccaagtctgcctttcacagagccctccattccaagtttagtttttgtcaaaatatgaatcattttatttgactgtactatcagtacacaaatgcatgagtatgtttatacagtgttagactgatgtgaatttgcatttgttacattacattgccagcgcatatcatttagcaagttggcattaacatttatgctttaattaaatgccagtatacctatgtgtgcagcagtaaaaaattagtgagaaaaagcaactttttgtcactcttaggaaatattttgtcttattagtgttcttggcacatgtatattactaaagtagataattccaatgagaaatactaccagattattgttataaaattaatttacaatgtccctgatattgagctaactcttaaaaaaaccaaacaaaactcgtatctgagtgtaactttgccaatattttaaaagccaaaatattctctggacaacaaatttgtattgctcagggacagtttaccttgcctggtaaaccttcccaaacagaaatatagctatactatc

SEQ ID NO: 240738 - DNA, 4668 bp, Homo Sapiens
  misc_feature (2144)..(2154): n is a, c, g, or t
  misc_feature (2910)..(2947): n is a, c, g, or t
aaagtagtttttgtttttcacatacaccattaagttgaacttcaagtgcagtggaaaggtacagcacttatttctggatcagttcacattcaaattataaccctttatctttttctcaagaatactacaaactgaccctaaacattaaagtacacctgtgcattaaatccctgggcattttgcataacgtagaaaaaaaaggccaaacatgttctagtgctcaatgtaaacattttaactattaatgatttattaattttccttaaaggtacttaggagtgtgtgtgtcacatattcaaagttaaccttaggaatagcaccataaccaaaaaaacccataaaaattattttctccattatctctcagttttatttcataacttgagaagctaccattgtcggctatgcttttaaagacatcaggtccattcttgctgcttctgatgaaaccaaatctgattaaaaaccaaaataccacttctgtatgcaagggtctaactattttggactgaaagaaaaaatggtaattggatggccagtcagtgaccaattaatgcagtccaaataatcagaatagttctattaatgaagcctaaactgtcaaaatattgttttataccaaaagaatgtatgtacttatgaatgtattccatatttatttatggatttttttggtacctttttgcaaatgatggtaaacatggagttaaaacctgagaacagattataaaagagaaggttaagaagagtttaaataaattaatggatttgacatctatcaccagtttttaaaattagcaaagtaaaaggcatcccattagtcttttcagtcttagtcaaggacaattatcatgaatcaatctgtttactatctacttaacacaagttctgagaagaaaagcatcatagttctgaaatggtgatagctctctaagccacaaatgagaggaggtttcccacctatctcagttgataatgtccaaaaacatccttccccatgcatcagagtagaaagaaaatgtaccttctactatgtcaaatggaatagataactacaaaataggaacacttcagaacattctctaacattaataccagtctgatgcttcgccttgtctgccacttcaaagatacacaggagaaaaggttttgtctgaaaccaaacacaattagggctaataaataacattgtctaatattgataccagtctgatgcttcaccttatctgccacttcaaagatacacaggagaaaagggttaattttgtctgaaatcaaacacaattagggctaataaataacttacaggtggggtactgtaacatatcccttacccactaaatatgtaaaccatttgaatcaagtccatcttcaggcacaaacaagttaggaatggccatctacactggagtagcataacctatcaagtatttggttagaaaataagtgtactatttgtgtgataaactttcactttaaatggattataaaattattttcccacaaaacatgacagtttcttatatttggactagaagtcactaataaagatacatttagttgccccagcaaagaatgcttaggattgcacatggaagcagtaaactaaaacaaagagatggagaatgacatttagctattttcctatatagataagatttgcaattgtactcttaacaaaactcacctctacaattggaatacagatgggggaaacctacatattaacttaaatactcttttagccctgtacactctattaaagaacacacttctaaatctaaggcacacgaattcctctatttcacagagtaagattatggaagagcaagattttggttaaatcccttacaatggaaaccaggagatcttggacagaagacagattatatagcattttgttagtgcacaatttaaaagaaaatgctctgactatgctctggtcctagaggtttaaaacatgcactcaaatcattaaaaataatttaccagcactttataaattcaagtttataacataaaagtgacaacgttttccttaagaagaaaaaaaccaacagcacttgggaagaaaattagaaaccatttcaatgaaagtgaccagatctggtataatgcattctactcaagtagccaggggaagnnnnnnnnnnngtggtaggtacctcgctactaatcatggttacacctcccatgattatagtgtcagtatgcatgtatttatgaagaatctgtaaacataggttgtgaaattgttgtaactactatagaacaggggttagaaactactgcctctttgacaaattcagaaaataactgcatgacacttgctgccatgaaagtaatgctcattggttttgataaccaggatgtctagtgtttaacatatttcaaactcttgctatatgtagtcaaatactgtcaaaatagatctgcccccaaaatgaagcatattttggcacctgtgctgaatgctgctacaaagaccagcaagtgcaaataaaaataacagtcatgatttagtcacattcataacttttcatagaaaaatataaatatattccctgaattgtaagacaaaaaaataattttaacagccagctttcaccataaatgccagtccatttcctcttaaatgaactggctttccctcaaggtcataaggtgcaaccattgaaatctaacacattttctaaacttctgtcatcatccccatcatggtatctcacagtccttctaccctgatttctcgtttttatttttgaacgtcgaagaactcttttagattttgcatagtccaaatcctcccagtcattatcatccacacttaacctagggcgtttgctttgtctttgacgtctcacagttttagatatgttagctgtaaaagttttaccttttctaactacnnnnnnnnnnnnnnnnnnnnnnnnnnnnnnnnnnnnnntattatcagtacagtcaatatctgattcagttacagatcccaaatctgatgatttggaactagtatcaggtctaaactttgaattcccagttgtttcagagattttcacattttccaattcaggatgcgatctcttcctttttacttccttctctgctgtttcctgtgaatcatgaatcacttttgtcttactaaaaggagcctttccataggtcctgagtcttctgccattccacctgcgcagcccataattcagttccacttcaaaattattctctgcagtagctttttgtgccaaggttgactctgaagaaaatgtcctatcagtctcactccctggaatatgactttttgaatcttctcctgaagatgtaacagaggaactttttcttttagaaggtgcatctattttgtgaatattggtatgcctgtgcttgtgttctgaattcaacatatcttcagagtctgagtctccatttagagcctgactaagcacttttgtactaccttcggagtcaggatcaggtggcttgccttcacaggcatactgttcacttggtacttcacaatgtacacttccttcacaatcactcaatttcttcttagctgtagtacaagcaagatggagaggttttttccttccatttttgcttctagtgtgcacattttctaaactgacatcttctacatcactcatgagcttgatcttattggcagccgtagctgcacatcttcgagtaatcctcaggagacctgttctggcttttgatgatttcttaaccacctgtaaactactgtctgagtcactggaacagacccttttcctggaaatttttctgcttagtccattgtcttgtgatgcagaatctttcataaaattgtttggtttttctattttgtcatcatctgaatctaaatcagtttcacatccatgatctgaggaacactgggacatagcaatagggtcacagttcagatttcctgaaattgggttcatttccattttatgacatttcccatcttctctatcttgctcttcagattcagagtcttctgagtcactcagaatcttggtttttttaaagaaactcgcattcttgtgaaatgtattgtatttcctaccaccagatcttcctggttcagaatctgcttcctctgagatgctctctgccttaagtttctgcacagacgttgatgggccagcagttctgttacatgcatgatctgaatcatgacttttagagtcttcctcagaagactctattttaagaaattttgtctttgaaggtgctggagtatgggacttgtaaccattagcatgccaatttttccgggctacccgcaaatcactttctgactctgagtctctgttttcagattcatcaacattgctctgggcagtgtgagaactggacactggtaatagttgattttcatcttttagctcctcttcttcaatttctgactttaagctctgttcatcttcagaattatgtaataacttttttctagctacagcagaagcattgcggtgaggcagcttccgaccagaacagacactttcagagctagaattctcttctacatcactcattagctttattttattggcagccacagcagcacacttccttaagacttttcggttatttccagctctggcttttagaatttcaccagtctccaatgaattgttatcagaatcacttaaatagacccaa

SEQ ID NO: 240739 - DNA, 903 bp, Homo Sapiens
acaaaaaagttggctcattctaaccacaatctagaaacttcactgaccaactatctgcccttcctgcgaacagtcctctgtattgttgtttgggtaccttagctttcttctcctggattagtagcccctcttcctccagtgttgtaccctcccataaccaatgtcagcaactcagctttggttccaggtcactagtctggtggagtaggggaagctgacctctacagcctagctctgaccctatctcctgccttcctccagacaacctctcctacattgagcacatctttgagatctcccgccgtcctgacctactcactatggtggttgactacagaacccgtgtgctgaagatctctgaggaggatgagctggacaccaagctaacccgtatccccagtgccaagaagtacaaaggtaagcggccactcctttaactagctgcacctctgcctcgtcccgttgactatccttggagtacttgagttttgggagagtggaggcagatgcccaatgggcctgcctggcatctcccacactgctgtccctggacacatacctttttgcccccagacattatccggcagccctctgaggaagagatcatcaaattggctcccccaccgaagaaggcctgagcaagggggaggaagaggaggaaggttggaccttcatcagaccactcccttcccccatcctccaggagagggggcaagggcaacccaccatctacccacttactaacctggtcctaacccccttactgtgcgcgtgtgtgtgcgtgtgcgcacgctctggctgtttgtctatatgtctagctcatctagttcctcttcttaaagggatgggggtcaggggctaaggggagggggctgagtttccccactttagaaggaggtgggg

SEQ ID NO: 240740 - DNA, 823 bp, Homo Sapiens
cataaatctttgttttattccaagtttcaagtatgtgtaagtgtctgtgatgacacatggtgctcagtgagcgccctgtcacccaggaccctggttatagcaccgttgaatcaaaaacccacagaattggaacaacaggaagatgagtcacttacacagtgggttggtttttccttagatttgtacttccaagggcccagatgtccaatattaaatgccaataaatttgtgcttcaaaagtctgtgaaaatataataatagtatcttgaaaaacaaggggtgggggctgtggatagggaagcaccaagtctgagctcaccaaatcagaaaacacgtggcaccattatctatgtgactataatagactggagggtttcattggaagagaggtctagatattcaagtttgctgaaaatgacctaagaggaggagaaatggggttcggcctgaccctctctgggggggctgatgagcccgcatttgtccacgtgtcactggagaagagcgcggctccactgtgtctgtggtgagctcggtggcttgaatgggacaagctgatgacaacctgtctgtgggcctcatcccggtcaagactggctcttggtgctgctccagcagctctgtggacaaaccccacccccccaaggccttctcaggccccaagggtcaggtagcagccccccatgaatgatgggagggtccctttcctcctgagcttagacacagctgtaggggtctggacagggtgggggccgggctgggtgagggcacgtggcattcgttcagactcgggttgttgggggccaacttttttgtacaaagt

SEQ ID NO: 240741 - DNA, 961 bp, Homo Sapiens
ttggcacaatgttcaggtttatagagctgaatgggtgatcaaactctaattaaaaatagctttgaatattaatgttgaattcttctttcttggtttcctttagtcttcattctttattcagagctcttaatcatattgctacactagaatatgaattgtatattaggagtctggggaggaaaggttaaattgtcttttacatcctcttctcactcactctggcaacctatcctgtgtccccatagaactgagaagtaaagccctgtgcaggcctgctttagaagactttacatcccagcagaggattcaggcagggactctcaggattttaatcagactgcctttgaataatgtgatattaaattttatttttctcatagactctcaaagtaccacttgcttgaaagtagctacttgtgatctttaatttccttatattgtgatagttctacttttcagtctttcctgtgtatctccatttcatagtgcgttagtacttaaacttcggacacttttccaaactgttaaacaagtcaggaatgcttttcagaatcgcagtagtattattagggtctctgtgtctaggacttacagtcatcagtggtcatcactgggactagaggtgttcttttttttcctcttctcctttgtattaaaaaatagattttgctactgtataatgcggcatttcatgacttcctcttgttacttttcaaggttattctaaagagatggagatcttcattagaggctatttctcataatagtctgccttgcttattttcatactccccctgaaataagcctacttttgcaaacaggccatatgaatcaaattttatgtttgttcctcacaaattttctacacattatttgttcccactttgctaataataatataatgattttattgtaaatctgtgttttaaatattttataacagagcactatggaaacctaa

SEQ ID NO: 240742 - DNA, 1945 bp, Homo Sapiens
  misc_feature (1322)..(1574): n is a, c, g, or t
  misc_feature (1582)..(1596): n is a, c, g, or t
tgtcagaaaatacttaatagatgagtatgtcataattcacttttaaattaaactcagaaaatgaataacaaggataaatttgaagaatgtatatggtgacctactaataaacagaacatatataattgattaataccattaataaagagattaataaacatataatctctttatatatcaattattatatatgttcaagaagcaagcaagtatgtagttaagtgataatgacattgataaggttaacaaagatcatctaaattacatttaactaattagacaattttagtgttcagtgctgtagagcaggcaaaaaggaagatgcctaaaacaaacttctagacttcaatgagtggccatctaggacagcagcaaaataatagcaaaggaaatcaggctgtagaaggctaggcagatggcaggcaagaagatggaagctccttatataagctacagcatcagagttttggtactaattgaagagagagttatagcttgattattagagtagaaatacagctgaaaaatgtacccacgtttgtctgttgtttatttgattggaggatttacttctttgcttactgtgaagggaaaagagagtgagtggagtactttttaaagacatggccaaaggacccaatagaaatgaaatgataatataaaaggagaagtaggtagacatggctcagtgtcagctggaacccaattaagatttacatttaaaatatagggttaaatttccaccactcatttttgctattatcaacttcacctaatagcattcaccctttttaaagaggcttatagatgcatgggagaaaaatgaatatcgctttgaaaagtgtatttgtatttcaaatcattaaaacagagtctggcaccaggagaatatagctattccagtaaaaatggtgataaaatgaatcattcttaactcttctttccttggtcattatcaaatatttaaaatatataaggacacctcatggcaagtgtgatggttaatactgagtgtcaacttgattggattgaaggatacaaagtattgttcatgggtgtgtctgtgagggtgtttccagaggagattaacatatgagtcagtgggctgggaaaggcagacccacccttaatctgggtgggcacaatctaatcagctgctagcatggctagaacataagcaggcagaaaaaatataaaaagagagactggcctagcctcccagcctacatctttctcctgtgctggatgcttcctgccctcaaacactggactccaagttcttcagttttagaactccgacaggcggggcatagtggctcatnnnnnnnnnnnnnnnnnnnnnnnnnnnnnnnnnnnnnnnnnnnnnnnnnnnnnnnnnnnnnnnnnnnnnnnnnnnnnnnnnnnnnnnnnnnnnnnnnnnnnnnnnnnnnnnnnnnnnnnnnnnnnnnnnnnnnnnnnnnnnnnnnnnnnnnnnnnnnnnnnnnnnnnnnnnnnnnnnnnnnnnnnnnnnnnnnnnnnnnnnnnnnnnnnnnnnnnnnnnnnnnnnnnnnnnnnnnnnnnnnnnnnnnnnnnnntccatctnnnnnnnnnnnnnnncaactcggactggctctccttgctcctcagcagatggcctattgtgggaacttgtgattgtgtgagttaatacttaatttttatgctagttactgctagactatattatatattccattagttttgtccctctagagaaccctgactaatacagattttggtaccaggggtgcttctagaggaacagaatattaaggatggagttcttttgtaagttttggggtttctggagttggctgcttaatatgattagaccccaaaatgcaaagaactctacttctaatagtatggagtacactgatactccttggcataaactgtttagagaattacacaaaataattgccaa

SEQ ID NO: 240743 - DNA, 875 bp, Homo Sapiens
aggtaggaaggccactctctgcctctaccactccttaagccaaaccagaggtcttctcctggacctctccctgtccacttctgggtttcaactatgagatcaagttagaagctaccagaaggggaacaatgataaactcactacaagcttaggggtatttccagttctgatctcctactctttgcctttcaaaattctcacatagtgactctgaattctgtccagctctcatagctcaaattcagtaggagacatagggtgaattgtgcttattccattatatccaaaaccaaaactcaggtaaaaaagtttcagattccaaactgaatgtattatgcacacaaaatatgagaaataaaactgctataaagtttgaagaataatataataaataccagtgtaccctcatctaacttaaaaacttaacacacaaactattccctgagaagctcttgtgtcttccatgcctagccttcttccttccatacagaggcaatcagtaacttgaccttaaaggtaaccattctcttgtatccctttatagttttatcattttagcatataactctgtgatgattaatattgagtgccaactcgatttgattgaaggatgtaaagtattgttcctgggtgtgtctgtgagggtgttgtcaaaggagattaacatttgagtcagtggagagggagaggtggacccaccctcaatctgagtgggcacatctaatcagctgccagcacagctagaataaagcaggcaggagaagatggaagagcagacttgctgagtcttctggccttcatctttctcccatgctggatacttcctgcccttgaacatcagactccaagttcttcagcttttggactcttgccaa

SEQ ID NO: 240744 - DNA, 1721 bp, Homo Sapiens
  misc_feature (68)..(76): n is a, c, g, or t
  misc_feature (1469)..(1481): n is a, c, g, or t
ttggcaactttcaacaacgggtctgaatgtctagctggccattggcttgtgctgtgttaagaaagggnnnnnnnnntaacccaagtgactcctttctagtgagacgtgagcgtagtgtgccgcgcaaggctctgtggaagtaaatctttgttgagacgttcgacttgttcttgtgtacgcacaatggcacgtgtgcgcttattgtctcataagaccttccttttagttctccatcagaaaggacctatgaatttgtactttttgccatctcaccctgtttacatgccataggtgttctggtctggatgatgggtgcctgttaaatcaggttgtgctgccagtgagttgtagatttatgctggaagaatggagaatggaaacaggccttcagcccattggctgcgctggagaggaaagcatggttcctttcttaaagaaatcttccatgttttctctaagtaacacttctttattgagcatttaatgtggacatactataaaaaagaatttttaatgctaatgagaggtttagcacttaagatcagattcaagagaatatagattcctgataaatttcactgtttgcaaattgagcagtgctgcaacatgtactgtatgaaggccataaaatagagctagtcatggataacagactttaaccagttaggtgctagatcctaagaggcactcacaaggccagcaggtgcttccttggctcccatgatcgatcgaggcatagtgaaagaagggcaaagacagctttccagagctttgtgctcaggctactaaagtagttgttataggtgtgttaacgaagaagcttagtgaggagcagaatgtggtactatattcatttaactcaacccagaaccattggtcagaattggtgggactggcatcttccctcagacttgcagttgatagaggctgtggtgttctcactagactttgcagagcagtaggcatctcaaggtaacagattcttattgagtaggtctattaggagtcagaaggtgttggggaggagtctctggcttatgactcctggttcccattagtcttaagtcttctggttcccataaaagactcagttttattgaggtagatacaggtttagaagagaaaagagcaacagattttcagcgttgcagtcactcggttatctatgaagggttgtgcaaaacaggaaggtctgggaatgaccagatatcttgttggcataaatgttatgaaaaggcagaatactggcaagaaatgaggaagagagagaaaaacaatataactttcttgagtgcaaaggtgctagacaactaggagcccagctgggattggtgtagggagggccgaacgctgactagtgtggcctcactgccccaggcttcctttcagaggaaggcctgtcctgctggaactggagccaaggggaggctgcctatgaaggcagaagatgtggatgaattcaggcactnnnnnnnnnnnnnttatttataaacacaaggtggttggtttaagccaaaaggagataccatcctgataagctctgtgaaagagaagatgtgccctggtgtgtgtaatgcggctggggtatgaaaacactgagaaaggagatgaaggagtgtgtgtagcatgggggtgtgtacaacttaacacctggacttttactgggggagtgggaaagtgattctgtaccaacattagaattacttttgggatttgtaatc

SEQ ID NO: 240745 - DNA, 1799 bp, Homo Sapiens
  misc_feature (268)..(278): n is a, c, g, or t
  misc_feature (778)..(813): n is a, c, g, or t
  misc_feature (876)..(912): n is a, c, g, or t
ttggctaatgaaggttttcatttgccattcatgtcctgtaatacttcacctccaggaactgtcatggatgtccaaatggctttgcagaaaggaaatgagatgacagtatttaatcgcagcagtagcaaacttttcacatgctaatgtgcagctgagtgcactttatttaaaaagaatggataaatgcaatattcttgaggtcttgagggaatagtgaaacacattcctggtttttgcctacacttacgtgttagacaagaactatgannnnnnnnnnnaaagtactggtgtcaccctttgcctatatggtagagcaataatgctttttaaaaataaacttctgaaaacccaaggccaggtactgcattctgaatcagaatctcgcagtgtttctgtgaatagatttttttgtaaatatgacctttaagatattgtattatgtaaaatatgtatatacctttttttgtaggtcacaacaactcatttttacagagtttgtgaagctaaatatttaacattgttgatttcagtaagctgtgtggtgaggctaccagtggaagagacatcccttgacttttgtggcctgggggaggggtagtgctccacagcttttccttccccaccccccagccttagatgcctcgctcttttcaatctcttaatctaaatgctttttaaagagattatttgtttagatgtaggcattttaattttttaaaaattcctctaccagaactaagcactttgttaatttggggggaaagaatagatatggggnnnnnnnnnnnnnnnnnnnnnnnnnnnnnnnnnnnncgagcaatttgaagagaatcttttggattttaagcagtccgaaataatagcaattcatgggcnnnnnnnnnnnnnnnnnnnnnnnnnnnnnnnnnnnnnatgtttaattatgttaccttttcatcccctttaggagcgttttcagattttggttgctaagacctgaatcccatattgagatctcgagtagaatccttggtgtggtttctggtgtctgctcagctgtcccctcattctactaatgtgatgctttcattatgtccctgtggattagaatagtgtcagttatttcttaagtaactcagtacccagaacagccagttttactgtgattcagagccacagtctaactgagcaccttttaaacccctccctcttctgccccctaccacttttctgctgttgcctctctttgacacctgttttagtcagttgggaggaagggaaaaatcaagtttaattccctttatctgggttaattcatttggttcaaatagttgacggaattgggtttctgaatgtctgtgaatttcagaggtctctgctagccttggtatcattttctagcaataactgagagccagttaattttaagaatttcacacatttagccaatctttctagatgtctctgaaggtaagatcatttaatatctttgatatgcttacgagtaagtgaatcctgattatttccagacccaccaccagagtggatcttattttcaaagcagtatagacaattatgagtttgccctctttcccctaccaagttcaaaatatatctaagaaagattgtaaatcccgaaaacttccattgtagtggcctgtgcttttcagatagtatactctcctgtttggagacagaggaagaaccaggtcagtctgtctctttttcagctcaattgtatctgaccctttctttaagttatgtgtgtggggagagatagaatgggtgctccttatctttcttgactttaaaaaattatt

SEQ ID NO: 240746 - DNA, 1258 bp, Homo Sapiens
cttttaaaagccaactttgtacaaaaaagttggttcaagtttccctataacatatgaaattcagttaaaagaatgtgtgtttcataatgacttttaactggtaaaaatattacttgcacgaagtacttgatgtatggttatcctgaaatttcggagtatttggtgtgttctttgtctaaaaatagtctgttttgtcagtccttcagaatattatttattctgaagattgtccctcttgcacttggcagtttattttcggggatacattgttgggggagaggggtttctgccactctttccagattgagtctgtgctgtttaaggaggactaccatcctgcaactctttttctaattggggcacagaggatgtcgctaaagaaaagttgaagagccctttcagcactttctcatctgtggagaagatggaatcttaaaatacatttggagttttatctgttttacaagtccattgatggcctaagttcctcctgttttctgctgtttgatctctaaggaactcctgttgctaaatatgaagagtatggaacattcatatagtctctgtgaagcatggggggagggaagacatttctttttcttataggctttatgctcaaatgtcatagtctcctttcaaagaattgtgttgcattttaaatgcacccagcttaagtagaagacattgaaggatgcattaattttcaggaactattttgaattatgaaaagattcccaattgaaaaaattattcaacaagtaaaagctaagaaatttcattgaaatcataaggcagtttaagcataaattgataaaaatagctgtgtactactaattaatagaaaatcattcaaccaagagaagagtcaagtgaatatcgtttgtttatttgctagtgagtttctttgtaacgttgattttattaaatgataatatttggttagtatgtcctatgttaataaaaatgaacaaaattaattttgctatgttcaggtgtcttgataaaataacaatgctccagtgttgttgcttacatttagcactaaattttaacacagggtcagtgagtccaggttttaacttcttcatgcctggatgggataaaatgtaattcattgttaaattaattcatatttgtatttattaatcactgtgacaacattaaccatttgttcttaccaggaagtggtcagattatcatctgagttacagttagactggctaagtttggtattagatcaaggggaatgtccagtaaa

SEQ ID NO: 240747 - DNA, 942 bp, Homo Sapiens
ttggggcatagaaaagatctaagggagtagagtatataaggtacagtggggattatttggctatgattaaagggacagcaattaggtgaagcttagattttctaggatctcctatacttgggtataaagaacaagtctacaatactcatattccttattgtctatacaaagttgtctcctttcttctatatagtttctaaagacaaccactttaagggagttttaggtctttatactgagtaattaggctgtgtactactttcttgtaagttattttcaaagtaggtcaaaagggcttcactttaagcttcttcctctgcttctgacatgtagtaatgaatcaagattgctggtgaacttctatggatgaggctagggcctcttcatatgtgtttgaataatattttcaccttttcctttagggtggtggtgatctctgtaattgttaaaatggataaagaagcatagtgttcaaggagaatgttaagctggtctattagttagtttagatggtctttatttttgagcatttccgatcgaggttgtatctacctagatatttatgttgcttgatatattattatttatctggatgtcagggctgaaaaatgttcccaaattaatcattgaagatccaggggcttaaaaacaaatactcttctttattgctacatggtgtatagaatttttataaagagaaaaagatgctaatactatcataaatttcacataaagtcttaatattgtacatgtatgtgtttatacttaaagtatcagaatgtcagatatcagatgtttattcaaaggaaaatcatctttgagcagattaaatttactaataggtggatattttatctagttgggaactggtgtgtattttattaagaatagtcaagctatgaatcccttctatatatgacatgtttcattttctatgtattt

SEQ ID NO: 240748 - DNA, 1784 bp, Homo Sapiens
ttggatcacgtatggtttccacaaagccgagtcgtgtcacgtggcaggtttacgtcaatagtccctctctctgctcctccattcgcaagtgtcttcctgggccagactcccctccacctcatgtacttgctatattgaggatgaagttttctatggtgggacactaaatataaagctatatagagaaagaatgtacggtcagttccctatggtttctgtagatcatcgtcatcttgtatattccccacaaagccgttcgcagcttccgggagaaggggccagagcccggtggggccagtttctcacagagggaggaggtggcctttgtcccctggagcccgatcagccagttggtgctactgctgtggccagctggggggcttcctccagaccaccggcctcggccccggcatccctgttgggcgtcagcctgagagtccctactgtgcgtcagaatccaccttgcgtgctgtgcgtatctgtgaacctggagcggttacttattttgacagatatcactttgggtctttttacattaaatttcttttctctaaggaatataagacataccccatagctctgtgtgagccagcaataccgctgccccctggcgacagggcagaccaatgatgccaggcagctgtcacacgctagtattggcttcattgtgatctgagccctgcacgctgggccttcagaattaatggccagcagtgtcagggatgagcccgtcagccagggcacaggcctggctcacagtccttcacacctgctggctggggagctccagccaggcagcgagtcctgccccgcccgcagctccctcccacaccccgcctggccaagatgactgcttcagggggctttggggaaagaattaggaagggtcagaaccaaacaatacctgctcatttacactgaggattcagggcgggagacaggagccttggggtcctgttaaaccacagacagttatgaactgaaagtcataacggggagaggtgcctggcttctacctgggtgctcaggaatgttcctcgtcacccctgccactctgtggtcggtgccctgcttcctcctccactcctggccgccttctccagcgccgcacacacagatgctcagtctcagagaggctggcacggcctggcagtctgagaaaagcgtcagttaggcacacctgcaggcccctcggtgggacagcggcggccttggagttaggagccaccctgggaggttgtgccggtgccatgctcctccctgtgtcttgtatgaaaggggccactgtgtgtcttcctccccggcgggagccccacatgtgtgcactgtaggacagcggccccgaggtggaagcctggctggagggctgccctataggtcttctcttcccgcctcccctgccatgcaaccagatgtgttgtgagtgggcagcgtgcccccacgctggagtaactccgcacgcttctgtctttcacggtgggcgctcggggggagcctgaggaaaacccccttaggtacctgtgcgaggctgtggagtgcaggccagagcagggtgtgcgtagcccccagcacccaggttcttctgtcaaaccctgtgacctgcgagctgctactactgtaaggagggaaatggatgaatctggctcgttttaaaatcacgttttctgacgaatcctttgccccctttcacctttaccccgcccgcacccctatggccctcttcagccctcctatcatcccacgtggtctacccagacccttgtgcggcccatgccctggggggc

SEQ ID NO: 240749 - DNA, 946 bp, Homo Sapiens
ttggattagtccagggatccagtgagagacacagaagtgctagaagccagtgctcgtgaactaaggagaaaaagaacagacaagggaacagcctggacatggcatcagagatccacatgacaggcccaatgtgcctcattgagaacactaatgggcgactgatggcgaatccagaagctctgaagatcctttctgccattacacagcctatggtggtggtggcaattgtgggcctctaccgcacaggcaaatcctacctgatgaacaagctggctggaaagaaaaagggcttctctctgggctccacggtgcagtctcacactaaaggaatctggatgtggtgtgtgccccaccccaagaagccaggccacatcctagttctgctggacaccgagggtctgggagatgtagagaagggtgacaaccagaatgactcctggatcttcgccctggccgtcctcctgagcagcaccttcgtgtacaatagcataggaaccatcaaccagcaggctatggaccaactgtactatgtgacagagctgacacatagaatccgatcaaaatcctcacctgatgagaatgagaatgaggttgaggattcagctgactttgtgagcttcttcccagactttgtgtggacactgagagatttctccctggacttggaagcagatggacaacccctcacaccagatgagtacctgacatactccctgaagctgaagaaaggtaacagagagcttcaactgataaatgaggatgagaaaacacaagaaattatcatttttcagtttactattgctagttttccagcatttgcagttttctatgtcttcagctggctattcctagaaattaatacttgctgaatatccaaattaatagatgttattttaaattacatttgtcattgttctagaacaagtttcttgttctttcacctttg

SEQ ID NO: 240750 - DNA, 874 bp, Homo Sapiens
  misc_feature (473)..(490): n is a, c, g, or t
tttgtacaaaaaagttggggactgatgatgcccttttagctttgagcttttgggggttattctaccaacaaacagtccattggaaagaaaacagtccctggaattaacagatcagaatgttcacactggttaatctttttttaacaatgagcatgaaggtagcagaagctggtgtgtttccagatggttcttctaaccaaactaatttttcactgttgacaagcgaggcaagggttgcactggaccaaaggctgaggcttggccatctagcattccatacaaaattgtttcctataagcattccttttattctctattctatcctgggtctgcctcaaccgtgagataggagagtctctggtactagctgctgtagcagtgcccttcatccagggcagttaatggagtcttggaccctttctttctctgggatccctgcccagcaccttcctatagagatgactttaaaaggnnnnnnnnnnnnnnnnnncaaacccacatgatttcaaggagtctggcattcctgaatccttcttccctgccaggtgcctgtcacctgtcttcactgcctccttttccctgtcatgctcatcagcttatggcttctgtctaagcacctgaacagaggactgaaacctccactgcaggctggttttaggtcttgaattatgtaaaaatcttgcacagcactgctaatgtaaatttcagttgtttttccctctaggacaaacacttaccaaaatatgcaacttttttttggtgggaagagagattgtcgctgtgatttctacccatttcctgagggctgtggaaataaacctttatgtactttaaagttatacagaaaatagaataaagtaataccaaactcgag

SEQ ID NO: 240751 - DNA, 871 bp, Homo Sapiens
  misc_feature (748)..(783): n is a, c, g, or t
ttgggctatttaatatttaaataacaaatgacatttgatctgtttcagcaggtggtccattatggctgacatgcaaaatctggtagaaagattggagagggcagtgggccgcctggaggcagtatctcatacctctgacatgcaccgtgggtatgcagacagtccttcaaaagcaggagcagctccatatgtgcaggcatttgactcgctgcttgctggtcctgtggcagagtacttgaagatcagtaaagagattgggggagacgtgcagaaacatgcggagatggtccacacaggtttgaagttggagcgagctctgttggttacagcttctcagtgtcaacagccagcagaaaataagctttccgatttgttggcacccatctcagagcagatcaaagaagtgataacctttcgggagaagaaccgaggcagcaagttgtttaatcacctgtcagctgtcagcgaaagtatccaggccctgggctgggtggctatggctcccaagcctggcccttatgtgaaagaaatgaatgatgccgccatgttttatacaaaccgagtcctcaaagagtacaaagatgtggataagaagcatgtagactgggtcaaagcttatttaagtatatggacagagctgcaggcttacattaaggagttccataccaccggactggcctggagcaaaacggggcctgtggcaaaagaactgagcggactgccatctggaccctctgccggatcaggnnnnnnnnnnnnnnnnnnnnnnnnnnnnnnnnnnnnagtctctaccagttcaggctcagatgagtctgcttcccgctcagcactgttcgcgcagattaatcaggggagagcattacacatgccc

SEQ ID NO: 240752 - DNA, 934 bp, Homo Sapiens
tccacaatgtggcaggggggaagaatgtactcgtcataaagcacatctccgttgtagttgacaatgctacatcgagccaaggaactaacatgcccctttggtcctgtgcccaccatctcacagtcaattgccaccatcttccgtggcaacttctgggatgctccggagcatttattctctgaatgagcttgggtggagttctgtggggcattcttctgaggatggttctttttagaggatttcttctgggagctcttcttctgagagcgggttgggtggctattgatctttggaagggcactctggaactcccccagcaaatctactttagcagcaacagaatcagccttttttgaaggggcaggggtcaaccaagacactgcagctttcttgtccaggggctgtcctgacccattgctggaagcagctgtcttcttttttgggaaggaaggggtcttccaagtgccatcgaccgtaggagtttcccctttctttgaaggttcagagtgcaacttaggcgccttgctagggggttggttctttttactcagaaagcctctccgttctaagagcctccgcttcttgacaaaatttcggtgcttggcatttccttctaatgcctttttgggaggaggttccccaaaatccagattgagcagtaaagtagacatagggacaatggaaggcggaagagtagttgggaagagtggcttatggatgaaaagaggatgtgggactcattctctgctgaatcctactgtccaacatgtggaggtctgtagtacaccctggggaagaaagtgatcctggtaattgagctcctaggcctgggagaaaaatgaggtaagctcgatctccgtaggacttatggaaggaaagacatcagagcaatctctcagacagaggggaaatgaaaacataacatgaaatccaa

SEQ ID NO: 240753 - DNA, 863 bp, Homo Sapiens
  misc_feature (56)..(65): n is a, c, g, or t
  misc_feature (834)..(842): n is a, c, g, or t
ttggctcagtttgggtagagttttaaggttatatgaaactgatagaacttttgtannnnnnnnnnaaatattgttttgatatatcagatatttgttttgtctggatcacaagtgagaaagaaaagagaataatgctctttttcacaatgaactggtcaaattgactatcttgtaaagtgatactttactatgtcagtgaaatttcagtttgattttagtcaaccagattatatcctttgtatctactgatattaacacatcatattaacacaccatttcttaaaaaaacatttcttctgtttggcaatcataattaactctggttatcagcctattttgtaattattgtctttgtcgtcacttttcttgaattgttttctagtcattaaacagatatgaaggcattgccaaagagctttaatatccagtaacaagatccagaaaccacactttaaccagtgatcagttttccgtgctgcattgtaactcagctcattctggcattcaagttttaggcaaaaaaagaggaaacttctaacatttagcttgtaagtcctgacataagatagtgaagatatttatcttctttctaatatttgtatagtccgccaatgtattttcttcccactattcccattaacataccaaacactgtttctaggtccaaagtctatttctaggagtggccaatatttgtattgttgaatctcctagggaatgctaaatgtttcactttaaaatacctatttataccaagtagcatgagattagtactagagtgagatttggaatattagtccacatatcacaaactgcttgcctacatgtatagannnnnnnnncacccaccttcctaaccagga

SEQ ID NO: 240754 - DNA, 167 bp, Homo Sapiens
ggccacccgccgcaccgccgcccacccccggccccgagccgctcacagccccgagccgggggcggctgcccagctcatcgcaccgccggcccgtggcagccagcagtggcttcagacctccggagcgcgccgccgccgccgcctttttagaggggatcgtcccccaa

SEQ ID NO: 240755 - DNA, 1710 bp, Homo Sapiens
  misc_feature (320)..(344): n is a, c, g, or t
aaaaaattcacaagtacacacttcaattttaccatcagtaatctggcgtattagaatatctatttataacagcaaagaattaaaacatccatatgcttaggcagcattagggaaattgttgaaagtatcatacgacatcctactcagttatgtggctttagtatttttcaattaaaatactgatggctactttacttaaatttaaatctccagaataatagggggacaaattatgaccataaaatacaactggttttcttctatagcctacagaagcagattggcctcttatccatacacccaaattcctactttggttnnnnnnnnnnnnnnnnnnnnnnnnntaatataattttccctaaccatgagcacattctattttttcctcaggtatacatcagttttagtgtcccaatcaacaaaacttaaagctgaaaagaggaaatgaaaataggtaataccattcctgacaattactgatatttagtgaggagaaaaaaacaagtatctcactgcttcctgtttttgcaaaacttggccataacttatttcccactggcataaatataacatgtcctaatacaagatgctctagaggtaaaataatacaagtgggattaaaaaaataaataacactagagcatctatttacagtttgaaaagctaaatatctcagagactgttttgttttcttgaataaccagatgagggagaagcactggaaaaaaattaagtgatttttatttccaacagttgtaaattaaaattgtacaacatgttttctaatctatgtctcatgtgtcttgctgtatgactgaagacaatgaatgtatttttaaaaattatggcagacacaatatacttggtatttacaatggcctgtgacaaatataatacctggaaataatttctaattttccacttattattgctatttagtcacagaaaagattaacactctccaagaaattttagcatatgtcatatatagatataataattttatataatgaaaaaccataacagaacagggtgcctttacaaggaaacaaaggaaaggcaataaaggatttcttccatataaagattctgatatgcattatttgatttttgtttacaaaatacaaaactgtaatattagaagcaaagggaaaacagcaaagaaaaaaacaataaaacagaaggccaaggataaggaactgttctatgcagatgcactgcatacatagtatatatgtatgggctgagttataataaaaatacttattgtcaattctcatatggatttagaaacaacaatttccaatcaagcacgactggacccaacattttctcagtcttcaattacatgacaaattacagctacacagcagtcacttctggtcagcagtatcatgataaatgcttgacaagatataatttttctccttgttcacttgtaaaaattggtgcctttttgtaatgttctacaagttcttccatggtgctgaatttacgctgcccaatgcagtagacagtctcttttagttggactttaaaatgcttgtttttcccttgtgcttttagtgatactgagaaatcatttggcgaagattcactatcacgaatgaggaaatccccttcatgtcctctttcatttaatgccatttctgcttgatgcctggtgactttgccataatggccaaggattgccaacttttttgtacaaag

SEQ ID NO: 240756 - DNA, 1480 bp, Homo Sapiens
gatggacaagcaccccaccccggatagctcagtggcttgatgagctgtacacagccaggctggtgcggaaccgtgagaaaggaacagtttggctataggagctagtgattcggggctcgccctttatgtccccatgaagatccggcacaaggcaggtgccccgtcgccttcggaaggaagggcgggagtcgctgatctgcttgagaggcaccagcctgcatcccagcatccactgcagcactcgcgtttccgtctgggtgaatcttaggctgggaggagggaattctcaccagccacatgattccagggtcccaccttgcaccctcttggcctgtgtggatgagggcccatcctgaaaccttctttaacatatgtgcggaggaaggtgatgccctggcccccaaactgagacaagggcgagttctgcagagccggaattctcactgggagggtgagagtggcagctctgctgttggcctggcccaaaacagaacggaaatgcaccctcatcacatgagtggtccagatggtctagcgccagggtgaggcaggcaccgggtggaggaggggacagaaagctgtgaggaggacccacacaggggttctgggcagctccctgatgccagccaggccagtgatacgaagagaaaggctaataaatagatgcacgtgaggagcaccgggcagccccggaccaggtcgcgtaggacgcaccagatgccgctgtggctcccgcacccgggcgcaggtgatcagttcctctagtaaagatacacaaacgaagttacttcttttcaagtattaaaaaataagttaattgacaaaaagggtttgaagcggctgagcgtcttgccaggttgtcagcttcatttcaacgtgcaaacacaggaaaaacacggaggaaaaggtcatcccctgtcccgacataaatgtggaacagggacaatgcctgtctgccaactgggggcttagaatgtagggcctcatcctgtcccccaaagtcagcattttccagtgtcaaaatggttgtgaactacaagcaaaatgcagcaacccacaagcctcaggccacagccagcaagcggcccaggcatttggccacttagggtccagtgtgtggtgttcggctggagggcagacccctcctgcgtcctcctaatttgcataataattcaggagcctgcccgcacctccatgtctcctgtgatgctggggtgggcatgactggacgcccccatcctgggtctcgatcgcaccctgacccctgaccctgctttcgtggggtattgtttacgtttctttggtggtgctccagggagcatgaagaagacagtgcccctcgcacggcgcactgtggttctgacggggagcagcttccctctcttaccaaatgtgccagtggaaaaaaggggcacagccagcacatcctcagggagcgcgcggggtggtcccctgcgtcatgccatacacgccgtgccaa

SEQ ID NO: 240757 - DNA, 1539 bp, Homo Sapiens
  misc_feature (696)..(710): n is a, c, g, or t
  misc_feature (723)..(864): n is a, c, g, or t
  misc_feature (981)..(990): n is a, c, g, or t
  misc_feature (1193)..(1202): n is a, c, g, or t
aagtgaatacattatgtacctatcaaacatttccgacatgccattcaaaagtatgcatgaatactgttggagtttatctagtgaaaggtggtgttcttatctgaataaatgtgtgagcccataggcttgaaatggaacgcaaactgctatccttcatccattcctgtctgttcattcccatcaggtgctactttgatacaacaaggattcctatatgaagttttttctacaattatggaagccaggatatttgttttacctgtatcaaaagcaatctaaattatttcattagggtaaaaagacacctaattctgaagaatagtacttacatagcatctctcaccaaaagatcactggaacaaaatggcttcataaaaattagggctattactaaaggcctaaattctagctgaagctagagctttctatattttaaaagagccaaatcctttgatcttctgagcctaacagaaacaggcgttggcacttataagaacaattatttagactcaagtgacaaaaattttctacctttttacatcttttacttacctaatcaccctggactcaaagtcctcttgaagcaatcccgttttcaatgagcatatgttgattacatgtaaactcaagagttacatgagcaatcttactttacttccgtataaaattttttatactttaacttggggtcctaannnnnnnnnnnnnnngagagacagggtnnnnnnnnnnnnnnnnnnnnnnnnnnnnnnnnnnnnnnnnnnnnnnnnnnnnnnnnnnnnnnnnnnnnnnnnnnnnnnnnnnnnnnnnnnnnnnnnnnnnnnnnnnnnnnnnnnnnnnnnnnnnnnnnnnnnnnnnnnnnnntttaattggattcctaatgtaaaatctcagtcctctaattataaagttatgtgaaggcaattttcaaatttactgtatctgtcacaaataatgatatctgtcaatttttattaagannnnnnnnnncgactttgtctcttatagtaagagctgtcaatttaacagaaaacccccaaagcaccagtgatgcaaacagtaactacaaaagcttaacactgggcaagggaccacaaatgcgtagataccaactctaccaagaaaaaatctattcgaattactgattcaattatcaaaactgattaaagaaaactttacccttcgtttatttnnnnnnnnnngcttactccacaacttgtaatgtttattacatatgcctgtaactacatctttaagaaagcaaatgtaaccagcacattcaaattcagaataacatttgaagcatcaagatgaagcaaatccatcaaacgtcaatgaacgctagttttatttaaggtgaaatcctctccccacacccatacaggctggaggtttcagttggcaaggatccctaactcctgtttaagatgtcaccttgcctcctggacacacccatcgctgtaaccacttggcaggaggaaccacaaagtaagtatcacagatcaccgccctcattagccaacttttttgtacaaagtt

SEQ ID NO: 240758 - DNA, 919 bp, Homo Sapiens
ttggcttggacggagccgagctgaggctcggcttcctgctgatggtcagggttttggcaactccccggtgtgagaggggtagggagtgctcccggcggcgacggggccgagttcaccagccgccggggcagtagtcgaaggcccggcgcggcatgtcctgggtgccgcggtgcgggcagtgaacgcgcgccgggcgggatgggccggcgccgggcgccagagctgtaccgggctccgttcccgttgtacgcgcttcaggtcgaccccagcactgggctgctcatcgctgcgggcggaggaggcgccgccaagacaggcataaagaatggcgtgcactttctgcagctagagctgattaatgggcgcttgagtgcctccttgctgcactcccatgacacagagacacgggccaccatgaacttggcactggctggtgacatccttgctgcagggcaggatgcccactgtcagctcctgcgcttccaggcacatcaacagcagggcaacaaggcagagaaggccggttccaaggagcaggggcctcgacaaaggaagggagcagccccagcagagaagaaatgtggagcggaaacccagcacgaggggctagaactcagggtagagaatttgcaggcggtgcagacagactttagctccgatccactgcagaaagttgtgtgcttcaaccacgataataccctgcttgccactggaggaacagatggctacgtccgtgtatggaaggtgcccagcctggagaaggttctggagttcaaagcccacgaaggggagattgaagacctggctttagggcctgatggcaagttggtaaccgtgggccgggaccttaaggcctctgtgtggcagaaggatcagctggtgacacagctgcactgggcagaaaatggacccacctttt

SEQ ID NO: 240759 - DNA, 1296 bp, Homo Sapiens
ttggactttatctgccttaaagttacaatgctgtggaataaaaaagctactgctgtcttgtcaacatctgtgctagctattaccaacacagcagttgacaagacaggagcttcctactatggagaacaaactctacactacattgcaacaaatggagaaagtgctgtagtgcaattaccaaaaaatggccccatttatgatgtagtttggaattctagttctactgagttttgtgctgtatatggttttatgcctgccaaagcgacaattttcaacttgaaatgtgatcctgtatttgactttggaactggtcctcgtaatgcagcctactatagccctcatggacatatattagtattagctggatttggaaatctgaggggacaaatggaagtgtgggatgtgaaaaactacaaacttatttctaaaccggtggcttctgattctacatattttgcttggtgcccggatggtgagcatattttaacagctacatgtgctcccaggttacgggttaataatggatacaaaatttggcattatactggctctatcttgcacaagtatgatgtgccatcaaatgcagaattatggcaggtttcttggcagccatttttggatggaatatttccagcaaaaacaataacttaccaagcagttccaagtgaagtacccaatgaggaacctaaagttgcaacagcttatagacccccagctttaagaaataaaccaatcaccaattccaaattgcatgaagaggaaccacctcagaatatgaaaccacaatcaggaaacgataagccattatcaaaaacagctcttaaaaatcaaaggaagcatgaagctaagaaagctgcaaagcaggaagcaagaagtgacaagagtccagatttggcacctactcctgccccacagagcacaccacgaaacactgtctctcagtcaatttctggggaccctgagatagacaaaaaaatcaagaacctaaagaagaaactgaaagcaatcgaacaactgaaagaacaagcagcaactggaaaacagctagaaaaaaatcagttggagaaaattcagaaagaaacagcccttctccaggagctggaagatttggaattgggtatttaaagattcacggaaagcaagttgatgaccagaaatcagtgcaaacacatcttctgttaaacccattggtatacacagaatattcctgtgcccacacttaatgtcaatctataattttaaccatttatccaagattctactaagtgtaaaattatttaataatgtctattaaat

SEQ ID NO: 240760 - DNA, 1725 bp, Homo Sapiens
gccaactttgtacaaaaaagttgggaggcccacctctcgaaaaacaagaatggggaaaaagctaattggttacaatgaaggttgctagaggtggaatacattatattaaaactgataagagcaggaatatttatcccgccttttctatataaatgcagcactaggtaaccaaatagtagaaggggaaatttttctttatagaagcagtacagctgaaaaataagtgagggagaaaaaaccagagtatcaacaatttgcaaccactgatgaaataatgcatccaggcatgaaacattaatgtcagctaagcctacaaaattaaagacaaccagacattatgtgcttcttgataaaagaagtgaacatcaccttataatgtagtcttacccttactcacctaaaaaagaacctgaagctgaaactctagagccaacttgcaatttataggggacagatgaacatgttaaattataccatgggatacaaaagcaaaattcaaactatgggaaaacgtgaaagacaaataaccttgtttcttaaacaataaattatgaagaataaaataacagatagagtgggaacttataggaccaaaagaaacataaaagatatatcaatcaaccacaatgtgcagtaccttatttggatcccgagttttaaaaaaaattgtaacatttgcaattagtagaaatttgaacacatatttaataatttgtgataatggttttgtggctaagtttaaaaaatgaaaggccccaatcttcagaaatctactctgaaatatttacaattacatatttaacaagtatataaaagtataaccatatctgggatttgctttcacttagtaagagatggtagctggagagatgtatggatgagataagattggccacaagctgatggttactagaactaggtgtctgaagtttaaaattctacacgataaaatatctaaaaaatttgtgtcacagaatttcaatagcaattaaattcaggaaaagatattcaaatgtcttaatagcaattaccagataataaaaagttattgtaaaagaaaacctttgtgttacagattttcactgaattcagacttataaagaattatgcaaatgtatgtaagagtaattattgattaatagattaacagtatttaggaaaaccctatgatgtcataaaagttaatggaaactgtatacgattacagtaagtaataaaattatgtcataaatctttccatactaaaattgttgttttcaaagaagtgaacttcattgttaacattgcgggcacaaagagtttcatcttctgaccaggatggacaccaattttgcatttttttctggatgaaagatttcaaacatgtcccagttttcacatcataaagttgtaggttgggtatcccagctgtgccatctttagaagtagtgtaaggctgccacgttgccaggacagtatttttgggtgagaattcaaggcaaactgccttcaggaggtcgaaggagtgcagtagtcccttgttagtgacactgataatatttactttttctccattgccccaggcaaacaaggtcccatccttactaaagatacagactttgcaattcttcccagattcccttggaaacactgtgctttctgtaaaatgtggtggtccattcaccatgtacagtccttctgatcctcggactgtcaagagcggcgtggacggcgccatgttgccaa

SEQ ID NO: 240761 - DNA, 2689 bp, Homo Sapiens
  misc_feature (236)..(246): n is a, c, g, or t
  misc_feature (358)..(392): n is a, c, g, or t
tgcccagttaaaagaatggcgggacccaaggaggaaaggagtgggggcagacaaacgcttgggggatcagtccactttctctacattcaaaactgcagaccaaatagaataccatgacaaaaagaaagagaaaggaaacttgtataaaccaagataaatagcttttaaacatttgaatgccaaaaattgggggccaaactcaaggtttttgaagatagcacagcgaatgacctttnnnnnnnnnnnttgaaaatccaccaaaccacagctcaaaatgttatgacccagtcaacaatactgtcagaaaaacaaaaagcatttgaaacagaatgctacctctcaaaatgtaaacaatatnnnnnnnnnnnnnnnnnnnnnnnnnnnnnnnnnnntcaatgttaaacaagttagatacctggtagtcgtctttaaccagtaagaatgtgttacactttccatacacattatggcaacatgatcagcagaccaaatgcagagaagccggtaggaacccgaggccacggaggctgctggaagacagctttccaagcttcagagatgctgcgcctgacgaggagcagatccaaacttccattcttcattatgacgtggggaaatcaagtccaaacattattcctacataatccctttcccaagtcaaatttgttttctccatgagccagttggtttcaagttccctaagtcatgtagtggtcttgcggcagttgttcagacctacctatggccccttcctggggccaaggcagtggtttgacccccatctgcctcttccagaaggtttcccatccaatccagcagccccagtgaagtccaagaatgccgtctccattctttcctgacctatatgctgtgagtcaggcacagagacagtgctggttcctgcttcggaagctgggcttggccaggtttggagggagccacaggaaaccaatctattcattcaaaatggtttcacaagcgatcttcacatctttggggttatctacaagtctgaccatatctcatcccaaatccccagttcctggttgagggggtgagaagatgcaggaatgtacctcccccaatgcagaacaacagagctgtttctctcctggccagagcagcctgtggctcagttctgagggcctgggtggcaggctccgaaggcaggtggaacacctgcaggaagccactccttccaaaaaagcctgtgggctgcagatctgctaaaagtctagagcggggcaacaaggaaaaacagccccaaggctgaggccaggtcaaaacccacatcaagcctccaaactggatttcctggatcacatcctcatgtaactaggaagccacctcacgtttggacaccacactctaagatgggggcaccttgctggctgtaactctccaggcacagggagacagatctcctacaaggtcatcccggagcttaacgaggtgtctctgctaaaaagcactccaggcgcttggagatctgcccagagctaagagttcggctagaagtaagagtgcctgggaggaggtcagaaggaagaaggaaatagatcgagggcacagggcctcatttgatacatcagtttctgaagttttcccaaagggaaataaccatttaaacatgagggtcctgataaatccaaaggtactctagttcctcttgacctagtgggaggcaggctttacagagaggacttctgaactccaggggctaagacagcctggggcttgggtgatcatcacagggttctctgagaaccaggtgtccaagagcccagccgctttcctgcccctcaccatcccatgaggatgaacttattcccctctgagatctctgattctgatctgagatctctggtgttgacctggtgtattccagacaggatggaggaataatgcaacagttttcacttgaatccaagggaaaggtggaggaagttgtgcacaatactccataaattacaaagttaatccagacaagagcaaatgcagcagggcgaggtgtctgacctctccaatctggcatccatagcacttggttctggaaggacccttgtgctgggtctactgggtatctctttaattgaagggaactgagagctcagcaaagatggggagggtgggtaggctgatgaaatatgattataaatagcaaacctggagcaatgaaatttcagaaacaaaacccaaataaacccacgaagtcatctctagccccaaggtatcttaaaaggttacaaggtaccaaaaagggaacccctttttaacctgggtgtcaaatggggagaaaaaatcaagggtaagcagaaggtggggttacatcctgtgagcaggtacacacacagcacatccccctcctcttcagctaaagtctctttcggtgtcacaggctgcagtctcattgctaaagccctcccaaacccgactctgctcccaccctcccatctagcccaaatacacccttctccctaactcccgatccccgaccccatatccagctctctggctctggctgaaggtagaagagaactacgtcaggatgttggacataaactcgttgaagcgtttggagtactgctcagggttcacagtcgagatctcggcccctgcctgtaatacacaagaggctgattcaggttgagttcctgtgccccaatcaggaggctgcacatggggccaa

SEQ ID NO: 240762 - DNA, 1665 bp, Homo Sapiens
  misc_feature (1414)..(1424): n is a, c, g, or t
  misc_feature (1536)..(1570): n is a, c, g, or t
cagtactgccccctcccccaagggtgttggctcccaccgcctttcacagtggctatgcgcaagggcaagaggctcctgtggaaacttctgccctgggatattggcacaagctgccaagggacagctgagtctccttttccccatggggcactcttcataagtggcacattttagaggagggagagggccacggtcactgaccctgcagatggctggtagattggggaacagtcgtctgaatgggttttccctttcaggacctccagcccgcatgactgccaggaagagatgaggctcctagacttggggggccacaggtttaaggccagagctctgagtgttgtttaaacgcactgtcccttctagcccccaacacctgagtaactcacatgctggggtgctgcagttttctctcccaccctgaattggtaaaaagacaactggggggtaggactggctactgcaaaaagtcctgggtctttggtccacctccccaaggtatgccctggcagaccatgaagacaggaaaggcagggcaggagtgtagcctcacgccctgagcgctaccagcaggcctgtttgaggccaaaagcacaggcaagagaaagagtcaagtagggagaggggataaagagctgcctgtggtgggaacttaagagactgccactgagaacagccacaggggccactcgtggcgcctgccacagaccagcaacccctgagctaaagaaggagaggtggagcactgcttcagtctgcgcccctcagctgtggcttcccggcatgccctgtgaccccaagccgcagggtacaggaaagaagtttgtgctgggggactcaaagacccagaggttaattaacaggaaccagggccaggggccttcatctagaggtcagtggagtctccagggcactcatcactgtggctgggagactacagtgtctcggctgcggacttgtggaagaagagggggaaggatgggagaaggggtgactggatgccagccaggaatcctggccttagccctatcctggcctcgcctaatcagccatgtcgttattcttacacctttcttcttgggagacccaacattattctgagatgccatgagactgtttagcttttcttcatggccccagggagtgaggctgagggcagtcacttcccctccaatgccctcgactgcccagtaaaagaatggcgggacccaaggaggaaagagtgggggcagacaacgcttgggggatcagtccactttctctacattcaaactgcagaccaaatagaataccatgacaaaaagaagagaaaggaaacttgtataaaccaagataaatagcttttaaacatttgaatgccaaaaattgggggccaaactcaaggttttgaagatagcacagcgaatgacctttnnnnnnnnnnnttgaaaatccaccaaaccacagctcaaaatgttatgacccagtcaacaatactgtcagaaaaacaaaaagcatttgaaacagaatgctacctctcaaaatgtaaacaatatnnnnnnnnnnnnnnnnnnnnnnnnnnnnnnnnnnntcaatgttaaacaagttagatacctggtagtcgtctttaaccagtaagaatgtgttacactttccatacacattatggcaacatgatcagcccaa

SEQ ID NO: 240763 - DNA, 938 bp, Homo Sapiens
ttttagtaaatcaaatttatatttttcttttatggcattataattaaaccttccttaccactcgtttcaattctttccatgaaatatgtactttaagtgatgctactactgtattatcccattttcaaattttcttctcagattacatgataatctaggaaataactaatgatatcatagaattgtaaactgctagagaagctttcagataggtatcttctatgttcacactccaaatcttgctaatcagaaaatttcttccttctgcttcacagggaaggtaagggcagaggaactatcttgagcacactatgacaggacttccttaaaacaaatgtttactttccaccttgggtatatgtaggtcttaccaagaaaaccacagataagctttttaaaatgtaaacttaagggggagggggaaaaaattgcaaaagttgcaaaaatgaagatgtatacactgaaaatgaaaaatcgatggtggttagaaaaatattctttcccctgcttcttttaataagaacccaacaaattaaaatgtaaaaacatttgagtggtcatgttactggggaaaaactattttcactttctacaacaggacaacctattttggaagaatgaggctaatcaagccacttgttacataatagtgctataatgatcactaacatcaatctcctaactgcctaagtttcacaagtgtatcactgactctcttcaaatacatgatatcccttcttgaatatagtttgctctcttaaatttcagtaagggatagattaattgaaaagctacatttagattacataccgagtatttcccattcctctccaaagacataaagatttttatttaaaaaaagtagcattgtatgtatatgtatcacatgaaacactaactaccatagggaacaaaaagcctgatagaatataagccaa

SEQ ID NO: 240764 - DNA, 1989 bp, Homo Sapiens
ccatcatcatgaaaaacttttagtggctgggcatggtggctcacacctgtaatccccagtgccttggcacataacagatgctcaataaatatttaatttttgatacctgagtttttgtttacatatttcgtatttttaaagtaccattaggttgttattattggtctttgtttctgaaagtaagaacacttactaaatgacagtagctgataagtctccatgtcaaatgggagtattctgaattttcagcttttattagaatattagaagacctggtttcactggagttggagagatgggcaaatctgggatatagtttggaggtggagccagtatccctcagatggactggattggataggtgggtggagagaagcaagaatgacctctgggtttttagtctaagcagctggctggatggggtgtcatttcattgggttgaggaaggaactgattttgaggagaaaaatcaataattttgttttgaacatgttaagtttgagaggctaagtagaattgataagaaagtggttccaaatatatgtcatgaactcagggtagaggttaaggcaataaattttggtatcaggagcatatggttgatatttaaaaaccacaggactggacaaaactaacccaggaaagagagtgtagatagagagcccagtactggacatgaccacaattagaagagaaacagcaaaggagactaagaagaaaccagcagtgaaatatgagaaatagaaaagtgttgtgttaaaagtctagaaagaaaattattcagggagggaagatggaaaaagagagtgaccttgaaatttagccatacagagggagttgatgatcttgacaagcaattcattgaaaggaagagatggaatcctgattggaattggttaagaaaaacacagcagatgtctggtattgatgagtttttttcatttacaggctagaaaggtgtcaactatgacaaaccgtgaagactttttccttattctatgaagggaagatctaaaatccaaacaggtttaaaaagtctctttaagcaaaatgatcctccattccattattgtgaactctgacatcctgccaaactcatattttttacatatcaaaataaaatatttgtagcaaattaaaaccctttattaatactttatctttgtatgttgctctgataaattttgatgtttttcttttggtagcttaatttttttaaatcctactttggaccatttgagcttctgggaagtattttggattgttggaattacagacttcattctgaaattctttttcatgggcttaaaatgccttattttattggtgccttctttcatcatgccttttaaatctaagggttactggtatatgcttttagaagaattgtgtcaatactaccgaacttttgttcccataccagtttggtttcgctaccttataagctatggggagtttggtaacgtaactagatggagtcttgggatactgctggctttactctacctcatattaaaacttttggaattttttgggcatctgagaactttcagacaggttttacgaatattttttacacaaccaagttatggagtggctgccagcaagagacagtgttcagatgtggatgatatttgttcaatatgtcaagctgaatttcagaagccaattcttctcatttgtcagcatatattttgtgaagagtgcatgaccttatggtttaacagagagaaaacatgtccactctgcagaactgtgatttcagaccatataaacaaatggaaggatggagccacttcatcacaccttcaaatatataagttgtataaactatcaaggcacaaaatactaatgtcatttggtcataatgactactgataagcatcagaatggattttcaggctaccagaaaatgtttccagatggtttagaatgtaggacttatgatccattcaccaaaagattaaatgaaaccaccctgtgtttaaa

SEQ ID NO: 240765 - DNA, 870 bp, Homo Sapiens
tgcttactaagtggcagtggtatctatgatgctatagatgcttccctagccctagcccagcccctcctaaatagggagacccaagattctgtagcttctggcccaatccctcatggccccagagcactctgggcctcctgaccctttgtctccctagacagcacccaagaaaacctcatttggctcgctgaaggatgaagaccggattttcaccaacctgtacggccgccatgactggaggtgagacagtgcccttagtgtgttgggtcccggagcaaggtgtccccttcattgccttccctattctgtccaggctgaaaggttccctgagtcgaggtgactggtacaagacaaaggagatcctgctgaaggggcccgactggatcctgggcgagatcaagacatcgggtttgaggggccgtggaggcgctggcttccccactggcctcaagtggagcttcatgaataagccctcagatggcaggcccaagtatctggtggtgaacgcagacgagggggagccgggcacctgcaaggaccgggagatcttacgccatgatcctcacaagctgctggaaggctgcctggtggggggccgggccatgggcgcccgcgctgcctatatctacatccgaggggaattctacaatgaggcctccaatctgcaggtgggtagggagagatgtagacagatgagaaggtgttcagtgtgcactcacacacccctcacccagcacagttgttctgaggtgttagtacctggtctgtcagtggttgaactgggggagtggtggccagtcctgcatgcatcccaaatgggacttggctcccaaagcctccttccagggctcctaatgctgctggtgtaaa

SEQ ID NO: 240766 - DNA, 924 bp, Homo Sapiens
  misc_feature (762)..(800): n is a, c, g, or t
ttggcctagcgtctctatcgcgccagttcctcagcctcagtgctatgaaggtgacagcgtgaggtgacccatctggcccgccgcgatgctggcaacacggcggctgctcggctggtcgcttcccgcgcgggtatctgtgcgtttcagcggcgacacggtgaggcccagcctggctggggccacgggtgtttggggccgggtgtcgcggccgcgcccgtgcacgagcagtccctggggtctgtagtggcctctggagagcccttctccccaggccaggcgggaaggcccccgctccggcctggttgaagtaggggaacgggtcccaacgcggggccgactcccttgaccctctgacttgctggcttcccttgttttacagtcctcggcctggcggaagttttgcaggttgtgaagacccctagtctttcattctctccttgtcacagccttgtagggcgtgaaggggtcattgccccatttagggatgcgcacctcctgatttcccgtccactgctctgcgccctgaagtggctgaaaagtgctcttaaaaggatgggaatcccgtcgccctcagctggtgcgctctccactgggtcgtggggctcctcatttcatcctaagtgagcccctccatcacctgtgtgttaaggaggcatttctttcccatcagtaaacacatttcgcctcttcggccgaggtaggaatataaaaggcccctggcctacccaagttttggtccagcaggggagccaggccgggaannnnnnnnnnnnnnnnnnnnnnnnnnnnnnnnnnnnnnntgccgtgatgcagctgtgggtttggccaccgacagacctgggctcaaattgggacctgctgcttttgactgtgagaccttccataagctccttttgctccagcctcagttttctcctctgtgaa

SEQ ID NO: 240767 - DNA, 1044 bp, Homo Sapiens
actttgtacaaaaaagttggctgcagacagcctccaagctgcgcagccttttacaattggtgataataagacatataatggatactggaacactccccttctcccctataaaagctacagaatttatttccaagctgctagtagagccaatggggaaaccaaaatagactgtgtccaagtggccacaaaaggagctgccactccgaaaccagtcccagaacccgagaaacagacagaccatacagttaaaattgctggagtcatcgcgggcatcttgctgttcgtgattatatttcttggagttgtgttggtaatgaagaaaaggaaactggccaagaagcggaaagagaccatgagcagcacccgacaggagatgactgtgatggtgaactcaatggacaagagctatgctgagcagggcacaaactgcgacgaggctttctcattcatggacacgcacaatctgaatgggagatctgtgtcttcaccatcgtccttcacaatgaaaacaaatacactgagcacatcggtgcctaattcctattacccagatgaaacccacacaatggccagcgataccagcagcctggtgcagtcccatacttacaagaagcgagagccggccgacgtgccctatcagactgggcagctccaccccgccatccgggtggcagacctccttcagcacatcacacagatgaagtgtgcggagggctacggcttcaaggaggaatacgagagcttctttgaagggcagtctgcaccatgggactcggctaagaaagatgagaacagaatgaagaacagatacgggaatatcattgcatacgatcattcccgagtgaggctgcagacaatagaaggagacacaaactcagactatatcaatggcaattatatcgatggttatcatcgacccaatcattacattgctacccaagggccaatgcagaaaccatctatgacttctggaggatggtgtggcacgaaaacactgcaagtatcatcatggtgaccaatcttgtggaagtgggaagggtcaaa

SEQ ID NO: 240768 - DNA, 593 bp, Homo Sapiens
cagtttccgcagataggcgtccatgggcgtcgcgtcctcgcggggccccgcgccgccctggtccccgccgtcggggacgccgacggcagcctccatgttgctggtcctgctgcaggccaggcgcggcgagggctagccccacatggccaggccgccggctgctcgacgccccggcctggggcaggcggcggctcgggctggggctcgggctccgcgagcggcggcaggcggcggcggcccgaggcagcggtccgcgctctccgggcgcatagggaagccctgcctaatgcatggctgtccgcacgcggccgcctcctcggagcgaacacgcgcccacgacaaacggggggagcgggattaaggaaaaccccgagagtgagtagtcacttcccgacggcctcgctgcctgactcaggacccaggccgggggtcgccgcccccacaagtttcctcctccgtaccggtgtgaagcgagaaaacccccgcccctggcgcgcacgctgggccggctcaggtgaagcggggcctgcgcccccgcgcactccccacgccgggagccgaggaaaccaaaaagaaagacgcggcctttccaa

SEQ ID NO: 240769 - DNA, 705 bp, Homo Sapiens
ccaaaaatactgtattttttaaccagcaagatcattggggcattattatacaacattaggtgttttttgcaaaactagttcccatccccaaacaatagacagtacatgcatttgaatgacattttaggaacagtaaatattcttttaaatactgcaagttaaaaatgttttctgacaaaactccctaaatacataggtctagtaagggtttccaacaggatgatgggtgaggaatccagcaaggagttgcatttagagagttctttgaggaaaagaaatccaccaaaaacgtgtttcagtcaaagtaacctggacaaagttacgtagtattattccagctttctttcctgaacttaaaaatgttctaccaacgaatacctttctgttttttctgtctaccaaaagcttatataaaagtcagaatttctttatccaagatctgattttacccaatagatgttttcataacatgtaaatgtcatttgctatattgggttggaatcatacggggaaatggaggacacagggtagataaggaaggcaaggaggaaattaatatttgagcacctactatgtgctaggtgtgtattcatactttgaacatatgattctagaggcaagagtgttattgaaagggcagtgatcattgggaagacagcaggaaatggctattctgtgagaaaaacaaatgacaagtttagccaa

SEQ ID NO: 240770 - DNA, 1658 bp, Homo Sapiens
  misc_feature (610)..(623): n is a, c, g, or t
  misc_feature (1285)..(1297): n is a, c, g, or t
ttgggtttgttggtgaagtttgggggcggggtgttgggagtagagacagggtaaggggacgtgagaaaggaaaaggcatgaagttctatacctcagccagcagctgccttcgtttggaactgaagtccagccagcagactctctagctccatctcccctgtgccaccctaggtcatatgaccttggccaccttggagtagacccagacccctcgggacccgggacattagtctcaggctgctgatggattgatttgacatgaaccaaacacagctaaactcgatacccacaagctgtcagctgaacctgactgagtgttcttcctgagttcacgaggataggctagagtgcatttttactggtggatcagtgtgtgcgaaagagatgaccctttataaagagattttcaagtggatatatataaaagaaacagttgcttgtaaaatatacttttgtaaataatatttaattttttaaataatatatttggtgctgttttctcagatcccctgagagcactttttattttccttttaaattctatggtttcctttgcatttcttgaagtatattttaagggaaacagtgatcaccaatacatgttttcagnnnnnnnnnnnnnnaaggtctctatcactttaatctggatcaaggctttgaagcaatgcctctctgcattttttccccagtggaacagactctgcagtacattaatcaggttgagaattgaaatattttcttgcatcagtattggctagaaaagaaaataaataaaaccaagttaatttagtagtaacaacttacagtgattcttcctgttggaagaatttgcaacaaatcagaatcacgtttttagttgtgcgtgtgcacgcacacgtgtgtaaaaagcactttcgattgtgcctcctgttttctcgagtggggacactttaactacagtttacacctcgggcgcataaagtttttcttctctttctctctggttgtttctgtttctgagtggaccaacagcagcacccacgaggatttgttttgagtatggagctgttgcgggtttgctcctttttcttgctttgcgtgctcagtttttacagactgtaaaggagatgtgttgtttgtgaagatggagcagagtcaaatctgtgcttctaactgagatgagagtgtattaatcacgtatcgcagggctccagctgttttagaagccacatcatgttaaacattaactggtttggattaaaagaacattaatattataatacacatatcttagtggtaaacagcnnnnnnnnnnnnnaaggtcagattgcctcaggtttagaaagaggctgagaaatcaaatcttgaacacaatcaacttacatattttaaaggaatctgcctcaaatgagaaaatatgctagttatctagatagaggaaagagatatttacttttttaaaaattaaaatagttatgaaatctggcagaaaaggtaaagcctagaagaaactatgaaagctattctcatgttaccaaattctatctgcgcatatgtttttgtataacatttcggtgacagtgggagtcggttccctttcccaacctgcagagactatcttccaatacagaatctgtctatttatgcttgtgtttacaaactgtatttgttgggtttgg

SEQ ID NO: 240771 - DNA, 1245 bp, Homo Sapiens
  misc_feature (194)..(204): n is a, c, g, or t
  misc_feature (866)..(878): n is a, c, g, or t
tttcttctaggctttaccttttctgccagatttcataactatttttaattttaaaaaagtaaatatctctttcctctatctagataactagcatattttctcatttgaggcagattcctttaaaatatgtaagttgattgtgttcaagatttgatttctcagcctctttctaaacctgaggcaatctgaccctnnnnnnnnnnngctgtttaccactaagatatgtgtattataatattaatgttcttttaatccaaaccagttaatgtttaacatgatgtggcttctaaaacagctggagccctgcgatacgtgattaatacactctcatctcagttagaagcacagatttgactctgctccatcttcacaaacaacacatctcctttacagtctgtaaaaactgagcacgcaaagcaagaaaaaggagcaaacccgcaacagctccatactcaaaacaaatcctcgtgggttctgctgttggtccactcagaaacagaaacaaccagagagaaagagaagaaaaactttatgcgcccgaggtgtaaactgtagttaaagtgtccccactcgagaaaacaggaggcacaatcgaaagtgctttttacacacgtgtgcgcgcacacgcacaactaaaaacgtgattctgatttgttggaaattcttccaacaggaagaatcactgtaagttgttactactaaattaacttggttttatttattttcttttctagccaatactgatgcaagaaaatatttcaattctcaacctgattaatgtactgcagagtctgttccactggggaaaaaatgcagagaggcattgcttcaaagccttgatccagattaaagtgatagagaccttnnnnnnnnnnnnnctgaaaacatgtattggtgatcactgtttcccttaaaatatacttcaagaaatgcaaaggaaaccatagaatttaaaaggaaaataaaaagtgctctcaggggatctgagaaaacagcaccaaatatattatttaaaaaattaaatattatttacaaaagtatattttacaagcaactgtttcttttatatatatccacttgaaaatctctttataaagggtcatctcttttgcacacactgatccaccagtaaaaatgcactctagcctatcctcgtgaactcaggaagaacactcagtcaggttcagctgacagcttgtgggtatcgagtttggctgtgtttggttcatgtcaaatcaatcccaa

SEQ ID NO: 240772 - DNA, 557 bp, Homo Sapiens
aaaagcacttccccttcctcctactcctcgcccccgccaaccccatgtaaagagcaaacacaggaaatgttattaaaccacatcaagtttctccatctgtaaaaacatatgaattcttccacaagtactttatacatagtagtaaagcactaaatatttaataaagtaaacctattttgtacaaatattttttgtcaataaaataacagtttttgcagaagcacttaaaaatctctgactggtattttggacttaagagtaaaacaaaaaggaaccatcaggctatgatcctcagttgtgtgtaaaattagggctttcaatctacacacaactgagcatcacagcctgatgagaattctgactctacctgcagacattgtacagtaagaaacccctgccctcaccatcattttcctcagcctaaagcaggtcaaacaggtgaaaggacattcccctggctgccctaaaaaaattaagagttgccaaaaagtgatgagaagtcaaacagaaccaccaaaataattttaggtatttctttaccaacttttttgtacaaa

SEQ ID NO: 240773 - DNA, 976 bp, Homo Sapiens
tttgtacaaaaaagttgggaagtcttttccgctttaagatgggtcaatgcccgaggactcttggagtttgagcatcagagggcccctagggtctctttctcggataaggttaatctcacgcttggtagcatatgggataagatcaagaaccttttctctaggcaaggatcaaaagacccagctgagggcgatggggcccagcctgaggaaacacccagggatggcgacaagccagaggagactcaggggaaggcagagaaagatgagccaggagcctgggaggagacattcaaaactcactctgacagcaagccgtatggccccatgtctgtgggtttggacttctctctgccaggcatggagcatgtctatgggatccctgagcatgcagacaacctgaggctgaaggtcactgagggtggggagccatatcgcctctacaatttggatgtgttccagtatgagctgtacaacccaatggccttgtatgggtctgtgcctgtgctcctggcacacaaccctcatcgcgacttgggcatcttctggctcaatgctgcagagacctgggttgatatatcttccaacactgccgggaagaccctgtttgggaagatgatggactacctgcagggctctggggagaccccacagacagatgttcgctggatgtcagagactggcatcattgacgtcttcctgctgctggggccctccatctctgatgttttccggcaatatgctagtctcacaggaacccaggcgttgcccccactcttctccctcggctaccaccagagccgttggaactaccgggacgaggctgatgtgctggaagtggatcagggctttgatgatcacaacctgccctgtgatgtcatctggctagacattgaacatgctgatggcaagcggtatttcacctgggaccccagtcgcttccctcagctcgcaccatgcttgagcgcttggcttctaa

SEQ ID NO: 240774 - DNA, 1193 bp, Homo Sapiens
ttggcaagatggcggcgggagcggcagtggcggcgcgtaggaggcggtcttgggcgtctttggtactggcttttttaggggtctgcctggggattacccttgctgtggatagaagcaactttaagacctgtgaagagagttctttctgcaagcgacagagaagcatacggccaggcctctctccataccgagccttgctggactctctacagcttggtcctgattccctcacggtccatctgatccatgaggtcaccaaggtgttgctggtgctagagcttcaggggcttcaaaagaacatgactcggttcaggattgatgagctggagcctcggcgaccccgataccgtgtaccagatgttttggtggctgatccaccaatagcccggctttctgtctctggtcgtgatgagaacagtgtggagttaaccatggctgagggaccctacaagatcatcttgacagcacggccattccgccttgacctactagaggaccgaagtcttttgcttagtgtcaatgcccgaggactcttggagtttgagcatcagagggcccctagggtctctttctcggataaggttaatctcacgcttggtagcatatgggataagatcaagaaccttttctctaggcaaggatcaaaagacccagctgagggcgatggggcccagcctgaggaaacacccagggatggcgacaagccagaggagactcaggggaaggcagagaaagatgagccaggagcctgggaggagacattcaaaactcactctgacagcaagccgtatggccccatgtctgtgggtttggacttctctctgccaggcatggagcatgtctatgggatccctgagcatgcagacaacctgaggctgaaggtcactgagggtggggagccatatcgcctctacaatttggatgtgttccagtatgagctgtacaacccaatggccttgtatgggtctgtgcctgtgctcctggcacacaaccctcatcgcgacttgggcatcttctggctcaatgctgcagagacctgggttgatatatcttccaacactgccgggaagaccctgtttgggaagatgatggactacctgcagggctctggggagaccccacagacagatgttcgctggatgtcagagactggcatcattgacgtcttcctgctgctggggccctccatctct

SEQ ID NO: 240775 - DNA, 933 bp, Homo Sapiens
ttggcaagatggcggcggtagcggcagtggcggcgcgtaggaggcggtcttgggcgtctttggtactggcttttttaggggtctgcctggggattacccttgctgtggatagaagcaactttaagacctgtgaagagagttctttctgcaagcgacagagaagcatacggccaggcctctctccataccgagccttgctggactctctacagcttggtcctgattccctcacggtccatctgatccatgaggtcaccaaggtgttgctggtgctagagcttcaggggcttcaaaagaacatgactcggttcaggattgatgagctggagcctcggcgaccccgataccgtgtaccagatgttttggtggctgatccaccaatagcccggctttctgtctctggtcgtgatgagaacagtgtggagttaaccatggctgagggaccctacaagatcatcttgacagcacggccattccgccttgacctactagaggaccgaagtcttttgcttagtgtcaatgcccgaggactcttggagtttgagcatcagagggcccctagggtctcgcaaggatcaaaagacccagctgagggcgatggggcccagcctgaggaaacacccagggatggcgacaagccagaggagactcaggggaaggcagagaaagatgagccaggagcctgggaggagacattcaaaactcactctgacagcaagccgtatggccccatgtctgtgggtttggacttctctctgccaggcatggagcatgtctatgggatccctgagcatgcagacaacctgaggctgaaggtcactgagggtggggagccatatcgcctctacaatttggatgtgttccagtatgagctgtacaacccaatggccttgtatgggtctgtgcctgtgctcctggcacacaaccctcatc

SEQ ID NO: 240776 - DNA, 983 bp, Homo Sapiens
gtttctcctttgatcaaaacgtgtcacagctgggaaccaagaggaagtaaaaaaaatacccacaaatattccccgactccccattagtcctcccccaaccccccacccagggcttccagccaaccccgagcacacatgatcatctccccccaccctcaggcttctcctagcaataaatacaggtgaccatgattcactgaaaccacaactgatttctccatcttaagtgcccctcaaaggggacaagaagggggcaaaagaagtttaatgcgcatcccctaagaggtgtggaaacgtctttctgccgagggacagaggaggtagaactgcccctctaagaattgcagcagctctacaaggaatcggggagaggaaaagggtagaatgagagggaaaaggatgttctttagcaacctcactcctttgatccattcatcctgtccggggtaaggggtggtcccagtgtatcggtggggcataaaaaggggagtaaagcctggaggaagaaatgaaaggtgggagagcaatctggtgggagggaaggggaaaaggagccctaactcattgccctcatcttcttccaagaagtggcatcaacatacaagaggcatgaatggatagactctgggggagttcagggctcctaaataagggaaagagaaggggcgacaagggccctgtggtttcctggtgttcgtaagtgaatgtgctccagttagagcaacaggatgttgggggaatgaagggaaagagttggtatcaatggagtgggagaggtgaggagatcacaagaggaatttggagcccagggtcagccctctcatcctgcccaaatgttggcagaatctgggtcttagactagcataagtgaagtctggggagggccgaactccaaggcagaagaaagaatatctctcagcactaatgctccccttccctccccctaacccagggacatcccttgccaacttttttgtacaaag

SEQ ID NO: 240777 - DNA, 1171 bp, Homo Sapiens
ccaactttgtacaaaaagttgggttccagtatgagctgtacaacccaatggccttgtatgggtctgtgcctgtgctcctggcacacaaccctcatcgcgacttgggcatcttctggctcaatgctgcagagacctgggttgatatatcttccaacactgccgggaagaccctgtttgggaagatgatggactacctgcagggctctggggagaccccacagacagatgttcgctggatgtcagagactggcatcattgacgtcttcctgctgctggggccctccatctctgatgttttccggcaatatgctagtctcacaggaacccaggcgttgcccccactcttctccctcggctaccaccagagccgttggaactaccgggacgaggctgatgtgctggaagtggatcagggctttgatgatcacaacctgccctgtgatgtcatctggctagacattgaacatgctgatggcaagcggtatttcacctgggaccccagtcgcttccctcagccccgcaccatgcttgagcgcttggcttctaagaggcggaagctggtggccatcgtagacccccacatcaaggtggactccggctaccgagttcacgaggagctgcggaacctggggctgtatgttaaaacccgggatggctctgactatgagggctggtgctggccaggctcagctggttaccctgacttcactaatcccacgatgagggcctggtgggctaacatgttcagctatgacaattatgagggctcagctcccaacctctttgtctggaatgacatgaacgaaccatctgtgttcaatggtcctgaggtcaccatgctcaaggatgcccagcattatgggggctgggagcaccgggatgtgcataacatctatggcctttatgtgcacatggcgactgctgatgggctgagacagcgctctgggggcatggaacgcccctttgtcctggccagggccttcttcgctggctcccagcgctttggagccgtgtggacaggggacaacactgccgagtgggaccatttgaagatctctattcctatgtgtctcagcttggggctggtgggactttccttctgtggggcggatgtgggtggcttcttcaaaaacccagagccagagctgcttgtgcgctggtaccagatggg

SEQ ID NO: 240778 - DNA, 1312 bp, Homo Sapiens
  misc_feature (1136)..(1153): n is a, c, g, or t
ggagtagcatgtccggaaccccatcacttatcatgctccaaattttcatagatgaggggtttcactgcctgaaaccagaccttaatccccctctaatgacctactaaattcctagtcccccttcctaaactcaagggtcgcttcccgtatagtttttgctgggcctctcttctccggccctactgaggctctcctcttcagtctttctcctccttccacagcatcccattcacagtttctacttgttggattcctaaacatctgtatatgtcttctacaaatcaatgggctcttgagttcagggagtatgttgtgtccagttctgtatcttcagcacttggcataatgcgtggctcataatgacattggctagatggccaatattttgatttataaattatgggtcacaggccagccaaacttgaatgtgatttattctgtgaaatcatctccaacccaaccatccctcctgtgtgtttccagacactctgaatgtatttggggttagttatgtacacatctgtcttccctgctaggctgtgagatccagaagggcagggagcacctatcacacaagctggtacccccacctctaagcactgtgcctggcttacaccacctgctcaatcagtattttctcagtgttgacaaaaatgactacatgaaggatggctttctttaatctcatgttcattccacgttgctacagtggcgatacaaaaacgaataaaacacatttcttgctttgagaaggatacagtctaagaatattagaaaacatgaatacagcttttaagacagaacatcatgttgtgtctgcaatctctagcccctaatatgtactaaactttaaatattttgtgatataaagacaaaacaaaagtaatattttactaggacattatcctaatacataatttctcttgctctatgagtatttttttaagccacccagtaaatgtgtagcaacaaagaaccatttggaagttattccctgtcttgcagactgagtcagatcatggctaactgatggttggtcctctctcatgtttcttgttttgtcttgtgtttagggttatttctttttctttgcttttcaccattactatgaattttgaaattccttccattttgcnnnnnnnnnnnnnnnnnngctttcctaattattgttcattataactgtaatcttttaaaaatgaaagagtccaaaattcatctaaatgtctgttaaaatgaacagaagttgacttaagatacagtgtagtttttagtctacatatttaattttcagtgtattcccagagaaatccaa

SEQ ID NO: 240779 - DNA, 1248 bp, Homo Sapiens
ttggatttgggtcaaagtgtctgaagcagacagcagtaatgcagactgggtcacgaagcagctcaatgaaatcaattatgaagaccacaagttgaagtcagggactaacaccaagaaggccctccaggcagtgtacagcatgatgagctggccagatgacgtccctcctgaaggctggaaccgcacccgccatgtcatcatcctcatgactgatggtcagaagggacctctctcctgtcccagcctccccaccttctcagaccagcatgtggcccttaagtccacttgtaacactatacccatggttggggccctgaatgtgactcatagctggctgttcatctctcctgtgacccttcataaggaattcttcctaagccctgtgatcaactatctctaacccttcctcaacttgctcaccctgccatgtgtatccctgcctttagccagtttatcttccttatctcctaccctcatggtcctgtctcttctgcaggattgcacaacatgggcggggacccaattactgtcattgatgagatccgggacttgctatacattggcaaggatcgcaaaaacccaagggaggattatctgggtgagtaacctgcctaggacccagcaccccacttcctcagggcttggaccctcatccttcctttttatccctcagatgtctatgtgtttggggtcgggcctttggtgaaccaagtgaacatcaatgctttggcttccaagaaagacaatgagcaacatgtgttcaaagtcaaggatatggaaaacctggaagatgttttctaccaaatgatcgatgaaagccagtctctgagtctctgtggcatggtttgggaacacaggaagggtaccgattaccacaagcaaccatggcaggccaagatctcagtcattcgcccttcaaagggacacgagagctgtatgggggctgtggtgtctgagtactttgtgctgacagcagcacattgtttcactgtggatgacaaggaacactcaatcaaggtcagcgtaggaggggagaagcgggacctggagatagaagtagtcctatttcaccccaactacaacattaatgggaaaaaagaagcaggaattcctgaattttatgactatgacgttgccctgatcaagctcaagaataagctgaaatatggccagactatcagcccatttgtctcccctgcaccgagggaacaactcgagctttgacgcttcctccaactaccacttgcc

SEQ ID NO: 240780 - DNA, 1761 bp, Homo Sapiens
  misc_feature (311)..(340): n is a, c, g, or t
ggcccagtcacacagagtcaccagcaataggatacacagaaacagaaaagggcacggcacatgacaacttcgcggtcataactcccaggaaaaggaaatgctccctgaacccccagccctgaaatccccagtaaggaaacaggacccgcggcatctcacggaccaggcaaacatccaggcctaactgtgccctggctgtgccttgggcccaggtgagcccatgagagcactacgtcagcaaatggggggagcagtatttcccttggttttaagaatgaaccacatacttgacatgaatgagaaggtaaccnnnnnnnnnnnnnnnnnnnnnnnnnnnnnncaacaagaaaaggtagagtttggttttaagagtaaaataacacagaagttaccactcagggcatttgtctgatttcttttaaggcactttggaaaagtcaggatctgcggacagaaagagaggctttcattcttcttatttcccacaactccctctcaatgcagtcatttctagttttaataatatccttggtatagagtggggaactgacagagaaatactttttgcatagtccagctgcttctgcaatggaaaataatttttaaccaatacaaaggcttctggaaaaagaaccaagttagcatctgagatgcgcaaagcagtaaaggcacagataagactggggccaggcaccagctcagcctccacactgagggctggtacccaggagggcagtggtttggggtccgccacgagcacaaggctcaaccctgggattaggcagctgagtcttggaacctgagcccaggctggacctggcaaaggcgctcagtggtaggagtgccttgtgtcatctcatcccaggtggctcaatagctcccaacagaggtgggtttgtgacagacagccctgtgggtgggagcctcaactggggtgggagcacctgtgaaaacctgaggtggaacaggaggctttaggcaccgaagttcttgggagggagttggggtgtgggttcggctgaacttctttctagatcactaattaaaaggcacattcatgctggggaatggatagtctgtttgaccctgagtgccacagtcaagttttaggggacaggcaagaggcaaaggaacaaaaagggagacgaaggaaggaatgagaaaggcaggggaaaagaggaaggaggaagaactggtaacaaagggtgggccacggagtgtggctagcagagcctctgagggaggtggcccccaccagaacagaggctccctctgcctggggaggtgcaaagggctggtaaacaacctgactgctgttatttacaaccccccagcctaggggcctgaggggtcagtctaaggaggctgaggctccctccgccctgcccacctggggagggttggggaagtggagagttctgcacagtaggtgcagaggcttctgtctcccaggtatcctccccgaggtctggcaggataatgctgaccgggaggccttacctgccaaggggccagagggtgattttgctcttgagaaaacctggcctgccagctaaatcataggcctatttgtggccactacagcatatatttatttttctccctaaaaaatgctcaatacccctccccatatttaaaacaccacaataaaaatacataggaaattcaagtttacatagcatgccaagaaaaataaattgtcatgacttaacattaaacagctatgcaaatttggatcaacccaacttttttgtacaaagt

SEQ ID NO: 240781 - DNA, 547 bp, Homo Sapiens
  misc_feature (297)..(325): n is a, c, g, or t
gagtcaccagcaataggttacacagaaacagaaaaggccagggcacatgacaacttggcggtcttaactcccaggaaaaggaaatgctccttgaacccccagccatgaaatccccagtaaggaaacaggacccgcggcatttcacggaccaggcaaacatccaggcctaactgtgccctggctgtgccttgggcccaggtgagcccatgagagcactaggtcagcaaatggggggagcagtatttctcttggttttaagaatgaaccacatacttgacatgaatgagaaggtaaccnnnnnnnnnnnnnnnnnnnnnnnnnnnnncaacaagaaaaggtagagtttggttttaagagtaaaataacacagaagttaccactcagggcatttgtctgatttcttttaaggcactttggaaaagtcaggatctgcggacagaaagagaggctttcattcttcttatttcccacaactccctctcaatgcagtcatttctagttttaataatatccttggtatagagtgggccaacttttttgtacaaag

SEQ ID NO: 240782 - DNA, 813 bp, Homo Sapiens
  misc_feature (760)..(769): n is a, c, g, or t
ggtagagtttggttttaagagtaaaataacacagaagttaccactcagtcaagttttaggggacaggcaagaggcaaaggaacaaaaagggagacgaaggaaggaatgagaaaggcaggggaaaagaggaaggaggaagaactggtaacaaagggtgggccacggagtgtggctagcagagcctctgagggaggtggcccccaccagaacagaggctccctctgcctggggaggtgcaaagggctggtaaacaacctgactgctgttatttacaaccccccagcctaggggcctgaggggtcagtctaaggaggctgaggctccctccgccctgcccacctggggagggttggggaagtggagagttctgcacagtaggtgcagaggcttctgtctcccaggtatcctccccgaggtctggcaggataatgctgaccgggaggccttacctgccaaggggccagagggtgattttgctcttgagaaaacctggcctgccagctaaatcataggcctatttgtggccactacagcatatatttatttttctccctaaaaaatgctcaatacccctccccatatttaaaacaccacaataaaaatacataggaaattcaagtttacatagcatgccaagaaaaataaattgtcatgacttaacattaaacagctatgcaaatttggatcaacacaaaatcaagctagatcataattagaactcgatctgttctttctttaaaatactacaaactactatttnnnnnnnnnncacaacaacgtttacattcagccaacttttttgtacaaagttgg

SEQ ID NO: 240783 - DNA, 2620 bp, Homo Sapiens
  misc_feature (2273)..(2281): n is a, c, g, or t
  misc_feature (2493)..(2502): n is a, c, g, or t
ggcagttaagagcttgacaataaacttgagtaagggtcttacacaatatcaaagtatattagttctttgaaatgaaaaaggtattttttttcttcctttaacattgagatgtgtgagatgtcaggatttttgtagcattcttagaaacaacatccactgtgtgggatactttttttccttctggagtttcaaaccagtctgactctttggttgtgcctatacaatgaaaagtctacaaatgaaatgagagaagtcaggatattttcctttgttaaactaagtagctgaataattagaactacctagataaaagactcaaaatgtttttgttatctggttgcctggttaggacatagccaacatttcaatggaatgtagtatcttgtacaactgcatataattttttaaaaaataaacaatgactttgtttctttagatacatcaaatgctgcttgagtggccaaagggaaaatgccaactctttgaaatgtagtatctgtagcacttttcttctttcagtagtttttcatgccccaaatacaaactttaaggagtaacatctatcctcaaaacccaaaaatacccatttgttttgaggttcacagtccaccagtataagttttaaactgcgccaaaaggcttaggtagggttcagcagtcaggcatgacagatgcataattctaaccaacagtgcacatgtgacatgcttcctactgaaattaaactgccaaataaaaaggaaggattgtgccctttttaataacaaagaatgcagtcgttagaattcttcagatttggaattccagcagcactctagtgttttcttcttgatgtgtgacaagaatgaataatatcagaaataaaaataaacctcatctaaacaagcagttctttgactttataacgttcaacatcaaattctcaaaatactcaagaccagtaaattatcagagctgaggaaataacatgctgaggacagaatcaatttttaaacattttgattgattttaacctgctagcattagttttgttcatttctgtttagacattgccacttcaactgactactagggaccatggtatttcatattcatataaatatctgaatttgacctcataagaagtcccttgggtctataatacttttattcttgtataatctgaaacaaatcctttccttttaaaaatcaaacagaccacgttatacacacagttgactatttacaaagcacccaattaaatcctacttaattctttcactctaaaaattccatctaacttgtgtgtaaagtacccataacattaaatgcataatgttcacaaaccctgatagtcctatctaacctagaaaatattaccttccttaaggagaaaaaagagccttaaaagaaaaatagagtaaggttttaaagaaatgagaccagaaatcacagtacaagacagagaaatctactttaatattcacatgtaaaagttacacatcacaagagattggacagtagcttagcgtaacatagctatagtgaaaatcatttttataaaaaaataatctagatgcggtcatcagaatttttggtctgcttaagttaatgtttgaagatcgacttttatccctgcttgaaggatttgccattatgccttttttttctcccactgttgcctattaattctttggaggaaggaaagcagaaagtgttcatttccaagagtttgtcctttggtagcaagcagagaacatttttttcatttccatgatttaaataatctgtacagacatgaaacttagtgacattaagctttagtgtaaaatgaagagtaataagcaattttttttcactttgataaaacagcagatttcgtaaactccttaaggatccaagcatttcctcatcccatatgcaaaatcattcagaatccattttgacctcagttgaaaaacaaaaacaaacacttactctgtatatattacactataaaaccctgtacttaaaaactgataaggtgtattttcaacatgtatgcttcaaatacaaagatttcaatctacatttaaaaaaacacatttgaatggactcagaacaagtttaatttgtgattaaacatctcatgcaatcatgcaagaccactagctataactgttacttccgagtctatactgggcaaaacaaaagcaaattaagagccaggccaaacagaaaagacattcaagatatcaagagctctgtaattgagctgaaaaatgattttccaaaagaaatattcccatagattnnnnnnnnncacacacataatatttacaaaaaaatatttaattaaaaatatcttataattacagtatctattaaagcatatactttctcacacttatagaacatctctatatatacatggtatgaaatgtcactcatttatctatacaatatgtaacattcttgcagagaaaagaaagttctctgccccgttataatcatctattttaaacaatagatgtnnnnnnnnnntatctacaatgctctggtagattagtaaagcttcaaaacaaaaattgagctccttggtcacaaagtaggcttctaaagtcggatctactcttgatcttctatttatcagtcctgccaa

SEQ ID NO: 240784 - DNA, 981 bp, Homo Sapiens
  misc_feature (372)..(435): n is a, c, g, or t
  misc_feature (593)..(602): n is a, c, g, or t
caaaatcattcagaatccattttgacctcagttgaaaaacaaaaacaaacacttactctgtatatattacactataaaaccctgtacttaaaaactgataaggtgtattttcaacatgtatgcttcaaatacaaagatttcaatctacatttaaaaaaacacatttgaatggactcagaacaagtttaatttgtgattaaacatctcatgcaatcatgcaagaccactagctataactgttacttccgagtctatactgggcaaaacaaaagcaaattaagagccaggccaaacagaaaagacattcaagatatcaagagctctgtaattgagctgaaaaatgattttccaaaagaaatattcccatagatnnnnnnnnnnnnnnnnnnnnnnnnnnnnnnnnnnnnnnnnnnnnnnnnnnnnnnnnnnnnnnnngtatctattaaagcatatactttctcacacttatagaacatctctatatatacatggtatgaaatgtcactcatttatctatacaatatgtaacattcttgcagagaaaagaaagttctctgccccgttataatcatctattttaaacaatagatgtnnnnnnnnnntatctacaatgctctggtagattagtaaagcttcaaaacaaaaattgagctccttggtcacaaagtaggcttctaaagtcggatctactcttgatcttctatttatcagtcctgtcacacttaagcttaaaagtttaactgcacctccaaaaaacacagaaatgtacaattcacagcagttataaatgaagagacaaaagagaatacgtatgtagaatgtttatgaacgtgcaaagaaagaatgaaagttgtatttttctttcctctctctctcttggaatgacgaatgaaaacgtttctaggttggccgatgttttttcctttcctccggtggctttttttctttataaggtctgctcttccccaacttttttgtaca

SEQ ID NO: 240785 - DNA, 797 bp, Homo Sapiens
  misc_feature (113)..(141): n is a, c, g, or t
ccctcattccagaacaccaatacctctttcaaacatgacagtggagtgaggatcagaaggatcagccccttcccgtttcctggcacagagggaaggacagttacacttagaannnnnnnnnnnnnnnnnnnnnnnnnnnnngtctataaaaatttatcacacttgatcaggactatccccctaccctttcacttgaccccaagggaatagggtcctgccctgggcccattccctgggtcttgctctcttgttgcctctctggccctgagcctgatcagtgtgagacagaactcagcattactgtccaccatgccctgcagcgaacagaccaggtgctgaagagtgatgcctatgggctctgacacccacaaatcctcgtggataacgggaagcccctcccaccccacaagtccctggagcctgagccagagtcagatcctgtactgcagccactcgaatcgccaaatcatttgcgcctgccaaagatggacttcttgccagggttcttgtcgcccacacttaaaccaatgaggagccgggctttctcctcctcttcctgctgttgcatgttcaggtccgatttagtttctagctttccccggacctcagagcctgttgcagacttcagccttagcttctctttgattacctggcagattggagaggagtaaaagaaaatgtaaatattagtgggcaggcagaataaatcaaaatgaaccaagacaataaagatttattaaacacatccaaggcacaatggggcaattcacatacaatggtctctgctttcaagccaa

SEQ ID NO: 240786 - DNA, 1245 bp, Homo Sapiens
  misc_feature (952)..(971): n is a, c, g, or t
ccaaatttgtacaagaaaaggtgggggaattgttttctttattcatgttacttttctgaggcttccaactgttttattgctaaactatcatgatacaagccgtataaaaatactttacatataggaaaaataaactacattaaactggagattaaaaacatttgcataggaatgtgatgtattcaaacgcctttaacagtcaggattttataaacctaagcctgccagcaccaccatgttggagagacctgtttgttggagaattggttttctctcctctgagggctgtagaggccagaggggtgagtgaggttctttgacaagatgtccaggatgctaagcttgtcccaacagccatagcctcggtctgctcaggccaatcagaatgctgtgagcacctgctctaatggaaacaacatcatttgcatccattccattcaaagcttgaactcagcagggagtttattctggtcagccaacagctgcataaaggtagaatgttaataaccctttcacttccagctcccaggaccctgatggctcagggagcaactctctgttatcaaccaccagaaaagtttgtttttaaacagactgagttaaacagtgatgttggctgtaagtcaaggcactcacaaaagctgagggaaatggatgttatgatcacaattttataggatgctgctttttcttaagcataattggaatgcaggaaaatacttgctatgcaattggctgctttggttccacgaaacgtaatgccctagcctcgagcctaggagacccaaggttaagatgcgctgggtcaccgagcaccttgcctccgggaaacaagttcgggaaaggttagcccagcttgtcaagaacgtcacaactccatccatgcctcttgtaaacttgaaatgaaaacattctttcaattctgagcaatagaaagcacttggaaaggtcnnnnnnnnnnnnnnnnnnnngacatgataaattcagcctcactgtagtccagagtgagaattagaacataccaacttccaatctgcctaaatgtgacagcctctgcccaagactggctcactgaggcgtcttggctactggatgtaaacaaaaaatgcaatatccgtgcctcccagttctttgaaggaatcaattcatccttggttatatctatgctggaaaactgtgggtgtcctttggataaagcatacaggagttatctaccaggatttagccaacttttttgtacaaagt

SEQ ID NO: 240787 - DNA, 1008 bp, Homo Sapiens
  misc_feature (223)..(241): n is a, c, g, or t
  misc_feature (635)..(667): n is a, c, g, or t
  misc_feature (771)..(808): n is a, c, g, or t
acaaaaaagttggatcaaagtgaccagtgtttggctactgcttctatttgaaatggtgctgtgttttggttgtggtctgaagctttgaagcgctacttatcatctcctttcttccatggagctctcacgattcaaacatgacagatttggtaaaatgctggttaggttgagtcttccttgcccccactcagtcatctttgtatgaatcccatgatttgggggnnnnnnnnnnnnnnnnnnnataccagtttttagctggtgtttatgaaaaacagtgagtacctagaactgtgccactaattaaaggaaatcctaagaaggtgcatttctttacagagctgtgtcatgccatcctttgggccctctgctggaaaagtaaaatcaagtctcaaataatgcctttttaattgtatcctctagtattataaatataggacagtactgtatcatacctctgtgaatgtaaaatatcttgtacctgctttatgatacttagtagtgaccgtgctttatcagagctgtttttaatgatgttattctagaatgttttctttccagatgatgattcagaagctaattttaaaaaacggtgccaggtaccacaacagtaacagaactttgcaattttctggggnnnnnnnnnnnnnnnnnnnnnnnnnnnnnnnnnaaatggagtgtgctggatgtctctataattttattcagatgactgcagaacctggaaaagctgttgctgctattgatgcataacatactgctattggtcttttnnnnnnnnnnnnnnnnnnnnnnnnnnnnnnnnnnnnnnatttgaatttttggaaactttacctgtgctgtcaactttggaaaaagtatcccggtttactgtgttgagttggcattgtacagaaattaacagccatattggtctagaaacgttaaacttaatttttttccatttgtacaggggtaacgcactgtattaaatatgtaaggtctgatctacatgggtttgattaccaaaac

SEQ ID NO: 240788 - DNA, 1055 bp, Homo Sapiens
  misc_feature (246)..(264): n is a, c, g, or t
  misc_feature (658)..(690): n is a, c, g, or t
  misc_feature (794)..(831): n is a, c, g, or t
ttgggataaatattgatgtcagcatccttgaaccatatcaaagtgagcagtgtttggctactgcttctatttgaaatggtgctgtgttttggttgtggtctgaagctttgaagcgctacttagcatctcctttcttccatggagctctcacgattcaaacatgacagatttggtaaaatgctggttaggttgagtcttccttgcccccactcagtcatctttgtatgaatcccatgatttgggggnnnnnnnnnnnnnnnnnnnataccagtttttagctggtgtttatgaagaacagtgagtacctagaactgtgccactaattaaaggaaatcctaagaaggtgcatttctttacagagctgtgtcatgccatcctttgggccctctgctggaaaagtagaatcaagtctcaaataatgcctttttaattgtatcctctagtattatagatataggacagtactgtatcatacctctgtgaatgtaaaatatcttgtacctgctttatgatacgtagtagtgaccgtgctttatcagagctgtttttaatgatgttattctagaatgttttctttccagatgatgattcagaagctaattttaaaaaacggtgccaggtaccacaacagtaacagaactttgcaattttctggggnnnnnnnnnnnnnnnnnnnnnnnnnnnnnnnnnaaatggagtgtgctggatgtctctataattttattcagatgactgcagaacctggaaaagctgttgctgctattgatgcataacatactgctattggtcttttnnnnnnnnnnnnnnnnnnnnnnnnnnnnnnnnnnnnnnatttgaatttttggaaactttagctgtgctgtcaactttggaaaaagtatcccggtttactgtgttgagttggcattgtacagaaattaacagccatattggtctagaaacgttaaacttaatttttttccatttgtacaggggtaacgcactgtattaaatatgtaaggtcttatctacatgggtttgattacagaaactaataaagtattctctaaataatg

SEQ ID NO: 240789 - DNA, 1168 bp, Homo Sapiens
  misc_feature (356)..(374): n is a, c, g, or t
  misc_feature (768)..(800): n is a, c, g, or t
  misc_feature (904)..(941): n is a, c, g, or t
ttgggccttattttttattatggcagcttgctatttttataacatggtgattgagttgaacacaatcaaagtacagtagtaactgatgtccccttcttcctggatgaatgagcagataaatattgatgtcagcatccttgaaccatatcaaagtgagcagtgtttggctactgcttctatttgaaatggtgctgtgttttggttgtggtctgaagctttgaagcgctacttagcatctcctttcttccatggagctctcacgattcaaacatgacagatttggtaaaatgctggttaggttgagtcttccttgcccccactcagtcatctttgtatgaatcccatgatttgggggnnnnnnnnnnnnnnnnnnnataccagtttttagctggtgtttatgaagaacagtgagtacctagaactgtgccactaattaaaggaaatcctaagaaggtgcatttctttacagagctgtgtcatgccatcctttgggccctctgctggaaaagtagaatcaagtctcaaataatgcctttttaattgtatcctctagtattatagatataggacagtactgtatcatacctctgtgaatgtaaaatatcttgtacctgctttatgatacgtagtagtgaccgtgctttatcagagctgtttttaatgatgttattctagaatgttttctttccagatgatgattcagaagctaattttaaaaaacggtgccaggtaccacaacagtaacagaactttgcaattttctggggnnnnnnnnnnnnnnnnnnnnnnnnnnnnnnnnnaaatggagtgtgctggatgtctctataattttattcagatgactgcagaacctggaaaagctgttgctgctattgatgcataacatactgctattggtcttttnnnnnnnnnnnnnnnnnnnnnnnnnnnnnnnnnnnnnnatttgaatttttggaaactttagctgtgctgtcaactttggaaaaagtatcccggtttactgtgttgagttggcattgtacagaaattaacagccatattggtctagaaacgttaaacttaatttttttccatttgtacaggggtaacgcactgtattaaatatgtaaggtcttatctacatgggtttgattacagaaactaataaagtattctctaaataatgaaa

SEQ ID NO: 240790 - DNA, 2064 bp, Homo Sapiens
  misc_feature (670)..(698): n is a, c, g, or t
ggacagcctggataacatggcaagccctcatctcataaaataacataaaataaaaaatttctgtgtttatcaaactttctaaatttattttttaagctcataaggcatagaaaaatatttgactgtgaaagatgtattcaaacccacccacttataaaataataatttcctttctcaatttttcatttccctcaaaaggaagacataaaggaaaaaagaaacacagtaaaagccatgattttttgaagccaactgaaagacaggtgtaaaagaaggaaaataaggtacctcatagtctgagtattctttcagaacagtagtcctgtttgattcagccttgatttcttttaaagaaatggagagggcatgttcatttttatatccctttaattgtgtatgttaatacacattttcaaatgacatataaatataagcaaatgaattaataactaagtattgatgtccttatattagatctggtttcttttacagtatagtcaagtataattatgccaaattcagccccttcttcccaaaggaaataaaatgctacaattcaggagaatttcatccctaatgatctgaattaaaatgaaattttaaaaatgtgtcaagaacaacgggaagattcataaagtgtttaaacacttgaattttgaatcacttctcnnnnnnnnnnnnnnnnnnnnnnnnnnnnngatacctatgtgacatacttattgttaattaaagacaatcaagaggaaaccaaacagagtaaatttctagggggttggaaggagtggactgggggattttgctctaccttgacacacgttgtaattccaaatgtacctttcaggcatagagatgtacattaatttatatatgtacaatttcagaatttaaaaaatgacagattatctggctaatacatggtaaggaaactagaattttaaagtaaatatctaagaaggcatttgttgctgtatatataagcaaaacagcgtaactttatggaacctgcattttaaaaagcaaatctcaaaatttaatgatctgtcaggttcttttttaaaatcttgggcatgggtaaagcagaatcgctgaagtgattacctgtagttaatctgtagctcagctgagctacagggctgtttacttgtaagtaacaagtgagaaatgaaaactaagttatctcattgcttacatagttatgagccaagactttgcaaagttgtcttatggagtcagagttgataacgtaagtacgttttctggatataggaactatcgtggaccatgaagaactgagtgtcagtttcatgtaacgaccgtctattcaataatctgctagaggttgataacaattgatcctactcttgagtgcttcctgtgaactgggcactggaggaacacagtgtagcaagttgatggttctgagcttgtgaagatttcattgtgaagatgtgcctcgggaggaaaagcagaaataaataaaaaggtacacattaaacaaaaatcctataaaaagaaaatttaaagtattattaattattacatcgttttcctactttgttacaccaccacctaccacctgagttctttttctgtactctttccatgtgcaccacaaaaacttatcctccagtctatggaaaatctaatatttatacatatttatctagtacattgcaggtgccttatgccctctttagtgccatgcttaatgaaagataagacatagatttagcatccatttgggtttatattctattgcaataaatatattctcatagattagcatgtattgtgactgtactggcaataattaaatgcataatttattaaacagctgacatgtattaattttcctgagctgtaacatctctccataatatactgtgctatactttcctttggctgtgaaaattatttcatacattttatcaaaatctataaaacagaaatttctggctttttttgtgagtgtcatctttcccaaagaaatctctatcacatagatatttctccaccaaagaaacatatatagccaagtcctaaacccaacttttttgtacaaag

SEQ ID NO: 240791 - DNA, 994 bp, Homo Sapiens
aaaattgttcacgtttcaagatggcaagagcagagcactaaactaagtctagggcccgactgagcacagcacacccacgaagccagcttgggtgggagatcagaggagggagccacaaagcgggggggagcagcctaacctgacaatgtttcgcatgagtagcatgaacgcatttttggctgagacacagaaattcttccccgtagatggcgatcatgatgtatgcattgcggtttaggaacttgataaatttttccagacaccagaggcagcacttgaaacagcacatgatgcagcgggctacagggttctgcactcctctgagcttgtggtcaatatactccaagatgacccgggctatctgcacaagggtcaggatgagggctccaaatgccaatgacccagtgtggtaacggagtgtgcggatgaaggcagagattaaggggaaggtagggatgtcctggggcttgtggaaggcccagtagaaggaggcaaaggctccagcgaggacgcattggcccagggccagtacccagttaagggtccagaagagccccaggaccccatagatttgcagattgaagacagaacgttggattaggcctttggatgagtagccctggaagacgcacatcagccctgggcacgaggagttcacaaggtgggcctgggagggtagacggggatagagtaggctcaggcatcgggggcctcagtatggagcctgggcgtcccattcccagtagctcctgcccctcccagagttgacaggtgggaagtagcttctctggactgcgggaatcaagttctgtcggagagttccatctccaggctcaaactcagtttggtctgcctatagcataagcataatcagctccctcagtctcaatcagaggggaaggcactcactcagcattcccattccagagcagcctctgcaacgtctaccaaaaccctttctggcaaattgaacaggctgggtatttgatgccaa

SEQ ID NO: 240792 - DNA, 2096 bp, Homo Sapiens
  misc_feature (129)..(153): n is a, c, g, or t
  misc_feature (386)..(395): n is a, c, g, or t
gcatgcaaattctccacgtaaaaggtcttttcacttttaatttctgttacccagctctgaagtcactacttgggcttatcatggtccacagacaaggaggggagcaaatgaccaggactggtcaagatnnnnnnnnnnnnnnnnnnnnnnnnngaatggcacagcagaaggaaacacaattctggaagtgcaagccttcaagaagcagcatattatgataaacccctcctacagaaaggtatcatttttatcactgataccacaggataaattatatattacgccatcttcaagtaacagctgaggcaacagaataaatgcagaggcattacaatgaatcccacttaatataaagaactatacagaccaacacttctctacaaaannnnnnnnnncctcattgccagttaaatacagagttttactttcatagcttaacaatgaagggtcatacactgaagccaatacatatacctagcatttcagtctaagcttgtccacgtacatagctgaagtcaattacaaggtttggcctagaaatgctaggggaacttctttgtagtttttacaggtattaaacttcatcttgcacactgaagtcatcatacatacagggcaaaatcagagcttttatatttgcgtttattcttcatttaactttttataacactactatagtttattaaaacaaaaacaagagcaagtagtgagcatattatgattacagtccttcactcattcactactgcacattaaatgccagcagtgagtgttattcactggcccattaagaggtctgacactgaacaccacctctgggatgatgttcatcatcctcatatgcttctccattgtagtggcgccgtctttcctgatttggatcaaagtccaccagttctacttggtccatctcatcagtctcttccacttccttcctctcgggtaggagtttttccagcaaagacagtttatcaggagagagaaagccattctcaggaaagtttaccttaaattcgatgattaggcgacccttttcatatggtctacgataaattggcatgccttcatttagtacacacttgatatctccatgcttgacaatctgacctggatgagaggtgatgacgatggttcggttgtcaagagtagatattggcttctggaagccacacagtgcttcaacgagctgtatgtccatacacatgaaaaggtcttctcctcgtcgagtaaaaacagcatggtccttctgatctaacacaatgataatatcgcctggctccagtcctggttcttggtctccttcaccatggaatgttatcttctggccatctttcatgcctttgtcaatatgaacttctaaaattttcttctctcgaactatcttccttccgttgcagcttttacatctatctttaggactgatccgctccccatggccctggcactccatgcacacagactgaatttgctgaaccattccaggtcctatctgatgaattcttatttgcattccagtacctcggcaattgggacagcactctactgctcctttcttacctcctctaccttcacatttgtcacaaatcacattcttttgcagagccagttttcttgttgcaccattatataagtcttctagggttactgagagctgatgtacaacatttttacctctcctttctctctgcatccttcctcctcctccaaaaaacatatcaaagatgtccatgggggagccaaaaccgccacctgctccaccctctttaattgcctgttctcctcctttgtcatataattcccttttctttgcatcagagagaacttcgtaagcttgagaaatctgtttaaacttctctccttcatttgggttcttatcaggatggtacttcaaagccagtttcctataagcctttttcaattcttcctgagtagcattgggtttgacccccaaaacatcgtagtaagttgtttctttcaccatcttctactgccggtgcgggctgaggccggtgtgtgagggagcgggaaggagcgccgagctgtgcgcagccggggtagttaccgctcctccgcctcccaacttttttgtacaaagt

SEQ ID NO: 240793 - DNA, 2337 bp, Homo Sapiens
  misc_feature (399)..(411): n is a, c, g, or t
  misc_feature (1494)..(1503): n is a, c, g, or t
  misc_feature (2119)..(2151): n is a, c, g, or t
agcctcataagaaaaaaactgaacttctaaacaaaatgttttaatctaaaatattaatacattcatttcatacagatacaattgtaaaatatcacttttaattttgtatggaagaaggggtctaagatggcaaaactatctagggcccacaagaatcataatgcagctctgaatacagggtcaaacaaactgtaactgaagcaatgtaacttgaactggaaactgaagataatttaaaaggattagagaagaatggtcaaggctaaaataatggagatggagagtctgagcttactgatcctgttccactggtttttcttttcttgaatgttactttggaattagattaagtctaatattggggaagcgctagtgtcgatttccattagccaagccagnnnnnnnnnnnnnttaggtcattattttatagtcattgtgcaataacaaagacagaatcaggatgaagacacctgcatgtctttaagtcctttagtcctttctccacttctgtaaacattattaaaggcaggtgttcctttgagactctgcctcctgaacttcctgtatcataggccccctcagttctagacttcctctgtgcttctacaaggccctggctccattatcctcggtagtagcccaaggctggtagtgccagcaatgtgggtacctgtggttgcaaaattgttttaagaatatgacaaaagaaaaaggaagcagggaaaatgatggaggaagagagaaagaagtaaccaagtttaacatactaaaattatactgtcaaaaaaatggggaaggatttatatactaattgtgtttttttaaatagtagcactgagatatttgtacttcacacttctctgtattttaaaatatactttacaagacaaatgtactctatagtcagaaaatactaagtattattttgaaaactgtgctctcaaggccccaaactcttgacaagtatcatccttgagatcctcgcaatatggcttagattagcaaatatggttaaacattggcacacagggcaaggagactcagatttgagagcagaacttttaacaatttccattactttccatcacccaaattcatcagtattatagggaaatgtcaatcaagaaagctagtataaaacattttttagtatttgttccccaatatatcatgaggaaacaggtcaaaaggaagatgagtacaaaggaatcaatcactgcctttcacagaatcacgcaacttcggagcttggaagggaatactaagccataaaattcaggcccttgatttactggtgaggagcatggggtccaggttatgtgttttgattaaggtcacacagcaaagttggtaacagagttagggtaagagctcaggtttcctgacttttggtatagttcctcttacactctcagccctcaaactaattgttttataagctatacttcactgtttatcctaagtgcacacagagaaatggaaaaatactacccnnnnnnnnnnaaatgtatgttaatttggaaactgtattaactcaaaatataaacttcacaagagtagtccaacgattagaatgaacaataaaattttagttctggaaggacattaagaagttaagttagacttcagttacacaagaattaaggctcagggaaagtaaactgtatctccccaaatcacaaagttgagacaagaaccaggtcacctaaagctgactcactgcttcttccaatactccttattcttcattggctattgattacaaacaaagcaaaatatagaatcaatctgatttagatataaggaaacgttagtaagaatgtttggtgaatagctataaatcaattctctgactactaagaaataaactaaaatctactgaatttcaataaatgaggcagcattgactgcttattttattttaaaattggcttaaatgcagatcataattctgagttttggtgtcatttgaagatgacgtaaagcttaacaaatgtaaaacaaaattctaatgtttaaaattctctagatcaagggttggagaataatagccaacagcctatgttttatgaggcctgtgagttaacaatggtttttatcattttaaagggctgtaaannnnnnnnnnnnnnnnnnnnnnnnnnnnnnnnnaagaagaatgtctcatagacatcatatgtggcctgaaaagccaaaattatttacaaactggccctttacattaaaaaagttcactgacctccattatagattcagaaagcatatgaaactgggctgaatatgtaacatgtcctgaaaggcttgttttaaaaattaaatctctgatttattccccaa

SEQ ID NO: 240794 - DNA, 924 bp, Homo Sapiens
tacaaaaaagttggggctgactgaagtgagtagtgggggtgccagaccaggtgcgtctgccgctggattgtgataggaagcagagtgttcgtgtgaaagatggatactatgatgctgaatgtgcggaatctgtttgagcagcttgtgcgccgggtggagattctcagtgaaggaaatgaagtccaatttatccagttggcgaaggactttgaggatttccgtaaaaagtggcagaggactgaccatgagctggggaaatacaaggatcttttgatgaaagcagagactgagcgaagtgctctggatgttaagctgaagcatgcacgtaatcaggtggatgtagagatcaaacggagacagagagctgaggctgactgcgaaaagctggaacgacagattcagctgattcgagagatgctcatgtgtgacacatctggcagcattcaactaagcgaggagcaaaaatcagctctggcttttctcaacagaggccaaccatccagcagcaatgctgggaacaaaagactatcaaccattgatgaatctggttccattttatcagatatcagctttgacaagactgatgaatcactggattgggactcttctttggtgaagactttcaaactgaagaagagagaaaagaggcgctctactagccgacagtttgttgatggtccccctggacctgtaaagaaaactcgttccattggctctgcagtagaccaggggaatgaatccatagttgcaaaaactacagtgactgttcccaatgatggcgggcccatcgaagctgtgtccactattgagactgtgccatattggaccaggagccgaagaaaacaggtactttacaaccttggaacagtgactccaccctgaacagcagcagctggagccaagaactgagacagacagtgtggg

SEQ ID NO: 240795 - DNA, 1771 bp, Homo Sapiens
  misc_feature (391)..(404): n is a, c, g, or t
  misc_feature (417)..(465): n is a, c, g, or t
  misc_feature (1225)..(1240): n is a, c, g, or t
ttggcttttctgttgtattcagtgggatatagcctatttttactaacattattttaatactcaaattgtcctagatttggcccatgggagccccttcaagctaacttctctatccttttgacatgtccctattattcttggaggacttgattactttctaagatgtcccagtctcatcttgcacttttcctgttccattcttggaatcagcagtttctctgaggatccctttttcattttagtggagaaaaatatttagaagccaagatctgggcacaaggtatacttgttgccattgaggagttgctgttcccagtcctctcaggggagagtaagggaatatatgtatatattcatatatagatctatgcacttttacatgtatatatannnnnnnnnnnnnngaaactttgtctnnnnnnnnnnnnnnnnnnnnnnnnnnnnnnnnnnnnnnnnnnnnnnnnnggaaagctatgttatagagaaagggaaagctccaggtaggccctgtttggaggctgctgacgtggagagggtggaacatcctgtgttattgattagtggtacatattttgctttctccagcaagtcttaatttaaaagtgggtacagaaattagggaagctgttagttactggtcaagtcctgactgttgggctaattgttacataagttttgtgcttagtcagtttaggctactctaacaaatataccatagggctcagtggcttcaacaacaaacatttattacgtacagttctggaggctgggaagtgcaagattaaggggctggaagatcctgtgtctggagggcttgcttcctggtttgcagatggccttctccttgtgtcctcacatggaagagagcagagagaggaagcaagctttctcgtgtctcttcttataagggaactaatctcatttacagagcactccatcgtcatgacctaattacctcccaaaagccccagctccaggtaccatcacagtggggattaggcttcaatgtatgaattttggagtgacacaaatattcagtccatagcattgtggtttggctttctggactgattgttgtaggttgtgagtcagagttctatttttatatatggtctggtcattacctgtttgtatattcactctttcacccacctcaaaggtagtgttctatatcaattattttgaattcttctgcatgggagatttgtctcttctctcccactannnnnnnnnnnnnnnnggagggactggttctttatttcaaaaagacatttgtcaatattcagtatcaaaacagttgcactattgatttctctttctcccaattggacccaaagagaccacatcaaaggagagtacattttaagccaataagctgcaggatgtacacctaacagacctcctagaaaccttaccagaaaatggggactgggtagggaaagaaactttaaaaaatcaacaaactgccagcccacggactgcagaggctgtcacagccagatggggtggccagggtgccacaaacccaaagcaaagtttcaaaataatataaaatttaaaaagttttgtacataagctattcaagatttctccagcactgactgatacaaagcacaattgagatggcacttttagagacagcagcttcaaacccagaaaagggtgatgagatgagtttcacatggctaaatcagtggcaaaaacacagtcttctttctttctttctttcaaggaggcaggaaagcaattaagtccaacttttttgtacaaa

SEQ ID NO: 240796 - DNA, 1794 bp, Homo Sapiens
  misc_feature (159)..(204): n is a, c, g, or t
  misc_feature (577)..(586): n is a, c, g, or t
aaactgtaaagaaagggaggaaggagagacaggaggaaagtgggaaaaggggatgagacagagagagaggacagggggccagagaaagaaacaaagacaaaaaggaaggaaggtgggaaggagggaaggagagacggacagagggaatgaatgaaggannnnnnnnnnnnnnnnnnnnnnnnnnnnnnnnnnnnnnnnnnnnnnccaactctgtattataactacactccttaggtaaggggtaaattagcatttcaggagctgaagacaccagacccatttcaaagacttgtaacatacagtaagctgggccccccagaaagagaccgaataatttggtggggagggggtggtggtccttgctcaggcttttaaatggttctaggtaaaaagggcttcagtcctgtttcaaagttctactctgagggcacaactgctaggtaatttctgtatgaatactttctttttcttatacaccttaagtccttcctgctgttatctgcatgaggaaaaatgacaagaatataatctggaagttttaatactgatttgtaataaaggaaggcatcaactaggnnnnnnnnnngaaagcttagatgccagcttcaaaacaattttccctgcagcatcttctagctcaataatttagtggcaatgacagtcacaaatgctgtcaaaaacagcaatgaagttttaaaaaataacccaaaaattcaaacaataatatcctttagatttttaatgtcatttattgaaatggcaatcataacagaaacttatgagagccttctagttagaaaaaataagtttactttttaaggtttccatacatgtgatgatctctacatgctatcaagcaggcatatagtattttcttctcaccaaaaactctgtctgtcctgatgttaccagtcacaagaaaccttttgttatcattactccctcaagattcaattcttactaggagtcctgggcaaacacaaaagtgtcctggcagttacatcattctctataaatggaaaagaccccgctatctgaaaataatgaaaggctccatttaaattaatgtggttttttggtcaagtgttcattttgttttgtaataatgtagttctgatccaaatagagttcttgctagctttaaaaagatctcaagggattatacgcagggcagcaatttaattcttaaatttttatttcttgcaatgacatttagggttcagtgtgatttgagatttttagtgctgttgctgacaccttatggaaactgttttatttggaaattctaattagatttttaaaactgttctgctcttgtttacaaaaagcattattataaaaaatggattttttgttcctttaaggtatttttctgctatttattcctcacttgactttataatcctgtttgggtcactatgattagttgctatggaaattacctcctatggaaatgattccaatgtcactgttgtaagaatatgacatttaatgaaaataccactagcagacatcaactcttactaggaaaaggaaatctaattaaaattttaaaaaagaattctgaaaattatttaccatggccaacttttctgatatttttgaatctctcatcttctttttaaataagtattaaatgaattttaaggtgttgatcagctactcacttccctaaattccaaagtcacaatggaaattagcaccacacacagaaaattgaatgtaaagagcatttcatctaccatttctctaaactagtaagtgttatgcttctatttaagaaagttaatgcca

SEQ ID NO: 240797 - DNA, 1513 bp, Homo Sapiens
cccaaatttatttttattttgcacacataggaaacaggatcctatcaaaagagaacaaaaaagagaaacgagccaattgttgcagaggaaaagcatgcacagatctgcttcaagtttactctgaaccacggacgctccgggaattctacacaccaggagctgtctcactccaggaagtgggcacaacccaccatccacacaatggaaacaagaatggccaggaaatgtcaccgaagtgggacttccatatgcaggatcagcgttcacagtagcacaattctaaccaagttcaagggaaaacaaactctgtctcacacaaacatgggaatacaaaattgttgagccctagccatcactgtctcttaacataatttgctatcaaaaagacaaacgaaatttagtcacggacttttgggtgcctattcagctgcacccgattccaggggcagcttagtgtgctttttcattacaaaaaataaagacattaaaaatgcaaaacaaatgacctggaggaagaggagtgtttggacccacgcagttgtcttggttgtaaacagtgaacattgtgctttgttgtctcatttagatggaggcctgcagcatgggaggtaccacgctggcagtcagcagtcacaccagggtggtcagagacactggtggcagcatctgtgcttgcaactgcattcccagggtgtctgttttgttcccaagtgtctcccacaaaattccccaggaggttctccgattaaatgtcctcagagtgaaaagcatggacaccaaatcactccgtatccacttccatgagatgtcttgatgctccagttcaatgagtaacaatttctcaagaggctctgattagttcattaaaaaataagcacccccacctcattccccgtgatacagcacatctagtaatctaggcgcctcagctaagctgcatagctcttagcacacaggacaggtcagcgttcacacatcaacactataactatgcggcggaactagctccccgctagccgtcaactactcaggagactacctgtgagatcctggggtgagctgtgattcctatccaggaatgtgcatttccgaccacttcttctttattctaattatgacaacatggtcagtgcagttgagtcagtacttctcctgtcttttcccagcaagctcctcctccttggagcccagcacacacccgcttagacccaacacaacctcagagagagacgcctcagctggtctctctccctggaagagtccatgtgacttcccagccagatgtgccccgttttgaaagcacccttcagaacccaccactggagctgcctgagggaaggagacccccgggcctgagaatgccctggagaggcagtgatgtccagggaagacacacacccagtctgatttcaaagggcaggacgctctacatgcacttccataaacacaccaaaaaaatgggtaacagtcctttctccaaatcgagaccaagagccaacttttttgtacaaag

SEQ ID NO: 240798 - DNA, 971 bp, Homo Sapiens
ttggcgccagccagctccttgcacccttcgcggccgaggcgctccctggtgctccccgcgcagccatggctcagcacttctccctggccgcctgcgacgtggtcggattcgacctggaccacactctgtgtcgctacaacctgcccgagagcgccccgctcatttataatagctttgcccagttcctagttaaggagaaagggtacgataaggaattgctcaatgtgaccccagaggattgggatttctgttgcaaaggtttggcattggatctagaagatgggaacttccttaaacttgcaaataatggcactgttctcagggcaagccatggcaccaagatgatgactccagaggtgctggcagaggcatatggcaagaaagagtggaagcacttcttgtcggacactggaatggcttgccgctcaggaaagtattacttttacgacaactactttgacctgccaggagctcttctgtgtgccagggtggtggactatttaacaaaactgaacaatggtcaaaaaacatttgatttttggaaggatatagttgctgctatacaacacaattataaaatgtcagcttttaaggaaaactgtggaatatattttccagaaataaaaagagatccaggcagatatttacatagttgtcctgaatctgtgaaaaaatggcttcgacagctaaagaatgctgggaaaattcttctgttaattaccagttctcacagtgattactgtagacttctctgcgaatatattcttgggaatgattttacagacctttttgacattgtgattacaaatgcattgaagcctggtttcttctcccacttaccaagtcagagacctttccggacactcgagaatgatgaggagcagaggcactgccatctctggataaacctggctggtactcccaaggaacgctgtccacctctatgaacttctgaagaaatgactggcaac

SEQ ID NO: 240799 - DNA, 1667 bp, Homo Sapiens
  misc_feature (818)..(828): n is a, c, g, or t
  misc_feature (1000)..(1051): n is a, c, g, or t
aaaagaacaaaaagggtcttctgaggtgacagaaatgttctttatcttgacttaatgtagccacacaagtacacaaatgtttcaaaattcattgaaaatttaaaaactggtttatcaaaatccataaaataattgttctaattacaaaggataaaatgtttaattcttataaaggatatctgaatataaaaatatatcatcgagtcaaaaatgccatcaattttaacatacattattattttatgtttctaaaaccaaaaacccagtaaagacactttctgatttcagatgttaaaatatgcaaaactatgcttgaagatcaatattaaatgcacaattcttacagtgacatcacaacaggatacaacagagccagaatttcaatcaagatcctaatgcctctaaaaattatcattactcatactgtcttgagcctcaaggaaaaatatttttaaatgaagtggtatatacaaacaggaaatacattttacatcctgagggagggaaagagacagctccaaaagtataacaaatagtcctaggaactaaaatcacttttatttcaaagagctgctgaataagggaatggggtatattatggagccagatcaaaggccacaatgagggaaaattttaacaaaataatcaatagtgctaataactgttaaagcaaaagtgttcaaaaattcccaccaaaccagcttcgtcattttatttcaattaacacatttcttggagtataaatcaaagaagtttcacaccaaacagagtgtacctgaacaattctcaatgtattctaaaatccacgagtcttttcnnnnnnnnnnnaagggcagattctagggtcacacagctttaatttatacaacactgacctacaataggtcatttggagagtcaaattctaatctcagatcatagttacaatagctctttcatagcttatgtttccctaaccacagatttaaaagaataatcaaccaccagaaaagtatttagnnnnnnnnnnnnnnnnnnnnnnnnnnnnnnnnnnnnnnnnnnnnnnnnnnnncactgacatttctcatcccaaatccaaacaagatttttagatttgctattaacaaaacttcaaacaaatacacagatcttgtggtagtggctatctaaatcaaaagaaaaagatatctattcttttaagcttggcactgttagcctgccaatatgccaacaggaagcaacaaactctcgcctaacacaaatgttttgtggctcagacaggacaaaaattttaaaacgaattgaatgtaactttttagaatttccagtaactctatgttgactgttcttgatgtaaaacatattaacttagtgtttgtatcacagtattcaatcacttaatcaaaatatcatttgagttccagcacaagatttgttaggggcaatgcaaaagtttaaaactaaccctcaaatttttttaagaccgggaattaacttgtatcgtcatattttaaaaaaataaacataaaaattcaccaaacctacaagtacaaacctgtcacttgtagaaattttcagactaatataaaaccatactacataaatataatactattaacactagaatgtgttatatgtgttagaataaaagctttttgtagcagtgtagcaagttttttaatccccaa

SEQ ID NO: 240800 - DNA, 684 bp, Homo Sapiens
cttatcgtaccatatttatttttactttattactataccatcatattttattttttaagattatttttatacatcatcatgttctgttagaattgagctttataaactccaaaacattggtaatcaagcgtaagtcagttctcagacattttaggtaagtcctcatgtatcacagatggcagtttaagtcacgaaagtagacaaaagatggtagaagtactatcaatgtgtggaatcatggaagccaaaggaagagactctatcaagaaggaaagagtggtcaacaattgacagatacattgtcaaaaggtcaagtaagataaaaactgcagtgtctgttggtcattaggacttggacaagagcaggttcagtggcatggaggctgaaggaaaataagtgaattgagaattggatgagaaaaaagaatgcaaatatcaactgtagacaatccattcaaggagtttatccaaatagatgaatagacaatagagtggagctggacaggaacgtgaagtccaggaaatctttctaaactggtttcttatacaagtttaatcttgttcaaacaccagtgggaaggagtcgctaaagaggagagaagaaaagaaacaagggtataaagcaaagacttaaagaaggagagagagcatgggcctccaatgggaccggaaagattatcccaa

SEQ ID NO: 240801 - DNA, 731 bp, Homo Sapiens
ttggcttggctctcctgcagctccagctttgtgctctgcctctgaggagaccatggcccagcatctgagtaccctgctgctcctgctggccaccctagctgtggccctggcctggagccccaaggaggaggataggataatcccgggtggcatctataacgcagacctcaatgatgagtgggtacagcgtgcccttcacttcgccatcagcgagtataacaaggccaccaaagatgactactacagacgtccgctgcgggtactaagagccaggcaacagaccgttgggggggtgaattacttcttcgacgtagaggtgggccgaaccatatgtaccaagtcccagcccaacttggacacctgtgccttccatgaacagccagaactgcagaagaaacagttgtgctctttcgagatctacgaagttccctgggagaacagaaggtccctggtgaaatccaggtgtcaagaatcctagggatctgtgccaggccattcgcaccagccaccacccactcccaccccctgtagtgctcccacccctggactggtggcccccaccctgcgggaggcctccccatgtgcctgcgccaagagacagacagagaaggctgcaggagtcctttgttgctcagcagggcgctctgccctccctccttccttcttgcttctaatagccctggtacatggtacacacacccccacctcctgcaattaaacagtagcatcgc

SEQ ID NO: 240802 - DNA, 1407 bp, Homo Sapiens
ttggggggattatgggaattgcgattcaagatgagatttgggtggggacacagccaaaccatatcaagtgtttagatgatctgattgaaataaatgctatctggagatccatgtgttcaacatcttggaactgttttctttctcagatgtttgggtcattgctgtgattgttattgccatagttgttggagttgcagtaatttgtgttgtcccgtacagatatcttcaaaggaggaagaagaaagggaaagcagatggtggagctgaatatgccacttaccagactaaatcaaccactccagcagagcagagaggctgaatagattccacaacctggtttgccagttcatcttttgactctattaaaatcttcaatagttgttattctgtagtttcactctcatgagtgcaactgtggcttagctaatattgcaatgtggcttgaatgtaggtagcatcctttgatgcttctttgaaacttgtatgaatttgggtatgaacagattgcctgctttcccttaaataacacttagatttattggaccagtcagcacagcatgcctggttgtattaaagcagggatatgctgtattttataaaattggcaaaattagagaaatatagttcacaatgaaattatattttctttgtaaagaaagtggcttgaaatcttttttgttcaaagattaatgccaactcttaagattattctttcaccaactatagaatgtattttatatatcgttcattgtaaaaagcccttaaaaatatgtgtatactactttggctcttgtgcataaaaacaagaacactgaaaattgggaatatgcacaaacttggcttctttaaccaagaatattattggaaaattctctaaaagttaatagggtaaattctctattttttgtaatgtgttcggtgatttcagaaagctagaaagtgtatgtgtggcatttgttttcactttttaaaacatccctaactgatcgaatatatcagtaatttcagaatcagatgcatcctttcataagaagtgagaggactctgacagccataacaggagtgccacttcatggtgcgaagtgaacactgtagtcttgttgttttcccaaagagaactccgtatgttctcttaggttgagtaacccactctgaattctggttacatgtgtttttctctccctccttaaataaagagaggggttaaacatgccctctaaaagtaggtggttttgaagagaataaattcatcagataacctcaagtcacatgagaatcttagtccatttacattgccttggctagtaaaagccatctatgtatatgtcttacctcatctcctaaaaggcagagtacaaagtaagccatgtatctcacgaaggtaacttcattttgtctatttgctgt

SEQ ID NO: 240803 - DNA, 2409 bp, Homo Sapiens
  misc_feature (2199)..(2246): n is a, c, g, or t
ttggcacggttaactttcttgaatagaggtgaagattatgtaatgacaatgccatacgctcattgtaaaggaattctttatggtacaatgacactggagcttggtggaacagtcaatattacatgtcaaaaaactggatacagtgcaatacttgaatttaaactaaagccattcctagggagtagtgactgtgttaatcaaatatcagggaaacttaaactgggaaaagaagtcctagctactttggaaggtcattgggatagtgaagtttttattactgataaaaagactgataattcagaggttttctggaatccaacacctgacattaagcaatggagattaataaggcacactgtaaaatttgaagaacagggagattttgaatcagagaaactctggcaacgggtaactcgagccataaatgccaaagaccaaactgaagctacccaagagaagtatgttttggaagaagctcaaagacaagctgccagggatcggaaaacaaaaaatgaagagtggtcttgcaaattatttgaacttgatccactcacaggagaatggcattacaagtttgcagatacccgaccatgggacccacttaatgatatgatacagtttgaaaaagatggtgttattcagaccaaagtgaaacatcgtactccaatggttagcgtccccaaaatgaaacataagccaaccaggcaacagaagaaagtagcaaaaggctattcctccccagaacctgacattcaagactcctctggaagtgaagctcaatcagtaaaaccaagtacaagaagaaagaaaggaatagaactgggagacattcagagttccatcgaatctataaaacaaacacaggaagaaattaaaagaaatattatggctcttcgaaatcatttagtttcaagcacaccggccacggattattttctgcaacaaaaagactacttcatcattttcctcctgattttgcttcaagtcataataaacttcatgttcaagtagaagttctctaccattgaatcagtgaactagaaagatctgatttggcctgggaccagtgttcaagttggtttggtctttattaaaaatcacaatattccgaaaacaaaaaaacctaggagataaatgtagaggtattgacttttcgtatcttttatcttcacactgaaacaagagctatcctatttgattattaaagtgagctatgtgttaagtgccaggacatttctagcttttgtgagaatgtgtctacatatgagtataataaacccacatgtatacacaattgtctcttatgtactcctacctgacagtagtctttgtattctatagtatgttctgagatataatgttaacattgttcataacaaaaaatgctatcaatcttataaatatatgtaatctattttcttcataaaacaggcacaaaagttttatcagtaaggaattacagattgagaaatgatggaataatagacataattaattcaatacactactgttaaaatcatttgcaaagcactcagctcaattatcttcttagaaagaaagaaaaagtatgaatggtcaaaatgaatacatcgagagagataaatggcaaattgcttttttaaaagtttacataagttttttttaacccctagaatttaatatttgtagatgcaggtaaatatatatacttacgtgtatatcagtataaaaacactggtgtgcaattaattggattgattataataccaccttaagcacttgctgaaaaaagtgtggtcaaaattgattgctgtccttttgtcttatttttgtttttcttaagtcagctggttcataacataggccaaattctagagatgtttatagagcatttgaagtgctgataatttatgttttttcattatgaaaacttattttagctttagactccagtgtgttcagtgaataagtagaatataaaaaaatataaccagtattttacttcaaaagccaaaaagaggcaataagaaaagacactttgtggtggcctttatgtgtgcattaaaattggtttctgtaaaacgtgtaataagttgagtatctacgaagagtatcaagttctgaagtttaatttttttattatcctcctctcttcttagtaacttctttctgtggcaaaaccacaattctttaagattcctattgttcaggctaaggcannnnnnnnnnnnnnnnnnnnnnnnnnnnnnnnnnnnnnnnnnnnnnnnacgtaaatatttatattccttgaaagcaatttttgccaaggtagttcagtttaggaatatgttgttctaaaatatgtcttataatcctgaaagcatacattttgaaatgtttttttaatgaaaatgaaccccacacacaacaattgccctgaccacatttgcc

SEQ ID NO: 240804 - DNA, 503 bp, Homo Sapiens
ctcttaaatacacaaaatgcactgaaccagcaaaaacaaagtcccaggtctgaggagctctgaggatgatgcctgtgatggcctctggccagctctccaggatactgagagagcaggtcaggggaggccttctccaggctgggcagtgggaaggccctctggaccgggggagtgagtattcaggggacaaaggcactacccgggtctggagccgccacggagccagggcacagcctagtttgggggattcctctgtcactggggtaggatctcccaacaagaggcggctttatgttccactcacgaagaggccagagctctcagatcttccccaaaacctaatcaggcctctcaccagcgtgttggaggccactcctggccatcatctccaactctttaccccaacctggcaccttgtagggggctagaagggtgaggggaggtgtctttcacttatgcttaggtcactcttagaggactatcccaacttttttgtacaaagt

SEQ ID NO: 240805 - DNA, 1725 bp, Homo Sapiens
  misc_feature (349)..(357): n is a, c, g, or t
aaagccaactttgtacaaaaaagttgggtaaagggctacatttgggaacatttgacttccttgggactcttaagtgcatactgatggcatgaagtaaaaggggcctcaatgatgataggaaaatcagttcttttaaaatttcttcaagaaaatccaggctatcacatagtctttctgtgtgacttattaggagataggaagagcattgggaaacttgcacagctagctatgcatctacattttggtttggggttagttatgaaatgttcttaatatgacgtgttcgataacttcacataaacttcctgttctccaaaacctcaaagagatagagttaatgagttgttgnnnnnnnnnaaatgggggtagttttctatctgtcatgggctctagcatctactccgctacccaattctgtcatctccaagctgagtttcctcttctgaggcagaggctggagcagttctttttcagttctcatcctctccatcccaatccagtatatcaatcaactctaactcggagacgtctagctggcaatgtttctaaaactttcactggatttctttagacattgaagcaaacatttttttctaagaattgcttctcagatgatgatatcaaatgtatatgcttttgcaagtttgaaaagttcaaattaaccacttttgactaggtaagtctttctaaaaaccatttaaagctaactgggtcttagcatcctcctgtgtatggaagagacaggtgaccgctccaggttgggtgctcacagaactcttttcctgactctcatggaagatggtggaaggaaaatagactgtctcatcaaccctcctgtgtcctctgaagcaatctcagtttttattaaccacctcttctgtgtttctggtagctatttaacctgtatttaatctgtacttcctatgccagcctcaattttatttgatttttaaaattattctcttctaaccaatgaagtgtttgtcagtatgccccaaagcttgctcttttgtgctcccttttgaataactttctatccagaaaaagagattatttgggacttgagatttgcagtgataccaacttatagcaatgatgtactttaagggaacgacccaactatgttgtgatagaagaaagagaaaccttcactttggcattttttttaatcactgtttatttttctgtttgcggcccaggaagcagtgggaggtggtggcagatatgctttgcatatggattgttatgtttttatttgggcaagttttatcatggaaaactcaaaaagaaggggggaaatggtcagtttaagccaaaagaaactttctaaacaatgtataggtacacagcaaaattaaacaaatccaacaatttctgaagcttagtgtaattgagtggtggttgttattcaataaaattattcccaaaagtgtttctcctaagagtgcagttcccatgagtcacttcctgaacccattgaccaaaggtggacagagacaatcctgtagaccttgacattcagaaagatgtgagctgcttactgatcatatatgcatacgtttctttacagcagaggaaaccattgtccacaaaactgatgttcttttggggttttatgtacagacttgtccaatcatgtgtgtggttcctgcgagttgctgatgactccgcattgaagctctctgagttctttgattttaagttgggtttatggaattttttcaa

SEQ ID NO: 240806 - DNA, 1986 bp, Homo Sapiens
  misc_feature (117)..(125): n is a, c, g, or t
  misc_feature (1602)..(1643): n is a, c, g, or t
tgaaaaagacctgctcccagcctctgcctcagaagagaaactcagcttggagatgacagaattgggtagcggagtagatgctagagcccatgacagatagaaaactacccccatttnnnnnnnnncaacaactcattaactctatctctttgaggttttggagaacaggaagtttatgtgaagttattgaacacgtcatattaagaacatttcataactaaccccaaaccaaaatgtagatgcatagctagctgtgcaagtttcccaatgctcttcctatctcctaataagtcacacagaaagactatgtgatagcctggattttcttgaagaaattttaaaagaactgattttcctatcatcattgaggccccttttacttcatgccatcattatgcacttaagagtcccaaggaagtcaaatgttcccaaatgtagccctttacatcggcaccagggaagcctgccatatatacaatccccttcctagggtgaacaagctccaccagtttgagtgtgttaataactggaattttcatgtatagtacagggtagggtaaaagcagaccaatagccatcttgtgtgctgtgaccaggatggacattttgaggacaagcatgctgagcccagtttaactaaatgtgcaggcattctagcccacacattcaatctggcagttagcaggaaccaggttgccccacaacccatccctccagctggagccttttgctgggaaatggagtagggggcccactctgcattatggtttccaatgacccctccccagagcagagcactactctgcttgcagataggaggctactggtgctttctggcaatgcatttctgcaaggtgcagtttaaatgaactcatatggtacttgatatggaaagaagctttttttcttctcaagttggatgcagaactgagtttaaaagatacaaggaaagcagggtttcattagtgggagctgatttagggttcagttctttatcactgcaatcttaggcaggccccttaactcctagtctctataaaataaggaagggggttgtcccagttttcagtctaatgtccccattctatgacagacccatgtcttctttatgtagaccaaggaagaggaattttagcaaaactacctgattatgcccatgtttcccaaataccttgatttttcttatattgacatttcatctgcacatgtctgggtgataattcattaatcaatgtaaaacgtagggaccctttactagctccataatgaaaaaaatctctccaccagccaagtgctgggacccaggtggccaccattgttattgacaggtaaggaagcactggaaatgcaccatcctctccatccccacactttccagagtaaagcaaggatgaggacacccaggcattgtgccaaggctgccattgcaggagggcacagagagaggatgggatagaaaaagcatggaataagcaagaggccactgagacaccaaaggctaaactgcaaactgcagtgtggcttccaaccaagcaagagctggtctcatctgctcatggccaccctgtcagagccatttgctaaacatgttagtagatccannnnnnnnnnnnnnnnnnnnnnnnnnnnnnnnnnnnnnnnnngagagtagtcctcattcagtgcatagcaatggaaggctaggacaatttagattccttaggtaagagcacaggaggatgctatagaacagtgactgttcattccatcccccaaatgacagcggtgagccacgtgtcagaggctgcaacacagactcagaaactattctacttgcttttttaccactggtgtcagagagacagcttgtaatcctaatatttggtgccagcaggaagaacttcagagcttttgttcttagtggcatatgaaggtaaattcaaatgttttcttcttcggctttaaaacagagcttaaattcttaagcacagccccaaagcatgccaa

SEQ ID NO: 240807 - DNA, 1051 bp, Homo Sapiens
  misc_feature (233)..(241): n is a, c, g, or t
ttggctcaattttatttgatttttaaaattattctcttctaaccaatgaagtgtttgtcagtatgccccaaagcttgctcttttgtgctcccttttgaataactttctatccagaaaaagagattatttgggacttgagatttgcagtgataccaacttatagcaatgatgtactttaagggaactacccaactatgttgtgatagaagaaagagaaaccttcactttggcannnnnnnnnaatcactgtttatttttctgtttgcggcccaggaagcagtgggaggtggtggcagatatgctttgcatatggattgttatgtttttatttgggcaagtttaatcatggaaaactcaaaaagaaggggggaaatggtcagtttaagccaaaagaaactttctaaacaatgtataggtacacagcaaaattaaacaaatccaacaatttctgaagcttagtgtaattgagtggtggttgttattcaataaaattattcccaaaagtgtttctcctaagagtgcagttcccatgagtcacttcctgaacccattgaccaaaggtggacagagacaatcctgtagaccttgacattcagaaagatgtgagctgcttactgatcatatatgcatacgtttctttacagcagaggaaaccattgtccacaaaactgatgttcttttggggttttatgtacagacttgtccaatcatgtgtgtggttcctgcgagttgctgatgactccgcattgaagctctctgagttctttgattttaagttgggtttatggaattttttcaaatgttggaaggtgtgtggttcttcctgccctccctccccttttggaaatatgaaagcaaatgtttagaagaattccttttgaaaagctgtgtcgtgttccctgtgaaactgagcaggtgtgtgttggcgcgctaagtgccacatgcttgtgtgtagaggaggaggtggccctgccggctccgcgctgctgtgcctgtgatccctacctgctccccgctcctgttgccaccagcactcactgcactcctttgt

SEQ ID NO: 240808 - DNA, 852 bp, Homo Sapiens
tgaggcccttagagtcagagccctgcctgccaggccaggactcctgggaacctcccaggcagtcaatgctccccagaccagctcctgcctccatcctccccacagctcctcttctcagtcatgggggttgcaacacactgcgatcatacccagtgtcacctggttttacataggtttacggagaggtgacacttgcttctggggtccctcgggataagtgggacagaggagaaaggtgttgagggcccaggccaggtgatgagagggggcagagtggtgggcaggcgccggagccgtcttcggggttcagggtgccccaccttgtgcaggtggtgctgcagcttgtgccgcgcgtcctccagttcctcacagcggcgcccgaaggccaggttcacggcgtcacactggagtcccaggtcctcggaggtgtcgcgaaggatgcagtccacaagcacccacaggttggccgagtccaggcgctcgcgctgggcgtggcacagattgtcctgtgtgaacttggtccgggtctctggggtggaggcgctgcggggctggggacagccaggagagggtcagggaggctatgccagtggctgggggccctgccgcgcccccattccctgtctgcaccccatgctcctggaggaactgcatggactccaatgcaccccgtgcagactcacaaagcccagtcccccaagctccctgcctccgagtgccccccgcccacaactcccctgagtccacccacaccctacccaccccgggcacttagtcccctcctgcccccgcgaccccgttcccagcaccgctgcccccaaggccccctctgcagcacctctgtccccccaa

SEQ ID NO: 240809 - DNA, 1588 bp, Homo Sapiens
  misc_feature (1318)..(1337): n is a, c, g, or t
ttggagatggcggaagcggaggagtctccaggagacccggggacagcatcgcccaggcccctgtttgcaggcctttcagatatatccatctcacaagacatccccgtagaaggagaaatcaccattcctatgagatctcgcatccgggagtttgacagctccacattaaatgaatctgttcgcaataccatcatgcgtgatctaaaagctgttgggaaaaaattcatgcatgttttgtacccaaggaaaagtaatactcttttgagagattgggatttgtggggccctttgatcctttgtgtgacactcgcattaatgctgcaaagagactctgcagatagtgaaaaagatggagggccccaatttgcagaggtgtttgtcattgtctggtttggtgcagttaccatcaccctcaactcaaaacttcttggagggaacatatctttttttcagagcctctgtgtgctgggttactgtatacttcccttgacagtagcaatgctgatttgccggctggtacttttggctgatccaggacctgtaaacttcatggttcggctttttgtggtgattgtgatgtttgcctggtctatagttgcctccacagctttccttgctgatagccagcctccaaaccgcagagccctagctgtttatcctgttttcctgttttactttgtcatcagttggatgattctcacctttactcctcagtaaatcaggaatgggaaattaaaaaccagtgaattgaaagcacatctgaaagatgcaattcaccatggagctttgtctctggcccttatttgtctaattttggaggtatttgataactgagtaggtgaggagattaaaagggagccatatagcactgtcaccccttatttgaggaactgatgtttgaaaggctgttcttttctctcttaatgtcatttctttaaaaatacatgtgcatactacacacagtatataatgcctccttaaggcatgatggagtcaccgtggtccatttgggtgacaaccagtgacttgggaagcacatagatacatcttacaagttgaatagagttgataactattttcagttttgagaataccagttcaggtgcagctcttaaacacattgccttatgactattagaatatgcctctcttttcataaataaaaatacatggtctatatccattttcttttatttctctctcttaagcttaaaaaggcaatgagagaggttaggagtgggttcatacacggagaatgagaaaacatgcattaaccaatattcagattttgatcaggggaaattctacacttgttgcnnnnnnnnnnnnnnnnnnnngcaaagggcctctaaagaatcagcctctttggtccctttgtgctgtcacctttttgccatgtttaacagcatcttggttggcactctagtcttaatcttgctccttaactttgaatatgcagtctaaaatgtcagtagtcaacatgtaattttcctttgaaattctgaatattccagtgctggaacttatccaaaaagaagacctcagaaacttagattggtagatctctagtgcatattatcatgtgggc

SEQ ID NO: 240810 - DNA, 697 bp, Homo Sapiens
ctttgtacaaaaaagttggaattccctttcagcaagatacactgagtgcctctgaaccaatggagttaagtgggcactgaaaggtaggctgggattacaggcgtgagcaatcgtgcccagccttgttcttaattttgtatcatccagtcatcgctaatattacacgcaccttctcacttaatcctcacgacaagcctgtgaggcagatgctcattgttcccatcttgatgaaacttgagtctcagggaagtgaagtgacttgcccagggtcactcaggtagagttgagattcaaacccacatgtggctccaaagtctgcatctggatttgggggtgttttttggcatggcaccctcacctctctccctgcctgttttccccaaagtggaaaggaaggcctttcaaaccagagtgtctcactcccctctgacctccagaccagatggggcatgagccagccagctcagccaggctccctgtgtcctgggaggaagtgtccccatcccccatgccccttatggggagggagggcgtctgatgctctctctctgcctcccccccatcctgtcaggcacaggtgacgggggcagcccatgcgagcccttctcctgctgctctgggagggccagttccacattgagccagcctggtcccatggaaaaatgatggcctgggctttctgaggccttatctgatg

SEQ ID NO: 240811 - DNA, 810 bp, Homo Sapiens
  misc_feature (450)..(475): n is a, c, g, or t
gaagcgcttctacattcactgcattcatagagtttctccctaaacgatttctatgatatatgataatctgtgactttttatagctctctttatatttatcacagtcatagtattttaaccaggtatcagtatcctcaggcttggaatggagaaaaaaattatcaaacacattaaagtcatctgattctgcttttccataatctccttttggaataagcaaatctaaatgatgttttaaaatcaatccatctaagtcaccttcactgtttgatttccttaaaggaacaaagttcatgttcagattgaaattttttccaaatgcatcacattcatgacctctttttataattttaagcttgtcttggttatcctggtgccacatcatgttaccatctactttccagacttctataaaggaaacaaaaacaatctgtttggttgtgctttctnnnnnnnnnnnnnnnnnnnnnnnnnntagaaatgctatgctgaggggttggctgcttttaaggcttagtttccgagtctgaaataagtcccaagtataataactatcttctaggtattgcaaggaaatgctaaaaacagaaacaggaaactgactggagattaagtcatctttggttgttgacaaatatgtttattaaatggggaatatgaaaaacacatgaaaagcaaagaaaaaaggttagaagaagctttgacccaatgttttgagtaattaattcactcaatactttctgagtatacactatgcccaggtagtgtgtaaggtactagagacacaagagaaaaaataagttcctgtag

SEQ ID NO: 240812 - DNA, 943 bp, Homo Sapiens
ctttgtacaaaaaagttggcatttgctggtctataacagcaaatgaaagactcttcactccaaaaagaaaagtgttttgttttttaattctctgttccttttgcaaacaattttaatgatggtgttaaagctgtacaccccaggacagtttatcctgtctgaggagtaagtgtacaattgatcttttttaattcagtacaacccataatcatgtaaatgctcattttctttaggacataaagagagccctagggtgctctgaatctgtacatgttcttgtcataaaatgcatactgttgatacaaaccactgtgaacattttttatttgagaattttgtttcaaagggattgctttttcctctcattgtcttgttatgtacaaactagtttttatagctatcaacattaggagtaactttcaaccttgccagcatcactggtatgatgtatatttaattaaagcacacttttccccgaccgtatacttaaaatgacaaagccattcttttaaatatttgtgactctttcctaaagccaaagtttctgttgaattatgttttgacacacccctaagtacaaggtggtatggttgtatacacatgctgccttcttggggattcaaaaacaggtttttgattttgaatagcaattagtgatatagtgctgtttaagctactaacgataaaaggtaataacattttatacaatttccatatagtctattcattaagtaatctttttacagttgcatcaggcctgaacccgtccattcagaaagcttcaaattatagaaacaatactgttctatacgagtgaccgattatgctttctttgccctacattctttattctgcggtgaagttgaggcttataagttaaaacaaaggactaacttactgtcacaagtttatacagaactcacagtacctatgacttttttaa

SEQ ID NO: 240813 - DNA, 1324 bp, Homo Sapiens
  misc_feature (910)..(1001): n is a, c, g, or t
taaagggcaactttgtacaaaaaagttggggactttaggtttatggctacaaatgatttgatgacggaactgcagaaagattccatcaagttggatgatgatagtgaaaggaaagtagtgaaaatgattttgaagttattggaagataaaaatggagaggtacagaatttagctgtcaaatgtcttggtcctttagtgagtaaagtgaaagaataccaagtagagacaattgtagataccctctgcactaacatgctttctgataaagaacaacttcgagacatttcaagtattggtcttaaaacagtaattggagaacttcctccagcttccagtggctctgcattagctgctaatgtatgtaaaaagattactggacgtcttacaagtgcaatagcaaaacaggaagatgtctctgttcagctagaagccttggatattatggctgatatgttgagcaggcaaggaggacttcttgttaatttccatccttcaattctgacctgtctacttccccagttgaccagccctagacttgcagtgaggaaaagaaccattatcgctcttggccatctggttatgagctgtggaaatatagtttttgtagatcttattgaacatctgttgtcagagttgtccaaaaatgattctatgtcaacaacaagaacctacatacaatgtattgctgctattagtaggcaagctggtcatagaataggtgaataccttgagaagataattcctttggtggtaaaattttgcaatgtagatgatgatgaattaagagagtactgtattcaagcctttgaatcatttgtaagaagatgtcctaaggaagtatatcctcatgtttctaccattataaatatttgtcttaaatatcttacctatgatccaaattataattacnnnnnnnnnnnnnnnnnnnnnnnnnnnnnnnnnnnnnnnnnnnnnnnnnnnnnnnnnnnnnnnnnnnnnnnnnnnnnnnnnnnnnnnnnnnncatgagttggaaagtgagacgtgcagctgcgaagtgcttggatgctgtagttagcacaaggcatgaaatgcttccagaattctacaagaccgtctctcctgcactaatatccagatttaaagagcgtgaagagaatgtaaaggcagatgtttttcacgcatacctttctcttttgaagcaaactcgtcctgtacaaagttggctatgtgactctgatgcaatggagcacggagaaacacctttaacaatgcttcagagtcagttcctcaacattgttaaagctcttcacaaacagatgaaagaaaaaagtgtgaagacccgac

SEQ ID NO: 240814 - DNA, 1327 bp, Homo Sapiens
  misc_feature (185)..(194): n is a, c, g, or t
  misc_feature (341)..(350): n is a, c, g, or t
  misc_feature (1207)..(1221): n is a, c, g, or t
ttggcacttgtagttttaaaccttgcattggtaacaaaatgatcaactttaatccaggtagaattcaagatggctgtacttcagttgtatgataaaattaatggttctcatgacttgtgtggcatctaaaaataatgtttttatagcatctctctgccactaaattgttgacttgaattttgggnnnnnnnnnngttggtgttgatatgtatatgtgtgtgtgtatatatgtatttataaacaagtgtgtttgagtaacaagtgagtttcatagtcttcccctacgcatgtgtattccacacacaaatggctgagttatagtcataaaacaatttgcaatnnnnnnnnnnccaaaacagattgtcagttaaccaggaaacagttaatgttttttaatgaatctggcattatagtgagcaaatgtcgtattaatttaggctaatttctaatactaccataatttgtgtctaaatttctgttggggtagaaattactaaaattgtggggagttttttctgatttttacattgctttaggaaacatttttactaattcagctgtcttaggtaaaatgaatagttttcttcctgtttttttatgtgtcattgttagtggtctcagaattctgatcagtaactttgtgtatgatgctgaattacaaaccgtttgatccagttgaaaacgtatccctctactttcttcagttgtagaaaaggttaatttccctcagtgtcccacattataccaacctaagagaagaacaggtaatagggagaaataaacatacggtggtttcagtggttttggtcatgtgtccacaggagaaactaaccattcagttgtcttaattttagttcgttctaccctgtgaggagtttgtttccatcagttgttgactttccaaaatgttgcattaagtaatagttgtcactctgttggtctcatggtcaatatcaatcagactttcatgatctctactaattattagtagagtcctgtactatgtctgtaactactaagtttaaagaaaagcacatagtcacttcatctctttttttcttagcctacgctcactccccaacccatcccaacattgacatgctatctgtggacaaatagcagttctcagaatctagtcaagttgccatcatcccccttgccttggccgttcatagtagtatgcatatgtttgtttctgtacagtacnnnnnnnnnnnnnnnatatatatatacatctgtatgcacacatctttgataaaatagctatttgactagcacggttaaagtggcttttaattactttcgtgagtgttagtggatacatctt

SEQ ID NO: 240815 - DNA, 882 bp, Homo Sapiens
  misc_feature (188)..(223): n is a, c, g, or t
ccattgcttacttcccttgaatcagatataggtttggatgcctttctgcctttaattttaaattcatgagatgttccttcaggttctttctctgctttgaaagccacatttggtggcacaggaggaacacgaattcgcaacccaaacaaatgcttcgtcttctttatttctttcccagacataaaccnnnnnnnnnnnnnnnnnnnnnnnnnnnnnnnnnnnntgaacacatatacatagtagaccctaacttaactttcatatataaggcccttatacttgaaagcccacccaatactacaaaaattcacttccccttgctttccttgatttttatctgccccagagccagtctacagtaggatatgatggggaggaagggataggaccagaaaggagaagagcacatgtccacttttctttttaaacatggcaactaactttttaaaggaagaaagaagaacaaagaatggtatatttttggtcccaatatgctttcccatatttagtgtcatctgttagaaatatttcaaaagggatttagggaaaaaagaattccatctcagagtggatttataaagagaaaaaccttagtcagaaataataggtgacagcattgaaaaagaaagcaggagataaatcctagaggcccagaaaataaaaggagtatctagagtgccggatctggaaatggaaataacctggggcaaagaagggttattccagtttattatggacttgggcctctgcaaaatatgctccttagacctttcttttagtctctatggtccttattcccaagcaactccatctacctcagctctactgaaacttgcctggccacaagaacctccatcagttgtttagaatgttctccctctc

SEQ ID NO: 240816 - DNA, 1305 bp, Homo Sapiens
ttgggactatatgtatccttcctttttcacttaatctcatgccttgagtagctttccactttattaaaaatgtgatgccattcaattgtatagtaaatacatatatgtaagcaaaacactgaaaactcttattctgggttccagcaagccatacctggaatggtgtaagcaggtagtttgcttggtgtgaacgtgttgttgaggcagctgccattgtgttgtgagtgggccacacgaacttgttctgttgtgtgtagacagtgtgtgctgatcctattaggaacagccaacgctttgtgtgagccacacacggttctaagtgctttgcttctgttaactcagtgaatcctcacaactccatgacggaatgctctaattatccccattttatagatggggcaactgaggtccaagagactacataatttcccgaagttcacacaggtagcagatggcagagccgggtcaggagtccaccatcttaccacgcagactgttttagccagagactctccggatctgctgtaggggacagaatacagctttatcgccgcacctgtccaccaagatggccgtagccacagagcttggttgggtaacgtcctctttatgtgacaggaacgttgctgatggggtttctgaaggtacttcctgctctttgtctcctggaagactgtgtcttcaggaatgtctctgaccctgcccagagttgaacggatgctgggaacccagcacctgcacacggccttccctccaggactctgcgcacctctgtgctccacaggagacatgcaggtgctttctctcatgagctcaggctcctgggctgacagctctccgaagctcgtggtgaggctcggtctctaactgtgccacttgccgatggcctctgttcacaaggcttcccctgctcttcgatcttgcatcaccccttgaatttgaaatccagagcagcccactcagagaccagtgtgaggaattagtgtccaggccacagatccagggactgggcacaaacatctgcctgttgagtaggaactgagctgtggccattggcaaaaaaggaggggtgagcatggctgtttcttggggagctaacattcactatcttgtctcctccctcacgatgtggggcaatcaagttggggatgaaggagcaaaagccttcgcagaggctctgcggaaccaccccagcttgaccaccctgagtcttgcgtccaacggcatctccacagaaggaggaaagagccttgcgagggccctgcagcagacacgtctctagaaatactgtggctgacccaaatg

SEQ ID NO: 240817 - DNA, 1302 bp, Homo Sapiens
  misc_feature (1245)..(1253): n is a, c, g, or t
ccccctgaaaagctttatgatacaacagctctgttttctgagagatgcctttagggtagatgagcctcagtataagcccagagcatttctctaaggctaccaaggcttgaggaattctgtacttactcccactgtcaccctgctcttcatcccccagctcaggtaaggggaacgcagggaaggctgaagagtgctagctgcggaagcactgaattagggtgtcctcagccctccattcccaactggaagccagtagttcacttagtgtatatagcagagcctcaaaagcacaagcattttgagtgtcgtttttctgtgccctccagcgatgagatggcaaatggtgggaaagtgtcagctgtgtgaaaagatagtgattgtttggttttgctaggacagttttaatgttgataaaaattgtttatacatttctgagaagtacagaccagaagaactgaattcttgttctgtcttcttcataggtagttgtgtgatgctgaagttaagacagattgctgatgtagaacccgattttcctttttgtctgatgtgtgtgtataatttcaaatttgcttcactaggatgctattttactaatgcgttcctgtgaatcctttccttggaatcttagggggcctcttgtagaggcatttgtctgttagcaaatgtcacttagaggcaagtgactttgagatccctgtgaccaccaccctcctgcttatgtgggatgaagctgtgtttctgtcctctgagttggattagactattacatgctggtgaagtaagctggcctggaaattgtctaccattaggaatgctgtttctgtgagaaatggtgctctttttccaaaaagaatatagccacatttggaatatattcactttcataaattggacacttcctgcagtgactcctgccctagctgcctcacggagttggtgtgaggcctaaattagtcaattttcctgaaaatgcttttgaaactgtaaaactgaaggtccttccccaatccctccagcctgaggaaagtctgaaatgtaatttagtttgaagttggcacacacttttataggactgtgaatcaaatgaagaaaacccctagataacattaaaccctttcattctcagaatcgatgatgcaaccaacttggtccagctgtatcacgtgctccatccagatggccagtcggctcaaggggccaaggatcaggctgctgagggaataaatttaatcaaggtaaagnnnnnnnnncatattggttgttttgtggtggtaattgagctgggaaaaattcagccaa

SEQ ID NO: 240818 - DNA, 608 bp, Homo Sapiens
tccaggaagcggaagttggggtcagccatactcaggttatcaggcaccccacagtcccatgggaggagaatatacagcccgctggctcactgcaccccgtagcaggttgttgtaatgctgattgtaaagttcgaatccgggcctggagctctgaggcagggaagcccaagaagttattcctgctaaccctatctcccacttgattcaggagtgagacccaggtcattggcccccgcagtgtgtgggtgccagagaatggagagtccagtgcactctcattgtacaggaggccaggaggggcagcgcctccaaaagccctccccacccctcctcttactgcaccaccctttaccctccctcacttctttcctcagatgtctatgtcagcgccacccctttccaccatggctttcagggctgagaggcaggcagagccctgagaggtgacatttccagcattctcgtgtgcacagagggaggcctctagccccagatcagtctcctagcggaagccctaggagatagcaatgagatatggaagagctgccgctttagcctgcaagtcagaagaataaaacacacaggcttagggcaggcacagtggctca

SEQ ID NO: 240819 - DNA, 870 bp, Homo Sapiens
agctggggcacttatgggtaaacgataatttcctgtccttaatgattctcaattccgttctgcccaaaacaaacctgtcactaatgaaaaccaaagctggcgtagtcagaagtggctgaaatgcacccaaaaaaaacacaacaaaacatacttaaaatcttgtattttggtttggaaatgaaagaaaagaatttctcaagacagtaaatcattgtaggagtcttttgtctctgctttagccacccactgttgatgcaagataactcacttaacctttatgagtttcaccagtcacagcggcagcagtaaaactcccctttcctcacttaagattcaattaaaaaaatgaaaaatttgaagtaataatattgagaaactgacattcccctttcattagtatgaactgttttgtccagatgatttgaacaccagtcccatcataaaggggctgactgtgcctggctgaacaacatatgaatatcttttgctctacatattgcatgaaaaagctcaaaatccagaaatctcaacaagagttttcattatgactgcacacagcaagttagattgcagatgagtgtgtttatattttagatataccaccccaacccaccaaaaattctttcttctaacttcttgttcctaaaaagaaaacaagaccactttctacactcttgccctacaactgagatgtgtcttcccaccaccgaatgagctggttcacagcatggagtcagtaacagtgactgctattatcactactaccatgagcatgacacacagttgcatcttgtaagtttagtctccaattaactgaattacacacttcatcttttccgattacagcacagggggattggcatagacttc

SEQ ID NO: 240820 - DNA, 1439 bp, Homo Sapiens
ttggggcgtttgtggtgccagagaaaagtagccagagcggcgcagtggcggccgcgttctgtggttttccgctattcccccagacccgcaccttctcggcctctttgcggagaatcgtgaccaagatgtggaacaagagcccgagcccagcacattgtgccctgtactatatctcagctgctttctgccactttggttgatgaagtgttcagaattgggaatgttgagatttcacaggtcactattgtggggatcatcagacatgcagagaaggctccaaccaacattgtttacaaaatagatgacatgacagctgcacccatggacgttcgccagtgggttgacacagatgacaccagcagtgaaaacactgtggttcctccagaaacatatgtgaaagtggcaggccacctgagatcttttcagaacaaaaagagcctggtagcctttaagatcatgcccctggaggatatgaatgagttcaccacacatattctggaagtgatcaatgcacacatggtactaagcaaagccaacagccagccctcagcagggagagcacctatcagcaatccaggaatgagtgaagcagggaactttggtgggaatagcttcatgccagcaaatggcctcactgtggcccaaaaccaggtgttgaatttgattaaggcttgtccaagacctgaagggttgaactttcaggatctcaagaaccagctgaaacacatgtctgtatcctcaatcaagcaagctgtggattttctgagcaatgaggggcacatctattctactgtggatgatgacaattttaaatccacagatgcagaataactggatctaactgggtacctgagatattttacagctggacctagtttcacaatctgttgtctccagctctgcatatgtctggccagggggcttctaggaagtaggtttcatctatcaaatgtctcctctgacttccttttgaaacttactgctcttctgttttattttgttttgtttgaagctcagagggagatgggcaattgacagggatgcaatccagggtgggatttcttgaggaagttacaaataagcttgttacaacatcaagatagatggaattggaaggatgctaccaggagagtacttacatagtgctcaggagtttctcttcttaaaatgtttactgctgaaagatgagcaggaccagggcgttataggcagagccctagccgagaaacctgctggcctctgcctgttttcatttcccactttggttgtgtggcattactttcagaattgcactttcctgcttgtcatgactttttgacacacttgccatgacgtgtgtttctgtgaacatgaagttctgcggtagtgcctccaggggcagaggaaaagaagaagtgttactgcattttgtacaaaataaatacagtcatatgtttaat

SEQ ID NO: 240821 - DNA, 1437 bp, Homo Sapiens
ttgggtcagcttagtccatactgcaaagatgaaccctgtaagaatggcggaacatgctttgacagtttggatggcgccgtttgtcagtgtgattcgggttttaggggagaaaggtgtcagagtgatatcgacgagtgctctggaaacccttgcctgcacggggccctctgtgagaacacgcacggctcctatcactgcaactgcagccacgagtacaggggacgtcactgcgaggatgctgcgcccaaccagtatgtgtccacgccgtggaacattgggttggcggaaggaattggaatcgttgtgtttgttgcagggatatttttactggtggtggtgtttgttctctgccgtaagatgattagtcggaaaaagaagcatcaggctgaacctaaagacaagcacctgggacccgctacggctttcttgcaaagaccgtattttgattccaagctaaataagaacatttactcagacataccaccccaggtgcctgtccggcctatttcctacaccccgagtattccaagtgactcaagaaacaatctggcgaaattccttcgaaggatctgctatcccagagcatcccgaattcagcacttttaaccccgagtctgtgcacgggcaccgaaaagcagtggcggtctgcagcgtggcgccaaacctgcctcccccacccccttcaaactccccttctgacagcgactccatccagaagcctagctgggactttgactatgacacaaaagtggtggatcttgatccctgtctttccaagaagcctctagaggaaaagccttcccagccatacagtgcccgggaaagcctgtctgaagtgcagtctctgagctccttccagtccgaatcgtgcgatgacaatgggtatcactgggatacatcagattggatgccaagcgttcctctgccggacatacaagagttccccaactatgaggtgattgatgagcagacacccctgtactcagcagatccaaacgccatcgatacggactattaccctggaggctacgacatcgaaagtgattttcctccacccccagaagacttccccgcagctgatgagctaccaccgttaccgcccgaattcagcaatcagtttgaatccatccaccctcctagagacatgcctgccgcgggtagcttgggttcttcatcaagaaaccggcagaggttcaacttgaatcagtatttgcccaatttttatcccctcgatatgtctgaacctcaaacaaaaggcactggtgagaatagtacttgtagagaaccccatgccccttacccgccagggtatcaaagacacttcgaggcgcccgctgtcgagagcatgcccatgtctgtgtacgcctccaccgcctcctgctctgacgtgtcagcctgctgcgaagtggagtccgaggtcatgatgagtgactatga

SEQ ID NO: 240822 - DNA, 558 bp, Homo Sapiens
aaattccagttagcactgtcctcctactaaagggaaaaggaaccaagtaaaacagtagggtttcatttggtacttaagagcccagtaatacccctttgggaaacacatgctttggtgcttacaagttcaagaaaatcaaaattgctttacatgcaatagctaattatggtctaccacagaaaacagggtgttttatgcattgagaattgttcacatgaagccctgaggtacccgcctttcatttaggcaacaaacagcctcccctgattttgtagtctttgtcaccatcttccccagtgccccaaattcagaatagtttgattaacaattttgtttggagatatggtcaatttaataagattttttatgatacagagtgtgcagatcatttaattttgaagcaccgtcatctagcggagtttcacttgcagtgcccaggtctccattttcatgtgtgtcagttactgcctttttattaaatcctgaaagaaaggagaaaaaaaagcagacactttttggtttaaaaagttggttttggtcaggtgcagtggctcatac

SEQ ID NO: 240823 - DNA, 1693 bp, Homo Sapiens
  misc_feature (334)..(346): n is a, c, g, or t
  misc_feature (1310)..(1329): n is a, c, g, or t
caacttgaagtttaaaaaccacctcttcatacacttattcgggtagttcttgaaaatccaaagggttatagcttacattcctaaaggattcagtcatagcagataaaggatgttctctgaaaaaaatgccatggccattccatcccaggctgtgttttaagaagataagaataacatggtttcatgtcacagcaaaaaggttttcgggtctgctacaatggacaatttttttgactaaataaatacggtggctaaaatccagtttgcagatctcatgtcatgcatggaaggtatgtgtttggcataggggattcataaagaaaaaacaagttgnnnnnnnnnnnnnaagaggcctaccctgtcaagagcaaacaataacatgtaacttgcttattcatttgtacaattaaatactagcttttgctcagagacaatgctataaagtattttaatgtcagtaacaatatacactacgaagtgcacttccattacaaattaacatggtgatatacagatgaacaccaccacccaaaacaaaccataaatgagcaacagttaaaacattaaatttataaatagcaaaaccacaaaataaagtatatacattttatagatttacccttgaacaaatatatagtgtatctgggaaagccaaaaaaaatgtgttttatcacataacatctgaataccagaaatgaagatactgataatattctaaaagccttgtaggctttctcccacttaatattcctttaactgtacgtcctttaaaacagtgatattagcaaagctatcacctctttaatgcaatgttgtgactttgcctagcaggttacaatgacctgcagaatattaaatcagagaggaggcactccatgtttaatcatgggacaacagacctaacaaatttataaacctgcatatgaagagagctttagtcaaacataaactgacatgaaaacccaaccaaaacaattactgtatcaaaatgtctttatctcatcttgcccaccttttagatgactggaaatcatttacttagaaagaaaactgccgtttgatttgaatgtactgtgtttcatgacatagtaataaatctgaacttttactaccagaaaaatttgtctttaagtgccaggactatcacaagacaaactttatgaacaactcaaaatgtataaaactgtcttttgtggaccccagaaaacaagcatttgaggctcaacatgaatgggtaaatgctccagtactgcgcacacagatcaacataattgagaacagatgttttacactcatctgcatttcttttnnnnnnnnnnnnnnnnnnnntgtttagtaacttttgagaatctatttctagtgcagcattgattgataaaagactgcttaaagaaaactattttgtactgcattgaataaagctgaaatgcaaactcattacaataaatgatcattaataattggtttagattttaggatgcacaataaatttttttaagtctaaagcctttcagttacaaaaattaagtcaagcctatatttctacaattcattgagtcaagctctgtcttctgaaataccacagttaacattctagaatataaaatatgaattcacttactctctgtattttaaagggtactccttataaaattccagttagcactgtcctcctactaaagggaaaagccaa

SEQ ID NO: 240824 - DNA, 1283 bp, Homo Sapiens
  misc_feature (142)..(154): n is a, c, g, or t
  misc_feature (1118)..(1137): n is a, c, g, or t
cagcaaaaaggtttcgggtctgctacaatggacaatttttgactaaataaatacggtggctaaaatccagtctgcagatctcatgtcatgcatggaaggtatgtgtttggcataggggattcataaagaaaaaacaagttgnnnnnnnnnnnnnaagaggcttaccctgtcaagagcaaacaataacatgtaacttgcttattcatttgtacaattaaatactagcttttgctcagagacaatgctataaagtattttaatgtcagtaacaatatacactacgaagtgcacttccattacaaattaacatggtgatatacagatgaacaccaccacccaaaacaaaccataaatgagcaacagttaaaacattaaatttataaatagcaaaaccacaaaataaagtatatacattttatagatttacccttgaacaaatatatagtgtatctgggaaagccaaaaaaaatgtgttttatcacataacatctgaataccagaaatgaagatactgataatattctaaaagccttgtaggctttctcccacttaatattcctttaactgtacgtcctttaaaacagtgatattagcaaagctatcacctctttaatgcaatgttgtgactttgcctagcaggttacaatgacctgcagaatattaaatcagagaggaggcactccatgtttaatcatgggacaacagacctaacaaatttataaacctgcatatgaagagagctttagtcaaacataaactgacatgaaaacccaaccaaaacaattactgtatcaaaatgtctttatctcatcttgcccaccttttagatgactggaaatcatttacttagaaagaaaactgccgtttgatttgaatgtactgtgtttcatgacatagtaataaatctgaacttttactaccagaaaaatttgtctttaagtgccaggactatcacaagacaaactttatgaacaactcaaaatgtataaaactgtcttttgtggaccccagaaaacaagcatttgaggctcaacatgaatgggtaaatgctccagtactgcgcacacagatcaacataattgagaacagatgttttacactcatctgcatttcttttnnnnnnnnnnnnnnnnnnnntgtttagtaacttttgagaatctatttctagtgcagcattgattgataaaagactgcttaaagaaaactattttgtactgcattgaataaagctgaaatgcaaactcattacaataaatgatcattaataattggtttagatccaa

SEQ ID NO: 240825 - DNA, 1582 bp, Homo Sapiens
  misc_feature (150)..(193): n is a, c, g, or t
  misc_feature (326)..(366): n is a, c, g, or t
  misc_feature (672)..(964): n is a, c, g, or t
ggttaaaatgtctttccacagggatgctgtacaaagaattcctgtacaaggtatgaacagacatctataaattcccttttaatgttaggattccaaatgtcctaaattctgacaaaactaaacctataaaattagtgctttagttcagcnnnnnnnnnnnnnnnnnnnnnnnnnnnnnnnnnnnnnnnnnnnngtacattcagtgtaaacttttaatgaattacacaggtgaatcatatgattagcatgaattgttgtaagtgatggatttcattatggattgtccttaaatcagtatgactttgaacaaagccaaactcagtacnnnnnnnnnnnnnnnnnnnnnnnnnnnnnnnnnnnnnnnnngcagggtcacgttgggaatatcatggtgagcagaaataggtacagtccctgccataggggcttatagtccaatgtgggaaatatttattacataaccacccccaaactgcaaaattatacctgaggaaagtatgactacaagagcacatagtagggatttgactcggtcaatgaataatgatgattggggagttaatgatgtgaaattgggggacagagaaggaagtggggaaagcatatgaaaagtaccagtggcaggaaggagcatgtggctcctttcatttctttttcccacctcatattccnnnnnnnnnnnnnnnnnnnnnnnnnnnnnnnnnnnnnnnnnnnnnnnnnnnnnnnnnnnnnnnnnnnnnnnnnnnnnnnnnnnnnnnnnnnnnnnnnnnnnnnnnnnnnnnnnnnnnnnnnnnnnnnnnnnnnnnnnnnnnnnnnnnnnnnnnnnnnnnnnnnnnnnnnnnnnnnnnnnnnnnnnnnnnnnnnnnnnnnnnnnnnnnnnnnnnnnnnnnnnnnnnnnnnnnnnnnnnnnnnnnnnnnnnnnnnnnnnnnnnnnnnnnnnnnnnnnnnnnnnnnnnnnnnnnnnttattcctaactttcttaaaaataatgataaaaaatgtcagaaaaatctaacacacaaagtgaaagtttgctggattaaaaaataaatatttgcaggcctctcgtattcaggaaatttatcaatatgtttaaatagtgaatagggtgctttgttctcagaagtattatagcagaagatgaaaagttacaattagcatgtgagaaaagaaagtgttgtgtggaaataggtaaaagctcacattttctaaagaaaatatgttgcggaacttaaaggaatgtcatgctccttgctagagcttagtgatgacattggccatggcaacgtggcaagggacagtggggaggagagaaggaggatggcagcactagtatgtgtttccgagttatctcactgtcacttccgcttaccaacaaacataatcctggggacatactggccatcaggagaaaggtgtttgtcacttctttcataaaccagattgaggaggacaaattggtctgccaatttgaggatttctttattttcagcaaacaccttgtttaaagctggactgagtgggcagtcatccaagtgacgaataatcattaagggtttgttgctttaaaagacagagccaa

SEQ ID NO: 240826 - DNA, 1461 bp, Homo Sapiens
  misc_feature (947)..(957): n is a, c, g, or t
ttggctctttaacccagggaagataatcacttggggaaaggaaggttcgtttctgagttagcaacaagtaaatgcagcactagtgggtgggattgaggtgtgccctggtgcataaatagagactcagctgtgctggcacactcagaagcttggaccgcatcctagccgccgactcacacaaggcagagttgccatggagaaaattccagtgtcagcattcttgctccttgtggccctctcctacactctggccagagataccacagtcaaacctggagccaaaaaggacacaaaggactctcgacccaaactgccccagaccctctccagaggttggggtgaccaactcatctggactcagacatatgaagaagctctatataaatccaagacaagcaacaaacccttgatgattattcatcacttggatgagtgcccacacagtcaagctttaaagaaagtgtttgctgaaaataaagaaatccagaaattggcagagcagtttgtcctcctcaatctggtttatgaaacaactgacaaacacctttctcctgatggccagtatgtccccaggattatgtttgttgacccatctctgacagttagagccgatatcactggaagatattcaaatcgtctctatgcttacgaacctgcagatacagctctgttgcttgacaacatgaagaaagctctcaagttgctgaagactgaattgtaaagaaaaaaaatctccaagcccttctgtctgtcaggccttgagacttgaaaccagaagaagtgtgagaagactggctagtgtggaagcatagtgaacacactgattaggttatggtttaatgttacaacaactattttttaagaaaaacaagttttagaaatttggtttcaagtgtacatgtgtgaaaacaatattgtatactaccatagtgagccatgattttctnnnnnnnnnnntaaatgttttgggggtgttctgttttctccaacttggtctttcacagtggttcgtttaccaaataggattaaacacacacaaaatgctcaaggaagggacaagacaaaaccaaaactagttcaaatgatgaagaccaaagaccaagttatcatctcaccacaccacaggttctcactagatgactgtaagtagacacgagcttaatcaacagaagtatcaagccatgtgctttagcataaaagaatatttagaaaaacatcccaagaaaatcacatcactacctagagtcaactctggccaggaactctaaggtacacactttcatttagtaattaaattttagtcagattttgcccaacctaatgctctcagggaaagcctctggcaagtagctttctccttcagaggtctaatttagtagaaaggtcatccaaagaacatctgcactcctgaacacaccctgaggaatcctgggaattgaccttgtaatcgatttgtctgtc

SEQ ID NO: 240827 - DNA, 1010 bp, Homo Sapiens
  misc_feature (156)..(192): n is a, c, g, or t
ttggtgaccttcccatgcgtgttaggagtttctgttctcttttctgaggcctgaggaagaaacccaaagattacataggttggagccatattcctgccccaagagagggagctgggccctcgggtcggcaggaggctgggctggattggacgtttnnnnnnnnnnnnnnnnnnnnnnnnnnnnnnnnnnnnnatgtttacttccctgctgttctgcccccttggctccaggctttgaaggggaagccaggcttctgctctgcatccgttgtttcgtttcatgatcaaaacaacattatctacaaagatcgtagagagcttggaaaacagagagcaacatgccccagtccctctctctggccagttcttgtggcagccccattggcctggagacatggttttttgtggttgcagctgcagctgtccccccgtcttttaactcgacatcaaaagcctctctcctgccagtgccataggtttgttagagctactgttttgtaacagctgctcaggtgtccccaaactcctggagttttccaccctgagctgttaaaaacctgccctgcctgtcacccatttctgtgccaccagcccaccccctgcctccactctcctccctgccaccttctgtccctgccataggaatatggggacaccgtgtacaccattgaagttccctttcacggcaagacgtttatcctgaagaccttcctgccctgtcctgcggagctcgtgtaccaggaggtgatcctgcagcccgagaggatggtgctgtggaacaagacagtgactgcctgccagatcctgcagcgagtggaagacaacaccctcatctcctatgacgtgtctgcaggggctgcgggcggcgtggtctcccccagggacttcgtgaatgtccggcgcattgagcggcgcagggaccgatacttgtcatcagggatcgccatctcacacagtgccaagcccccgacgcacaaatatgtccagggagagaatggccatgggggcttc

SEQ ID NO: 240828 - DNA, 809 bp, Homo Sapiens
ttggccgagacttggagcgcagcctgcctgccgtggcctccctgggctcctcactgtcccacagccagagcctctcctcgcacctccttccgccgcctgagaagcgaagggccatctctgatgtccgccgcaccttctgtctcttcgtcaccttcgacctgctcttcatctccctgctctggatcatcgaactgaataccaacacaggcatccgtaagaacttggagcaggagatcatccagtacaactttaaaacttccttcttcgacatctttgtcctggccttcttccgcttctctggactgctcctaggctatgccgtgctgcggctccggcactggtgggtgattgcggtcacgacgctggtgtccagtgcattcctcattgtcaaggtcatcctctctgagctgctcagcaaaggggcatttggctacctgctccccatcgtctcttttgtcctcgcctggttggagacctggttccttgacttcaaagtcctaccccaggaagctgaagaggagcgatgtgagtgcttgcgggtaggggggtgcagcgagggttacccacagccccaagagaggggagttgcgggcatgagagtcagtctgaagcatctcgccacctctgagcagcctccagtagcctgagggggagcttgggtgggggtaccccaggctgctagggtgtaactgtcctcggtccgggaccgagtctgctcctccagggtatcttgccgcccaggttgctgttgcccgtggacccctgctgttctccggtgctctgtccgagggacagttctattcaccccc

SEQ ID NO: 240829 - DNA, 1008 bp, Homo Sapiens
ttggcaggagtttgctgccagggctgcaaaacagctcgaatatcagcaattagaagacgataaactttctcagaaatcatctagcagtaaactctctcggtctccattaaagattgtcaaaaagcctaaaagcatgcagtgcaaagtgatacttctcgatggatcagaatatacctgtgatgtagagaaacgctccagaggacaagtgctgtttgataaagtgtgtgaacacttgaacttgctagagaaagactactttgggcttacgtatcgagatgctgaaaaccagaagaattggttggaccctgctaaggaaataaaaaaacaggttcgaagtggtgcttggcacttttcatttaatgtgaaattttatccaccagaccctgcccaactatctgaagatatcaccaggtactacctctgcttgcagttgcgagatgacatcgtgtccggaaggctgccctgctcctttgttaccctggccttgctgggctcctacactgtccagtcagagctcggagactatgacccagatgaatgtgggagcgattacattagtgagttccgctttgcaccaaaccacactaaagaactggaagacaaagtgatcgagctgcacaagagccacagaggaatgacgccagcagaagcagagatgcatttcttggaaaatgccaaaaaattatcaatgtatggggtagatttacatcatgctaaggactcagaaggggtagaaattatgttaggagtttgtgcaagtggtctgttgatatatcgcgaccggctgcgaataaacagatttgcctggcccaaagttctaaagatttcatacaaacggaacaacttttacattaagatccggccgggagagtttgaacaatttgaaagcaccattgggtttaagctgccaaaccatcgagctgccaagcgtttatggaaagtatgtgttgagcatcatacatttttcagactactgttaccagaagcaccttcccaagaaattcctaa

SEQ ID NO: 240830 - DNA, 1262 bp, Homo Sapiens
gtaagtttcctgaggtctccccagccatgctgaactatgaatcaattaagcccctttcctttataaattacccagtctcggggtatgtctttatcagcagcgtgagaatgggttaataaacatatattttctgactaccccctcccctcctccaaccactcttaccttatcctgatggcactgttcactatctgaaattatattatgtgtttacatgtttgtctggctcacttctcccactacattttaaactcagtaagagcagagacttcgcttatcctattacatttctacctcgagtgcataaaaaaaagtctgaaacactggaggcacttgataagtatttgctgaatgcatgcataaattcatggatggatggcatatggattcatggagagaaggtaaagacagtattaaaaccaggaaggtatttttaaaccaagaaatattccaggaaccagatgttttaataagctatttgtaaaacattcctttttgctttgaaaagttgattggctgggcccagtggctcatgcctgtaatctcagcactttggggaaaaaaatcaaaacaatgacattttgttacatttgaaaatgataagaaattcaaatttcaatgggcataaataagttttactagaatacaagtgaactcattcatttaagtattatctatggctactttggtgctacaacagaagcactgagtagctgctcttctgtcattctgggcccacaaatcttaaaacatttattatctgtccattttacagaaaaaaactgccaactcctgttccaatagattttcctaccatagagtgaggccatacaggtcggcaaatacagaatctagagacacacagaaagtagaaggcacaatagagaacatctagtccaacatctttattataggagaagaaataaaggtcaaaaaggcaaagagaatttcaaattccacaataatctgaacaaacttgaccctagaacccaatgctgacgcctcatccactaaatcaggtgtgtataatcacagtattttaacaaaatatatccagacaggtcagagaagcttgagaaaaacttatcactttacaccagttagaactaactgaagttgattgtcacatatatgaactttatggtaaggaaatttttcatgttcttaatggctggattttaaaacatacctgagggtgcttggacaatgaaaattcttctccccaccttgagaatacaaattaaaacaggattaagatccaa

SEQ ID NO: 240831 - DNA, 1362 bp, Homo Sapiens
  misc_feature (894)..(914): n is a, c, g, or t
ttgggtgtgtgtgtgtatatatattcctatcagatactcatattcctaacttctaaatatctggtatagtgtttgaaatatgattaaatgtacctatgcttgggcaaaatagcttttgaaaacaggaactcatgccaaaagcccctggttgtctgaaaggtatgctttactcagtctaatggtgctgttggagtctggggagaatgtcatgctaataaatagaacactataaaaatattaagagaatgtcctaatgaagtgtgcatgaaacatgttgacaattttttatgaacaacagaaataaatcattttaaaagttctcagaaaacctatttatgtcatctttgcttttgtgagtttgtgttaccgcacaactcccatacttttaactgcctgtaccttggaaatgtctgctgttcgtaacttcttcagtttgtataacagtgctgcagctgtatttggtttttacctctccctgttcccacggcacaccgtcagtgaaccttcaccaaaccccacgtgcattttatcctcagtgaattgttggtggaggtgcacctgactgctctgtgagaatccgtgccatggctcctttgggtcaaagatgccctcccctccgtcttaggttcttgtctagaaatgagtaatgtcttacaagcatgcctagttctaatcatctcatcctgtgtttgtgattgatgtttgcctgcctaaatgtacaaaccaccattgtgtccaaagcacagctattcatgacttaattttctaatctcaccacagagaaagtggctcatgccaaagaagaaaaccttagtatgcatcagatgctggatcagactttactggagttaaacaacatgtgaaaacctccttagctgcgaccacattctttcnnnnnnnnnnnnnnnnnnnnnaaacacctgcttaccccttaaatgcaatttatttacttttaccactgtcacagaaacatccacaagataccagctaggtcagggggtggggaaaacacatacaaaaaggcaagcccatgtcagggcgatcctggttcaaatgtgccatttcccgggttgatgctgccacactttgtagagagtttagcaacacagtgtgcttagtcagcgtaggaatcctcactaaagcagaagaagttccattcaaagtgccaatgatagagtcaacaggaaggttaatgttggaaacacaatcacgtgtggattggtgctactttgaacaaaaggtccccctgtggtcttttgttcaacattgtacaatgtagaactctgtccaacactaatttattttgtcttgagttttactacaagatgagactatggatcccgcatgcctgaattcactaaa

SEQ ID NO: 240832 - DNA, 632 bp, Homo Sapiens
  misc_feature (420)..(449): n is a, c, g, or t
ttggcggacagtgcggaactaaaggtggcccgtaagctggtcatcattgagagcgacctggaacgtgcagaggagcgggctgagctctcagaaggccaagtccgacagctggaagaacaattaagaataatggatcagaccttgaaagcattaatggctgcagaggataagtactcgcagaaggaagacagatatgaggaagagatcaaggtcctttccgacaagctgaaggaggctgagactcgggctgagtttgcggagaggtcagtaactaaattggagaaaagcattgatgacttagaagacgaaagtggctcatgccaaagaagaaaaccttactatgcatcagatgctgtttttgactttactggagttaaacaacatgtgaaaacctccccccctccgaccacattctttcannnnnnnnnnnnnnnnnnnnnnnnnnnnnnaaacacctgcttaccccttaaatgcaatttatttacttttaccactgtcacagaaacattcacaagataccagctaggtcagggggtggggaaaacacatacaaaaaggcaagcccatgtcagggcgatcctggttcaaatgtgccatttcccgggttgatgctgccacactttgtacagagt

SEQ ID NO: 240833 - DNA, 1088 bp, Homo Sapiens
  misc_feature (290)..(363): n is a, c, g, or t
ttggatacagcatttccgcatgagtgatgatgtccactcactgggaaaggtgacctcagatctggccaaaaggaggaagctgaactcaggaggtggcctgtcggaggagttaggttctgcccggcgttcaggagaagtgaccctgacgaaaggggaccccgggtccctggaggagtgggagacggtggtgggtgatgacttcagtctctactatgattcctactctgtggatgagcgcgtggactccgacagcaagtctgaagttgaagctctaactgaacaactaagtnnnnnnnnnnnnnnnnnnnnnnnnnnnnnnnnnnnnnnnnnnnnnnnnnnnnnnnnnnnnnnnnnnnnnnnnnntgaggagtcagggaatcagtcagataggagtggttccagtggccggcgcaaggccaagaagaaatggcgaaaagacagcccatgggtgaagccgtctcggaaacggcgcaagcgggagcctccgcgggccaaggagccacgaggagtgaatggtgtgggctcctcaggccccagtgagtacatggaggtccctctggggtccctggagctgcccagcgaggggaccctctcccccaaccacgctggggtgtccaatgacacatcttcgctggagacagagcgagggtttgaggagttgcccctgtgcagctgccgcatggaggcacccaagattgaccgcatcagcgagagggcggggcacaagtgcatggccactgagagtgtggacggagagctgtcaggctgcaatgccgccatcctcaagcgggagaccatgaggccatccagccgtgtggccctgatggtgctctgtgagacccaccgcgcccgcatggtcaaacaccactgctgcccgggctgcggctacttctgcacggcgggcaccttcctggagtgccaccctgacttccgtgtggcccaccgcttccacaaggcctgtgtgtctcagctgaatgggatggtcttctgtccccactgtggggaggatgcttctgaagctcaagagtgaccatcccccggggtgacggggtgaccccaccggccggcactgcagctcctgcaccccc

SEQ ID NO: 240834 - DNA, 1390 bp, Homo Sapiens
  misc_feature (281)..(293): n is a, c, g, or t
  misc_feature (390)..(434): n is a, c, g, or t
  misc_feature (1300)..(1314): n is a, c, g, or t
ttttttaaagcattccataggctgaaagactgtagagattaatcttttgattaatttctaattagcccctacctatattccagaggagatggtcaatattaccactctgaagaggccaggctaagacccagaagcacttctagaacagatgcaattaattcctgagagtttagtttatgaacctcactggtaaacgctagagcgctctcattcagtcacaactcagtagaaagttagaaaatgcagagagcaaacctttcaccagtttacccttgtatccnnnnnnnnnnnnnaaaaggaagtcatatgaattttaaaacagggaatgttcaaaatggtccaaatcggttattattaaaataaatcctgaatacaattaaagacaatttnnnnnnnnnnnnnnnnnnnnnnnnnnnnnnnnnnnnnnnnnnnnnggaattttaagaaaattaaattctctttcaaattagttttctaccaaatccaggatagataaaagcagagctggaatgattttgaaatctaaacttattttggctttgaataactttcaattcgattctcctaatacagaacatctgtttttggttgtggttatacgaagctgttatttcacagatagagggaaatggcagagaactgatcagaatccctttcgtggggtattttttttagaaaggaaaataaactaaggacaacattacattttccccaacccctcaatgtgtagactgagatcctgaatatcttgtcaaccattccagtttaacactttagtgttaggataattctaatcatttttttaattaaaagagaacatataaaagtatccagagttcttccagtttcatacagaactccaaataaattttcacagaatgaaaaatatttctgtacaaacatttaaaatgggctgcaataaaatgccaacaagagaaataatgacccttccatgacctttgtggtgatgacccctccatgaggagttcagttgcatatttctgcagcaaaagaagctggagatgtgactggcctaacttctaaaaatcccaaaatctcccaacaggtaccaaaaaggttcatttgtaatgacagttcatttgcatttaacagctatatccttcttaaatcatttccttcaatcctgctacctaaactttaatgttaccaaaaaagttagaatttcagttcttgttaacaatgcacataaatccaaacttggaaaatattacaaaattctttcaaaagcttcaaatacaacacaaaaattgtccatctttataaattgaaaatttcccannnnnnnnnnnnnnngactaaaatagttcccccacccacctgaaaaatctggaactgaaatcttctatgtttagcaaaatgtcccagccaa

SEQ ID NO: 240835 - DNA, 1984 bp, Homo Sapiens
  misc_feature (1266)..(1358): n is a, c, g, or t
  misc_feature (1592)..(1826): n is a, c, g, or t
  misc_feature (1849)..(1859): n is a, c, g, or t
aaacagaaacatgcttttaatatactaatagcataattttcatcccattgcactttttaaaatattattaagtttcaaagccactcaaaggcaagggtctagcagacagtacttttaacaaatcattttttaaaataaaaaaacctgaggaaaatttgtgtatgtacaagattagtattaactcctttaaggcttacatccatgacagcatgtatctaattagaaagctatgggaatcaatgctaccttcccttgctcataaaaacatttaaactgtagttctggcacacgaaatttgccccaaagaaaaatgtctttcaaagcccttctgtccctagatctgttttgcaaagtttctgatatggggtacttaggtcactaatgacaggaattaggatcttgtcttctttcttgttcattatttttatttgtggcttaatgtttcacctgtatgtgaaagatttgggggttcaagtcacagtgctgaattttactttttaaaagaaaaactatcaaaaattgcttttaaaaaatcctaattacattagaaaataggatacctgtacattcatttttcagagaaggcactatgacaatggagaaaaacagctttaaagagcttagataatcctctgaattaaaggcattcttactacttctgaacacagaaaacgcctggggattgtactggcaagagaccacctattctaaacctcaggtacaaagtgtccacttgcctccagacaatactgaattgtactttctccttggtacttcccattcgatgaagcagtctctctctgtggtctctgaaccactatttataaaagtgatgactccaggaccacagcccataccacctgaggcaatccctgggtacaaagctaggaatctgaactttttaaacaagcctgctaggtaagtcttatgcactccaaggtagatgagaaccactaccctaaacatagctacaacaggacttacagcaagaaaaaccatttgactgcaaatattattttacaatgggcttcttaatgtcatttttaaaaattaatcacacaaatagtttgtactttcataactgaagcttgtcttcattatgcccttatcccttgactagaattttgttaaataaaacatatgtaagccagaatgacacagccatgttgacaacttgagatggaagatcaaatcatcctaaattacatttcaatagttccaggaaagaaaaaagtcctgtgaagacttccatgtaagttacatcannnnnnnnnnnnnnnnnnnnnnnnnnnnnnnnnnnnnnnnnnnnnnnnnnnnnnnnnnnnnnnnnnnnnnnnnnnnnnnnnnnnnnnnnnnnngcatggacttgattcaatctacttaattttgctataactcatacatacatacatacttatccaaactcaccctatccaaggcaccattttacaagccaagtagaacactgtgtgtgatccactaatgaaaccaaccaccagtacaaggcagtatttttgtgtgtttgaccaaagcgctttacttcatgtaagagaaaaaataaagcaaaacaaggccaggttccagtggctcannnnnnnnnnnnnnnnnnnnnnnnnnnnnnnnnnnnnnnnnnnnnnnnnnnnnnnnnnnnnnnnnnnnnnnnnnnnnnnnnnnnnnnnnnnnnnnnnnnnnnnnnnnnnnnnnnnnnnnnnnnnnnnnnnnnnnnnnnnnnnnnnnnnnnnnnnnnnnnnnnnnnnnnnnnnnnnnnnnnnnnnnnnnnnnnnnnnnnnnnnnnnnnnnnnnnnnnnnnnnnnnnnnnnnnnnnntgacagtacaagagtccgtctcnnnnnnnnnnnggaataaagcgaaacacaggcaattttaccaagtataaaagaggtgttaaaacgtaaacttccatagaacatttcttggtatactacgaaaataaggcatgactcagctgggcggggtggctcat

SEQ ID NO: 240836 - DNA, 1193 bp, Homo Sapiens
  misc_feature (261)..(271): n is a, c, g, or t
  misc_feature (802)..(862): n is a, c, g, or t
tgtacaaacttcttggcttcatttccatgaagctgtttcaatatattcagtatactttgtccttaatgctgcttctgttaacagtgatctctttctttttttcattcttatatcttcattagttcatcataaatctgtccagttgaggcctcaggaccacggcatgatttcatgactccgaagtattttacagaaacattttttaaataagggaaatattttatataccagatggttcacaagtgatggctcatagctagnnnnnnnnnnncttctaaaaaatgtcaggtttttaaaatcatttaccttattaaaatgaaaagtgccatacttaacttttaaaggaaagacctgacttgctttttctctatttagactgtttttgtactttactaatctttaaactatcaggaaaaaaaccaaaactttataccaatgatttagtaattttgaggcatagggtagcttacgtagtggaggatgtgccaaatattctcttcaaatgccaccttctcaatttataactaaaatagtgttatctgactaattcctctgaattttgatgtaagatctatataggcccccaaaatgatcgtagtacatgccagtcatttctcagtgaaataaatacaataccagagtacattatgggttttattgctttcttttatggtagacctgttaatggggaaaaaatacatcaaatcaaatagaatcttatatctgtatgttaaaatagagcacttacctgaagtcagtggcctggatcatagccctggatcatttcccagtctgtcctgtnnnnnnnnnnnnnnnnnnnnnnnnnnnnnnnnnnnnnnnnnnnnnnnnnnnnnnnnnnnnncaagtggctgcagtagatgatggctgagagcccttcctgttcccagatgccttggtccaaagaccccacccctctgctggtcctgccaacgtgttggtgctataagctgcttcagatataaaattggtttatctataatgtttgttcatttaatagcttctaaaaggcctttttgttatacagtgctttttttctagttttatggacttgattactgtaataatgtcttgtttttagccatgtaactacaaaccagatattctcttgatgtcttagtaaatttgcatttgatatatcattgatgagattttgttgttagtaatattctttg

SEQ ID NO: 240837 - DNA, 867 bp, Homo Sapiens
gaagagctaatgtggagaagcaggcttaaagaagacaacatttggctgaacaaaggaaaccatttcccccatttagaactatttgaaaatggaatgagctgcctgtcccaggaggtccctcaaccaaagatgacttcttagtaggtagagactttgtagagcagattaaagaattgcctttgcaggggaggggaaaaactgggtaaaataagctctacagattcaatgtattatcctggagatgactgctggcttgaagagctaccttttggccaggcatttttataggaatgtagctttagttacattatattcagacatttaccttgactaaaaagcatgaaaatatgaaatacaggttgttaaaaatgggtgtgtgattatgacagagatgttacgaattcattgattttaggatatctcacagtaaaatggcccagtgaagtgattgtaacaatttaattgaataagtgactaagaataacttaatgtttgcaatgagaaagaaaatacttcctgaatttctaagtatactctatattttctatgcaaaataagtaatcagaggtattcgatttcttaaagaaaaatcagtataagcactgttgttttttattctaatttcttaagagaaaaaaattagcaaattctctgattcatttttattccacgaaagtacaccttggccattttcctgcaggaatgcccagccttgagtttgcttctcctcagcagttattgtcttatgtttgtaagcaacaatacgaaggaggaaaaggaaatgttaaaagctttcttaaaaattaccacagcaggccgggtgcggtgactcacatctgtaatcccagcactgggggttgttgccaa

SEQ ID NO: 240838 - DNA, 1753 bp, Homo Sapiens
  misc_feature (1420)..(1434): n is a, c, g, or t
ttggggatttgagtccagaaattacaacagaagatatcaaatcagcatttgccccctttggtaaaatatcggatgcccgggtagttaaagacatggcaactggaaaatccaaaggctatggttttgtatctttttataacaaactggatgcagaaaatgcgattgtgcatatgggcggtcagtggttgggtggtcgtcaaatccgaaccaattgggccactcgtaaaccacctgcacctaaaagtacacaagaaaacaacactaagcagttgagatttgaagatgtagtaaaccagtcaagtccaaaaaattgtactgtgtactgtggaggaattgcgtctgggttaacagatcagcttatgagacagacattctcaccatttggacaaattatggaaataagagttttcccagaaaagggctattcatttgtcagattttcaacccatgaaagtgcagcccatgccattgtttcggtgaacggtactacgattgaaggacatgtggttaaatgctattggggtaaagaatctcctgatatgactaaaaacttccaacaggtaattcgatttttcatagcattctttaaggtttccatcttacatgtcacataaaagctttggaaactctgtaaaatgaacaataaaataaagcatatagctactttcagttgattgtatttcaaaattgattatttgcggtattaactgaatcttaatactttcttttcacaggtgtcaccaccccaataaacttagacaatgataaataacagagtcctattcacataagggtgcttacttagtttttctcttccttgtctcccactctttcttcatatacggtgtttcttatgtgttccctaaaacaatactttgctttttcctaggttgactatagtcaatggggccaatggagccaagtgtatggaaacccacaacagtatggacagtatatggcaaatgggtggcaagtaccgccttatggagtatacgggcaaccatggaatcaacaaggatttggagtagagtaagttgtttgggtttttccagtatagaaacgtatggttctgacaaaataaataaaagtgtgttttcctagggagaatctattttaattatatacattgagctatttggcattatgagcattatagaaactaatctaacaaaatatgatttatgaggctaagaaattacttctcattacctaggtggaaaggggggattggggtaacatttagtgtgtcctatgatccctgtaagcagttggtagaatttgatttacatttctgatacacttttatttatttttgcatgtaaaagatctttgtccagatatattcaaaagtttgatggttttatgcctatgtggtatgtgtgagaaatctgaggtttgtgtgatacaaagtaactggccnnnnnnnnnnnnnnncttttgttgatagagtggtttcctcctttgtaattcccctgcccagggccagcccatagctttattttcagatttcttcctttgagactgtttccaacatgaacttgtttttaaaatttcttatgtaatagatgatgtgttgaatcatttcacaatttttaaaaaattagtttgcagatactcctcaaaacatcagtgtgttaagttgtggtttatcttaaaaatatcaaagactaatactggaatatgtattctacacatatatcatttatttctttgatctttctatttgttgtaagtgtgttgatttctggttttc

SEQ ID NO: 240839 - DNA, 936 bp, Homo Sapiens
tatggggctttagtcttcttgtgtctctttaggggaaattcatgaagcagccctgaaagcaacagctcctttagtctcgtcctttcttccctgtgttcaatggctggctgtgcttcaggagtcaaagaaaccaagttcagctgagcactggggcgcagcagccagagccagggaggtgacagcttccaggcatactaaggtgtaccacggggttgcctgagcagtcaccttgcttgggcccctgtgccaagcacctcagggacagagactctgaaaaatgcacatggctaaaaaggtttaagttgccgtcaaatatgacatgataagaagctccctagaagccatgttaatggaatgttggctcccagcctagagaaatgaggtgatgacccttaatcacctcctcacctaccctggctctgggaggtacccttccggggctcacttgcaagacccctatttctattacaaaaatgccagctgtctatagctggcttcacccaatgccatgatctagggtaagactaaagtaaaaataagcagtaaaaggaatgcataccccagtgtctatcaaatgtaaaaaataacacgaccttcacaaagaaaaagaacaaagaacacatatcaccagcagtgatgtgacaactccagtcctgggggttgacacctgctgctgatggtgggggagggtggtttggggtcccaggtagagtccagcactctgagcaggtatctacgatgccaccagagctcttcactccctcagtgagctcagctggccccttgctctgaggaatgtgctctgtgtcctaacttcggacccaatgtgggaagcccacaagagcactttcagaaaggcccaagccagtcactgatcagattaggaagagtctgtgttgctcattatttctttgacttactggggagttaagccaa

SEQ ID NO: 240840 - DNA, 1311 bp, Homo Sapiens
  misc_feature (350)..(369): n is a, c, g, or t
  misc_feature (506)..(536): n is a, c, g, or t
  misc_feature (941)..(1051): n is a, c, g, or t
catttcaaagcttattttcagggataaaatttagtttttataaataaatatacagtaagagagaaaaccagagagagaaatcaaattgtacaaaaagagaaaaacaggtgtctttaaatttgaagttctcagaagaatagaggtagaagaaaatgaagacaaaagaaacacctgactgtagatactgaatgtagctgaagttatgtcactattcctgtggtgagatcagacagtaacatatgtccaggaaggatgcaagaagtgaaaactcaggcaggaagaaataaagcccataagtaagttatatagatatttagaaagatttgaagccctttgcaattgaatatgtnnnnnnnnnnnnnnnnnnnnaattttgaagtgatttataatggagaatatcctaaacacacaaataccacatccacatatccattatgcacacgtacaccataacaaacacaaataaatataccacacccacccaccataccaaacacaaataaatnnnnnnnnnnnnnnnnnnnnnnnnnnnnnnnagagactgaaaggaaagagaggaagactcagaaagaacccttagaacccttcccatttagagactggagctatcatggtacttctctcttcgtaagtggtggagttcattctcccactttctactaggagaataatcccattccatttcctcggctgcaatggtaataattattttctcctcctggtattgtgtttgatcagggtttggcttcccacattgcctcacgtgatatttatgtttcatgcctcctagattgtgctttattgtcatgcaaaccaaatcaaaagttcctacagacgaataagaaaggaatggttaaagccttgccttcagatttctttcctctgtaaaattattaataagctgcaaccctcaaaagaaatatagtaaaatcatttgttcnnnnnnnnnnnnnnnnnnnnnnnnnnnnnnnnnnnnnnnnnnnnnnnnnnnnnnnnnnnnnnnnnnnnnnnnnnnnnnnnnnnnnnnnnnnnnnnnnnnnnnnnnnnnnnngagttcatattgcaaggtgttgtggagacaaacaataaacatgttaagcaacttgtatgtatgctggaaggtgataagagctatgattaaagaaaaaaagtaaaacagtgtaaggaggactgaggattctgggtgtgtgttgggaagggctcaagagagcagtgagcaatatcatagggtaagcagggtaggcctcgatgagagggtgatacctgggcaaaaatttataagagatgatatgggtctggaggaaaagccaa

SEQ ID NO: 240841 - DNA, 731 bp, Homo Sapiens
ccagctcacagtgctggagcagcctggctatgccaaggcctcccagggagcagctgaacccctggccaaaccgattctgccagatgcagcctggaattcttagctttatgccctcagggttctacccctaccccaaataatacagtttcccattgttgctactggacaagtaagcacaggcttggagcatgacaagcttctccatggtaaccaggaagtggctgcccttcttccctgccaatcttctggtatctaaggcactcctctgccaggtaagaaggccctatggtgaaagtggcagggcaaagggaaatgctaatacctggtcgttaaaagcacagctgagtcaggccctatcctaaccctggccgcttgttcgtggggaccgcacagtctccatgtggtccagggctaggctggaagccatccatccctctatgactccaaactgagaagcaggaccctccagtgctagggacatcagcccaccctaggcacagacactgcctgtcacctgcctcatcagccatcctctcccacagagcacaggttttgggtgaagacttggaatatgtttttggagaacagaacaactaactcaccagattcttcccaatatgctcattcacgactcagaataacagcaaagtggccactgttgtaaatgaggaaatagcctcaaagtggctgagtactttaaggtcatacaactcgtctattaagaaaaatgg

SEQ ID NO: 240842 - DNA, 950 bp, Homo Sapiens
ttggccatcccagaagctgctgttagctcgccggtcctcggcacgccgcccgttcgcccctgcgctgtccgcccttcccctagcgttacttccggtccctcgctgagggggttcgtgcggctcccaggaggcgtgaaccgcggaccatgagcgtgggcttcatcggggccggccagctggcctatgctctggcgcggggcttcacggccgcaggcatcctgtcggctcacaagataatagccagctccccagaaatgaacctgcccacggtgtccgcgctcaggaagatgggtgtgaacctgacacgcagcaacaaggagacggtgaagcacagcgacgtcctgtttctggctgtgaagccacatatcatccccttcatcctggatgagattggggccgacgtgcaagccagacacatcgtggtctcctgtgcggctggtgtcaccatcagctctgtggagaagaagctgatggcattccagccagcccccaaagtgattcgctgcatgaccaacacacctgtggtagtgcaggaaggcgctacagtgtacgccacgggcacccatgccctggtggaggatgggcagctcctggagcagctcatgagcagcgtgggcttctgcactgaggtggaagaggacctcatcgatgccgtcacggggctcagtggcagcgggcctgcctatgcattcatggctctggacgcattggctgatggtggggtgaagatgggtttgccacggcgcctggcaatccaactcggggcccaggctttgctgggagctgccaagatgctgctggactcggagcaccatccatgccagcttaaggacaatgtctgctcccctgggggagccaccatccacgccctggactttctagagagtgggggcttccgctctctgctcatcaatgcagtgatgcctcctgtatacgaacacgaaagctac

SEQ ID NO: 240843 - DNA, 886 bp, Homo Sapiens
tggcttgcacgtcggccccaatctcatccaggatgaaggggatgatatgtggcttcacagccagaaacaggacgtcgctgtgcttcaccgtctcctttgttgctgcgtgtcaggttcacacccatcttctgcaagaggagactcccagctcacagtgctggagcagcctggctatgccaaggcctcccagggagcagctgaacccctgccaaaccgattctgccagatgcagcctggaattcttagctttatgccctcagggttctacccctaccccaaataatacagtttcccattgttgctactggacaagtaagcacaggcttggagcatgacaagcttctccatggtaaccaggaagtggctgcccttcttccctgccaatcttctggtatctaaggcactcctctgccaggtaagaaggccctatggtgaaagtggcagggcaaagggaaatgctaatacctggtcgttaaaagcacagctgagtcaggccctatcctaaccctggccgcttgttcgtggggaccgcacagtctccatgtggtccagggctaggctggaagccatccatccctctatgactccaaactgagaagcaggaccctccagtgctagggacatcagcccaccctaggcacagacactgcctgtcacctgcctcatcagccatcctctcccacagagcacaggttttgggtgaagacttggaatatgtttttggagaacagaacaactaactcaccagattcttcccaatatgctcattcacgactcagaataacagcaaagtggccactgttgtaaatgaggaaatagcctcaaagtggctgagtactttaaggtcatacaactcgtctattaagccaacttttttgtacaaagt

SEQ ID NO: 240844 - DNA, 1485 bp, Homo Sapiens
ttgggtacgacccccgcacgagccggtgccatctgtgggggctttgggccaggggtctccggacagcatgagcgtgggcttcatcggcgctggccagctggcttttgccctggccaagggcttcacagcagcaggcgtcttggctgcccacaagataatggctagctccccagacatggacctggccacagtttctgctctcaggaagatgggggtgaagttgacaccccacaacaaggagacggtgcagcacagtgatgtgctcttcctggctgtgaagccacacatcatccccttcatcctggatgaaataggcgccgacattgaggacagacacattgtggtgtcctgcgcggccggcgtcaccatcagctccattgagaagaagctgtcagcgtttcggccagcccccagggtcatccgctgcatgaccaacactccagtcgtggtgcgggagggggccaccgtgtatgccacaggcacgcacgcccaggtggaggacgggaggctcatggagcagctgctgagcagcgtgggcttctgcacggaggtggaagaggacctgattgatgccgtcacggggctcagtggcagcggccccgcctacgcattcacagccctggatgccctggctgatgggggtgtgaagatgggacttccaaggcgcctggcagtccgcctcggggcccaggccctcctgggggctgccaagatgctgctgcactcagaacagcacccaggccagctcaaggacaacgtcagctctcctggtggggccaccatccatgccttgcatgtgctggagagtgggggcttccgctccctgctcatcaacgctgtggaggcctcctgcatccgcacacgggagctgcagtccatggctgaccaggagcaggtgtcaccagccgccatcaagaagaccatcctggacaaggtgaagctggactcccctgcagggaccgctctgtcgccttctggccacaccaagctgctcccccgcagcctggccccagcgggcaaggattgacacgtcctgcctgaccaccatcctgccaccaccttctcttctcttgtcactagggggactagggggtccccaaagtggcccactttctgtggctctgatcagcgcaggggccagccagggacatagccagggaggggccacatcacttcccactggaaatctctgtggtctgcaagtgcttcccagcccagaacaggggtggattccccaacctcaacctcctttcttctctgctcccaaaccatgtcaggaccaccttcctctaagagctcgggagcccggagggtcttcacccactcctactccagtatcttctggcacgggctccttcctgagagcaaaggtcaaggaccccctctgtgaaggctcaccaaaggtgggatccctcgccccctcccggcccctccctgccctttattcatggacaaacctctccttcccttgtgaaaagggccaca

SEQ ID NO: 240845 - DNA, 1592 bp, Homo Sapiens
agcatgaataacaataataataatgaattagatgtggtcatctgcatggaagttcactgtctaatgctaagagaattcccaaaacatataaaaatataaagcatggtgagtgttatgataaatagaaacctgtaagatctctggaggggcattttttgtgtgaacattgccatggaatgagtccaagtagagacagtaagtagttacaggcacccaccacactgtgttgtaattatgtatagaaatatagatctgactccattatttggcaatggactctggagaatttgaacttggtcttttccttcacaaaatagggtgaataggacagtggataaacagtcttggatccagactttctggattggaagctagccctactacttcatagctgtgggaacttgatcaaagtgcttaaagtctctgtgtatgtaaaaagatgtaagtatctctcatgtgaaatagtgaaaataatagtacctacctcaaagactatgtgtgagaataaagtgagttaataaatgtaaatcctcagaatagcgcctgaccatattaactactcagttagttatcggtgttgttgttgttatgtggctgaatgcttttaacccattagaagatcaatgaacacttatcagattgaatttttcctcccttccttacattctacaaatcctagggcctcctctttacattcccacctttacagtatttcacagggtcccctgggcccgggggtcatggccagaacgcagagactttatgatgaggacggtgcccacgatgatgccgactaggcccagcaccaggcccagggcacagagcacagtctccgttgtctcaggcatctggattggctcttgggcctcccagtgcttgaggagcggctggtccaagccccagtgctccaccctgcagtcatagaagtcctctgctgagggcacaaaggtcaggtaatggaacttgtggaagctgtaatctgttctgggcaggaagaggctctcagcgacaccctcagtgaccagctccccgttgcacagccacgtgacgttgagcactggtgggaagaacttgtcaatgtggcagatgagggtgttgggctggcccagctccacaggctccttgggaaacacggtcacctcagggggatcgttggtggcctgagtgtggttggaacgctggatcaaggtattcaagttgttgttcaatatagcaatgttagccagcccgccctgagcctcaaaggaaaaggcttggccaaactcctccagatgccagacggtctccttcttgtccagatccacatagaacatctcatcttcatcaaattcaaacataaactcccctgttggtctatgcgtctgtacaaacgcggcataagttgacacatggtccgccttgatggccccagctcctcggagactcagcaggaaagccaaggagagggctctcaagatcacagctctgatatggaacattctgtcttcagggcgcatgttgtggggtctataattgatgactgtgagcacaggaacagtgatgaggccaacttttttgtacaaagttggcttttttaaagaaagcattgctca

SEQ ID NO: 240846 - DNA, 1254 bp, Homo Sapiens
  misc_feature (312)..(436): n is a, c, g, or t
aaataaaatcctaactacgttttctggctagatcattgggttttaaaatctagactgtctgagaaacccagcctcagaactcagcactccctcagcccagagtacctctgattgtgttctatatcgttgggtcccctgtgcaatttaagtgaaaaaatgaacgagggtggattctttcctttaaaaaacagagaaatctgaaaacctctgcattcaacaccagattccatcctgcagaactacatttacataaagtccaaaacaggcacaaccaatctgatctgcactgtcagaagtcacagtgaagggctnnnnnnnnnnnnnnnnnnnnnnnnnnnnnnnnnnnnnnnnnnnnnnnnnnnnnnnnnnnnnnnnnnnnnnnnnnnnnnnnnnnnnnnnnnnnnnnnnnnnnnnnnnnnnnnnnnnnnnnnnnnnntttaaataaaaagtagtggttacccttggggagggcaaatgactggaagggggcacaataatgggttctggggggcagttatgtgctctttcttgaccaaggcgctggttgggtaagtgcggtttatgaaaatttaccatttgtgtacttttctatatgcagcataattgacaggaaggttttaaaaacaagccaataccctaggccacatacatgacacctgcagtctggatcctgacagtctgggaccaaaggctgtcttgcgctttagagctggatgcagctgagcccatctgcaattcctatggtccctactttactgctggcatgagcccggggcagtgcaggggcccagaaagtgctagatcccggcccaccaaactccctgggacagtgccctcctgagaaccagtcaaccccctgacgcccattcccttggacctggtgtggtgctggtcactcaccggtgatgaggacaagggcagagaggcaggcgaaggcagggacatcgacaagcaagctgtgcagggaccttgagaaggccaggatactgtcaatccagtccccgaagccacgggcacactgcagccggtgtagcaccaggcctgagcagaagatgagcttgccctcgcctggcttagacctgtacgccaggcggaggatgaagagctccaggaaggccgactccagcaacaggtcctggtcagccggtgacagctcagcaaagccagggatcttctccgcccacttgcggatgacctccagagaaccggagagcaggtcgtagaactgctgtacatccccagcatcttccccaa

SEQ ID NO: 240847 - DNA, 2129 bp, Homo Sapiens
  misc_feature (1049)..(1104): n is a, c, g, or t
cctctgcctgtcctctcccaactcaaggttctagttggaaggtgcacccccagccctcaagaaccaaaccctccgcagggatcctttcatctcacgccaggaacatgagagcctgggggcaccccttcccactagaaccttgagttgggagaggacaggcagaggagcagaggaaaaccagaggctcgccaggcacccctgcagctcctatctgcccctatctcacccctccctccagctctgtgcaatcccatgggcccgagtgtcccggcaaatgaaagcttccagccctggcatctacgggtctccaggaaggcggcccacctggcagggctgatcccaccctgcaggacaggacttagctaggaggagaacccagggggagaccacaggtcccaatgggatgaggccagcctctctccatttccaacaaaaggccccacctggggctgcgcggtaccttgaagaagcccttgcagccctcacatgtgcggacaccataatgctggcatgaagcgttgtccccacacacagcacagcggccttcacttccacctggggccccgctccgggccttggttgaggtcacgggtgtatccagtatccccgagccctcaaggtgtggagaagtgggtgccaaacctgggaaggccgtaggcatggaatagctctctccctcccccagctggtgggtggcctgtgaggggaacaacttcagggggctctgggccaggctggggctggggccggtgggaggactgaaggaaaagaaggctggaggctgtgggggcccagaggctttgggcagctgctctgtccatgcccgcaggccttcgtaagtctggctgggcgagaagtggccgaaggagccatcccagggagagagctggggcggctggaagctgggcgtggagggcgacggggccgagcaggggctgccatagtagtcagagccactggaggacagggcctcatccactgggccgctcagggggccggggtagcagccgtacacctggaagtcctcgaacttgaaggaggcagaggcnnnnnnnnnnnnnnnnnnnnnnnnnnnnnnnnnnnnnnnnnnnnnnnnnnnnnnnnatggctggactgttcctggcagctggtagaggaaggtgtcaaactctcctgtgtagccgtccatgaaggtgctgaagctgggcagggcagtgggggcagcgggggctgcctcggggctggccaggtccatggtgggcttgatgaactcaggggtcagggggtcgcttgccaggtggtcacggggtcccggactcggtgctggtgtcccatattgggcttggatacagggcatctctggagagagaggagaccccagggagggaaaggagagtcagtgggacaagcctatagccttgtctcaaagtatttgggccccagagcagcaaggtggcaggaatcccagcctaaagatgagacagaggcaccgggaccagagcacccaggaatcctgacccctggcctgagtaccatctcgacctaggtgccacaaagcccctgggcagcggcccagcatgagtgggctccatcagaaggccagccacaccctagtcagcctgggaaccctaggggaggcatacagccagcatttctctgctagaacagggggaagctgtgttcctccagccccctgcccctcccccatggggaaggcatggtgggggccgggagaagggtgagtgggagaggcagcccagcaaagcctcagcccagctcccaggagcagctccctggttgtttcgccaaccaggcacttcctgggaatactcccaggcctctgcaaagccccttttctcctcccctcgcagtgcctaggaagaaggacatcgtgaaaatggaagaggagctggaagtgaaagcccacctgcctaagaaggcagcctaatgcagaggccctagcctgtcccccatttccaccccaaccctgcacactgagcaaaggcagcagatcccaaacccaccccaatcctgccatctggggctgggaagccactctgcactgctcgagatgctcccagaagcaaagaggaagggaacctaggcctcctcatcggtaacctggctccagacctttaaaggccatccaa

SEQ ID NO: 240848 - DNA, 1883 bp, Homo Sapiens
  misc_feature (1653)..(1677): n is a, c, g, or t
  misc_feature (1679)..(1713): n is a, c, g, or t
ttggatcctgagaaaacttctgtatgttttgtgattccccaccgccatcctccctacccaacaacttgcctatctgttacagatgcctgaagaacaggcattcagtgttctggtcaagatcatgtttgactatgggctcagggaacttttcaagcaaaacttcgaagatttgcattgcaaattttaccagttggagcgcctcatgcaggaatacattcctgacctgtacaaccacttcctggatataagccttgaagcacacatgtatgcctcccagtggtttcttactcttttcactgcaaaattccctctctacatggtcttccatatcatcgacctgcttttatgtgagggaataagtgttatttttaatgtcgcccttggattattaaagacttcgaaagatgacctgctgttgacagactttgaaggtgccttgaagttctttagggttcagcttcctaagagataccgctcagaagaaaatgcaaaaaaactaatggaattagcctgcaacatgaagattagtcagaagaagttgaaaaaatacgagaaagaatatcacaccatgagggaacagcaggcccagcaagaagaccccatcgagcgatttgagcgggagaataggcgtctacaagaagctaacatgaggttggaacaggaaaacgatgacttagcccatgagctggtgaccagcaagattgcactacggaaggacctggataacgctgaggaaaaggcagatgctctgaataaggagctgctgatgaccaaacagaagttgattgatgcagaagaagagaaaagacggctggaagaagagtctgctcagttaaaagaaatgtgccgtcgggaactcgacaaggcagaatctgagattaaaaaaaacagttctatcattggtgactataagcagatttgttctcagttgagtgaaagattggagaagcagcagacagccaataaggtggaaattgagaaaattcggcaaaaagtggatgactgtgagcggtgccgggaatttttcaacaaagaagggcgtgtaaaaggcataagctcaaccaaggaggttttagatgaggacacggatgaagagaaagagacgctcaagaaccagctgagagaaatggagctagaactggcacagaccaaactccagctggtggaggccgagtgtaagatacaggacttggaacaccatttagggcttgccctcaatgaggtgcaggcagccaagaagacgtggtttaaccgaacactgagctccataaagacagcaaccggggttcaagggaaagagacttgctgagagcagctgccgcctcccgacaccttcagaaaacacgacaccttttgttgccttctttggccagatgtgtgattctgtgacttgtcccaggaccagaatgtacctaagtcagatccatagacgcatgttggtaggtcactggaccagagcttgtgaagcaggcaacctctggggtaagactactgatactaacaggcctgctagctcagccgacgctctggacactctagaaatcactcctcagtgtgacctcccaggcctcttccccgtgtacgtcaacacctcacccagcctaaaggctgagtttacatgatcagagttaggggatccttcagtctgttgannnnnnnnnnnnnnnnnnnnnnnnnannnnnnnnnnnnnnnnnnnnnnnnnnnnnnnnnnngtgggggtggggcaagggatcagaaattcaaataattcttttctgcttcaatgccagcagaaaggtcccccaggtagacatggagaagcactttgttttaaataggagggtttcatagttgcatctgaagccacctggttctgttaaactgtatcgtgcaaggttttggg

SEQ ID NO: 240849 - DNA, 819 bp, Homo Sapiens
  misc_feature (145)..(169): n is a, c, g, or t
  misc_feature (171)..(225): n is a, c, g, or t
  misc_feature (546)..(578): n is a, c, g, or t
ttgggctcagccgacgctctggacactctagaaatcactcctcagtgtgacctcccaggcctcttccccgtgtacgtcaacacctcacccagcctaaaggctgagtttacatgatcagagttaggggatccttcagtctgttgannnnnnnnnnnnnnnnnnnnnnnnnannnnnnnnnnnnnnnnnnnnnnnnnnnnnnnnnnnnnnnnnnnnnnnnnnnnnnngtgggggtggggcaagggatcagaaattcaaataattcttttctgcttcaatgccagcagaaggtcccccaggtagacatggagaagcactttgttttaaataggagggtttcatagttgcatctgaagccacctggttctgttaaactgtatcgtgcaggttttgggtttggcattattcatgtttctgatcaattctatgcaactctcatagttcctgttactttttagcattagctgccaaatgacttcaaaaggctggggtgggtgacttgactgtgagactggattataacatggacaaatcttattttgcttaannnnnnnnnnnnnnnnnnnnnnnnnnnnnnnnnatgtatatatatatatataaatatctttcccaatatgccccgttgacagtgtttaaattccagactaggactgctgatctgcacaatttaattatgtggttattcgagcacttaatttcactcaaggttcattgggctctgctctcctccctgccattacgggagctgtggacagagctccctcactttcaagattcctagtgtttttgcacaacaggttgtccaaagtgagaaagactga

SEQ ID NO: 240850 - DNA, 1066 bp, Homo Sapiens
ctataaaagccccctttgtacaaaaaagttggctatatttgcccatgttattcaaggtccgtttattaatggttagtcgaatggctaaaccagaggaagtattggttgtagagaatgatcaaggagaagttgtgagagaattcatgaaggatacagattccataaatttgtataagaatatgagggaaacattggtttatcttactcatctggattatgtagatacagaaagaataatgacagagaagcttcacaatcaagtgaatggtacagagtggtcatggaaaaatttgaatacattgtgttgggcaataggctccattagtggagcaatgcatgaagaggacgaaaaacgatttcttgttactgttataaaggatctattaggattatgtgaacagaaaagaggcaaagataataaagctattattgcatcaaatatcatgtacatagtaggtcaatacccacgttttttgagagctcactggaaatttctgaagactgtagttaacaagctgttcgaattcatgcatgagacccatgatggagtccaggatatggcttgtgatactttcattaaaatagcccaaaaatgccgcaggcatttcgttcaggttcaggttggagaagtgatgccatttattgatgaaattttgaacaacattaacactattatttgtgatcttcagcctcaacaggttcatacgttttatgaagctgtggggtacatgattggtgcacaaacagatcaaacagtacaagaacacttgatagaaaagtacatgttactccctaatcaagtgtgggatagtataatccagcaggcaaccaaaaatgtggatatactgaaagatcctgaaacagtcaagcagcttggtagcattttgaaaacaaatgtgagagcctgcaaagctgttggacacccctttgtaattcagcttggaagaatttatttagatatgcttaatgtatacaagtgcctcagtgaaaatatttctgcagctatccaagctaatggtgaaatggttacaaagcaccattgattagaagtatgcgaactgtaaaa

SEQ ID NO: 240851 - DNA, 1338 bp, Homo Sapiens
  misc_feature (980)..(998): n is a, c, g, or t
ggagttccagtgggcttttattgagataaattaacaaaaaccaagattttaccatatttttggaaccttataaactcagcagactccggtccatatatgcgtacatacaacataacacatcccaacaaaaacagagcccccccgccccactggaacatctgccaattaagagaaagccaattttcccttcccccaatgtttctgaaattttgagttcccactgttcacttctcagtggaactggtcccttgtggctagggacattggaattctctaccatttttactgaacaaaaaataattttttttcctgtttcaaaaaagggaatagtgactttgttttctccaggctccccttcccccacaaccaatgtaaaatacagcagcctgtatcttaataacccagccctaccccctcccttacccagcattgtctactggagaatttaaatacacttctgttggaatctgtcagctgtggatgggcagagtccaggtgccaggctagctccctctgacctcatgaactgtgacaacctttggacacttaactctttaccccaaagatgagtttttagatcagaaaggagagcagattttctttgggagttttaaaaaactatctttagatttagagatacaaagtacaactacaatctcacagaagtccactaaagttcaccaaaaagctgacttacttcagctctcatgaggccaataattttgataaaggtatctggcaggaaaatgattccacaataacaaatttaaagatacctagaacattgaaaaaaatagcaaattaaaataaatggcttaatttccaagaacttatttcatttttttgttactcatctagaaggtcaggagtgtggctaaaggcagtttctgatgaggttatgagcttccaaagtgtttctaaatccttagtgcagacaccctcccttttggggcaaagtaccctccctcccacccctattnnnnnnnnnnnnnnnnnnnttaaaccacgtcatcagaatgagatgttttgattccaacaatttatactcaaggctttgtgctgagttgtcgtttgaaccaagcatgatgttatcaagcacaaagcacgtggcaaaggaaagatgctcccatctcattctgaaaacaaatactgataaccaagcccaccctccaaccctttggggccaacccattttatgctgctgggaccaacttcaaacaatttagaggtatatttaggtttccctctctcttacttctgtgaaagatcattttagaataaatgtattccattcctatgggagaggcaaaacagtatttatcggccatcagaatccaa

SEQ ID NO: 240852 - DNA, 1119 bp, Homo Sapiens
  misc_feature (784)..(793): n is a, c, g, or t
gttttaaagtttcctttatttctttaaatctttatgaaacattccatcgtttgcaaatcatagtgctttattaacaaattcatgtgttcttttcccatccctttaatacaaaaaaattattcatcagttattttcatctgacatttcactaagtacagaatgcataatgtcaacattattagatcagccattcaagtgggtcacataagtttatcctcattgtgccaaatacccactcaaaggataagctgaataacagatgcctccaggtgtatacaacaaccttagtttcttgacttgaactagtcctgtttaacaggtcaaactgctagtctttctaagtaaactaaaaaagactcaagtacacagctgtacatacatatcatcagatggtaagttcatttcaacaagaacctctataactaactgtacatttgtacagttttctgctatcattgcaaaagcccctctgaacaaacttatagtttagaatttaaaacaatcctgatgagacaaaacgtaccaggtggcttttctgtagcagaaattaattacaaccatttttcctcaagcaattttaaagacaaacaaagttgaaaataaatatgcaagcatacagtaaacaaaatgtctatactgagaaattcagacacaaagcacagtggagtctataactgtagaagttagaaatacaaactagcaatgaagcaacaatctcttccaaatagcaggaaacaagttctccaataccattatttagataattatttagtgattttggagnnnnnnnnnnaatcccgtttgctgattatgacatttgaccagaatctcaagaaataccttaaatcatactgcatgaaataaatgaccatttaattcctgattagttgaactccttaatgacttttcagttttgtatataatagaaaggttcaagaacctttgtagatttgcttacaattgctgctggtatttatgaaagcttttaaaagttatgttatattcttctgcatctgttgattccacattaatgtaattctcaagtattttataaacaagccttgggtgttagaatggtctgtttcaaattttcaggcatgccaacttttttgtacaaag

SEQ ID NO: 240853 - DNA, 1220 bp, Homo Sapiens
  misc_feature (122)..(130): n is a, c, g, or t
  misc_feature (1142)..(1152): n is a, c, g, or t
ttggaattggtttcagttgtcttactctattccagtctttgcccactttcacacaaatgacaaggccaatatgttttgtttgttttttaatcattaagagtttttgtacaaaaggtgatggnnnnnnnnncttcattttaaaacaccagggtgtgggggagggatgcaaacaaataacaaaaaagatgcttttgtaacattattttccctgtttagaaagaaaaaaaatcactccaatagtattgaaaagtccaaagatgaaatagtttcattttcttttcctaaggcttataaaaggccccctgcctgttgattccatccctcttttgtgtccagtggagccatgttactcttcagtggcccaggggttcactattaaagaaagatcagtccaggtttctgggcacatggcctaaacaggaagatggaagcatcagaggattaaaaacctttccccacagaaatgtgggcaagaagacacttccctgagccagcagaagggacaggtgcagcagcattccacacccagcgcagaggacagcagagccctcgatgtcccacttctgcttccgttccctttctagaagattgaaaaaaaggtcaaaaccacatgcctgtggagaaagtgcgacatgtttagaaatactggtagggaaccaggagtaagaaaagctttaccagcttttactacaaatggatgaaagacatcaggatcccaccaccgcaaggtaaagtgacttcccttttctggaacccctgtggcacaggagtaccaattttcctttccaacgaactggatttctggataggcattttggctgtatgtggacagataagaccacagtccttagcccaatcccagctatacagtcaccccaatttccacaaatgatgtgatggtaccgtataatcctgtaattgggaaatttcacatttttcctgtcctaatctcagaggtgggagaagcaagtctagaacatctccaggctcagactaaacgagagtacttggactgcaaccaagtaatcactgcaaagtagttccaagcagcaagaaataccagattctcatggaggctactatagggtacagaataacaacatgaaagcaatcaaccctgtataaataatgtttcttggcannnnnnnnnnnaattaaagaaatccagtgtctcaaaaacttgtgaaaatgtgtttaccaacttttttgtacaaagttgg

SEQ ID NO: 240854 - DNA, 1580 bp, Homo Sapiens
  misc_feature (356)..(365): n is a, c, g, or t
  misc_feature (1367)..(1430): n is a, c, g, or t
ttggcctcagtcccccaaaccaaagctacacagccagatttctcaagcagtctcaactccagtccctcatctcacccttactattgctcttgctttccagtttgcttttgatttgcatcttctcactagtaaaactgccttccctttgttccttattttctgttttttctctagagaggtacagttgtaagtcagagttaatataatagggcctgtgaaaacagaggcttttgcattgtctcttgacatcagaagttacaataggcatatgggcaaaatggtgtagcaggctcactggccgtttgttttttaaacacattttcacaagtttttgagacactggatttctttaattnnnnnnnnnntgccaagaaacattatttatacagggttgattgctttcatgttgttattctgtaccctatagtagcctccatgagaatctggtatttcttgctgcttggaactactttgcagtgattacttggttgcagtccaagtactctcgtttagtctgagcctggagatgttctagacttgcttctcccacctctgagattaggacaggaaaaatgtgaaatttcccaattacaggattatacggtaccatcacatcatttgtggaaattggggtgactgtatagctgggattgggctaaggactgtggtcttatctgtccacatacagccaaaatgcctatccagaaatccagttcgttggaaaggaaaattggtactcctgtgccacaggggttccagaaaagggaagtcactttaccttgcggtggtgggatcctgatgtctttcatccatttgtagtaaaagctggtaaagcttttcttactcctggttccctaccagtatttctaaacatgtcgcactttctccacaggcatgtggttttgacctttttttcatcttctagaaagggaacggaagcagaagtgggacatcgagggctctgctgtcctctgcgctgggtgtggaatgctgctgcacctgtcccttctgctggctcagggaagtgtcttcttgcccacatttctgtggggaaaggtttttaatcctctgatgcttccatcttcctgtttaggccatgtgcccagaaacctggactgatctttctttaatagtgaacccctgggccactgaagagtaacatggctccactggacacaaaagagggatggaatcaacaggcagggggccttttataagccttaggaaaagaaaatgaaactatttcatctttggacttttcaatactattggagtgattttttttctttctaaacagggaaaataatgttacaaaagcatcttttttgttatttgtttgcatccctcccccacaccctggtgttttnnnnnnnnnnnnnnnnnnnnnnnnnnnnnnnnnnnnnnnnnnnnnnnnnnnnnnnnnnnnnnnnacatattggccttgtcatttgtgtgaaagtgggcaaagactggaatagagtaagacaactgaaaccaattttcatccttttactgaggaaaaaaatccaacttttttgtacaaagttgcccccttatagaaaagcattgctcatcaattt

SEQ ID NO: 240855 - DNA, 2096 bp, Homo Sapiens
  misc_feature (200)..(278): n is a, c, g, or t
  misc_feature (1486)..(1531): n is a, c, g, or t
gcccatttgatggacagagcagacagcccggaacagattcaagcaagaaagtcctccgcacatcgttaaattaaagataaagcctctataaaagttaggttatggttttcatttttacctcctttatggccattttgaaatatttcttcacaggctgtggaattttctagctaaacattctagtttctccttaaaaaaannnnnnnnnnnnnnnnnnnnnnnnnnnnnnnnnnnnnnnnnnnnnnnnnnnnnnnnnnnnnnnnnnnnnnnnnnnnnnngaattctgcccacttttttaaaaaagtagtatactttctgtattaccaacagatagctagacagatatgtgaaacttgtgccttttaagcaaatacattaacattgggggttttttaatacttctgtatctttaatatgtgtgaaaatgttacatattaaatacagccggtgtgtgatctatacaattgttgtgcaaggtctatatgaaagtctcaaggtggcagaattggtcagatttttccattttcctgttttccattttaacactgacagtcaagttgcctaaagtgttgaacaaatactgacatgtaaagggagtttcactctatgtctttgtgaaggaggaccttaaagagattttttttctgtattatacgttgatacagtacactgccaggtgaaacaagagccttaataaagcatgcatcgcccacacccctgtatgagacccccacagaagggatcgcttgcgtaaggcaccattatgaaggtcaacagtgcattaacagctagaaaaccagaaattagtcctcaaggcataaataagagaaacatagctgcatgagaaaacagtttctaagcgttagtggttttatccacccaactgagaaaaattttaggttcttaagtctaatgaaacattagaccagcaattcccagccccagctttgtgacactcaatacgtgtccaatttcttctaagggcatcacagaattctccaaaaagttaattcaaattcagaatcatttaaaaataatcctgtgttgcacaatgcctttctggaaggggagtgttacaaacttggaggggaaaaaaaattgtatattgccaggcccggatggctagggggtcactgtattagacagattggatcttagctgctcattaactggaatcagtattgcagtcctgacttaaaaatggaaaagcatatagttccccagaccatgcatgactttttgtattctaaggaaaagttaaattgttgtgttatatttgtaaatacacagcttatacaatgggttacaaatgagctatgttgtagcgtgtaaaacaagctacttgacacattgcacatttaatagctgcaccagacactaagagttcctctcacacagaaaagggggagagaggctctccctccccacaccactcgccactctggggtcctgagttcccacgcccaccctccaagattttccttcnnnnnnnnnnnnnnnnnnnnnnnnnnnnnnnnnnnnnnnnnnnnnnctaaggtgcagacaccccctccccccaaggaaatgattggtggtcatctcatctcatggtatactccttacacacaaaacattcaaactactttttttccatctcttgcagtcttgctaaccacaaggaaaaaaaagttggcctcatcatacggtcagtaatagatcctcaacatacaatcaacccaaccattagcattctcagtgtgcatgctcacggcaaaggcttaggcgccgctcggaagggcgggtaccagtggcgagtccagggtcacccacataccatgcaccacgggtgctatgccgcttcttacaggacctttttagccctcaaaagaccttccaaggagaggccctggaggcaactgggtagggtgcagaacggcatgctttggctggaacacgcatccctccttccacggccggctctcagcctggaagccttttagcctacaggatccacctctctgctccctcagaggtgcctcttcatgtgcagggccaggtggtcagacctggaaaaacacctgcaagggcaaatcagaagcacagaagaagttagccaa

SEQ ID NO: 240856 - DNA, 409 bp, Homo Sapiens
  misc_feature (174)..(200): n is a, c, g, or t
aatttcaagcaaaaagtttctgcttgattgaggctcagttatcacctgaacagaatgtacttctttatgtacgtgctaattatgaaaatcacaggcattgacaggtacggtacccagccccacccaggcaaacagctccgacatgtttcgtaagtgagaccagccagtgcaagnnnnnnnnnnnnnnnnnnnnnnnnnnngtcttttgcttaccttcttgcttaatggaattgttatggctaagcacatagaaggccaaaaaaggagttttccaaacccagcaaatcaagtgcttggattctgaactgccaaaagaaaactgcacttcccctcttaagtaaaacgaaatgagtttcttaggtaaatgtattcatcagcccagataaaaaaccaacttttttgtacaaag

SEQ ID NO: 240857 - DNA, 1405 bp, Homo Sapiens
  misc_feature (185)..(194): n is a, c, g, or t
  misc_feature (789)..(866): n is a, c, g, or t
  misc_feature (977)..(985): n is a, c, g, or t
gtcttttgcttaccttcttgcttaatggaattgttatggctaagcacatagaaggccaaaaaaggagttttccaaacccagcaaatcaagtgcttggattctgaactgccaaaagaaaactgcacttcccctcttaagtaaaacgaaatgagtttcttaggtaaatgtattcatcagcccagatnnnnnnnnnnccagttatgtgagcgttagtcactgctcatttccaggaagatcaaacaaaataccagcccagccagactcacatgtgtgtatatatatataaagcaaagagccacacccacaagccagcagctgggtgaaatatcagctgtccacgccgtggtatgccaattcggggaaattactccttggaaaaactggaagaatctacttgctggaaaaaatagcttcatctgcataaaaagtgttctacaaaagaatccctgtggttagcttactcttaggttagatcttctaataaggctgaaattcaaaatcaaaaccttagtgtgtccgagtccagcctgggttccagcattctgttcaggccacttctgaacggccgaaggtgccccattccagacctgcccatttgatggacagagcagacagcccggaacagattcaagcaagaaagtcctccgcacatcgttaaattaaagataaagcctctataaaagttaggttatggttttcatttttacctcctttatggccattttgaaatatttcttcacaggctgtggaattttctagctaaacattctagtttctccttaaaaaaannnnnnnnnnnnnnnnnnnnnnnnnnnnnnnnnnnnnnnnnnnnnnnnnnnnnnnnnnnnnnnnnnnnnnnnnnnnnnagaattctgcccacttttttaaaaaagtagtatactttctgtattaccaacagatagctagacagatatgtgaaacttgtgccttttaagcaaatacattaacattggggnnnnnnnnnaatacttctgtatctttaatatgtgtgaaaatgttacatattaaatacagccggtgtgtgatctatacaattgttgtgcaaggtctatatgaaagtctcaaggtggcagaattggtcagatttttccattttcctgttttccattttaacactgacagtcaagttgcctaaagtgttgaacaaatactgacatgtaaagggagtttcactctatgtctttgtgaaggaggaccttaaagagattttttttctgtattatacgttgatacagtacactgccaggtgaaacaagagccttaataaagcatgcatcgcccacacccctgtatgagacccccacagaagggatcgcttgcgtaaggcaccattatgaaggtcaacagtgcattaacagctagaaaaccagaaattagtccccaa

SEQ ID NO: 240858 - DNA, 1393 bp, Homo Sapiens
  misc_feature (185)..(194): n is a, c, g, or t
  misc_feature (789)..(866): n is a, c, g, or t
gtcttttgcttaccttcttgcttaatggaattgttatggctaagcacatagaaggccaaaaaaggagttttccaaacccagcaaatcaagtgcttggattctgaactgccaaaagaaaactgcacttcccctcttaagtaaaacgaaatgagtttcttaggtaaatgtattcatcagcccagatnnnnnnnnnnccagttatgtgagcgttagtcactgctcatttccaggaagatcaaacaaaataccagcccagccagactcacatgtgtgtatatatatataaagcaaagagccacacccacaagccagcagctgggtgaaatatcagctgtccacgccgtggtatgccaattcggggaaattactccttggaaaaactggaagaatctacttgctggaaaaaatagcttcatctgcataaaaagtgttctacaaaagaatccctgtggttagcttactcttaggttagatcttctaataaggctgaaattcaaaatcaaaaccttagtgtgtccgagtccagcctgggttccagcattctgttcaggccacttctgaacggccgaaggtgccccattccagacctgcccatttgatggacagagcagacagcccggaacagattcaagcaagaaagtcctccgcacatcgttaaattaaagataaagcctctataaaagttaggttatggttttcatttttacctcctttatggccattttgaaatatttcttcacaggctgtggaattttctagctaaacattctagtttctccttaaaaaaannnnnnnnnnnnnnnnnnnnnnnnnnnnnnnnnnnnnnnnnnnnnnnnnnnnnnnnnnnnnnnnnnnnnnnnnnnnnnagaattctgcccacttttttaaaaaagtagtatactttctgtattaccaacagatagctagacagatatgtgaaacttgtgccttttaagcaaatacattaacattgggggttttttaatacttctgtatctttaatatgtgtgaaaatgttacatattaaatacagccggtgtgtgatctatacaattgttgtgcaaggtctatatgaaagtctcaaggtggcagaattggtcagatttttccattttcctgttttccattttaacactgacagtcaagttgcctaaagtgttgaacaaatactgacatgtaaagggagtttcactctatgtctttgtgaaggaggaccttaaagagattttttttctgtattatacgttgatacagtacactgccaggtgaaacaagagccttaataaagcatgcatcgcccacacccctgtatgagacccccacagaagggatcgcttgcgtaaggcaccattatgaaggtcaacagtgcattaacagctagaaaaccagccaa

SEQ ID NO: 240859 - DNA, 1094 bp, Homo Sapiens
  misc_feature (325)..(359): n is a, c, g, or t
  misc_feature (427)..(552): n is a, c, g, or t
gatcaccagtgagtaggtggggagaagcagggccgggcagttgctggcccagctaaaggtgggggcagtacaggacacacttgtctctcaggcactccattcatgctttctcttttgtttacacttcctcgggggctttctaaatgactttgttcacgctgcctctcgtcttcattggctggggtgtggggttatatgcattggaaggcagggaggcaggcctctgagcgcagcagccccaatcatccactcagacgcccagggtcaccagcacctcggcttgtcttctgcctcggccattgcttctgtcccctgcttctctttnnnnnnnnnnnnnnnnnnnnnnnnnnnnnnnnnnngaagccagttcacggcacgcctgctccggaaagctgttattccttctctcgcacgcctcttcccctgnnnnnnnnnnnnnnnnnnnnnnnnnnnnnnnnnnnnnnnnnnnnnnnnnnnnnnnnnnnnnnnnnnnnnnnnnnnnnnnnnnnnnnnnnnnnnnnnnnnnnnnnnnnnnnnnnnnnnnnnnnnnnntgctttctctatttctctctgctgaaattttatacctccctcccatgacgtctctggcctggggtgggggagggagggaccagcgcacgcagcctcttttgctgcacgatgttaatgttttaaacaggcacaggaaaagccgagcccttttgaaaaatactttgcgagtcctctcgttcgacgtggtagctgaactttttttcccctcttggaatcactcctgccacacgttggctgtttttctggaaagttactccgatgagccccctccctccctttcccccagccccggcgccctctcgccagctgtcagtccgcgccgtccgcggcccgcgtctactctccctcctggtcccccggtcccggggccgcccgcgggccaggcccaacccggggcagggtccgcagagggcgcgggacccggtaggggcggccatgccagcctcgcagaggggactcccagcctgcgagccgggtcggagggtcggcgtccgctccgcggcgatcctggcccgattcttcattgacaagatcggagccaa

SEQ ID NO: 240860 - DNA, 1738 bp, Homo Sapiens
  misc_feature (374)..(387): n is a, c, g, or t
ttcaaaggaaaaaacaggaacttcattctctccttgctatgtttacaccagcacttctgagcttgcagttaaaactgcagtgtttgcatatagaaggctcagagcagaaatgcctcaaacagctccttccggcagattccctaattccagaaaaaggaggtcttcttgtgtcctctaggagaatcagacctttcctttcacttctactcctgcctctaaccacctacccccagcttaaaacaccctgaacctcaggataccacgaaaaataaccattacttgacagaaaggacccctcaacccttgagaggcaagaagagagggttgcatgtaaaggagaataaaaggtgaggcttcaacctcgaaacacagannnnnnnnnnnnnngtaaacatacacattactgaaatgacagcaacccacattgcagaggagaaaagtctattagctgtacagtttacatttcaatgcccaaacttatttatatatttacataaagatgctaccttgattaatcaatgtctatttgcatttccacatgtgaatttcttcagttttgatattccatatgaaggagctacagtgaaaacacttttgaataaagcagtgaaccctaagaatcttatcttgagatgagatgtgtgaaccaccatttgaatgttatttctccctgctgtgtacattagtctggctgggtgttggtcacagacatggatgcactgacggctattcccataaccgagccaggcgggaagggggaaaaggaagacattatttgtcaccaacaacccagtatcccaagtcaaaattctcaactatggccaaaaaggcctaaactcgacccacaggaactggctttctaactggttgacaaacacgtaagctgccctcctgcaaaagccaaccagagaacaggcaggtggcaacaggacccagcctagagcagagcacttcagaagaggatggataaatccatcagggatgctcagggcttcctgaccactgtcccgggtgaaggcactgccacattttctctcaacaaatctgttatgtccctggatccaattatttagcctaaggaatgtcacctctgctaaagagaagtgtgtttgtgaggggtccaaaatgataaaccgtcttgttagcatcatgctccaccctctgagttaaccagctcagatccttgctagattttggaatccagtaaatctgtgttgacccagaggtgctgctgctaatgcctccagagaattcgtgtccagatgaagagacttagagtggcttctccatcctgctcgaacttcaattgctctatcctccggtagtccaaacttcagcctttaaaaatacccaactcactccaagagcattattgaacccttaagagactaaactggaaaattaatttgcttgcaagctccaaggccagcattggcccttagcaattcaccaattcatcccaagaagaggaaggttcagacaaagaggaacattacattgcatggccaccatcaagttactttgaggaaggtttccaggcttcattctataattttagttttcagctcactgataagcaacctctttcattctgaccataagataagctcatatttggtgtcagaaacatccttttttccctctttgtggtccctactcaagtaaacagagaagacataaagttgccctaatgaacaagaaaagggatttgatcccaagactatagactcctagccaa

SEQ ID NO: 240861 - DNA, 1068 bp, Homo Sapiens
ttggaataaggttgccatgaagcatccgtcagctgtgacagcttgtaatctggatctggagaacctggtcacagattcaaaccgcagcattgccacgctggccatcaccaccctccttaagacgggcagcgagagcagcatcgaccgcctcatgaagcagatctcctccttcatgtcagaaatctcggatgaattcaaggtggtggttgtccaggccatcagtgccctgtgtcagaaatatcctcgcaaacacgccgtccttatgaacttcctgttcaccatgctgcgggaagagggtggctttgagtataagcgcgctatcgtggactgcatcatcagcatcattgaagagaactcagagagcaaggagacagggctgtcacatctgtgcgagttcatcgaggactgcgagttcacagtgctggccacccgtattctacatctcctgggccaggaggggcccaagaccaccaatccctcaaagtacatccgcttcatctataaccgagtggtcttggagcatgaggaggtccgggcaggtgctgtgagtgctctggcgaagtttggagcccagaatgaagagatgttacccagtatcttggtgttgctgaagaggtgtgtgatggatgatgacaatgaagtaagggaccgagccaccttctacctaaatgtcctggagcagaagcagaaggcccttaatgcaggctatatcctaaatggtctgactgtgtccatccctggtctggagagggctctgcagcagtacactctagaaccatcagaaaaaccttttgacctcaagtctgtgcccctggccacggcgcccatggcagagcagagaacagaaagtacccccatcacagcagtcaaacagcctgagaaagtggcagctaccaggcaggagatcttccaggagcagttggcagcagtgccagagttccgcggtcttgggcccctcttcaagtcctcgcctgagcccgtggccctcaccgagtcagagacggagtatgtcatccgctgcaccaaacacaccttcaccaaccacatggtttttcagtttgactgcac

SEQ ID NO: 240862 - DNA, 1178 bp, Homo Sapiens
  misc_feature (99)..(112): n is a, c, g, or t
  misc_feature (959)..(975): n is a, c, g, or t
ttggatgagaccttgcagtgagtttatcagcatactcaaaatttttttcctggaatttggagggatgggaggagggggtggggcttacttgttgtagcnnnnnnnnnnnnnnacagacttcacagagaatgcagttgtcttgacttcaggtctgtctgttctgttggcaagtaaatgcagtactgttctgatcccgctgctattagaatgcattgtgaaacgactggagtatgattaaaagttgtgttccccaatgcttggagtagtgattgttgaaggaaaaaatccagctgagtgataaaggctgagtgttgaggaaatttctgcagttttaagcagtcgtatttgtgattgaagctgagtacattttgctggtgtatttttaggtaaaatgctttttgttcatttctggtggtgggaggggactgaagcctttagtcttttccagatgcaaccttaaaatcagtgacaagaaacattccaaacaagcaacagtcttcaagaaattaaactggcaagtggaaatgtttaaacagttcagtgatctttagtgcattgtttatgtgtgggtttctctctcccctcccttggtcttaattcttacatgcaggaacactcagcagacacacgtatgcgaagggccagagaagccagacccagtaagaaaaaatagcctatttactttaaataaaccaaacattccattttaaatgtggggattgggaaccactagttctttcagatggtattcttcagactatagaaggagcttccagttgaattcaccagtggacaaaatgaggaaaacaggtgaacaagctttttctgtatttacatacaaagtcagatcagttatgggacaatagtattgaatagatttcagctttatgctggagtaactggcatgtgagcaaactgtgttggcgtgggggtggaggggtgaggtgggcgctaagccnnnnnnnnnnnnnnnnncagtacccctcactaaaggcaccgaaagcttaaagtagacaaccatggagccttcctgtggcaggagagacaacaaagcgctattatcctaagtcaagagaagtgtcagcctcacctgatttttattagtaatgaaggacttgcctcaactccctctttctggagtgaagcatccgaaggaatgcttgaagtacccctgggct

SEQ ID NO: 240863 - DNA, 1471 bp, Homo Sapiens
aaataaacttttcttttgctagccacagagttgctcactgtggcaagctgagctggtcagaacacttgtgtgtgtgttcttgatacacactaaccacaataagcaagtctgcacacatctctatgagccccatgcaaagacaagacattcccaaagatcagtcactagagtgcaacaacgaaattcaagatttgaccaaaacagaccctgctgcctcctaaattgccaattgcctctcaaaaacttacagaaaaagggacattataagaattcatagagggagagaagaaaaagctgctactcctagtcattagtacaatgtgctgtgttaattagatacctctatataaattagaaaaagtgctttacttgcatgcttcaataaaatgaatactgagtgtcgtagtgttagatctgtacagatataaattttttgcagctatataaaagtgtataagatgggcttttgccattttaaacatgattttttttcattaaaaaagattaaactatatgtgatttgtatgtagctgattattatgccaagaattttggtctttaacacactttttattcatcaggaacaggtgagggatatcctaatgatttaaaagtaacatgtgcattaaccatgtgcatttttaccactatttagaagtatttctgatgcactgacaaccctaggggcaaacacagtatgcaaaaccctacttgtaggactagatagaggcaacaatgtctcgcaaagggcaaaattgtgcttctgtgaattgactttacttaactctaggctgtgatgagcttatagacacttcaagggagggcaagcagcatggcagtaacaagtagttaacactgagtggaaaactgacacagagccaactgaaagttgagtggggctggcagcaagttatcacagtcctgactggaataatgcagcttgtgctattgcaaacaaagcaattacatcaactgcaggaagaggcagacaatgttgaatacactaaaagaatgagaaagtaatttaaacattgctggaaaaatgactttaaagtgaattatgctcaaagaacttactaaaaaaaaccccatacagctatgtattacatcaactaaatgaaggtcaactcctgtttaacagcattatttttttatacaaaaaccaaatcttcatttatactgcaagtattctggacacctgttgtattaaacttttctcattcaaacaaaaattaaaaggaaaggcagtaaaatatcaaaacaaatcaggtctaaggaacatgagctgtaacagcacttgatccatcctgaaaccagggtttcgatgagaagcacgtgtgatgaaggaagaactagacaactttcagaattggagtctggcaagtgaattaatatgaacagaaatagagttttcttaaaacaattgagttgcccacaggagcttgaacacagaacacatatgagaagccaa

SEQ ID NO: 240864 - DNA, 728 bp, Homo Sapiens
ttggcaagaacttcaccccttcagagacaccgaccatggacatcgcaaccaaggggcccttccccaccagcagggaccctcttccttctgtccctccgactacaaccaacagcagccgagggacgaacagcaccttagccaagatcacaacctcagcgaagaccacgatgaagcccccaacagccacgcccacgactgcccggacgaggccgaccacagacgtgagtgcaggtgaaaatggaggtttcctcctcctgcggctgagtgtggcttccccggaagacctcactgaccccagagtggcagaaaggctgatgcagcagctccaccgggaactccacgcccacgcgcctcacttccaggtctccttactgcgtgtcaggagaggctaacggacatcagctgcagccaggcatgtcccgtatgccaaaagagggtgctgcccctagcctgggcccccaccgacagactgcagctgcgttactgtgctgagaggtacccagaaggttcccatgaagggcagcatgtccaagcccctgaccccagatgtggcaacaggaccctcgctcacatccaccggagtgtatgtgtggggaggggcttcacctgttcccagaggtgtccttggactcaccttggcacatgttctgtgtttcagtaaagagagacctgatcacccatctgtgtgcttccatcctgcattaaaattcactcagtgtgggcccaga

SEQ ID NO: 240865 - DNA, 1129 bp, Homo Sapiens
ttgggttttggggaaggggccaaatcctcactcatttttttatttctggtgctcgttgagaccacacagacatggaaaggccgcaggaggtgatgagacagagattaaccgtgccgaatgaaacaaggcttcctttcggggaattcagcagaaaaacctttcgtgagattggagaggaaaatatgtctgttctgcttggcgggtcctagcagaagatgtgactcagactgcctctgggtggggctggctggcccacagatcctgccaccatgccgcagcatcgtcaggaccctccaccagcataagctgggcagagcttcctggccatctgtccagcaggggctccagcagtcctttttgcacactctggattcttaccggatattacaaaaggctgccccctttgacaggagggctacatccttggcgtggcacccaactcaccccagcaccgtggctgtgggttccaaagggggagatatcatgctctggaattttggcatcaaggacaaacccaccttcatcaaagggattggagctggagggagcatcactgggctgaagtttaaccctctcaataccaaccagttttacgcctcctcaatggagggaacaactaggctgcaagactttaaaggcaacattctacgagtttttgccagctcagacaccatcaacatctggttttgtagcctggatgtgtctgctagtagccgaatggtggtcacaggagacaacgtggggaacgtgatcctgctgaacatggacggcaaagagcttgtttcagtcccgatggagcccggctcctgaccacggaccagaagagcgagatccgagtttactctgcttcccagtgggactgccccctgggcctgatcccgcaccctcaccgtcacttccagcacctcacacccatcaaggtgagtggcggtgggaaggagctcgcagaagaggctgtgatcatgaggccggagcggtctgcccacagtggggaagggctgatgtggtaagcctgccaccccagatcgctcctgggcccgagcacagagcatctcttacccattggctctctctcttccttttatcccacttctgccatcccatatggttgagttttctgtctcgctga

SEQ ID NO: 240866 - DNA, 1112 bp, Homo Sapiens
tttgaaatacagatttacttcatcataagttaagaaaaatgaaagaaagcattactcttgctcaccagagatttcatcattgtgtgcattaagtgtaaaaattggcttatctgaacgtgcatccaaattatatacaaagccgtcatctgtactggccaagaaatgacaaggtgaaaagtgattccaagtcactctctctatctgcccactgaatcgccacattcgatggcttttcatctggacttcggcagtcatacaaagccactgacctagacacattcaggcaaagttagggttttaagagttcaattctcctatatgttttatttataatgaaatagtaataaaatagcactgtgaaatcaagattcatttaaagcctgttttaaggttctaaataaagtagaaaaaaaatgagctgagtttcagtaattggtggattctgatcttaacacttgaaggcactggtgcctctaacgttacagtggttttgaccttctccaggtcaaatcttccactcgcaagaagaatcctctctatgtccaaaagcccaggacaatttctaatttccccttctctggccgagctcagagccaggttactcatgtcttaggcagacttactctccataagcagtttatcatgttaggggaagcaagggatgcacttttgtaattctgcgtgaatcacaagaaatgtaaacatatcatgcttcaagaggataagaaatgaaaataaagactgcaaagttggttttggcttctactatctgtttctcctacctgtagacccaatctgtaaaaaggagcactgatatgagctataaaccccgtggttgaccacagtggccccagttcttcatgtctccctatatccatgccctctgtcatgtgacatggaaattcttcccataaaggcaaagtacagcctctaaaagccaaagaagttgctagttcctacagttatattattatgacagaatcatgttccgttgtagactgaaaggaccagagttaaaaggaaaaataagtagtgcaaataatttaaacataaaggtggcctcaaggatacattctgcctgggtaccaagtgatactcttaaaatgacccaa

SEQ ID NO: 240867 - DNA, 1401 bp, Homo Sapiens
  misc_feature (166)..(194): n is a, c, g, or t
ttgggcatatcctctgagtgtggaatggctgaattttgatcctagcccagatgattctactggaaattacattgctgtaggaaacatgacccctgttattgaagtgtgggaccttgatatagtggactctttagagccagtcttcacactcggaagtaaactttcnnnnnnnnnnnnnnnnnnnnnnnnnnnnngttcctcagcagaagggcataccgatgctgtccttgacctttcatggaataagctaatcagaaatgttttagcaagtgcatcagctgacaacactgtaattctgtgggatatgtccttggggaaaccagcagctagcctcgctgtacacacagacaaggtccaaacactgcagtttcatccatttgaagcacagactctgatttctggctcatatgataagtcagtggctttgtatgactgccgaagtccagatgaaagccatcgaatgtggcgattcagtgggcagatagagagagtgacttggaatcacttttcaccttgtcatttcttggccagtacagatgacggctttgtatataatttggatgcacgttcagataagccaatttttacacttaatgcacacaatgatgaaatctctggtcttgatcttagcagtcaaatcaagggctgtctcgtgactgcttcagctgacaaatacgtgaagatctgggacatcttaggagataggccaagtctagttcattctagggacatgaaaatgggagttctcttctgttcttcatgttgccctgatttgccatttatttatgcctttggaggtcaaaaagaagggcttcgggtctgggatataagcacagtctcttcagtaaatgaagcatttggaagacgagagaggcttgttcttgggagtgcaagaaattcatctattagtggcccttttggcagcaggagctcagatacacccatggagtcttaatgaagatcatctaatttcctgcttaccttaactgggaattttaaaaagttggcctaaaaatgttccatgcgtggcagcaaccatgcagagtgactgaaacacaattcatttctgactgacattcctttctgcaactgcggtggcaccacaaatatccggtctttgtgcttgctcttcagatggatggtttgtaaggctcttgttgcatttcttaaaaaagagtaataaaaaggatttttaaaaagtaattccttaaacataccatctgtcacagttaatctagatttgtaaataggtagtaatttatagaatttttaaagcgtaaaatccggtaatattaaaagataggtaaacctacgcctggaaaggctgttatttggctaaaattgcacatggaggccatgaacagaggcaagtgccccagagacttcactttcattcctaac

SEQ ID NO: 240868 - DNA, 926 bp, Homo Sapiens
  misc_feature (47)..(76): n is a, c, g, or t
ttggcatctccctggcctccggtcccaacttcgcttctctgctgacnnnnnnnnnnnnnnnnnnnnnnnnnnnnnnctgccaaaatgtctacaggtccaactgctgccactggcagtaatcgaagacttcagcagacacaaaatcaagtagatgaggtggtggacataatgcgagttaacgtggacaaggttctggaaagagaccagaagctctctgagttagacgaccgtgcagacgcactgcaggcaggcgcttctcaatttgaaacgagcgcagccaagttgaagaggaaatattggtggaagaattgcaagatgtgggcaatcgggattactgttctggttatcttcatcatcatcatcatcgtgtgggttgtctcttcatgaagaaccagcggaactcaaaactgctgttcaagaaacctcttcaagacttttgacttagaacctgctatattatcaagcttacctactgttatctctaaaattttttttgtgttaatgtaaagttgaatttctaggaaacgtgcctttgttttttaatatgcactccaaattagaaggccggccccgtccacattttgcacagtgcctttacagatttacgtatgggctgatgaagaggccttcttaagttccagagtgctataatctagatgtaatgttgtcactaattaattgccattactcccagttagttacccttgtcatttggcattattttcagaaccacattttaaacctttgggtaatcagattccaacttatgccttccagaaaaaaacactactgcctaacacaaatctgtgataacaacaggctgtgccttattttgataattttctgattccctagaagagaaccctctactttttgtaagcactactgactctcgctgtatttaagatgctggtgaagagcttttg

SEQ ID NO: 240869 - DNA, 950 bp, Homo Sapiens
ttggggcgctgtttaaagatggcggcggaggaacctcagcagcagaagcaggagccgctgggcagcgactccgaaggtgttaactgtctggcctatgatgaagccatcatggctcagcaggaccgaattcagcaagagattgctgtgcagaaccctctggtgtcagagcggctggagctctcggtcctatacaaggagtatgctgaagatgacaacatctatcaacagaagatcaaggacctccacaaaaagtactcgtacatccgcaagaccaggcctgacggcaactgtttctatcgggctttcggattctcccacttggaggcactgctggatgacagcaaggagttgcagcggttcaaggctgtgtctgccaagagcaaggaagacctggtgtcccagggcttcactgaattcacaattgaggatttccacaacacgttcatggacctgattgagcaggtggagaagcagacctctgtcgccgacctgctggcctccttcaatgaccagagcacctccgactaccttgtggtctacctgcggctgctcacctcgggctacctgcagcgcgagagcaagttcttcgagcacttcatcgagggtggacggactgtcaaggagttctgccagcaggaggtggagcccatgtgcaaggagagcgaccacatccacatcattgcgctggcccaggccctcagcgtgtccatccaggtggagtacatggaccgcggcgagggcggcaccaccaatccgcacatcttccctgagggctccgagcccaaggtctaccttctctaccggcctggacactacgatatcctctacaaatagggctggctccagcccgctgctgccctgctgcccccctctgccaggcgctagacatgtacagaggtttttctgtggtgtaaatggtcctatttcacccccttcttcctgtccattga

SEQ ID NO: 240870 - DNA, 1323 bp, Homo Sapiens
ttggcgcctttgtgggccctgcagccgtcattgtcctggtgaacatgctcatcggaatcatcgtcttcaacaagctcatggcacgtgatggcatctccgacaaatccaagaagcagagggccggggcctcactctggagctcctgcgtggtgctgcccctgctggcgctcacctggatgtctgccgtcctggctatgacagaccgccgttccgtcctcttccaggccctctttgctgtcttcaactccgcgcagggctttgtcatcactgctgtgcactgcttcctgcgccgagaggtccaggatgtggtgaagtgccagatgggggtgtgccgggctgatgagagcgaagactcccctgactcgtgtaagaacgggcagctgcagatcctgtcagactttgaaaaggatgtggatctggcttgtcaaacagtgctgttcaaggaggtcaacacttgcaacccgtccaccatcacgggcacactatcccgcctgtccctggatgaggatgaggagcccaagtcctgcctcgtgggccctgagggcagcctcagcttctcaccactgcctgggaatatcctggtgcccatggcagcctcaccagggctgggggagcctccgcccccacaggaggccaaccctgtttacatgtgtggggagggtggcctgcggcagctggacctcacatggctgcggcccactgagccaggctctgagggagactacatggtgctgccccggcggactttgagcctgcagcctggcggtgggggtggaggtggtgaggatgcccccagggcccggccggaggggaccccccggcgagctgccaagacagtggcccacactgaaggctaccccagcttcctgtccgtggaccactcgggcctggggctgggccctgcctatggatctctccagaatccctatggaatgaccttccaaccgccaccgccgacacccagcgcccgccaagtgcccgagccaggggagcgcagccggaccatgcctcgcaccgtgcccggctctaccatgaagatgggctccctggagcgaaagaaattacggtattcagacctggactttgacaaggtgatgcacacccggaaacggcattcagaactctaccacgagctcaaccagaagttccacactttcgaccgctaccgcagccagtccacggccaagagggagaagcggtggagtgtgtcttcgggtggggcagacgagcggagcgtgtgcaccgataagcccagccctggggagcgccccagcttgtcccaacatcggcgccatcatagctggagcaccttcacatctatga

SEQ ID NO: 240871 - DNA, 1368 bp, Homo Sapiens
  misc_feature (979)..(1106): n is a, c, g, or t
ttggcttctctgcactatgtcgggtggcctcctgaaggcgctgcgcagcgactcctacgtggagctgagccagtaccgggaccagcacttccgggtgagggaggccgggccgcgagacgggaaggccctgggcaagaacgctgagaaacgggtgacaatgaagaacaagaaaaattactgaagaaaagctgtacgttatatgttggaaatctttctttttacacaactgaagaacaaatctatgaactcttcagcaaaagtggtgacataaagaaaatcattatgggtctggataaaatgaagaaaacagcatgtggattctgttttgtggaatattactcacgcgcagatgcggaaaacgccatgcggtacataaatgggacgcgtctggatgaccgaatcattcgcacagactgggacgcaggctttaaggagggcaggcaatacggccgtgggcgatctgggggccaggttcgggatgagtatcggcaggactacgatgctgggagaggaggctatggaaaactggcacagaaccagtgagtggtgagagctctgtcagtgacaaacactcctttggcctgttgaatttgctgaagaacatcacctaaagtctgcacacgagcccatttttaccaagatttgatcagtgtctttactgagctggaagcctctgaaagttattaaaggacagaatccaaaagaatgcctttaattcttgtctgagaatcttggccatgtgtcagattatcagaacaattttgttacccggtcagaaattgtgttctttgacaacagattggatctgtaatgttgattagtctttagccataaccactacacttttagaaagacagaaaaatgtaagaatttgtttttaccataatgagtcttaagtaggttcatgatctacattggggcctgggattatttttttaattttaagtttgcatgagatagcctaataaatggaggtggnnnnnnnnnnnnnnnnnnnnnnnnnnnnnnnnnnnnnnnnnnnnnnnnnnnnnnnnnnnnnnnnnnnnnnnnnnnnnnnnnnnnnnnnnnnnnnnnnnnnnnnnnnnnnnnnnnnnnnnnnnnnnnnncgaaaaacaacaaatggagttgtgctatgttgtattgctttgcacaaaattaggaacaggtgtttgacaattgaatttgttttctgtgaattctaacctctaaaggcatgcttagaggtcaaggaccttcctgtgtagttggtgcaaaagcaatctccacaggacagcactgcttccatgcttcatacatcaggaaatgaggccagaacttgagtatttactaacacgtttttcaaaagatgtcagtgttatacctaaagct

SEQ ID NO: 240872 - DNA, 971 bp, Homo Sapiens
  misc_feature (565)..(574): n is a, c, g, or t
atgaagaagagacagatggaaagagatgggcgaggaaggctgatgttacaaatataaactttgtcagcactttcaaaacaatagcaattacacttaaatacatacaaagtttattaaaaataggtgcaactgaaatacagtagaaatggaaaactacagcagttttgatgttttctcatagtaatgcagttctgaaaagcacttttacacatattcacatttgacctcactgcccaaagatggccaaatccacttgtgtatgggtttcacaaccacacatacaaatatccctgtatgtagatatttacatgtatctgcatgttctcctgtgtatttttctatatattaacagaaaagtaattcatctgcatctctttaaagaaagtgtggatttagtcaccataaggctgccagtgtcctcaagatatttgggaggtgcctgcttttcctagaacttctgctgcaagcaagcaaatccttcctaaacactcagaaccattcactctcttactcaaacaaggaaatggtaagagcacactttcaaataaaaaccctgatagaggtnnnnnnnnnntatttacactcgcatttttaatgatttatcatacaacttttattaaaagtgatttcgaaggcagtaaaaagcccctatacctctctttgaaagtgtgcctattttcctaacatatgtaagagaacattctctttgaaaatgtgtctattttcctaacatacgtatgtgtaagagaacattctctttgaaagtgtgcctattttcctaacatacgtatgtgtaagagaacaatatggtacagaaaaatcatttggactccaccaagggctttgtcaaatagaaaatttgcttgtaatcacaaagtaatttatcatcttaacaccagacaatataaaacacactgaggtccgtctctccaacatcagccacatatccatagctggagaaatgacaccaa

SEQ ID NO: 240873 - DNA, 1494 bp, Homo Sapiens
  misc_feature (322)..(332): n is a, c, g, or t
aaatcactggaagcatgttcaactccttggtgtttgaagaggcatgacacaaacatagagcccttagtggttgtgtaggatgcttctgttcaccttgatgactacagaagcaagaatcctgttttaaaatccttgccctatcatgaatgtttacgatagtgactaaagcactacgatggctggattcttcaaacaaataagcagtactttgggggttatggagactagaagctttttttaaaggtaaggatttcttatccaaagcaaagcaaaaagttgaaaaagtgctataaagtccatgcccctgctaagttaaagcttnnnnnnnnnnngatgcgaggagaaaccgccactgctgcttggtccactcctcatatgggcttttgacatctagctatgcatttcctggcttctgatgtgatctgctgaaagaggtcttataaacctgaaataggtaacagcaatgctgaataaaaagaggaatgagaaaaagtgctaaggactagtcacacctctatcaatcgactcagatgatcagttttggtagtcatggttaaccggtatctgtttgaatcctatcagagtcttgaatcaggccgtgttaaactgtgtaagaaactactcttgtatgcctcaaatcgacttattctcaatgactgtatttatatatacttgtattcctccaagtacttggataaatgatgatacctaggatatgactggaccctagatttacattacagtttcaagaagagacaaccaaccatgtataatgtctacataacattttgttctttagaaagtacagaggtcctgcatagatcacaggagatttgtctcttcaaaataaacttgtaacaaaattacacttatcttgaaataactttgccaacaaagtgatatagatatattttaaatgccggtactgacatttgaatttgcagtgacttcatgcaagccaaaataaaaagactagcaggtaagttcattgcttacaagtttgtgacttttacaaaccctacgtttacattagtaaatagtaactgcagtgcaaaagctatgtggtattccagtgggattctatggtaggaaactagatgtgcagaaaaggttgacaatgtatttgattttataggactcctatttagttaccacaacctccttcttactttaacctatacatgctaaatatagtctctgcatctctccttggttctttcattcatctttttctgttctttaaaaaagtaaaataaaactttggaatatctcaagggcttattaaagttctcagatgctgacagtgactaaacataactcatactcaagacattaaaaacaaaacttcacaaacaataatattgcttacatcctctgctatacgtaatgtgcacaaacatatcacagctgatgacaacacacccaggagaatttggattgagaatctttaccgataaaaggagcaatttcaaaaacttaaatgtgtaacatgac

SEQ ID NO: 240874 - DNA, 945 bp, Homo Sapiens
ccttttaaagccaactttgtacaaaaaagttggacaaggggcccctacaagcggccacaaggatggcaggcttcgcggagctcgggctgtcatcgtggctcgtggaacaatgtcggcagctgggtttgaagcagcccacgcccgtgcagctcggctgcatccccgccatcctggagggtcgagactgcttgggctgtgctaagacaggcagtgggaagacagcagcgtttgtccttcccatcttgcagaagctgtctgaggatccctatggcatcttctgcctcgtcctgacacccaccagggagctggcctaccagatcgcagagcagttccgggtcctggggaagcctctagggctgaaagactgcatcatcgtcggtggcatggacatggtggcccaggcgctggagctctctcggaaaccacacgtggtcatcgccacgccggggcgcctggcagatcacctgcgcagctccaacacttttagtataaagaagatccgcttcctggtgatggatgaggcagaccggctgctggaacagggctgcactgacttcaccgtggacctggaggccatcctggcggctgtgccggcccgcaggcagacactgctgttcagcgccacgctgaccgacacactccgggagctgcagggtctggccaccaaccagcccttcttctgggaagcacaggccccggtgagcaccgtggagcagctggaccagcgctacctgctggtgcctgagaaggtcaaggacgcctacctggtccacctgatccagcgcttccaggatgagcacgaggactggtccattatcatcttcaccaacacgtgcaagacctgccagattctgtgcatgatgctgcgcaaattcagcttccccaccgtggctctgcactccatgatgaaaccaaaaaaacgctttgccgccctagccaagttca

SEQ ID NO: 240875 - DNA, 1959 bp, Homo Sapiens
actttgtacaaaaaagttggcaaggattctctgcctaagcttaaggacctggcatttctcaagaaccagctggaaagcctgcagcggcgtgtagaagacgaagtcaacagtggagtgggccaggatggctcgctgttgtcctccccgttcctcaagggattcctggctggctatgtggtggccaaactgagggcatcagcagtattgggctttgctgtgggcacctgcactggcatctatgcggctcaggcatatgctgtgcccaacgtggagaagacattaagggactatttgcagttgctacgcaaggggcccgactagctctaggtgcctcccttcctgcagattgtggacagtagttcctcagcctgcaccctggattccttcttccccttcctagctccatgggactcgccccaagactgtggcttcaaggaccaccagccccttactcttcaagccctgactgtggagttggtagatgcctctgatcctcagtattctctctggcaatgttccacggcttctccttcctgggagctggctccataacttgattttccccaaacgtgttgcaatccctgctgccccttagccacccagggtcttgtgtgggtatgagtgtagaggatgggggtatgccaggcctgggccgtcccaggcaggcccgctggaccctgatgctactcctatccactgccatgtacggtgcccatgccccattgctggcactgtgccatgtggacggccgagtgcccttccggccctcctcagccgtgctgctgactgagctgaccaagctactgttatgcgccttctcccttctggtaggctggcaagcatggccccaggggcccccaccctggcgccaggctgctcccttcgcactatcagccctgctctatggcgctaacaacaacctggtgatctatcttcagcgttacatggaccccagcacctaccaggtgctgagtaatctcaagattggaagcacagctgtgctctactgcctctgcctccggcaccgcctctctgtgcgtcaggggttagcgctgctgctgctgatggctgcgggagcctgctatgcagcagggggccttcaagttcccgggaacacccttcccagtccccctccagcagctgctgccagccccatgcccctgcatatcactccgctaggcctgctgctcctcattctgtactgcctcatctcaggcttgtcgtcagtgtacacagagctgctcatgaagcgacagcggctgcccctggcacttcagaacctcttcctctacacttttggtgtgcttctgaatctaggtctgcatgctggcggcggctctggcccaggcctcctggaaggtttctcaggatgggcagcactcgtggtgctgagccaggcactaaatggactgctcatgtctgctgtcatgaagcatggcagcagcatcacacgcctctttgtggtgtcctgctcgctggtggtcaacgccgtgctctcagcagtcctgctacggctgcagctcacagccgccttcttcctggccacattgctcattggcctggccatgcgcctgtactatggcagccgctagtccctgacaacttccaccctgattccggaccctgtagattgggcgccaccaccagatccccctcccaggccttcctccctctcccatcagcagccctgtaacaagtgccttgtgagaaaagctggagaagtgagggcagccaggttattctctggaggttggtggatgaaggggtacccctaggagatgtgaagtgtgggtttggttaagaaatgcttaccatcccccacccccaaccaagttcttccagactaaagaattaaggtaaacatcaataccctaggcctgagaaataaccccatccttgttgggcagctccctgctttgtcctgcatgaacagagttgatgaaagtggggtgtgggcaa

SEQ ID NO: 240876 - DNA, 2345 bp, Homo Sapiens
  misc_feature (227)..(265): n is a, c, g, or t
catacattcaatgtattggttagggcccaaaatccctaaaccacctctcaacaaacatacacttttggttctttattatgcaaaattacaaattggcaaattcaataaagaggatgcaatggatttgagcatcacagccaattgcttatactaaaatattttaattctcagactctctttccctcatacccttcccttccccacctcacataagaaaatgatgcttnnnnnnnnnnnnnnnnnnnnnnnnnnnnnnnnnnnnnnnctatccccaaaggcaggcagaagaggagtcaaagaaagaaagcatttataacaataaaaataaaccaaaaatagcaggggaggatctatacatggcataaaagatgtgtctcataaaaactgagtctccaattcagaacccaaatgagaaagtgattatccatcttaccttcccttttattagataccacacaattcaagagttcttaaaatctaagagatcagtaaaaagtttgaaaggcagtgttgtcctcctcatcactgaaacctgttgtctgtaatgacagctttcacattccctttctccaaacccaaaggatccaaattaaagtagtccaagaaaaagaaacaagcaatttggtctgacattgtgcttaaggaaaagggaggatataaaatatccagtggctggatcagtagctgatactttcagaagtggggctggagcaggagggcagaaaggggcaggtacgctgtggtccacagaggtccatgcagataggttctccccatctgtgaataataaatgggtccaagggcagagagtcaccatttagaatgataaaatgtttgcacactatgaaagaggctgacagaatgttgccacatggagagaataaagcagagaatgaacaaacttaatctgcttatctcagggcagaagtaattatttttgttggttcaataaatttggataggactgaaaaaaccatttgtaaactattatgccaacagacacgcagggtttccatatggggccaccgacagacaaatcaggtaagtgggaagcactgatgcatacttgcagccatagaaggaatgagaactgtcattcaaaccaaaagagtcgggaattcacctgttaatatctacaaaatgcccaggcagaacttattttgcaggtgtcatgggcatcacagcactggacggaagttgcagtgtagccatggaccaattattaactggcccaaggagaagaggaagaaaactattctttatctacaattaactaaaatgcttctgcccttaaaagaaagtcaaagaaattgccaagagcatgaatacagagagtggattcaggtgaggggcaatcagtctgaacaatgagcaagtctatagttgtccattatcatctaaaaggtgactctaggaaaggaaaatgttctgttgagtttctacgttagttgccaaagggaatgtcatggccgcttcagaggaaaagaaatggtagcagaaaatagcaaaggctgctatatagttcctccttttccaaccttcttatagggctgttttggatcatagaaaacaagtccaactttccaattcctgcacttgaacatataaagtccatgtcttcagtgagaacatactgggtataccagtaacacggaccacacggtgtgaaagaaagattggtgagcaggcctttaagcagcaagataatcagtagagactgatcatctgacaaacggaagacaactgtcactgggtcccttgggctaaggaaagttcagtcctaaatggcaagggtacaacatttgagacagtgtcttctgtggatatgaaaggaaaggctcaacagttaagactagtttcatatgctgggtgagtgagtgaaacaggcctagaatgctcagatctgggacaaatgtgttccatacaggcagtcaatggaatgcttggcaggaagtagggggacctgtgggtgggtaactggctcttgcacgagttaacttgtctcttggtcattccaacattccaaacctttttctggttttaaaaaagtggggagggtcatagtaactagactatcaaggataaaactttacactgaccaggcccatacacagaaaaacaacaaactcacacccttcttcctggtaaagtttatatgaagacctgcacacagacaagaaaaattaaggtgcagcctcttgaagggatctcctgcccccaaaatttgttgaagaaaagtattcttctccccttctctctccaggaatgatatatgcaggagaacacaatacagtatgtccattttccaaagaaacaacatacttgaaaggtttgtgctgagccaa

SEQ ID NO: 240877 - DNA, 796 bp, Homo Sapiens
  misc_feature (388)..(426): n is a, c, g, or t
acgtttagtcaggaatatgcggtcatttattggttactgggtttctcatacaaacagatataatatcacttttaagagaaatgtacacaaggaagtaaccatagtaccacttattagtgggggcctctgggtacataaatgtgtcctcccaaatagtcatcatacattcaatgtattggttagggccaaaatccctaaaccacctctcaacaaaacattacacctttggttctttattatgcaaaaattacaaattggcaaattcaataagaggatgcaatggatttgagcatcacagccaattgcttatactaaaatattttaattctcagactctctttccctcatacctttcccttccccacctcacataagaaaatgatgcttnnnnnnnnnnnnnnnnnnnnnnnnnnnnnnnnnnnnnnnctatccccaaaggcaggcagaagaggagtcaaagaaagaaagcatttataacaataaaaataaaccaaaaatagcaggggaggatctatacatggcataaaagatgtgtctcataaaaactgagtctccaattcagaacccaaatgagaaagtgattatccatcttaccttcccttttattagataccacacaattcaagagttcttaaaatctaagagatcagtaaaaagtttgaaaggcagtgttgtcctcctcatcactgaaacctgttgtctgtaatgacagctttcacattccctttctccaaacccaaaggatccaaattaaagtagtccaagaaaaagaaacaagcaatttggtctgacccaa

SEQ ID NO: 240878 - DNA, 1177 bp, Homo Sapiens
  misc_feature (437)..(464): n is a, c, g, or t
  misc_feature (1142)..(1155): n is a, c, g, or t
ttggctcctccccgccaccacggccctcctgggcccaccttcttccgccagcaggatggcctgctacggggtggctatgaggcacaggagccgctgtgcccagctgtgccccctaggaaggctgtccctgtcaccagcttcacctacatcaatgaggacttccggacagagtcaccccccagcccaagcagtgatgttgaggatgcccgagagcagcgggcacacaatgcccacctccgcggcccaccaccaaagctcatccctgtctctggaaagctggagaagaacatggagaagatcctgatccgcccaacagccttcaagccagtgctgcccaaacctcgaggggctccgtccctgcctagcttcatgggtcctcgggccaccgggctgtctgggagccagggcagcctgacgcagctgtttgggggccctgnnnnnnnnnnnnnnnnnnnnnnnnnnnnttcagctgctgacaaacccctggcatttagtggctgggccagtggctgcccatcagggacgctatccgactctggccgaaactcactgtccagcctgcccacctacagcaccggaggtgccgagccaaccaccagctccccaggcgggcacctgccttcccatggctctgggcgaggggcactgcctgggccagcccgaggggtccctactgggccctcccactcagacagtggccggtcctcctccagcaagagcacaggctccctagggggccgtgtggctggggggcttttgggcagtggtactcgggcctcccctgacagcagctcctgtggggagcgctcaccaccacccccgcctccacctccttcggatgaggccctgctgcactgtgtcctggaaggaaagctccgagaccgggaggcagagcttcagcagctgcgggacagtctggacgagaatgaggctaccatgtgccaggtgtggtcagaggcaatgatggggaaggggcatggcaggacatcccaaggccctgggatgcaagcggcatttccattttggcagggaacgggggttgggtagttgtagttgtgacccccctgccctccccaccagttgtctggtttaaagtgctgggattacaggcgtgagccactgcacccggccaagtgcttgcnnnnnnnnnnnnnngagacagggtctcattctgtca

SEQ ID NO: 240879 - DNA, 1309 bp, Homo Sapiens
ttgggtccatttcaatttatcacctcccaggattagaaatattgcgagaaaagtcaaaggtaatttttaaaaaatagcctttaataaaaaatacaaaaatactgtatctttgaaacatgatctgtatattcagcaagtcctaagcttcctaatgtaaaataatctgtttaatattgtatttttatttgcaagtacattaaaacaaatcttattttacttgacagtaatatttatgatgctgacatcctcatagggcttatctgttttgggattgactttgacgttggagatcctctgtacaacttccattcctttagtcactcgtccaaatactgtatgcttattatcaagccaaggctgttggaggacaaatggaaaatcttggtaaaccccaatttctttaaattatatcctctggttgagcaaattaaagagaatttaagtttacgctcccctttagcatatatttaaaaagaagtacaataatttctcagcaataaaaatgtagcagcttttaaaagttatttccagtgtgttaaaaaaaatagaagcatagtataatgtttaattaaatatctgcatctttcagaccaaagggaactggaagatcttccctaaaggtaagttacttcacatggcttacagaattgtggctaaggctttaaaaggtctctggaggactcttacctgaacagtttattcagaggcagtttgaaatagtttatgcagcacatactttggcattagacaggtgggagttcaaatgctagcttggctacttgaccttttggcaagttaatcatgtctcactgtttcttcatctattattgaaaactggggatactgatagtagaagtactgtgaatactacataaaactatgtgcctggcagatggtagttacatttttcccttcttcatcacttagtgcttaattccaaaacaaaaactaggtaatttttataattttgtgttatggcatagcaatagagctaggttaccttatactgtatttcatcaaatctaatgtattctgatttcagagatactaaaatgtgggggaaattgtctcaaaattgtgaattcatatactctaatctttgtattctaaagacaaggaaataggctcacagaagtgaaataatttattttaggttacatcatcagtagaggcagagttgagattgaaactcaagtatcttgaatcgtagtccattgtatttcttactacagtggcagtattgttttaccaattctaaactgattagtcacataatttggatattcttgccaacttttttgtacaaagt

SEQ ID NO: 240880 - DNA, 3595 bp, Homo Sapiens
  misc_feature (1138)..(1403): n is a, c, g, or t
  misc_feature (1405)..(1419): n is a, c, g, or t
  misc_feature (1563)..(1821): n is a, c, g, or t
gccaactttgtacaaaaaagttggcttaaaatgcctgttaaaaagaaatttattggcagtgtggcaaagaattataaaacatagtgtttaatgtacttggagtttccttgtagtagtaagtatagagtttgatgataagtaaacgtcccttaacaaaaacctcaaccttattactatcccattaaaaaacagcaaatacttactgagttcttgtaagagctaatgtcattgtaagatttaaaactaagggcttttatcactttgcaaattattttttaaatgcattcatcatttgacagtgttctctcatttcttaaaatgcgagtcatcttccaaaagagttgtttttaactgccctaaacatttttggggaagtatgcagggtttaaatttttaagtataattagttctgaattaaaatatgcacatggaacttgtctggcagactgatgcaatagtaaaacaactgcagaattactattaatgtaaacaatccatttgaaagtcaatcagctgctcccattaaaatattatttaaaatacaatacccacagcatctaactaaatcctcaggatttattctccgggagaaattatccctttctaggaaaatgaagttatttctggttttaattcatacaatactttaagaaaatctgttaaatataacaaaacacaagctagatgcttaagaaatgcttaaagaaatattggggcgaaggtaacagcagtcaacaggattgtggccattactggtcctattattttgatgtaccatggaaggcacagaaatcgagcaaggaagaaaatattagttattttgatctacatctttttctaaagaaaagtggagcttgcctccagttcaattcacaagagcattttccctcccatgcccaccttttcttgtggctgtcgctaggaaggatgcagaggctgtgtggtttaccaaatgccttaacttagcagtgaatgacaactgtcaaacacatgttgagggaaaatttttactgattcacaaaaaggaagacagtttgcccactcttagtggcacaaatcaaagctgcatgcactacattatccaaattagtcgtaaccaaatagttaaaaaattctgctgggcacggtggctcatacnnnnnnnnnnnnnnnnnnnnnnnnnnnnnnnnnnnnnnnnnnnnnnnnnnnnnnnnnnnnnnnnnnnnnnnnnnnnnnnnnnnnnnnnnnnnnnnnnnnnnnnnnnnnnnnnnnnnnnnnnnnnnnnnnnnnnnnnnnnnnnnnnnnnnnnnnnnnnnnnnnnnnnnnnnnnnnnnnnnnnnnnnnnnnnnnnnnnnnnnnnnnnnnnnnnnnnnnnnnnnnnnnnnnnnnnnnnnnnnnnnnnnnnnnnnnnnnnnnnnnnnnnncnnnnnnnnnnnnnnnttccataggatgttcaaccatgttttcagaggccgcactgcatgaatgcgggaaaatgttgatgatcactaatcaataatctgatatttaacaaaatatggacaggccacttatgctcagttttaccttagttattccttggtnnnnnnnnnnnnnnnnnnnnnnnnnnnnnnnnnnnnnnnnnnnnnnnnnnnnnnnnnnnnnnnnnnnnnnnnnnnnnnnnnnnnnnnnnnnnnnnnnnnnnnnnnnnnnnnnnnnnnnnnnnnnnnnnnnnnnnnnnnnnnnnnnnnnnnnnnnnnnnnnnnnnnnnnnnnnnnnnnnnnnnnnnnnnnnnnnnnnnnnnnnnnnnnnnnnnnnnnnnnnnnnnnnnnnnnnnnnnnnnnnnnnnnnnnnnnnnnnnnngtgtaacatacataacatataaaacaggtcccttccagcgctagcacactgcaattacatcttaccctgaataagagagaaactctgttttggctggtaaaatttccaatgtcttcaccaataacaaagctcattttcacagaagtttgcataaactggaaaccttccatgaccacctggaacctccagtgtacagcttccttcattgttccattaattccgaaatgtcacactaggtgatatagcagtaggtaccagctaaatagctgattaaaatagaattatggttattagtagtcttaaaaacttcttgtggcttatctatcatacctacttttaaaaaatctttaagtgctttatgcactttccccttccctcacccctccctctttggttttccttgactgtttgtgcttttccatctcagtaaaaggacctcggggaatttaaaattaactagctcttctctggacttgtgattatattgtctgagtttggcaacaagaaaatgtgactatccctaggtaccatcatttgcaagcatctctttagtctacgtacctctactccatcgctggtttccctttgcttcgattatataatgcgaggaggtctatataataaattcaggattcctgtttatgcacttttcagcaaagagctagggatcaaatagggtttcaatccttctattcatagataaaaatctgtgatggggatcaagatacccctttaaaagtcatgttaagatatacactattctttgggtaagcagaagaccttaacaaggaaagtagaaaaattaaaatgattgctgtaattctgatttttagtggtcctctagaataaaataagttttggaagtaggtatcttaaaatagtccagtagtcatcaacccaggtcaatataatataccaatatcctccaccacccaaatactggtattttacacaacttattttgcacattaagttccattttaaaatgttttaaaatgttttcttaaaaaggaagctgttagaacaaaaaaattatgaagatggttttcaaagtattacatttaaagttcataatgtgagcactacagatgttttacaaatatttttcagtgctttcaaccgttgcatttgccgtacgcttccatgttctagaataaggacatttttatgttgagaaggctacactgattacattaataggcaaatactaattctgagagaggtttctattgttcactttagaaaaatgtaggtcaatgtaatgggtgatatctgttcttaattattctaagaattaaatcctgtatgttatcagtcacctattatatggcacaccctcagggggtatcaatcattctttgcatatactggtttcttaaagggtaagtttccatagaaatgtttcttcatttgacttctaccctgaagtcatgtgaaataaaacatatatgccttaccatctaaattcaaagcttatttttgaaatgaatgtttccttttctgtaattttatgatttttctcaaatgaacagaaatggtaatgaaaccacaagttgcctactctttcgaaaccattaaattgctttatttgtgagtagacccatatttcattaagcaaactctgatagctacgtctagaatcagaagagcccaagccctctcatttcaccgaaagacattctggagcgtatagtggggaaaataaatttcctctgaagtctttttcagggaaatggaaaattacatattctggactgatacaaccaaaacccaa

SEQ ID NO: 240881 - DNA, 972 bp, Homo Sapiens
gccccaaacaatactaacccattgaagataactatgaaacctttaaatggacagtggttccttttaaaagcagccttactgaaaattttatgtacacttaaatcaagtaacagttaccgtgagttttctaaacttttgtgttaacagaaatgccagttcagcagtgtgactgttacttttaaatgtctgtcttgccgccctagagtgacagacatcccagttaaacatattaggaataagaaatacataaatccaatgaagactgtagaaaaagaattttagcacttgaaggaacttcagtcatttaacccaacccattcatgttatagattgagaccatagaaataaaagtagcctataggatacaaaagttagcggcagatctgagataaaaatccagctctttggatccccgcgtttttcaccacacttagctgtcgttcccatgtattacgaacaaagaatcaaatataatcaagtgcagcctcacttcacaggcaagaaaacagactagagtttaatatattgcccatgtttatcttaaggtgaaacatttactcttacaaccacagttgatgttaacctagttaataaaatatgaaaggtaattactaggggaattttaaacggcactacataagcaaacatgactcaaattactttttccatttctgcttcccaaattattggagttactgaagcaagctatgctgctttcaattccaatgataggcatattcccaaataaactcatttaaagagctcataaaatgaattatcctatttccaagtcagttgattagcaaattaagatacagctccaagttaccctactgcttaagggttttccggtccaatttgtaaggttttcggatttaaagattcagactgcataccaaaggtggacaaagacaacgcaagctgatttaggttgtcacgtggcacatactctagtttaaaccctcaacccaa

SEQ ID NO: 240882 - DNA, 1021 bp, Homo Sapiens
aaataattcttgctttattatgaaccaagtcacattttgtctcttccaacagatgcttgagccaaaaaagcaaacataggcagaaatacaattgagaatatcttcatgtttcaaccttttaatctgacttgccttttactatcctttccccatttcttttaatctcttttgccttacaatatattaccttctaggtatcacctcatcctatagaatcccttctagtttaatgtcctgccccaaacaatactaacccattgaagataactatgaaacctttaaatggacagtggttccttttaaaagcagccttactgaaaattttatatacacttaaatcaagtaacagttaccgtgagttttctaaacttttgtgttaacagaaatgccagttcagcagtgtgactgttacttttaaatgtctgtcttgccgccctagagtgacagacatcccagttaaacatattaggaataagaaatacataaatccaatgaagactgtagaaaaagaattttagcacttgaaggaacttcagtcatttaacccaacccattcatgttatagattgagaccatagaaataaaagtagcctataggatacaaaagttagcggcagatctgagataaaaatccagctctttggatccccgcgtttttcaccacacttagctgtcgttcccatgtattacgaacaaagaatcaaatataatcaagtgcagcctcacttcacaggcaagaaaacagactagagtttaatatattgcccatgtttatcttaaggtgaaacatttactcttacaaccacagttgatgttaacctagttaataaaatatgaaaggtaattactaggggaattttaaacggcactacataagcaaacatgactcaaattactttttccatttctgcttcccaaattattggagttactgaagcaagctatgctgctttcaattccaatgataggcatattcccattataagggtcatttaaagccaacttttttgtacaaagttgg

SEQ ID NO: 240883 - DNA, 1863 bp, Homo Sapiens
  misc_feature (510)..(518): n is a, c, g, or t
ggcatattcccaaataaactcattaaagagctcataaaatgaattatcctatttccaagtcagttgattagcaaattaagatacagctccaagttaccctactgcttaagggttttccggtccaatttgtaaggttttcggatttaaagattcagactgcataccaaaggtggacaaagacaacgcaagctgatttaggttgtcacgtggcacatactctagtttaaaccctcaactacaagaaaagaaatggtgtattgtcatttttgccaaagcaccccaaaatgaaatactttcttactcaatctaggttcttttttttcattctagtcccttaagctcctaggatttttagatgttgaaaatactccctgcgcccggcattcaatattgtatggttcattaggatctgttgtggctggctttggacattttttgttcactagtgagtatctgtattttttatttctctatgtactaaaaaaagcatttctctacataatgaactannnnnnnnnctaggtggagtaatgtatataacgtaattatattctaattaattgttatgcttatttttacaggtagaattagaagatcatgtgatgttggagtaggagggtttatcttggtgactttgggatgctggtatgtttgctaagtattcaagaacatccatgattatagtaggttatctaattcaaaaagcacatgctcttttcagagcagtctcccattgggagatcctcaccctcaatgaagaatcttgatttttcaggacattttcatggaaatcttaaaatgcttgaacagataaatgcatattagacatcccattaaaaagaaagctgtggtttttacacttcacttaggaaagcctcaaccatttcccttaccctaatacttatttcatccctgcttattcatatctgaaaatgctactttaagaatgtgtttacaactactgatgagtgaatataaaatatggatgaacctcaaatatttgccagacctaagagtatgatatgtatgtactatatggttccatttatacatgaatttctacagtgagctatttaaggtggtagaaatcattttatgtagacatagcattattatcccgttaaaaacgagagcaaatacttgtttcttataatagccaatgctatcagaagacttaaaaactaatggattttatcactttacaaattgttatgtagacatcctttttttcctaataaaaaaagaatgtgttgataggtattctgacaccaaaactgcccaaaaatagcactataaattagaacatatttttcagtctcagggtagtagtcatctgtatttaagttttgtgtgatttagagaaatttcataaattaatttctgtaggactttatattaacaatttattcatattcttttcttctaaggtttcattgtaggtataattatgcaaagcaaagaatccaggaaagaattgccagagaagaaattaaaaagaagatattatatgaaggtacccacctcgatcctgaaagaaaacacaacggcagcagcagcaattgaacaatcttgagcatagaagtcaatgtaaacgaagttaagatcaaccacataaaacatttcatgtgcaataagctctcaatcaagtaaataaagtttaagttgtagtcatttttttcccacacttgtgtggaatgaaaacttgccagtttattctggccctgtgtctactgccaggatagcattcttacgtgttacatatagtggacttgtcatccttaaaatgtgaacagaatttattggcagtgtggcaaagaattataatattacaatgagtgtttaatccaacttttttgtacaaag

SEQ ID NO: 240884 - DNA, 1412 bp, Homo Sapiens
ctttgtacaaaaaagttggcaaaccgtgaccacactgatgaccaggtcaccattgactctgcactggccacccagaagtacagtgtggctgtcaagtgtgccaccatcacccctgatgaggcccgtgtggaagagttcaagctgaagaagatgtggaaaagtcccaatggaactatccggaacatcctgggggggactgtcttccgggagcccatcatctgcaaaaacatcccacgcctagtccctggctggaccaagcccatcaccattggcaggcacgcccatggcgaccagtacaaggccacagactttgtggcagaccgggccggcactttcaaaatggtcttcaccccaaaagatggcagtggtgtcaaggagtgggaagtgtacaacttccccgcaggcggcgtgggcatgggcatgtacaacaccgacgagtccatctcaggttttgcgcacagctgcttccagtatgccatccagaagaaatggccgctgtacatgagcaccaagaacaccatactgaaagcctacgatgggcgtttcaaggacatcttccaggagatctttgacaagcactataagaccgacttcgacaagaataagatctggtatgagcaccggctcattgatgacatggtggctcaggtcctcaagtcttcgggtggctttgtgtgggcctgcaagaactatgacggagatgtgcagtcagacatcctggcccagggctttggctcccttggcctgatgacgtccgtcctggtctgccctgatgggaagacgattgaggctgaggccgctcatgggaccgtcacccgccactatcgggagcaccagaagggccggcccaccagcaccaaccccatcgccagcatctttgcctggacacgtggcctggagcaccgggggaagctggatgggaaccaagacctcatcaggtttgcccagatgctggagaaggtgtgcgtggagacggtggagagtggagccatgaccaaggacctggcgggctgcattcacggcctcagcaatgtgaagctgaacgagcacttcctgaacaccacggacttcctcgacaccatcaagagcaacctggacagagccctgggcaggcagtagggggaggcgccacccatggctgcagtggaggggccagggctgagccggcgggtcctcctgagcgcggcagagggtgagcctcacagcccctctctggaggcctttctaggggatgtttttttataagccagatgtttttaaaagcatatgtgtgtttcccctcatggtgacgtgaggcaggagcagtgcgttttacctcagccagtcagtatgttttgcatactgtaatttatattgcccttggaacacatggtgccatatttagctactaaaaagctcttcacaaaattgtc

SEQ ID NO: 240885 - DNA, 864 bp, Homo Sapiens
tttgttgggagccctgacttggaatggttggcatttctgaggtggagaaaagacctgccctccatggaagtcctgacactgctctgcggggagctctgagggaccaccacggggtcagccagctaacttgaactgtgttcagggaaacggggctgcattcattcttaatgttgataatgttctgaagcagatcagcactgctctcctgtttgggttcattgagatgaacatcttccatgctctccccgggcgttggtgtttgaggtggtgtcaaaaattgggaatgcaacagagctggccttttgcaagcaggtccatcagacaacgaatcgggccctttccttttcccactgtatgatactgtgttcttcaattctctgaactgttctatgttcacaccttgtgtctataaagaaaaaagtttccaatttagtgtacacaaaatgacttcctcttaatatacatcagtaagtaggcttatctctaccaccctttatagcttaccataaatctctgatatggtttttctatcaatattgattttctatatcaatttttattctatcttgcgacttcctcattttcactttcaccttagctcaacgcaggtcaagatgaaattaataagaccatttgatttttccctttctagttaaaatgttccatttcagttgagcctctgaacttgccttcatttatttattcattgagtttctcttgcccacctaccaggtgtctggcactgggctaaggaggatacaacagaccagacaaatatggtctctgtcctatggactttgtcatcttatgaaaaatttcaagtgacttacttgatgactggacctaggtcatcatatttgtaca

SEQ ID NO: 240886 - DNA, 2745 bp, Homo Sapiens
  misc_feature (225)..(237): n is a, c, g, or t
  misc_feature (333)..(442): n is a, c, g, or t
  misc_feature (516)..(575): n is a, c, g, or t
  misc_feature (593)..(606): n is a, c, g, or t
tttaatgagtcaaatttattacaaaaacttagtgtgtaatcaaagccaaatacattccctcaggcatgccagcggcaagcaaaataatgttaatagaatgttattaaaaaataaaactttttctgaatgatatatataaaacatcatggcacattatcatcatttgacaacagaaaacaggaagatatgtttcaatactgactttttgttgtttcaataaaggtnnnnnnnnnnnnntttcaacagaacacataaattagaaattctagagggtaagccataaagaggtgttctcttccatgcaactgccagccgggcatggtggctcactcnnnnnnnnnnnnnnnnnnnnnnnnnnnnnnnnnnnnnnnnnnnnnnnnnnnnnnnnnnnnnnnnnnnnnnnnnnnnnnnnnnnnnnnnnnnnnnnnnnnnnnnnnnnnnnttagccaggcgaggagtgcacacctgtagttccagttactcagaaggctcaggtaggaggatcacttgagcccnnnnnnnnnnnnnnnnnnnnnnnnnnnnnnnnnnnnnnnnnnnnnnnnnnnnnnnnnnnnagaccctgtctcgggagnnnnnnnnnnnnnngcatgcaattccctacaaataatgtataatttcaatgcatgagaaaaagcatctttacaattcgaatatatctttcagccagtaaaggaacaactccgtaactccccatctgctttatctacaaagacttagtgattacacaataaaaactccttagtaagaattgtaaaatttttttaaatagcaacaattcacttgttcttttctattttatggacttatacatttcaaatatgaccatgttaacaaccaagtatgtacaatatttttaaggacaaaaataacaattatatacagtttgcaaagatcaaattctaaccatggacacctttcatctagtccaatgactgaagcctgtccaacgccagtaactcccagggactaaggccaaatgaagcctcaatgctgtatttacctttttcctttcacatgctttttcttaaagaaacatttacaatttacctgctttgaaactgtcaatagctatattaataatgttttgtgccacaaatcaaagtcctttcctactcaaaagctactgttaattgaaggcaatgttaccattgagatcaaattcagatgtctagatcccagatacctgggtatgaaatatgcaaatctgccaagagaaattagatatttttcttcttttcttttaatataacccactatataatagtgaactaaatatgtttgtttcatagaaacaacttacatttgccaatataaggcaaatggtctatgtacagatacatcaggactgcctaactgacagtgagtgttgctagccaggctccaagctaatggagctaatacggtggagctctctgctgaatggactttcccttcaggatacgtcggatctggaagagaaacaaataaaatttgtgaggtttatttcttatggccaatgtggtgtatttccttctgagtttcattcctttcttataccatctacactactcctattaacttgtaagtatacgaagaaatacacacaatatttctcaagattttgaggtgacttttaaaaatactaaactccttttaaacttatttcagatctcttataataatctttgagttcaagaaagtaaaacatctccactaaaaattatctgaagttgaaaatctccataaacttaacacctatattcttttcctaatctttactcttgctatttgtgagaacatttaacataagacagtaattaaggcatattataatatctcacttatcttgaagtcagcctcaactaacaggaacagaaaacccacattttatgatacacacacaagtaaatccttaataccattcaagtcaaaacagctgtcatgatatccaagtaataaagcatctacacgtaacttcatggatcacagaaaagatcccggctcattcagagtgattcattttacatcccagtctgacaaattttattttctatctctcagcctccagcagattagaagcaacaatttagatgaaaggcgattggggtaggggatacaactgatagctgctagaaggaaacacacgaccacagtatgacaataaaagccagggaaaagagcctctacctgcccaacacacacaaaataccaaagcaaaaaggagataatctgggaacatttaatgaagagttaaatggcttaatatctcaatgatccctgagagcatagttatatgactgcacaccacaaacagtgaagtagaagcaaatactgggcttaggactctgccttttacaagttaatgatggttctggtccttggaacctctctgaatatcaattttctcagttgaaacttgaaacttgtaaagttcttctaactattaaatgatatacatgaaaactttttacaaactatagaaatattctttctaaattacaaagagctctataaataggggctactataacattatggtcataatgacagctcagaatcaaagaaaaagctaaactgcattccacgtattttattttgtgattagtaaagtatgtaatgacctacccacagccacaatccccctcattcctcccaggaaaagagttccatcaaaaacattttaagttcttgaaagaataagttcttgttatctaaaaagtttactcatgaaactattcaatccaa

SEQ ID NO: 240887 - DNA, 2158 bp, Homo Sapiens
tgcgccactgcgacaggccgttgtacacttttaaacacctagaaagactagatgtttcaaactggacttaagttttccattatatacacagtagcattgaataaatggtatacatacataacacagactgtaatttgagtgtcttctaaataggaacattctggcctagaacccttccctttcccacctctaccaaccccgtggacagctataagccatctgtaatgcttagggggggttttaacaatttcacttgtttttaagaagtcttccctatgaattttaacacaaagtgtactcaatgtagtagtttactaattctacttttgtcatatactggcaacctttttaacatcgactagacgtaaattaggactcctatgtccgcttatatacactatatacacagcacagtaaatgaaaatgcagacataagggacaatggtcaatgtgcctcctcataaacacactggacactggtagaaagccctttgcactttgtgctcctccttccccctgaaccagcacaaatatcaaaatgggtactgctcagagaattgatcaatttccaagacaatatttcatatcaaaaggatagctacaaaatgtgttatttactacctctacttttaacatactttgtgcacttctaaacatctagaaagactagatgtttcaaataaggacttaagtttgtccgctatatacacagtagggttgaataaactacacacatgtaacaatggttatatctgatagtgtcttctaaatacgaacattctggtctagaacccttcattccttccaactcctctccaccaccaacctgatggatataggcacgtgtcacttagagctgatgttatctcacttccaaaagtccttttcagaagacagcctttctacaaattttaacaaagtgtacaaaatgtgttagtttactaactctacttctgtcatacattggcaacctctttaatatctagagactagatattataaaatcgggactaatttgtccgttatatatacaatatatacagtatagcaaagttaaatgaaatgcatgtaacatatacacaatggattaagctgaaattttctaataaacaatggcaaaacaccatttgcaatttcttccctcccacctcccaggtggttcaacaattccacttccaaacagcatttcccatcagtttttaaaagctatttacaaagtgttattctactaccacttttaaatacatcaagcacttccaaatatctagaaagactagatatttcatataacttgtccaccacatacacagcactgttaaataaaattgcacacacataacaatggttatcatctgaggtatcttctaaatgtggccattttggccttgaatcattccctcctcccttccttctctgccttcaatccagtggacaagtacaggcacgtgtaatgcttagagatggtcaaacaaattcctatgcaaaagtctttacagaagacaagttttcctacgaatttcaacacaaagtgtacaaaatatgctaattttactcctttgtcatacactggcaacctctttaacatctagagactagatgttgaaaaattaggactatttgtccattatatatactatatacagagcaaaacaaaatgcacaaaacatatagaaaaatggtgtctgaaaatgtccaagtatgaacacactagtaatattaccttttgcaatttcttccctcctacctcctctaaactattgaacaagtatagacattactatactgttcacaaaggtggcttcacaattcaatttccaaaagcatttcctatgaattttagcaaaaagatatttacaaagtggtattttactacctatacatttaacatacatcgggcacttctaaacatctagatagactagatgtttcaagtaaggagttaatttgtctactatgtatacagcagtcttgaataaactgcaaacatgtaacaacagttataatttgaaagagtcttccaaatgtgaacattctggcctagaacccttcccatctccatcaacccagaagacatcaaattttcagaagacaatctttcctaggacttgtaaaacaaaatgtacaaaatatattagtttactaactctacttttgccaa

SEQ ID NO: 240888 - DNA, 713 bp, Homo Sapiens
  misc_feature (374)..(382): n is a, c, g, or t
  misc_feature (457)..(478): n is a, c, g, or t
taacaagtactcactgtgaaaataatgtcctcgaccgaacaatgaacttgaacacatattccaaagtttcagcgttcttaggattggctcacattgctcccctctgctggaggtatccaagtaagtcttcagcactgtcatcaatttcctgaataagggataatattttcaaaatacatctctttcatcatggtaattagtttgctcagtaaattataaggcattcaatcaaaggttaaaggtggtagtagagccaagctcacttactcatttgtaagcataaagataactctgcataaaaattatatttattacagggaattaataagtatttcctgctcataaaaagccagcaaagaaaaagatagggaggnnnnnnnnntcttttgactaggagaactagtcacaatcaggctacaagtgggaataatggggaataatggtggcaataatgtcnnnnnnnnnnnnnnnnnnnnnntatagaacatgctcttgtaatatcacagaactctaagtttgcttaggaactttctatgtttcttctttaccatagggcagacttcaaattacttggcctgactttcaaggccccttcacaaactggtccccaccaaactccctgtggcatcatctcctatctctcaccctctccctacacccaaaccagactgagctacttggcatgtgcactttcttctgtgtagctcccccgc

SEQ ID NO: 240889 - DNA, 1562 bp, Homo Sapiens
  misc_feature (1028)..(1041): n is a, c, g, or t
  misc_feature (1193)..(1244): n is a, c, g, or t
gaccccagtccccatagaagagtcggcagccctgagggttgctcacggttcatggtctgcccgtactccttcccacggtaatggaaacttgatgtccaggtcagtcactgcaagggttagagatgacagtgagagtcttgcttcactgctctgcttgttcatcccgtgtgactcatgcaagtccattaagatcaagccacctttcaaccagcattcaggaaggccactgccatagttatccttcttgggagagagctgatccacagttctggagagctatagaagggctgtataggtgcctggggtacttccatctccaggggttcagttttgggccacactgcctccgggctgcagttgcccacactgcaattgcccacactggctggcgccatgggagaacctaaaacaaaagcatatggtgagcagacaggggtaccacacgtgcacatcacttgctgatgctctgagaactcacaaggtcagtagacaagaaccaaacactgaaccctgacccagtgtgatcttccagcccatcagtgattcccataactaacgcaataagaaataaggttcccctgctcctgcttcctagtcatattatttctcccacaaattcatagttttaaaaacctttgtttgctgaagattaacatagacatgtgagttttctctggaggttaaattacaaggagtaagacattccatactgtaaaatttggccccagcaattaaatagaagctggttgtcttccataaaacgaactcagctaaattagctgattagcttcgagtaagtgttaatgcatagaaatacctttaacaacaaacaaatacttttacatgcataaaatgtctggaaggatactcaagaacctagaaggatctgactcctccagggaaagaaatgaaaggttcagggacaggatagaaggaaaacctttccactgatttacctttttgtaccattatgaatgtaaaccatgtgaaagtattatttattcaaaaggatccaattaaaaggtttnnnnnnnnnnnnnngagtatttccctgctactgtcaaagttgacttgctccaaagtctacagatttctcctcctagcctcacctcttaggcatctattcttcaacaattcttcatcctctgccccaacagctctgaaatcacaaagattaatgtttctttgacccnnnnnnnnnnnnnnnnnnnnnnnnnnnnnnnnnnnnnnnnnnnnnnnnnnnntctggttaaatttatgggaactggttaaatttatgttcccattttacttttttgtttttagtatctattctacaactttccaaaaaaggattaaaggcagctcaaaacataaggacacacaaatattagctttaataaaagatcaacagaaataggaaatcaggatcctggaaataaactgcatccttttagggggtgagaataacagaatgagtcagccagacatttgagaaaggatcccacatttctagatgttcaatttcactaagcgggaatgtaacgtgtggcaattttttgtttgtgtttacttttatccaa

SEQ ID NO: 240890 - DNA, 2172 bp, Homo Sapiens
tcatgaattttttggtcacttccaacacatcagttggcattgtggcagaaagcaacacaaccttaaaaagagaaaattatgttgtagcacaacttacacattaatacccaaaggaaaatgtctgaagccaagcgtctctgtcttactacggaatgaaggtagacagagttatgcatcaagtgctttaagcagggggaacgacagcaaaacacatcagttgtattgtaacagtacctgcattaaataaaccccatctctacctttaagaggggggtgaagtaatgcttacctgaatacttgtgtttagtttttggaaaatctcatagatttgatccttaaaaccacggctcaacatttcatctgcttcatccaaaacaaacattttgatccattttggagctgttagaaacaaagtcatactgtcatttctagatctactcagtgatacaatttgacttttcaactatgttaacagttttaaaaaaaatactctcttaaagacaatacttacaaaggtatcttctgtttaacatatcaaacactctcccgggtgtaccaacaacaatatgtggtgcttcagcctgcagtttttgcatttcatttcgaacatttgttccaccaatgcaggcatgacaagtggctcccatatagtctccaagtgccagaattaccttttggatctaaaacccaagccttaattattattccgcagaactccaggatcaatgactaatttttaaagcataaaggcaaatataatctggtctgccaacagcttttatgcatgcacagcacaaaactacttccaagcttaaaatgcagacgacctaactgctgcaaggtaaaattcccttaatgtctttcttatgccttgtcaaacttgggatgctgctgctccacgcatcagctagacaattcaagaataacgtttcgtacattattcttcactgtaggtagggagtacgtagtgaaatttatgttctgtaattacagctagggcaaatgatttttttcccccagagggtattgtgccttatataatcctgacctcaataaagcctacagctttattaggaaggtttacttcaaagccaatatagcagtgagctttgaaaacatagcatgcaacagatgcatcacgaactacggagacagtcaaatggtaacatgtcactgcagttttcatgttgcacaactgcattcaaacttaaaaaatggggacagatctagtacatccaagagagcgcttcggattctcaatctattagtatacaaccctacaaaccatacctgcatacccagttcttttaaaactttcaacaaaaactccctgcatgcatggacaattaaaaggagggatctggtaggaccaatttatactaagttttaaattcttcacagttgtgaaacctgaaacctatgcaacacgcaagcagtttttttgaactacactatcaatacctgttgagccagttctctggtgggggccaatactagtgcttgggtctccttgaactcaatctccaactgttgcaggatggaaatagcaaatgtggctgtcttgccagtacctgactgagcttgagcaatcacatcataccctaaaaaaaagtaggatacacatttaccgatcccacatcaaattgtcacttctacttcacaccatgtattccatttggaacattatacccaaataatcaagtgatcagcaatgagtattctcttcatttcaggtcagtcccgaaagatgattgccatcatttcactttaaggaatacaaacaggtgctagtcccccagaggttactttcccttttatggttcatgtctatgtagaacaatttcctaaaaatgccagtttcttttacctttaatacagggaataatagctctctgctgaatagcggaaggcttctcaaaaccgtaagcatagatgccacgaaggagagactcctttaaattcatatcatcaaagttatcaacaatctccttccagttgctctgtaagttagaaaaaataatgcacgcataaatgagatgaacacactcacctttccaaagcttcaagatccacaaccgtttcttacctcgatgacaccatcggggtccattccctctgggccgccatgttctctgctgttataatccgcggagccaccagacatgatcccaa

SEQ ID NO: 240891 - DNA, 1191 bp, Homo Sapiens
ttggctttaatcaggcctatggtcgagatttaatggaggcccaagagtggtgcaggaagtacatgaaatcagggaatgtcaaggacctcacccaagcctgggacctctattatcatgtgttccgacgaatctcaaagcagctgcctcagctcacatccttagagctgcaatatgtttccccaaaacttctgatgtgccgggaccttgaattggctgtgccaggaacatatgaccccaaccagccaatcattcgcattcagtccatagcaccgtctttgcaagtcatcacatccaagcagaggccccggaaattgacacttatgggcagcaacggacatgagtttgttttccttctaaaaggccatgaagatctgcgccaggatgagcgtgtgatgcagctcttcggcctggttaacacccttctggccaatgacccaacatctcttcggaaaaacctcagcatccagagatacgctgtcatccctttatcgaccaactcgggcctcattggctgggttccccactgtgacacactgcacgccctcatccgggactacagggagaagaagaagatccttctcaacatcgagcatcgcatcatgttgcggatggctccggactatgaccacttgactctgatgcagaaggtggaggtgtttgagcatgccgtcaataatacagctggggacgacctggccaagctgctgtggctgaaaagccccagctccgaggtgtggtttgaccgaagaaccaattatacccgttctttagcggtcatgtcaatggttgggtatattttaggcctgggagatagacacccatccaacctgatgctggaccgtctgagtgggaagatcctgcacattgactttggggactgctttgaggttgctatgacccgagagaagtttccagagaagattccatttagactaacaagaatgttgaccaatgctatggaggttacaggcctggatggcaactacagaatcacatgccacacagtgatggaggtgctgcgagagcacaaagacagtgtcatggccgtgctggaagcctttgtctatgaccccttgctgaactggaggctgatggacacaaataccaaaggcaacaagcgatcccgaacgaggacggattcctactctgctggccagtcagtcgaaattttggacgtgtggaacttggaga

SEQ ID NO: 240892 - DNA, 1473 bp, Homo Sapiens
  misc_feature (461)..(675): n is a, c, g, or t
agagtttaaactaatgaatgtttttacaattgagttttcatttactttctatgttctggcttcaacaggttactgaagctgagtctctctcctcacaggcatctaggcctgacaatcagctgtgatgatgtatctttgaacagttgtatctctaagaggaggctataattaaccttgaaattaatatcttaatatatcaaaagtcaattgatttattttaaatgcttagtttttcaactcatttttcatttactttctagtgttcattccctatgattaaaaatacatatgaatatgtatatacaggtataaatgtacatgttataaacatacatacaaatttcattttctattacctgagcacaaaggaaaaaagtaaaatcggctttcttttatctagttcttaggttgagtttgtattacaaagaaaatgatttattaatgtatttatttgagatagnnnnnnnnnnnnnnnnnnnnnnnnnnnnnnnnnnnnnnnnnnnnnnnnnnnnnnnnnnnnnnnnnnnnnnnnnnnnnnnnnnnnnnnnnnnnnnnnnnnnnnnnnnnnnnnnnnnnnnnnnnnnnnnnnnnnnnnnnnnnnnnnnnnnnnnnnnnnnnnnnnnnnnnnnnnnnnnnnnnnnnnnnnnnnnnnnnnnnnnnnnnnnnnnnnnnnnnggaaagggttttaaattaaaaatgccaggctcacacatagtaggtgttctgtaagtgtctatagagttatgaattaagaataaattagaaataatgcacagaaacctaaggaactgagagttttcgtttcgttcagcctagggaagagaagatgaagaggtaaaaaataagtcttcaactatttgaatgcaggagagcaatagatttattctacattgtgtccaaagggagacctcagacagaatggggaaagttccactgaagcagattcagttcaccatgagaaaaaacagcctgtttgatgtatacaatagcctagctgcatttttttgtaaaataataattatcctgaaggctcctttaagatagaagaatttatgattctgtgatcttctttcctatttctagaagtacttagacaatattcagaaacattagcagccctgtagcagtcattgtagtagtggtagatccactgcataagagtataaaatcagatcgctttatctgtacaccaaacctcagcatcacacaatatactcaggtaataaaacctgtatgtgtacccactgaatcaaaaattaaagttgaaaaagaaaataaaatcagatccctcatgaatctgtaattctaaagttgtaaatgctctctctttcagatatccccaaaacaggagtatgggctttgcttaaaatttttttaaaaggtaaatgaatataataaatgtttgctttataaacctctagaatataatttttaagtaactaagttctaattccttatgaaatatctatccaa

SEQ ID NO: 240893 - DNA, 710 bp, Homo Sapiens
ctgagctactgcgcttggccccttgcggtacttttggcccaacctcctccatggctggggacgcggaggccgagagagaagtcacttgccctggctctaccttgaagtggttctcagggttggggcgagagtcggggtggggaccgagatgcagctctatcctgtgcccctggtcgcagcaggcagcccagcgcttcgcgtgttctacttggcctgtccgctgccgcctaatgagctcaggtctaggccgagcagagggggcacctggtcggactcggttgggctcgggcggccccgcctccccccgcccgccaggcgggcccttctcgacggcgcggggcgggccctgcgggcgcggggctgaaggcggaaccacgacgggcagagagcacggagccgggaagcccctgggcgcccgtcggagggctatggagcagcggccgcggggctgcgcggcggtggcggcggcgctcctcctggtgctgctgggggcccgggcccagggcggcactcgtagccccaggtgtgactgtgccggtgacttccacaagaagattggtctgttttgttgcagaggctgcccagcggagcactacctgaaggccccttgcacggagccctgcggcaactccacctgccttgtgtgtccccgagacaccttctttggtctgggagaacaccataattctgaatgtgcccgctgccaggcc

SEQ ID NO: 240894 - DNA, 932 bp, Homo Sapiens
ttggattcagactcactttgagagcaagatggaaattcctcctcgcaggcgcccacctccccccttaagctccgcaggtagaaagaaagagcaagaaggcaaaggcgactctgaagagcagcaagagaaaagcatcatagcaaccatcgatgacgtcctctctgctcggccaggggcattgcctgaagacgcaaaccctgggccccagaccgaaagcagtaagtttccctttggtatccagcaagccaaaagtcaccggaacatcaagctgctggaggacgagcccaggagccgagacgagactcctctgtgtaccatcgcgcactggcaggactcgctggctaagcgatgcatctgtgtgtccaatattgtccgtagcttgtcattcgtgcctggcaatgatgccgaaatgtccaaacatccaggcctggtgctgatcctggggaagctgattcttcttcaccacgagcatccagagagaaagcgagcaccgcagacctatgagaaagaggaggatgaggacaagggggtggcctgcagcaaagatgagtggtggtgggactgcctcgaggtcttgagggataacacgttggtcacgttggccaacatttccgggcagctagacttgtctgcttacacggaaagcatctgcttgccaattttggatggcttgctgcactggatggtgtgcccgtctgcagaggcacaagatccctttccaactgtgggacccaactcggtcctgtcgcctcagagacttgtgctggagaccctctgtaaactcagtatccaggacaataatgtggacctgatcttggccactcctccatttagtcgtcaggagaaattctatgctacattagttaggtacgttggggatcgcaaaaacccagtctgtcgagaaatgtccatggcgcttttatcgaaccttg

SEQ ID NO: 240895 - DNA, 1414 bp, Homo Sapiens
  misc_feature (787)..(822): n is a, c, g, or t
  misc_feature (990)..(1028): n is a, c, g, or t
  misc_feature (1278)..(1328): n is a, c, g, or t
ctatggccaagtattccatttattaacaaaataagtctaccaagagagagctctgttcgtcccaaacaggccccgcagcccccgcgctgccgcatcagaccagaaaggagggaggagtgggagaagaccccagtcgctggggagtccactctgaggggctctgccgggccaggcctaggagagggcggggggctgctgtgatccgagagctccctgacgccccaaccttccccgaacgcagctaacgagctcgtgacatccgctgacatcgccaccggtctgctttggagggatctagcgagagtcacctaccccacccctactgccaggggaggggtcgttgcccccacgagggagagaaaaacaaggactataatgcacttcgcaaaatgtaaggggccggcttcacgccagcggggccttctgggactttgaattcaaccaggtgagcgctccaggtgccccgacaggcgcactgtagccactgggtgttaggggcgggagtctggaaggtgacggtagacggccacttgggcccttctgggggcgagcctactggtggggtcagggctctccgtgctcagagcaaggtagaggagcaaggccctacttttggggggcagggtccagaccaaggaccctatgcgcggagggtggcgggggaggagtcccggagcagtgtaccaggtcaatagagctccagggcccctgccacccaggtggccccctccacccccaaaatgagttacaaaaaaaacctcctctctgttacttgtacaacaaaggnnnnnnnnnnnnnnnnnnnnnnnnnnnnnnnnnnnngaaccgcaaatggaaggaaacaagagggaataaagggggaagagggaaaaagagaaggcggaaacgtagttttaagttaagactcatgcaagaaactccccaggaagggaaaacaaaacgtctagaagaacccaaagaccccaactctccctcaaaccaaaccaatcnnnnnnnnnnnnnnnnnnnnnnnnnnnnnnnnnnnnnnncttatatctaagaaaaaataacagaaaggaacaggggcggggatcatgtcgttatttgtgggattaatattattatttgggagaacacagactttttgcataccattgactcatgtgggccgttaatgcacttatattcccagcttgtaagctaacattatagtaaataaatacacagtccggtggggaagggctgggtggggaatcccggcagggtcaagcagtagtggaggttgcagcggcgacggcnnnnnnnnnnnnnnnnnnnnnnnnnnnnnnnnnnnnnnnnnnnnnnnnnnngaggaagagctgtagttactggtatcccagcgccgaggctgaagctagtctctgtccatacagcgcgtatggcgaatagtagccaa

SEQ ID NO: 240896 - DNA, 755 bp, Homo Sapiens
ttggcttcgctgggggaagaagccgagatggcggcagccagcgctggggcaacccggctgctcctgctcttgctgatggcggtagcagcgcccagtcgagcccggggcagcggctgccgggccgggactggtgcgcgaggggctggggcggaaggtcgagagggcgaggcctgtggcacggtggggctgctgctggagcactcatttgagatcgatgacagtgccaacttccggaagcggggctcactgctctggaaccagcaggatggtaccttgtccctgtcacagcggcagctcagcgaggaggagcggggccgactccgggatgtggcagccctgaatggcctgtaccgggtccggatcccaaggcgacccggggccctggatggcctggaagctggtggctatgtctcctcctttgtccctgcgtgctccctggtggagtcgcacctgtcggaccagctgaccctgcacgtggatgtggccggcaacgtggtgggcgtgtcggtggtgacgcaccccgggggctgccggggccatgaggtggaggacgtggacctggagctgttcaacacctcggtgcagctgcagccgcccaccacagccccaggccctgagacggcggccttcattgagcgcctggagatggaacaggcccagaaggccaagaacccccaggagcagaagtccttcttcgccaaatactggatgtacatcattcccgtcgtcctgttcctcatgatgtcaggagcgcc

SEQ ID NO: 240897 - DNA, 1514 bp, Homo Sapiens
ccagagactgaagaaactcttgaaaggaaccaagtgggtgagagcttttatgtagtttatatggttttcccctcaggcagcaacttcccgagtccttgcaacatggtacagctacaacagaagcacaatgccctgcagtcctattgatttgagatgtgacagaatttggggcggccagaggagatgaaaattgtaggggaaagtttcacaaaagagggagcctcaaaagaaggagccaacaaatctatgataaaatatcttcaaatccttaactacctccagaagtgctcacacaggagggaaaagcgaaggaatccaccagaaataaacagctgaaaggctcaaagaggttagcagagattatagaggaaggacagaagaaaaaatgtgtctgaagtttaaaattgccatgttcaaaggagcttgcttactccagaggagtaacgtttaagaataagcagaggccacttgcgcgtgtgacgtcatggcaccgtgcgtggcagcagcagcagcgcaggtggcaggcccgtggagcagtgctggaggaggaagtggtgaggttgttgctccctctgcgccccgctgctggctcttgaacgcagagaggggccacagtccctgcggctgcatcgcgcttccctgcagtcccctccatgttcccctgcgccactgctccccttcctaaggctgccacttaccccggagtctatgaaaataatggatccctcaacctggctcatcaacagagcagatgaacagaccatttatcagcaactacaaagaagctatttcttgtcacaaaaaggctgcggcatatccttcagaagccgtgaagctgacagtctgagcaggctcatttttcactggaattgcaaaggaataggaaacagcgcctcctcatccaagacaggtggaaaagggcccagcgtgaaaagactgaaagcccagcagaacataggatgtagctgcccatctcacaaaccctctgctgaggatgcagagagccagagccccctttctcagaagcacagccctttcacagagaaatgcctgcctgagattcaagggatctttgacagggatccagacacgctactatttttactttagcaaaagagtgagccagcagagccatgtattagaagcaaaggcccgaaagataaaacaattatagagaagcagatttgaagaggcatgtggaattccttgtggctgagaatgaaagattaaggaaagaaaataaacaactcaaggctgaaaagggcagacttctaaatggtccaatagaaaaggagctggatgtagatgctgattttgtagaaaagtcagagttatggagcttgccgccacattcagaaactgctacagcctctttaacctggcagaagtttgcagcaaataccaggaaagccaaggatattccaatccccaatcttcctcccttggattttccatctccagaacttccccttatggagctgaggatattctgaaaggatttatgaataatccaa

SEQ ID NO: 240898 - DNA, 923 bp, Homo Sapiens
  misc_feature (796)..(833): n is a, c, g, or t
ttgggctgccagcggggaggctgcagccgcgggttgttacagctgctggagcagcagcggcccccgctcccgggaaccgttcccgggccgttgatcttcggccccacacgcagagaggggcagcaggatgaatgtgggcacagcgcacagcgaggtgaaccccaacacgcgggtgatgaacagccgtggcatctggctctcctacgtgctggccatcggtctcctccacatcgtgctgctgagcatcccgtttgtgagtgtccctgtcgtctggaccctcaccaacctcattcacaacatgggcatgtatatcttcctgcacacggtgaaggggacaccctttgagaccccggaccagggcaaggcgaggctgctaacccactgggagcagatggattatggggtccagttcacggcctctcggaagttcttgaccatcacacccatcgtgctgtacttcctcaccagcttctacactaagtacgaccagatccattttgtgctcaacaccgtgtccctgatgagcgtgcttatccccaagctgccccagctccacggagtccggatttttggaatcaataagtactgagagtgcagccccttcccctgcccagggtggcaggggaggggtagggtaaaaggcatgtgctgcaacactgaagacagaaagaagaagcctctggacactgccagagatgggggttgagcctctggcctaatttcccccctcgcttcccccagtagccaacttggagtagcttgtagtggggttggggtaggccccctgggctctgannnnnnnnnnnnnnnnnnnnnnnnnnnnnnnnnnnnnngaatagagactccatggagttggtcatggaatggctgggctcctgggctgaacatggaccacgcagttgcgacaggaggccaggggaaaa

SEQ ID NO: 240899 - DNA, 1275 bp, Homo Sapiens
actttgtacaaaaaagttggattatctgtgaccataactaatggagtcctctttctgcctcccccctttctgttttgcagcattgacaagatatctaaagtcacctctcctgtgttggtcattcatggtacagaggatgaggtcatcgatttctcccatggcctagcgatgtacgagcgctgtccccgagccgtggagcccctttgggttgaaggggctgggcataatgacatagagctttatgcacaatacctagaaagactaaaacagttcatatctcacgaacttcctaattcctgaagacaacaacttgatcttacctcatttactgtgaacagaagagtcctctgttttgcacatgctttaactgggtagctgtaaaggcttgataaccatgaagaagtgcccaacctttagggtgttctaatcaaagagctgatgaaatctcagtcttttgtatctagaggtggttctgctaattcacacaacacgttaaactgaacagtcgtgattcccagcttcattaccttgcaggaatgggaatgagagctgaatgtagggacaattttctagtgctgtataaagtagcctcgcatctgtttctcaaccttatccatcatttctgacattcatgcaggacttgccctgttgccaccaatgttctcggtatttcacatgcagctctctttctgccactggatacatgggttcaatccatttgtgaagctgtgatagtgtaactggaaagctagtgtggtgaaaattcctttattattttttgttaacatgctgatctttcccggacaaatgaactgaagggtaatttactggaactctcgtgtacagcttcatcaactgtaaccatataaatataactggaatattcttaaacaaaaagaaactaggggtttttttaagtgtaaatttattactagccaacagagttttactattttgattgtctggttggtttaacaaagagcctagctgactttccttctgtaaagtcctccttgtaggctttttttaaagtactgtacatatttgcaatcacattgtgcatagattcttaatggtagatatgatttcttttgtcaggctacaacaatgaactgcagattccttgtttgtaatgtaaatgattgaatacattttgttaatatgtttttattcctatgttttgctattaaaaatttataacatttccaagaaaaaattccaagtttatgctttgaagaatttatgtaattaaaatttcactaaactaatctttta

SEQ ID NO: 240900 - DNA, 963 bp, Homo Sapiens
ttctcttcatagactggattctctcgtatagcagcatgagcttttcttatacatctcctcccatcatgtctggagttacgctgttctttatgtattgagagaactgtttcttataagcatcgtcatcttcttccattaagtagcgcatgtaatctgcaacattctggcccatgaagtgcttctggtgtactcctgcattaaattccttgctttcagaatcataaccagggaatcatttggtgctgtgagggacagacaagcctccatccacagctcccttcagggcgccaaaaactttattgccagtggtagttctggcaagacctgcatccatacagcaggtgaaggcacctggctgaccatcagtactttccacattgtatttatcgccagtcacctccacttggccgtcatagatcttgtccatgccaaacctatcaagaagcctgcgggccagcagcaggccagtacaatatgcagcagcataatttgtcgggccaaccttcacaccgtattttggcagttcgtgtgcatatgccgcgcagactatcatatccccctctatacgggcataagcaatctgacaaatgatatctctgtcagttacacgaacaatcatcctatacttgggtgtgttgtatttatttttatcctgtatcaccaagcgtttccgagcatagtaatcagttttaccctctcgtcgtcttctaaatttcacttggtatctgttaaagtaggccttattcttaacaactttaacaaaccccatccagcggaacagagacccgcgtccgcggctcgacagagacctgcaggcccagcggtgccagggaggggaagaggctacttggcttttttgagcccaaaagcctgaatttgttatatgatgggatcagaatcctttgtctctgaaattcttttcaactctaaaaggtgggtcattcccaacttttttgtacaaag

SEQ ID NO: 240901 - DNA, 2346 bp, Homo Sapiens
  misc_feature (174)..(190): n is a, c, g, or t
  misc_feature (1471)..(1485): n is a, c, g, or t
actggtgacagcagagaaagcttgcaatgacacactgcaatattctataatgttgggggtacgacagggtacacagaatacctaaaacatttatattaaggatatccgaaacaacatatttaaaacccagaaaaatgttatgaacactgtttctgcctaatacatgaccaatgnnnnnnnnnnnnnnnnnaatcttaacatggtattctctcctactctctcaccctcccccccaaaaaaggccacaaagtgctttcacgaagcgtcattcttttagataaagccattgcacaaaatgtacagttcaggtatactgaaatgagtaccacaccggcgtccaattgcggcagtttttatacaccagtatggcataggcgaagtcttttaacagaattacagcaaacacctttataagggccatacaaataacacatttaaagtattaaaaggtacagctgactcaatagcagaatttaaaagctacatcctattagcacatttaacccaaatgaacttgaatctttctatgatttaccacgcaggaaactaggacagaataaatttcttgtcaaaagcagtttgttcatttacacaaaactataagtcaattaatgtcactacctgctaaagcagacagcaagggggcccttgtctataatatttatactgtcccaaatattgtcaccttaaaatggcaaaactttaaattactattttctttacaaaataaatgtaatctattatatatagacctggaaaaaactcaaaagttcaaattcttaatgtgaaagcaagtaggtaaagattcaaaagtgaaaaaatcttttacactttatgtaaatgatacttaagtatgacaaagaggtgataattcaagttcgtaactagtaagtcactaaaaagataaatgcattcattcatgtaccacaaaatcagagaagacacgaggacatgccgcagtcagtgaaatagccgagaaatcaacattttactagttattttgtcccaaactattaccatgtgtgtttggtatgttaacaatttaaatatccacattaggctaaacaacaagcacctgtcagcagtggaaaccaaaacattttgatgctaaaaaatatacaagatatttagacgctatttcattggttgtcaaaaacagtgactactgccaaataattaaatttaaaatattgtgccaggtcctctcagggaaatgtgaaaataatactgacgatctcattgtcattgctgttattttactggaattaaacaaaggccagaagttataaatttatgactgccaatactatctttggatagttacaatacagtatgtaaaattaaggatggctttgtttagaagactgccataaatcaacaaaacccaactgtgtctgggggacatggtagagaaaatggcaattttgagagaggagtgtttctaaaggcatttccttggaggctttgaggnnnnnnnnnnnnnnncacattaccgaaaggccaagtaatgtggtgtgattactataattcctacaacaaaacttccacttagaatagttacatgttcccaaactatttttcttctgtctgccatgctggcttctgtatcccatggtccactgtaatcttttggtcttctttttttgcagtacagcagtcctcgtgctgctatccattgagtaggtaaaccaccaattcataggtggccatcataatggctgtgtttggaatctgtctcactagatgagttgtcagaccacgataaagagacccataaccttcttcttgaacaagcaaagatagagtctgaaaaaaagatctgtattttgttccctcttcacgtagtcttgttcttacaacttcatgtggatatgctatagttgtggcacaagtttttgaggtggcagcagctagcatcattcccacaaaatctgatgcttctttcacagactcttcatcattttccattgtagaagcagtcttatattccagtagtttttgttttatactttcataaataacaaaatggataacagtctctgatataccagcatatgaagcagacatgcccctataaaatccttttagtccatctgtctgatacactttacgaacacattcaaaagcacccattcgcctttccccgcggttccttgcatcaagctgtaaccgagtctttataagccaaatggggttggttgctgtgattgcagtaaaacgaggtttaagttagtccatatttctacaggaagtgacctgcggatggggagcatgagatgacacgatctcactcttttctcgggagaaatgtacagtaaatgcctgccattgcagctgaaatcccaa

SEQ ID NO: 240902 - DNA, 1495 bp, Homo Sapiens
  misc_feature (1216)..(1232): n is a, c, g, or t
ggtggacccatctagaaaggatggttctacaaagttacataatgagaatcaaacgaacttttgttgatagtttttttcctgggattaaaaccactgcatggtatcccgaaatcacaaacgctaattcttcagatttgaactttgaaatttaaaagtacaacaaactaaataatgtggactctacaccagaaataaaaaagtcatgataaacagatgaaaacaagttaaaaaagtccaatgctctgaatatgtgtttttgtttttaaacatgagtcaattttttaaaaacttcaaagaaatatttcagagacaaactttatatacaacttttatatatagttttcctttttgaattatctctgtcatacataaactattgcagattgtgcttagggaaaaatacaactgaaataaacttcattgctcctttctagttgttgcacaaataaacaatgtccaagactctaagatttctttgctttccagtacatacataatactgttaaaagctgaatataatgcactaaaggtcaacacaagttttacttgctaaatacaaatagagaatatatgtttatccttgaaggacacttgttatgaatatgctacaactaaataataagatgttccttagctgctggttttcatatcattcttaatcatttgtggggtactgagatcagtaagactagggagagtctctatcttacattcaacacaatgaatgtttatgggtcttcacaaggcaaatggcactgtattaggcagtagaaatggcacctgaaaaggcaaacacgatagattcagaccttctctacagatttgttacaaaccggtttttggtacgttcctcataatacatgtcaaagctgaaatttaccataaaaggtacgaataattccaaaggtaagaaaactgattttgcctttggtctccaaatagattggaatatttttattccaattgagcacctcaaaaacatccagttactgttgatcacaaggaagttaaagtgggggaatttaacagggcactatgtttcactggtgacagcagagaaagcttgcaatgacacactgcaatattctataatgttgggggtacgacagggtacacagaatacctaaaacatttatattaaggatatccgaaacaacatatttaaaacccagaaaaatgttatgaacactgtttctgcctaatacatgaccaatgnnnnnnnnnnnnnnnnnaatcttaacatggtattctctcctactctctcaccctcccccccaaaaaaggccacaaagtgctttcacgaagcgtcattcttttagataaagccattgcacaaaatgtacagttcaggtatactgaaatgagtaccacaccggcgtccaattgcggcagtttttatacaccagtatggcataggcgaagtcttttaacagaattacagcaaacacctttataagggccatacaaataacacatttaaagtattaaaagccaa

SEQ ID NO: 240903 - DNA, 1293 bp, Homo Sapiens
agttttatcagtgtataaatgtcacactagaacttaagaaatcatgaactcacaaattacttccctatcacggctcccaatgttcagtaataaacacacacacacaacttggaacacctgtgctcaattttaaccattattttgccagtgccttcagtgcagagtactattagtagaaccaacaatttcagatttatgtcaatgttgaaatacaaaatatatttcgtcctggtttcctcacctacaagactggacaatgtttgatgttaactacaatacagaaaaacttaaataaaatagacaaaatgtaaagagggtaggcactacatagcattttatctttgtcatttgtattttgatctaacattatgtggattcatttggttattctaacaagttctcacctctgtatttttaatatcaactttcacaaaggctgaaattaaaacatgaaaagtgttggataaaagtcaataaacctgtggaagatatgcaagatttctttgtacactatgagggagttggattacttgacctttgggttccttcagacatcactagatctaacagatacaaagtgctcaagataaggtttgctgactgaatcaagcgagcctaaaacttaacctgaaaatggcaatggatttttgttccacacataggataatccaaaaaagtgtgattatgttctcaataaaatgttgatatattacagaaaaagccatattttcatgagcgtattttaatttttaaaatttgaacaattcaagtaaaagtcagctagataacataaatacagagtaaatgcacataatttacagccatgtacataaatgcaagatccaaacctcacatgaatagtcaaaagttaacacttttgaggttcactatttagctatgactgataggtcataattcttcacataaacggggtacacattccaaaagtttataaacacaaaaaatgagtcaaaccagaattttgtttctacaaggagtagcataaaaatcagtgtgtaggttaatgggaaatactaagtacatgatggagaagagatctgagtgggcagaaagtttgtacattgtattttatgtattaaaattcctcaaatttaaatcattcagaaatacctatattcttaggaatgttaaagtcattatatatttgaggagaaaaggctgaactgtacttatcagctccaaagggggtccctagattactaacagtctgggcagaagagcatgtaaacaacaaaaggcaggcatggacaatccaacttttttgtacaaagt

SEQ ID NO: 240904 - DNA, 1086 bp, Homo Sapiens
tcacataaacggggtacacattccaaaagtttataaacacaaaaattgagtcaaaccagaattttgtttctacaaggagtagcataaaaatcagtgtgtaggttaatgggaaatactaagtacatgatggagaagagatctgagtgggcagaaagtttgtacattgtattttatgtattaaaattcctcaaatttaaatcattcagaaatacctatattcttaggaatgttaaagtcattatatatttgaggagaaaaggctgaactgtacttatcagctccaaagggggtccctagattactaacagtctgggcagaagagcatgtaaacaacaaaaggcaggcatggacaattattgaagggcaagaaatggattgatttttagcacttaaatccttcaaatccgaataaatatttttagtgatttaaaaccaacctaaaaatgctgaaatgtctgtaacccagtaatagagcaaacattatttttaccaacccaaactctgctggtcctaacatagtaatgctatctcacagataatctaatgatattctatcctgacttcaaagttacaaattcactgtggtggacccatctagaaaggatggttctacaaagttacataatgagaatcaaacgaacttttgttgatagtttttttcctgggattaaaaccactgcatggtatcccgaaatcacaaacgctaattcttcagatttgaactttgaaatttaaaagtacaacaaactaaataatgtggactctacaccagaaataaaaaagtcatgataaacagatgaaaacaagttaaaaaagtccaatgctctgaatatgtgtttttgtttttaaacatgagtcaattttttaaaaacttcaaagaaatatttcagagacaaactttatatacaacttttatatatagttttcctttttgaattatctctgtcatacataaactattgcagattgtgcttagggaaaaatacaactgaaataaacttcattgctcctttctagttgttgcacaaataaacaatgtccgaagactctaagccaacttttttgtacaaagttgccttttatagg

SEQ ID NO: 240905 - DNA, 944 bp, Homo Sapiens
  misc_feature (318)..(334): n is a, c, g, or t
aaaggtagaaaacctgatttgcctttggtctccaaatagattggaattattttattcccatttgagcactcaaaaacatcccagttactgttgatcacaaggaagttaaagtgggggaatttaacagggcactatgtttcaattggtgacagcagagaaagcttgcaatgacacactgcaatattctataaatgttgggggtacgacagggtacacagaatacctaaaacattttatattaaggatatccgaaacaacatattttaaaacccagaaaaatgttatgaacactgtttctgcctaatacatgaccaatgnnnnnnnnnnnnnnnnnaatcttaacatggtattctctcctactctctcaccctcccccccaaaaaaggccacaaagtgctttcacgaagcgtcattcttttagataaagccattgcacaaaatgtacagttcaggtatactgaaatgagtaccacaccggcgtccaattgcggcagtttttatacaccagtatggcataggcgaagtcttttaacagaattacagcaaacacctttataagggccatacaaataacacatttaaagtattaaaaggtacagctgactcaatagcagaatttaaaagctacatcctattagcacatttaacccaaatgaacttgaatctttctatgatttaccacgcaggaaactaggacagaataaatttcttgtcaaaagcagtttgttcatttacacaaaactataagtcaattaatgtcactacctgctaaagcagacagcaagggggcccttgtctataatatttatactgtcccaaatattgtcaccttaaaatggcaaaactttaaattactattttctttacaaaataaatgtaatctattatatatagacctggaaaaaactcaaaagttcaaattcttaatgtgaaagcaagtccaa

SEQ ID NO: 240906 - DNA, 839 bp, Homo Sapiens
  misc_feature (600)..(650): n is a, c, g, or t
ttggcgacatgatggcgagcatgcgagtggtgaaggagctggaggatcttcagaagaagcctcccccatacctgcggaacctgtccagcgatgatgccaatgtcctggtgtggcacgctctcctcctacccgaccaacctccctaccacctgaaagccttcaacctgcgcatcagcttcccgccggagtatccgttcaagcctcccatgatcaaattcacaaccaagatctaccaccccaacgtggacgagaacggacagatttgcctgcccatcatcagcagtgagaactggaagccttgcaccaagacttgccaagtcctggaggccctcaatgtgctggtgaatagaccgaatatcagggagcccctgcggatggacctcgctgacctgctgacacagaatccggagctgttcagaaagaatgccgaagagttcaccctccgattcggagtggaccggccctcctaactcatgttctgaccctctgtgcactggatcctcggcatagcggacggacacacctcatggactgaggccagagccccctgtggcccattccccattcatttttcccttcttaggttgttagtcattagtnnnnnnnnnnnnnnnnnnnnnnnnnnnnnnnnnnnnnnnnnnnnnnnnnnnatggactcactcccaggttcacctggccacaggtgcacccttcccacacccttttacattccccagagccaagggagtttaagtttgcagttacaggcccagttctccagctctcccatcttagagagacaggtcaccttgcaagccctgcttgcaggaaatgaatccagcaccaactcgaatccccct

SEQ ID NO: 240907 - DNA, 1661 bp, Homo Sapiens
  misc_feature (188)..(208): n is a, c, g, or t
  misc_feature (1201)..(1221): n is a, c, g, or t
  misc_feature (1461)..(1474): n is a, c, g, or t
  misc_feature (1518)..(1529): n is a, c, g, or t
tcaaaggcaagggctgacttcaaaatccattgtctgtcaataaaatggcatcagccaaaaagctggggaagagaagcccagatggatccttggttgttttcagatgtcaaaggttcacaaaagctggccaagctgtttctggaagggactttttccagttcactatattatagtgtgttgggggatgnnnnnnnnnnnnnnnnnnnnngcagggtggggtgggagaaatgggtggtaacaaatgtcacacctgtaccaccaggcccatcacatcttgagcattccccagtctgtgaaagcctattaaacagggtcacctagaaaaaaaacaagtttataaatccatttcccctcattttattaaatgttccacttatgtacattttaaagacgaaccatttacaagcttgtgcagtttgcctccttggctcacaggaggggaacattgtggaaagcctcaggataaacagaagacttggttttttgctccttttctctgtacggtacagtacgttttggtttacaaccatgagtacatacaattaaaaaaatccctcatgcaaattgtagaaaaaattttctttccttgaagctggcagtgaaaaataaagattcatgtcattttctttgtgcacacccctgtgcgcttcttcctgtcagattcttccctaagtattaagagaaataggggaaagccacagagcacgctggatttcaacaagtggtcttgtctttttaaagttcaacacttcttgaacaattagctcctggctgtaggaccagtaatcccttaaacaggcatgctctccatctaacaggatgaagttcagtaaagcagggactgcccctgggggcttacaggatgaagactcaaactgggaatggcttccaccctaaaactgtttgatcgcttcagtatctcttgcttgctaataacacctgtatgatcctttgtccagagggatggatggtgttgagaatggggaaaggggccaaggatcacaagtgcaaaaaatattgtttatgtcatgttttggagggaaggtggtgaggaaaagacaaatctattcattctggataattaaaggtggtttcatgcatttttaaagccacaattttatatctagggttgctgtagaaaccaacatctctggagagggaaggaaagaaaaggagaaggaagagagagttcagtgggacnnnnnnnnnnnnnnnnnnnnnatataaaagtgttaagaccacaatgaaaaaagttttttatccatatatataataaaccagtttgtgagctacataatttgtctttcccatcttcagaaatgttctcacattaacaatgattagatagcatcatgcccaaagacattggccacacaataaaacaaacaaaaaaacccagtactatgatacaattgaggtaaaaggggaaacaaaaaaatttaacatttgcccacaaataannnnnnnnnnnnnncttaattttgtcagaaaaataccaaacacagtgatttaaatttnnnnnnnnnnnngtcacaaaaacctgtttttagcagaagtgaatgaccaatgggccagctccttggctcagacgtgattactattggttttcctaattaatccacaaatccacagggaagtgtaagtcaacttcagggagccaa

SEQ ID NO: 240908 - DNA, 1196 bp, Homo Sapiens
  misc_feature (347)..(356): n is a, c, g, or t
  misc_feature (406)..(418): n is a, c, g, or t
ttgggataaatgagttactggaacccttatgaatttgaatgcaaatgaaacagctaaatgttatataattgttgtgtttaaaaagcagattataaaactgtctgtattatatgattacagttttataaaaacaaaacaggcctaaatgtgtatagtataaagactgaagagtcagtacttccatgttctcagcggttatccttggatgtgagatctcatgcactttttgctctcttctttgtgcctttccattttgcatgcgtatttcttataatctaaaaagttacttaaacatatgcagctaaaaactttttttacttgtaaagcgtttggtgctaattttaacnnnnnnnnnnagacggagtcttctcactccagcctgggtgacaagagtgaaactccatcnnnnnnnnnnnnngttgaactagatttggtctgatgcagttacagatttacaaaccgcatcccaccctccagcctgagtttctgtttagaaacaacagtctatgatagtataatcctctcttttttgtacacagagtaaagaggacaaataggtgaaagaacaaatgaaaggctggaatcccacttcccccgctgtcccagggcattggatattgacggataggaggcagcaaaccactcacagagccaggaagaaatgaaggcgttggtattgccaggaggggaagccggctcggctgaaatacgctatgaccatagcaaggagatactgatggagagaaaggaacacagagagggagaggtcacatcttggaagaggaagattgtggagagggggaatgagggtctggggaggggctgcccatcagagaagggacctcagtgttggggtgactgtactcatttggaaattgcgggatggaggggtattcgaaggtcggatgcaaatccgagaagccagaggaagggttttgggtgatgctcccaggatggtgggctccgatgggatctttggagggggtgtgtctaggttggctggtgtcaggagggtcttttgtgtgccaggcagagaactgtcccgaagagctgagagtagaggggccaggagcttcagggctgcggccagactgtggcccagagctcagatcccaaaggacccataggagaggcaggggccactcattcactctgcaagagaccagcagaatcctgagggagatgctgacaaatca

SEQ ID NO: 240909 - DNA, 1081 bp, Homo Sapiens
  misc_feature (788)..(845): n is a, c, g, or t
ttgggttgagggacccccctcccccggccaccgcctccgctgagtctgccccctccccatccgcagggctcttccgtgggcggcggcttcgcgggcttggagttcgcgcggccgcaggagtcggagccgcgggcctcggacctgggggccccccggacgtggacgggggcggcggcggggccccggactccgtcggcgcacatccccgtcccagcgcagagagccaccccaggaaaagcccggctggacgaggtcatggctgccgctgcccttacaagcctgtccaccagccctctccttctgggggccccagttgcagccttcagcccagagcctggcctggagccctggaaggaggccctggtgcggcccccaggcagctacagcagcagcagcaacagtggagactggggatgggacctggccagtgaccagtcctctccgtccaccccgtcacccccactgccccccgaggcagcccactttctgtttggggagcccaccctgagaaaaaggaagagcccggcccaggtcatgttccagtgtctgtggaagagctgcgggaaggtgctgagcacggcgtcggcgatgcagagacacatccgcctggtgcacctggggaggcaggcagagcctgatcagagtgatggtgaggaggacttctactacacagagctggatgttggtgtggacacgctgaccgacgggctgtccagcctgactccagtgtcccccacggcctccatgccgcctgccttcccccgcctggagctgccagagctgctggnnnnnnnnnnnnnnnnnnnnnnnnnnnnnnnnnnnnnnnnnnnnnnnnnnnnnnnnnntgtcctgagcaccgttgctaacccccagtcctgtcacagtgaccgtgtctaccagggctgcctgacgcccgcccgcctggagccgcagcccacggaggtcggagcctgcccacccgccttgtcctccagggatcggagtcaccctgaggaagccccgcggcgacgcgaagaagtgctggagggtgtatggcatggagcgccgggacctctggtgcacagcctgccgctggaaaaaa

SEQ ID NO: 240910 - DNA, 1138 bp, Homo Sapiens
  misc_feature (175)..(186): n is a, c, g, or t
aaaaagtttggctttcttatcctcctcctagagttttgacttgggactctagtgttaagatgatgagcccgtgcatcaggtccttctgcactttggtggaagtctcccagggtaggtttcctatttgaaacagtggaatcatgtttccagtgataaagtttaatgacctcatccnnnnnnnnnnnnctcatctgccatttgtgtgtcttaaatgggttttaattgcatgaatgtggctaatgtggttctcagaaattggtcagtatggcccaacatagcttctgctctgtcttactgactcaatacctttaggatttgtatcataagtttggatactagtgttagtggtggtgtcaccactacttaattgggagataatgaaaccaatcatggatgctgtttttattgggcatgtcatctaagagaggagaaatagctgggttttgggtctaattatgaataaggactgattcagaaaacgagtttatggtaggtagactaaagtttcacatcagactgtaccattgtgatttagacctatctaaaattcagagcatatcatctgggctacctcagggtcaccacccatgtattgggcttagtcaggattgacagatacattctcagctggcctgtcatataaaacatactgtcattgagcttaagctccgcttgttctgaggtttcacctccatgtgtttcattggtgcaaaagtggatctcttagttggtcacttaattctttctttttcagaaagatagtatgttcactggtatatttggtcactcttagaaccttccttcacattgttttttatgggacccatgaatggttagcctttcttttctattgtagaaggaaataaataggagtaaaaagaccattgtagtaaataagttcaaggggaacttgggaccagaaaccactgttatgtacaaaaaaatggcaaattcaataaactcaaatttaaaataatttttaaattaacagttatgataaattttatattttatacaaatagattgcttagaatggttctcaagaattataagagaaatgaactcacagtacaaaaattttataattactatacttgtgttttgtttgggggcctgggaaatgtatttttacattgta

SEQ ID NO: 240911 - DNA, 2381 bp, Homo Sapiens
  misc_feature (1683)..(1872): n is a, c, g, or t
  misc_feature (1879)..(1903): n is a, c, g, or t
caacaacattatacatctttttaattagattagctttacaagcaacttgagagctctttcataatgaaacactgcttttcaaattacatgacttttatagtctatctgtatatgaatcctgaaaatctttgcctactcttgataaaggtctgtgttttacagctggttaatgtgttgaataaaaacagcattatgaagctttatctttaaccaggattaaacacatataggccacaaacagttttaaattttgtttgaaatagagtcctgcttggtgacaagttaatagtcccactaacatgaaatgaatggatattaaataaatggccatcctgatttcttgatcttttcacaatgattcctaagagagtatataaacttttccaaaaaatatacaatttaagacctgtctggcaagcacaacccacagatagtagaatctaatactttttacaactgtagaggtacacatttgaatgacaacaggggctcccaaattaaaaggctgtggctgtacattttgacaatcaaacaaacctcccatcaacataaaacaatttctactaaccctaaaaaagataatgcttttgagttgtggcctaacgccgcgcactgtactatagaccagatggcaaagacaacttgcgctcctgggttgggctggcagaggcacttactgtagagatgtgatgttatcatctggaaggaaggggaggaagtagaacaaaactgaatatgggcgaggaaaaaacaataaactatcactttctcctgcaaattctcctaagtgagatcactatactgaacattcaatcccatcctaagtccactgttggcttcactacacaattttttttccatgttttacatgaatagcaatggcaatcttttaataaaaattactgagcttcccatagaaaaggtctcaaattgaatacaaactatacagatgctaaaaatgtcttaagttgaaatatacagaaaatttctgtatactcacattttggcaaagaagatcaaggacagagatagaaaacctaagtgggcaaggtcttacacccataattcacgcaaaatatggataccaccctttaggttttgctaaaaagcctaggaaagtgaagtctaagacatccgtcccaattcattctttaaataacatgtatgtgaggccttgtgtgattttctaatattccttccttgtttaaaaagtaaataagaaaacccatgaaacaaaataaaattatctgattttgcatctgttttgtttttttctaagctaagcatctttcagtacaggtaagaaggctggcatcacatctgggaaatgccttaacagatatctgaggagttactgcacattccgtcagtaacaccacacttcagtttcaatgtgtacataatctccccttgatgctcttcaacagagacaaggttcttgtctgcagatcagatagatcacagtattaggaaaaaaacataacagcaaatttggaagtacaatcaatttaaggagaagcaaaaggaaaagacttagaaatgggacattattgtctacatctagaggatacatacacctgaaagcttaagaaagcccttatcttaggaacttgaagctgaggataatctcaagttcacttagtgccagtcactttagttttttaaaaaatttaacttaaaccnnnnnnnnnnnnnnnnnnnnnnnnnnnnnnnnnnnnnnnnnnnnnnnnnnnnnnnnnnnnnnnnnnnnnnnnnnnnnnnnnnnnnnnnnnnnnnnnnnnnnnnnnnnnnnnnnnnnnnnnnnnnnnnnnnnnnnnnnnnnnnnnnnnnnnnnnnnnnnnnnnnnnnnnnnnnnnnnnnnnnnnnnnnnnntgtctcnnnnnnnnnnnnnnnnnnnnnnnnntttaaactcttcttgtgtctttttccttgtaaaacattaactaaaagttattggtagtaaatggtgactgttttacaattaggtttcgttattgacaatgtcaaaaaaaagcagcaatctttaacagttcaaattagtgtaaggaaggactacaaaacaatctgatttttcagttgtaattaaagtgctccttttcttattttaagtaaaataaaattaatcatcagtcactggcaacaatcattattaagaggtcttttagggcaaaatttaatagtatgaacaggtttacaaaaatagattgatgttattttgaggaataatactgtaattttttctcaattcagtttagataaattgtacctaatatagaaaaattatcccaaattcaaacttgatataaaaaagggagagatgaaatgaactcagctagataacagatctggcaaaatataagaatgaaaaaaattctacccaa

SEQ ID NO: 240912 - DNA, 912 bp, Homo Sapiens
  misc_feature (633)..(643): n is a, c, g, or t
tttgacacttacagatgattctgtaggcatatcggcaggcacgatgttgaaaaccaatccactagattttaaaattaatggtaagataaaaaagaaaagatacacatttcagaggtaatgtttgaaattaaagaaaaatatccaccatatattacaacagatcttttaatgactatttttaacataaagattgttgttttgggaaacatctattctctttgaacatttcactaaattttcaatgtattaaataactgacagaaataagttctgtgttctgtacaaattaaaggtcccatgaatacataaccccctcccagccccaccaaagctcaattttgcatggtttcagcagaaaatagacagcccaaaatttaaacagaattcatagcattacaaaagtttacagaacccctatgttttcatcatttgtttctaacaacaaagattacaatgacagaactgaatgatcagaatgtaaaaatatttgtgcaaaactgcattaattgttcttaccatctaataggggtaaaacttaagaacacgcaatgacaataatgaagaaaaactacattaaaagcaattctacttttgatatcaaacaacatggattatactattactaaacattgnnnnnnnnnnncgtggcaccatgagagcagcaggagcaacaaatgatttggcaattccagctaaagaaagctgacactggaatatgccaaagttaatctccacagtaggcatccatctgaaaagactggaaacaactgtagggcttcaaacttacttcagtgtctttattcttgaatttgcaggtcataaatgaaatatttaagaaagtcttttcccctccctctcaaggagtgtttcttgcattactggcaatcattaaaagagttgaatcatagccaa

SEQ ID NO: 240913 - DNA, 1601 bp, Homo Sapiens
  misc_feature (515)..(653): n is a, c, g, or t
ttggcgccctcccgccgcgcgctcgggatcccgaccagtcctgaccgcacgggggccgcggccacggggcgcaggggccatggtgcgcggcaggatctcccggctctcggtccgggacgtgcgcttccccacgtcgcttgggggccacggcgcggacgccatgcacacggaccctgactactcggctgcctatgtcgtcatagaaactgatgcagaagatggaatcaaggggtgtggaattaccttcactctgggaaaaggcactgaagttgttgtctgtgctgtgaatgccctcgcccaccatgtgctcaacaaggacctcaaggacattgttggtgacttcagaggcttctataggcagctcacaagtgatgggcagctcagatggattggtccagaaaagggcgtggtgcacctggcgacagcggccgtcctaaacgcggtgtgggacttgtgggccaagcaggagggaaagcctgtctggaagttacttgtggacatggggtgaacaactnnnnnnnnnnnnnnnnnnnnnnnnnnnnnnnnnnnnnnnnnnnnnnnnnnnnnnnnnnnnnnnnnnnnnnnnnnnnnnnnnnnnnnnnnnnnnnnnnnnnnnnnnnnnnnnnnnnnnnnnnnnnnnnnnnnnnnnnnnntataacccaccttataattgattcaggcctcttcccctcctgtcacgttgccagggtcccaggatgctggtatcctgcatagatttcaggtacatcactgatgtcctgactgaggaggatgccctagaaatactgcagaaaggtcaaattggtaaaaaagaaagagagaagcaaatgctggcacaaggataccctgcttacacgacatcgtgcgcctggctggggtactcagatgacacgttgaagcagctctgtgcccaggcgctgaaggatggctggaccaggtttaaagtaaaggtgggtgctgatctccaggatgacatgcgaagatgccaaatcatccgagacatgattggaccggaaaagactttgagtctctttttgcagatgatggatgccaaccagcgctgggatgtgcctgaggcggtggagtggatgtccaagctggccaagttcaagccattgtggattgaggagccaacctcccctgatgacattctggggcacgccaccatttccaaggcactggtcccattaggaattggcattgccacaggagaacagtgccacaatagagtgatatttaagcaactcctacaggcgaaggccctgcagttcctccagattgacagttgcagactgggcagtgtcaatgagaacctctcagtattgctgatggccaaaaagtttgaaattcctgtttgcccccatgctggtggagttggcctctgtgaactggtgcagcacctgattatatttgactacatatcagtttctgcaagccttgaaaatagggtgtgtgagtatgttgaccacctgcatgagcatttcaagtatcccgtgatgatccagcgggcttcctacatgcctcccaaggatcccggctactcaacagaaatgaaaggaggaatctgtaaagaaacaccagtatccagatggtgaagtttg

SEQ ID NO: 240914 - DNA, 1618 bp, Homo Sapiens
  misc_feature (71)..(86): n is a, c, g, or t
  misc_feature (462)..(475): n is a, c, g, or t
  misc_feature (596)..(621): n is a, c, g, or t
  misc_feature (1234)..(1247): n is a, c, g, or t
ttggggcccctgtagcctggctctcacacagtattttatctttgattctgaataaatattttttgtggggnnnnnnnnnnnnnnnnggtggcagttgtttgttttaaactgaccacttggaagaaacaccttggttatctgtggttttcatgccttgtccctgcctctacccccaccccttttgagtcgggtgactcatttttctgtgtagagactcggtggcccaggcaggaggtgaaagcagccatccggaaggccctggggacccttgtgcctgttgctcgccttcaggtcaccagctgagctgcgataggaaaatctgaatggaggcagcaaacagccaaaacaaacattccccacccggccctgtgcatatgaagtctttcttcccccaactcttgaacgatgatgatattcagacgaagcattgatgttatggaagaaagaaagaaacaaacaaannnnnnnnnnnnnngtccaaaaacagacaaatccaagggtgtgaggtaaacgagtgtctgcatttagattccacaaaaccaaaatccatgttgaacaaagttaagtccgtacacagtgactttttgggtgagccnnnnnnnnnnnnnnnnnnnnnnnnnncctcaagccctggtttcctgtgaagatactttgagtggcagccattctctccacgtgaaccacacgtctggagcacagacaggcctctcaaggtcattgatcttacgcatttactgtttaccgaacaaatgtctgactgtgtactcgggtgtactccgcagcattgtcgactgcagtcccctgtgtttgccagagatactgtgctcgaagtagaggttttactctactcatcactgcgatttgcacattgctccgtggacactcggaggcctgcgttctgttccctataaatggaagcgtgctctgagcctgtctgcctccctcggctgctgctggtcctcagtaccagcgcccgggggtgtccacaaccacttgggacagaagaaggtggaatttcagacagaagcttgactgggtcttcaatgacaggcttggactagctgtggcccagacatcggccctgcccagaattgccaggaggaggctttgcaggctctagaggagccgcagggcctgcctgcctctggtgagtccaacaggcacaagcaagctggcgtgtggccagaggtagccggagtgtgtcacagcccctcagatgcctttccttccaccnnnnnnnnnnnnnnaagaatcccaaataactcactgaagtgtctcaaaggcgaacaagttttaccaaaatgaatcctttttcagttaacagatcaaatggatgagttctgagcctctcaagttcctttccccagttagagtggggaactgggcaagtgttaactgtgggactcactgcagcgtcctatcctaaaggcacgagaagacggaaatgcaacctgcggagctgggcttggttcccaggtcacagtttggcccccgctacaggatgctgccctgctcagagagagatttaatagggagctgaggaatcgttaggggccagggagatgtgactgaggctggctttccacgtgaatgaaacggggtcgtggagggtttggtg

SEQ ID NO: 240915 - DNA, 1645 bp, Homo Sapiens
  misc_feature (492)..(501): n is a, c, g, or t
  misc_feature (1176)..(1226): n is a, c, g, or t
ttctaaagacagaagatactagacaaccactggttaaacttcaggataggaattaacagtacgaacagttgttggtggttgaaaagggtggaaggaccataattagatgggattcaccagcagtggagtgctgttttgtcactaaagtggtcagccactctctcctccctggtacccctttgtagtattgtacaaagatacagagaaaaggttctgtatggtgctagtggtgtggtagtggtttctcttcaatgatggagtggtaccacaatttataaagaaaccaatgatctcaggagatatttttggtctgtcttccctgaaataagaattgtgttttggaaatctaaagggtgttctgttccaaaatcttaagttattagttatttccacatcaaatagcaaacactacaatacagccagggaaagaggatcttccaaacaaacaaaaaaggtatgttttctagattgctccactactaaatgagaacnnnnnnnnnngaggcataattataaatcaagttcttgatcaattttacaaatctttcccagtgacaagctcatatttccaataaaaagtgctcttttgctttcctaaggccacactaaatctccctggggtcacctaagtggtgcccaagcatattgaagttttgtcatctgcttactgcaagactctggattttccttctgcctgttaccttgtctgtaaaacaagtggaaatgtgtagatgttatggcacatggttactatggatgtcgacctgatgcccttagcacctggctcttcaagaaatcctgtccaaccagctgcttcctcttcagagaatgtacattttgaaaaatggttatccattattttgcatattcccaaactttgtgctactaatttgtaccatgtatttcccagagaagcaagtaaagaggcactgttggctacagggcactttattctgagttgattaaatgatatttgaaaaaggtttacaaattgtgcatgccgttccagacacacactgccatgttcttctgtgttaatagctggccatgaatagtattattccatcatttccacctaattcagtgagttttctaaagtaacactgaatgtctgcttgaagactaaagtttagattttggttttattttcaaacacttgaaatgtgttacatgtgnnnnnnnnnnnnnnnnnnnnnnnnnnnnnnnnnnnnnnnnnnnnnnnnnnnaaaacctccataacatcccagacagatctgagatgtcaaatagtctcattttcatggcctcgttccttgaaactttttttcatactagagtgcttactctatggacttagagcatgttgtcagagagagagtatggcccttgaattcagaaacacctcttttgcaaccaactttgccttttacttgttatcttgggcaaatttcttaacctctctgggtctgtgttcccctctgaaaaaatgaggaacacaacacttgtctcacaaggttgttgtgaggactacgtgtgataatacaggtaagggtttgcaatcacagtgacattcactactcgcctcctccctgctatttgtaacctcttgctattactatcaaaggtcttcattctgtttggcttgatgggactgatactaatccaa

SEQ ID NO: 240916 - DNA, 1554 bp, Homo Sapiens
  misc_feature (1309)..(1329): n is a, c, g, or t
taccaaattgtcaataatgattatctccatgttacaggatttaaaatgggcctttacatttagacttaagaaatgccctgaaaaggggcctaattcttttgacagaattctgtaaacacaggatatttatatatatttattcagtaaacacaattgtttcatgtaccagatttttaatgcatttgaatctttattctacaacacaagcaacataaatacaatatcttttaaaatattttctctttagaattttcatttccacctcagataaaatgtacacaaaatacacttgcaagcttgcttacagagacctgttaaacaaagaacagacagattctataaaatcagttatatcaacatataaaggagtgtgattttcagtttgtttttttaagtaaatatgaccaaactgactaaataagaaggcaaaacaaaaaattatgcttccttgacaaggcctttggagtaaacaaaatgcttcaaggctcctggtgaatggggttgcaaggatgaattttgcattttataggtaaaatggtatactgactcaaatcattatggctataacaagcttcatttatttataatcttcaatgaaaataagttgattctttggcataatactataaggaataaaaggacccataccacccactggctttatctagagtgggagatagtagtaggggaactgtttataatgtaatttgtctaagtttattcctcttagaaaagcgggaaaagcatattgaataatagtctcttagcatgattagggcaataaacatcttattcttatctgtcccatccccacaacacaacactaagaaacaaaaataacttttccctctaggcacctcctcctgccccatcatgccacacctggatattctatcacattgtttcaactgaagtgaaacccaacttatcaaaagcattcatctttgttcagctttgcctattttgtgggaaatcaatttttattagagagaagcactcccaataagaaccagatgaaagaaatgtaggacaaagcagcttgcacataatcccgaggtagccagggatgctcactggggctggcagtgtcagggcccgagcctccctaactttaagaaaaaacataatcttttacacattggttcaaaagattggcttttggattccctcctctcctttttggcactggttggtaaaacaaaaataaattactcttagagattgacttttgaaatttaattttaaaatcagtgttactaaaagaactaaatgcacacataatttccaaaaattatgggaaactaaagtnnnnnnnnnnnnnnnnnnnnncacccttatttccatccacagaggcaaaaactctgtagattgtctccttgatatcatcaacattctgatatgctttctgatctcactaattctagtaaatataatcatttccttccattcctacaatagtctaaactaatttaaatgaagtcagcatatttattaagcagaagtctttagagaaacctcattgaatcaataagcattatgtgtaattaataccaa

SEQ ID NO: 240917 - DNA, 1791 bp, Homo Sapiens
  misc_feature (1009)..(1067): n is a, c, g, or t
  misc_feature (1560)..(1569): n is a, c, g, or t
tttttctaaatcattctctgtatggtcttaatttttttaatggtaaaagaatttccaaaactaattaattcagtaaagaagagataaactaaggccccctctatatgagttaacatgatttcactgaattcccaaagcacactgattcacttttatatttttcccattatttggaagatgaaataatgaatatggtctccaccatgtagatatgtgcacaaacaacatatttactgaaaagtcaaaaacaggcacacctgctgcttaaaagggaattagttcattttgcaaatttccgtgaagcctttgggtagactctttacagatatatatgaaattaaaatgttaatttacgccagaaaattaaatgaaagatgaaggtacaacaagtagtctcatctcatctcaaatggctaatattttggtggccaatgaaagatgtaaaacaactggcaagcaaacaactattcaaaaatctgtaagccaggagccaaggctgtaaaggagctgacatggaaacatctcattaaaacgacatggatggaagaaattcaaacactacatacttaaatttaaaatcaccttcagtacaagtcaaagggtcaacatgatacaaatgatcatccatagaatcaatgtttctaaatacaaagacaagaagcttagatttatctcactgttccatagaacttatacattcattgtcttctagcttgtaaaaaccaattgttggtataataaaactggaaactgggaagattgagcaagactgctgtatagaatccaatcccaagtcatctgcccaagggtagattcagtttttctctagcgtttgataagtcaggctgatcttaaaggtagaagttggaaattttttcaaggcagtggttctcaaagcatagttcccaaaacagcagtattggcctcacctataaacttgttagaaatacaaatttcctgatttacttaactgggaactctgaccatgagcccagcaatctgtgtcttnnnnnnnnnnnnnnnnnnnnnnnnnnnnnnnnnnnnnnnnnnnnnnnnnnnnnnnnnnnttctaaagacagaagatactagacaaccactggttaaaccttcaggataggaattaacagtacgaacagttgttggtggttgaaaagggtggaaggaccataattagatgggattcaccagcagtggagtgctgttttgtcactaaagtggtcagccactctctcctccctggtacccctttgtagtattgtacaaagatacagagaaaaggttctgtatggtgctagtggtgtggtagtggtttctcttcaatgatggagtggtaccacaatttataaagaaaccaatgatctcaggagatatttttggtctgtcttccctgaaataagaattgtgttttggaaatctaaagggtgttctgttccaaaatcttaagttattagttatttccacatcaaatagcaaacactacaatacagccagggaaagaggatcttccaaacaaacaaaaaaggtatgttttctagattgctccactactaaatgagaacnnnnnnnnnngaggcataattataaatcaagttcttgatcaattttacaaatctttcccagtgacaagctcatatttccaataaaaagtgctcttttgctttcctaaggccacactaaatctccctggggtcacctaagtggtgcccaagcatattgaagttttgtcatctgcttactgcaagactctggattttccttctgcctgttaccttgtctgtaaaacaagtccaa

SEQ ID NO: 240918 - DNA, 1310 bp, Homo Sapiens
gaaaagccattaaatgaatcagtgctgggttactaaaataattctcaggtttgctgactttaaaaattatatttttaattatagaatattgttagaataatacaaacactaggataactgtgaccaataccataaggaaaactgttctacatattgatttgttcattaattctccacaaccatagaaaacaggcacaaagtgttcacgggatgtgcagaggcagccagggacttgggagcagaaggcatgcaaaaagcattagtgaagggagtctgatgcatgagttctatacaaagttcaacacagcaaacgggcaacaattggcagaaagaggagacagctggtgtggcccttgtcccttaagtttcccagctagattgttcatgtatggagatagctgggtgcttagaagccttgttttaagcccttcacctccaagaagccaaaagcagcagcaggaactggttggggtggggcaagaacagtagggaaggaaaagggggtgaaatacagttaggtcatggaaatgcggtcatctatggccactcccaagctgatacccatagtggctcacagaagcaacaggagaactttgacatttattaaaaccatcagcaacatatatgagaaaagacatatttgagtttagttaccaagaacatgtgtcacccgacaattaaaatatggatacccacagtctgctagattttgtaaataacaaaaaaacatgctccttgcctgagtttgtccttaaaaaggagtggcaacatgaaggaacccccctggaagatgggttactttaaaggttgtgttattaacaagtgatgtggtcccacacagctgtgggtcacaataactcattatagtacccacccagagagaccactggctcctttaacaccaagtcctaaaaagctatggcaaaacatttttaaaatgttacaacattcacaataaagaacagtagcaataaagcacagtagaaataaactgggggtactctcaaaagaaaagatattcctcactccagtcccattttctgggcaccaattcccttccaccccaacatgcttggatagcatcaacacttgagatatttcttaattcctacctggactgagattaggaaaactgacactactgggcttaaattgggcgaactgttattttaacctcttatatctgtagggtgggaggatggaaatacattcctaccgaggttcgttaattccttctgactaagccaaagagttcttcattaccatagaagccaacttttttgtacaaagttggccattataagaaaagc

SEQ ID NO: 240919 - DNA, 2711 bp, Homo Sapiens
  misc_feature (140)..(158): n is a, c, g, or t
  misc_feature (889)..(938): n is a, c, g, or t
  misc_feature (2168)..(2184): n is a, c, g, or t
gaatttgagtacacggggtgtggagagtagggcacaaaatgtttccatacatttgactttattgatttgaaagcaaagttactgaaatgcctcagttagttctgcattttaaaaggtgtctacctgaaagaaacaaaaannnnnnnnnnnnnnnnnnngcggggaagatggaagattattcacatgcttgaaggctattcacactgctttaacaaataaacatggaacatacgtccttaattaactgtggagttaatagtctgtctctttgtcctgatgtaatttagatcttaatctaaccccaaccctaaactatatcaaacccaggcagaaaaactgaagttacaggcaactacctgggctaatcttaggtttttttctcaagagtgagaaccatattctcctatttccattgaccacaatttggttccaccacctttctacatcctcaattcactcccaacagtagttacgttttcacaggggaggaaaacgccagtacaacagggttcttgcatcaagcttcatgctttcccagacatttactcaagggaacgtggagaggaggaggaggagggagctggagtgataagcagatgttacacatgtttttcctggaaagatcaccccactttttctaatttcccagaattaaaagaatgtattttatctgtattaccatggaaattactagtaacactggatttttttccctcttttctaagtttccaaaaactttcaaaagtgttcaaagaaattttcttgaacaattttaatatgtttgatttctcatttggggctggaatatttgtattctttttaatttttttacttcatttattagaagagtttctaatatgtgtaggaatacaattttaaatgtaagatnnnnnnnnnnnnnnnnnnnnnnnnnnnnnnnnnnnnnnnnnnnnnnnnnnatgtcacaatatcactataaggcattccttcttccattctttttatatctccacagaactgctctcatgggaccctgtcctgccctgtaggtaaaagcccttcttattttccgctgagaggtctacccactttcatagggtgtccagtcaatttgtgagtacagtccactggagtcttcataacatcaaccctctaggtgagatctgtaatagctagttaattatctgggaatttttaaacatttggatattgcaaataatgtgaataaaatacttgaattttaaataattaaattgtttcttcaaatgttttagcgtttatgaaaaaataatgcaccaagattttggatttctaacatttctggctgtatgagagagtaaagggttggcactttattaacttgggggcaatgtagacatatgttgaagctggttctggaagtgcaccctggaaatttttatctgagttccttgtcaatcctacacaattgcatgcaatgagaacttcatgattgtagcattgatctggcctagctctggactgcttgatgaaggagtttctttgaagtgagcaatactggcaaatatgaatgaattcacaccactagcaattgttggcagaacacccaaccactctacccagtttcagaatgtgaaatggcatgtattcagcagggcatattattcttgaagtcacaaaaatagggaaaatccaacaagcgcagtcagtgtttacctgaagaatacagtcacatagttgcttcactttcaatattcttaggaaataaccaaataaatgagctacaaatatgagaaactgagagtgtgtgaatgaaagagagcaacagaaggaggaaatacaagactagacaatgtaatcttctacttaacatttcagaattttattaatcctttaaaaatcaccctatttcttttgagttaatatcctcatctcgattaccctcatacatggcttagtttgattctgttactaaattctgtgaatcattatttaatcaaatctactaaagattagaaaaaattctagcaagacttataatcatgaaatacagaattaaaagtttaaacctaccaaaagtcctatggcctattatttagctgtgaatgagacacgtcaggagtataaatctgcacttttgactgtaagtaaaatttgctaatgcaggaagcgaaatagtgaaggaatactggggttgctaaaagattacnnnnnnnnnnnnnnnnngcaaaatgcagtgtaccttaaaagtgtctcacctagaaggcctctacctgtaatcacattaatttttctaaagacaatttggtgttttgaagataaatgtcattagtctatgataatagcatcataggacaattagccattttagacttgaccatattttctctttttagcatatagccatcttgatatttaggtgggagactactccaatggagcaacagtttcattttacatgattggatttagaaatttacaaattttaaactcataagaattctaaataatttgaaaatggaaacatttgacccacagtctagcagcataaatacatttataaaatacttcattgttgatcttaggtcattgatttaaaacagaatttggtgactatgggcaggtggagggggccagtgaggaaggtataaaagagaaatctttatgaattgtgttcagattgattttgtataaacataatatattcatggttgtatctcttatttataatacccaactaacatgaaggccaa

SEQ ID NO: 240920 - DNA, 1189 bp, Homo Sapiens
  misc_feature (305)..(320): n is a, c, g, or t
  misc_feature (1009)..(1018): n is a, c, g, or t
ttggctttctcttttggacaatagttaaattagcagtattagttatgagtttggttgcagtgttcttatcttgtgggctgatttccaaaaaccacatgctgctgaatttaccagggatcctcatacctcacaatgcaaaccacttactaccaggcctttttctgtgtccactggagagcttgagctcacactcaaagatcagaggacctacagagagggctctttggtttgaggaccatggcttacctttcctgcctttgacccatcacaccccatttcctcctctttccctctccccgctgccnnnnnnnnnnnnnnnnggaaacgtttatcatgaatcaacagggtttcagtccttatcaaagagagatgtggaaagagctaaagaaaccaccctttgttcccaactccactttacccatattttatgcaacacaaacactgtccttttgggtccctttcttacagatggacctcttgagaagaattatcgtattccacgtttttagccctcaggttaccaagataaatatatgtatatataacctttattattgctatatctttgtggataatacattcaggtggtgctgggtgatttattataatctgaacctaggtatatcctttggtcttccacagtcatgttgaggtgggctccctggtatggtaaaaagccaggtataatgtaacttcaccccagcctttgtactaagctcttgatagtggatatactcttttaagtttagccccaatatagggtaatggaaatttcctgccctctgggttccccatttttactattaagaagaccagtgataatttaataatgccaccaactctggcttagttaagtgagagtgtgaactgtgtggcaagagagcctcacacctcactaggtgcagagagcccaggccttatgttaaaatcatgcacttgaaaagcaaaccttaatctgcaaagacagcagcaagcattatacggtcatcttgaatgatccctttgaaannnnnnnnnngtttgtttgtttaaatcaagcctgaggctggtgaacagtagctacacacccatattgtgtgttctgtgaatgctagctctcttgaatttggatattggttattttttatagagtgtaaaccaagttttatattctgcaatgcgaacggtacctatctgtttctaaataaaa

SEQ ID NO: 240921 - DNA, 833 bp, Homo Sapiens
  misc_feature (708)..(717): n is a, c, g, or t
ctttgtacaaaaaagttgggaaacgtttacccatgaatcaacagggtttcagtccttatcaaagagagatgtggaaagagctaaagaaaccaccctttgttcccaactccactttacccatattttatgcaacacaaacactgtccttttgggtccctttcttacagatggacctcttgagaagaattatcgtattccacgtttttagccctcaggttaccaagataaatatatgtatatataacctttattattgctatatctttgtggataatacattcaggtggtgctgggtgatttattataatctgaacctaggtatatcctttggtcttccacagtcatgttgaggtgggctccctggtatggtaaaaagccaggtataatgtaacttcaccccagcctttgtactaagctcttgatagtggatatactcttttaagtttagccccaatatagggtaatggaaatttcctgccctctgggttccccatttttactattaagaagaccagtgataatttaataatgccaccaactctggcttagttaagtgagagtgtgaactgtgtggcaagagagcctcacacctcactaggtgcagagagcccaggccttatgttaaaatcatgcacttgaaaagcaaaccttaatctgcaaagacagcagcaagcattatacggtcatcttgaatgatccctttgaaannnnnnnnnngtttgtttgtttaatcaagcctgaggctggtgaacagtagctacacacccatattgtgtgttctgtgaatgctaactcctcttgatttggataatggttattttttaatagagttg

SEQ ID NO: 240922 - DNA, 1078 bp, Homo Sapiens
tacaaaaaagttggctgggaggcgtttgggcccagagaagtggatccgccgcttgcgccgcatggagtccgaatcggaaagcggggctgctgctgacacccccccactggagaccctaagcttccatggtgatgaagagattatcgaggtggtagaacttgatcccggtccgccggacccagatgacctggcccaggagatggaagatgtggactttgaggaagaagaggaggaagagggcaacgaagagggctgggttctagaaccccaggaaggggtggtcggcagcatggagggccccgacgatagcgaggtcacctttgcattgcactcagcatctgtgttttgtgtgagcctggaccccaagaccaataccttggcagtgaccgggggtgaagatgacaaagccttcgtatggcggctcagcgatggggagctgctctttgagtgtgcaggccataaagactctgtgacttgtgctggtttcagccatgactccactctagtggccacaggggacatgagtggcctcttgaaagtgtggcaggtggacactaaggaggaggtctggtcctttgaagcgggagacctggagtggatggagtggcatcctcgggcacctgtcctgttggcgggcacagctgacggcaacacctggatgtggaaagtcccgaatggtgactgcaagaccttccagggtcccaactgcccagccacctgtggccgagtcctccctgatgggaagagagctgtggtaggctatgaagatgggaccatcaggatttgggacctgaagcagggaagccctatccatgtactgaaagggactgagggtcaccagggcccactcacctgtgttgctgccaaccaggatggcagcttgatcctaactggctctgtggactgccaggccaagctggtcagtgccaccaccggcaaggtggtgggtgtttttagacctggtgggcccttcagagggaggggtggacctgtttctctttcactttcatttgctggtgtgagccatggggtgtgtatttgtatgtggggagtaggtgtttgaggttcccgttctttc

SEQ ID NO: 240923 - DNA, 2775 bp, Homo Sapiens
  misc_feature (24)..(32): n is a, c, g, or t
  misc_feature (2281)..(2354): n is a, c, g, or t
ggaggagagaagcacagtgaaagnnnnnnnnngtcccttttcgacatcacattcctgtgttttccctcagcctggaaaacatattaatcccagtgcttttacgcccggaaacaaagagactaagccagactatgggggaaagggagataagaaggatcctggaactttaaagagggaaagagtgagattcagaaatcgccaggactggactttaagggacgtcctgtgtcagcacaagggactggcacacacagacacacgagaccgaggagaaactgcagacaaatggagatacaaagacttagaaggacagctcctttcacctcatcctacttgtccagaaggtaaaaagacacagccagaaagaaaaggcatcggctcagctctcagatcaggacaggctgtggatctgtggcggtactctgaaagctggagctgcagcacaccccttttgtattgctcaccctcggtaaagagagagagggctgggaggaaaagtagttcatctaggaaactgtcctgggaaccaaacttctgatttcttttgcaaccctctgcattccatctctatgagccaccattggattacacaatgacatggagaatgggaccccgtttcactatgctgttggccatgtggctagtgtgtggatcagaaccccacccccatgccactattagaggcagccacggaggacggaaagtgcctttggtttctccggacagcagtaggccagctcggtttctgaggcacactgggaggtctcgcggaattgagagatccactctggaggaaccaaaccttcagcctctccagagaaggaggagtgtgcccgtgttgagactagctcgcccaacagagccgccagcccgctcggacatcaatggggccgccgtgagacctgagcaaagaccagcagccaggggctctccgcgtgagatgatcagagatgaggggtcctcagctcggtcaagaatgttgcgtttcccttcggggtccagctctcccaacatccttgccagctttgcagggaagaacagagtatgggtcatctcagcccctcatgcctcggaaggctactaccgcctcatgatgagcctgctgaaggacgatgtgtactgtgagctggcggagaggcacatccaacagattgtgctcttccaccaggcaggtgaggaaggaggcaaggtgagaaggatcaccagcgagggccagatcctggagcagcccctggaccctagcctcatccctaagctgatgagcttcctgaagctggagaagggcaagtttggcatggtgctgctgaagaagacgctgcaggtggaggagcgctatccatatcccgttaggctggaagccatgtacgaggtcatcgaccaaggccccatccgtaggatcgagaagatcaggcagaagggctttgtccagaaatgtaaggcctctggtgtagagggccaggtggtggcggaggggaatgacggtggagggggagcaggaaggccaagcctgggcagcgagaagaagaaagaggacccaaggagagcacaagtcccaccaaccagagagagtcgggtgaaggtcctgagaaaactggccgccactgcaccagctttgccccaacctccctcaacccccagagccaccacccttcctcctgccccagccacaacagtgactcggtccacgtcccgggcggtaacagttgctgcaagacctatgaccaccactgcctttcccaccacgcagaggccctggaccccctcaccctcccacaggccccctacaaccactgaggtgatcactgccaggagaccctcagtttcagagaatctttaccctccatcccggaaggatcagcacagggagaggccacagacaaccaggaggcccagcaaggccaccagcttggagagcttcacaaatgcccctcccaccaccatctcagaacccagcacaagggctgctggcccaggccgtttccgggacaaccgcatggacaggcgggaacatggccaccgagacccaaatgtggtgccaggtcctcccaagccagcaaaggagaaacctcccaaaaagaaggcccaggacaaaattcttagtaatgagtatgaggagaagtatgacctcagccggcctactgcctctcagctggaggacgagctgcaggtggggaatgttccccttaaaaaagcaaaggagtctaaaaagcatgaaaagcttgagaaaccagagaaggagaagaaaaaaaagatgaagaatgagaacgcagacaagttactnnnnnnnnnnnnnnnnnnnnnnnnnnnnnnnnnnnnnnnnnnnnnnnnnnnnnnnnnnnnnnnnnnnnnnnnnngaggtaaaacagaacaggatggctatcagaaacccaccaacaaacacttcacgcagagtcccaagaagtcagtggccgacctgctggggtcctttgaaggcaaacgaagactccttctgatcactgctcccaaggctgagaacaatatgtatgtgcaacaacgtgatgaatatctggaaagtttctgcaagatggctaccaggaaaatctctgtgatcaccatcttcggccctgtcaacaacagcaccatgaaaatcgaccactttcagctagataatgagaagcccatgcgagtggtggatgatgaagacttggtagaccagcgtctcatcagcgagctgaggaaagagtacggaatgacctacaatgacttcttcatggtgctaacagatgtggatctgagagtcaagcaatactatga

SEQ ID NO: 240924 - DNA, 1262 bp, Homo Sapiens
  misc_feature (182)..(195): n is a, c, g, or t
  misc_feature (1102)..(1114): n is a, c, g, or t
caaaatctagattatgtacatatggctcagcttgtgaacaggaaaaaaggtcaatagtgtacactttcgtgatacaaagcacttcattgcaatgccaacagactgatctcaaatgagttctccccttgtaacacaggagctaagacttctatcaaggaggacatcttacgttgcataatttnnnnnnnnnnnnnnttttttctaggattacccttgctctatggagaacagcgaggccagaaaaatgaacagtgcaaatttatttttgaaacagtttcttaataaaatattttgtggtcactaagcccatgtactaataaactcagccatggacagcatattaaagaacaaaagtttaaaatatctaggaagccagctggtggccatcttctctaaaacccaaattgcatgtgcactgagaaaaatgttactgcttcaaaacaaccaaaaatgggaaaataactgaggtctagaaacagattttctctttctagactcccagcgggctcggccagcagttccttattcaaaatcaatgtgtctataatcaactctagtatgtccacagttcacccaaatgccagatacattaagactaccaaatacaaacctaaaatgttccccccaaaatttcccttaaaactgttccccaatacctgcaattcacagatataatttagcatttttgtttttatatactaatttaggcaaaacccccccgccactgaatcgtccaacaaaaatgattaatttgacagaaacaaatttaaataactgcacatacagtttatgtttatacaacgtgtggctgctctacagagaaaatgcttgtctgtagacacactctcttaaaaatcctacaagccatcccaacgccctcagtcaaggatcctggaggttccaggacaatctggagaggcgaggaagaaggtgccttccccatctgagatgctcaaagttgcgataaaatgctgccagcttccgaatggctgacctcgatatctgcagcacatatcatagagggtcaatacttccattaacaattttaagacaacaatagatttgggtggattcaacataatacaaaatcattgacagtttnnnnnnnnnnnnncatacattttaaatgaaagagcacaatagcagaaactgctccaagtgatgagctgcattagagaaaaggaatacacacagtatttgaacaagcaggtttacaacttagatatttacagatttttacctgaggtgcaagcattatccaa

SEQ ID NO: 240925 - DNA, 974 bp, Homo Sapiens
ctttgtacaaaaaagttggaccctgcgccccttaaagagcagttgggctatatcgtcttcagcgggccacgtcgagctaatggcatacagggcttgagattcatcatccagtcagaaaagccacctcactacctagaaagcagagtggaagctttcttaattaccatggaaaagtccatagaggacatgacagaagaggccttccaaaaacacattcaggcattagcaattcgtcgactagacaaaccaaagaagctatctgctgagtgtgctaaatactggggagaaatcatctcccagcaatataattttgacagagataacactgaggttgcatatttaaagacacttaccaaggaagatatcatcaaattctacaaggaaatgttggcagtagatgctccaaggagacataaggtatccgtccatgttcttgccagggaaatggattcttgtcctgttgttggagagttcccatgtcaaaatgacataaatttgtcacaagcaccagccttgccacaacctgaagtgattcagaacatgaccgaattcaagcgtggtctgccactgtttccccttgtgaaaccacatattaacttcatggctgcaaaactctgaagattccccatgcatgggaaagtgcaagtggatgcattcctgagtcttccagagcctaagaaaatcatcttggccactttaatagtttctgattcactattagagaaacaaacaaaaaattgtcaaatgtcattatgtagaaatattataaatccaagtaaattacaaaatcttatagatgtagaatattttttaaatacatgcctcttaaatattttaaaatttttcttttgattactgagagaaatttccccaatataacaatgcttaaaatgaatgatattcctatagaatcttccttccctattctgtaaaatagtcacttgtccgacgaaagttaaaagttagctcttttc

SEQ ID NO: 240926 - DNA, 1456 bp, Homo Sapiens
  misc_feature (1241)..(1291): n is a, c, g, or t
ttgggacggacacagccctttccttaaagagccctggggtcctgtcctgcaggatgctgcataggaatgggcagagatgtcctggatgggaacatggtcctggaggtgccctacctgcatcctgctgcacccccacccacgacactcgagtgcaagatcgcctcactcctaaccctgactttattcccaggccccacaccgaggcaggtgcaggattcgccatggtgcagcctccgggtacaaacatctgaggcactggcgatcccagtccttgcagcaccctgaacacagctcagaccagtgaggggtgattcagaggtggggatgggcagagagggctggccactctgcctcaggacttgacctcaagtgttctgtctccccacccggtgtgtccagaagaccagcctctttcttgccagaagcaggtgctaagatggactgcacagggtcccggcactccctcgggacccattcaggatctcagctgggcaggggtgccacccaacaggaagatgtgatctgagcaatagtgtggccttgtttctccgcttctggttgtggctgtgtgtacagggctacctgactattttgacttctgacaggtgtcactgattttctttcccccatttaaaaaaggtcatttagtcaaagacacagtgctagaggtttaaagggtgtaatgtgttggtcacatcacaaccagtaagaaacgcttggtaggttatccacatcttttgctgactgtttccatatacaattctggtcaccatattttccaaagctaaaatctgaggcgtgggctgatggtttttgaaatcaggattaccccaggaagaaccaggtcctattactaattttcctgattctgaggctctgaaggcttgtctgagacacattccggagacctttgtaccagaacttggatgcatagtccaccttactactgatacacgcctgagcaccctttagggcgaggcgccgcctcctgcctgctgtcctgtccctcagcatcagaagagttgaattcagcaggagacgggagcccggtgtccatgagggaagaggggtcgcgcttggtttctactgacccccatgaagatttcagacttgcagtgcggccacctggccctgccctgcctctctctttctcatacagctttaaaactttactacttttatttaaaaatgaactggatgggagagaagtagcgtcccctaccctacaagtcacacattcnnnnnnnnnnnnnnnnnnnnnnnnnnnnnnnnnnnnnnnnnnnnnnnnnnnagcacgggaacagctttcttaggcctcagggtcctgttttccctggcctcttctagagggcccgtggacaggtcgcagtgcgtgcttatttggaaaccaggtgtgtgagccgaatgcttgccaggcccatgcactcagcagaggagcccttgtacctggctgccc

SEQ ID NO: 240927 - DNA, 1224 bp, Homo Sapiens
ttggcatatatatatatttctgaagaacatgaatttctcaaatcaaagtaaagctgaggaatcctctccatggccacttctacctcctcaatcttaatgagcttggtcttcatggctgggctccagtgaatgggagacagaaacttcctcatcctcaagagtggtttttctgtcttctctggtttaccaggaatttgtaaaaggaggcgattgatgtgtattgaacaataagagataataatctattaacattgtcatcacgttgcgttttgctctgcccttccagacatctctacatggatgccataagctctttcttcttatctaggtgttgagataactgcctacctcggtatcagcatctctcagtggtgttgtgactggttatctggggttgtgtggctactggtgtaactagatattatatttagatacctggctatgtatagctagatatcggcatcagagctgtgtatctggacattatcttggtgaagatttgatgtgggagtagattcctgtcatctctgtaggctgcatctttatcttgatgataactttgaagaaggaacctggagatgttcctctggcagtgacctttctgggctctcctgccatcggtcacgttgccttcctgggcttggggaaaataaggtctcagctccagtgtggggctttgtttccttctccaggtgacctctcccagctcagcttcgggaagctgggtgttggctgctctcagcaggttggccatttgaattcttcctttcttagctgtgattttctggctttgggaacagacaggtaaaacccagagccaagggttctccacccttgagaactgtggcggaaggcgatgctttcagcccgggaagtcaggaatggccaggacactgacattcactccttgagtctgtttgccaccctcccctgggaacgtggccagatgtggagtttgctcttccgggcagatgtctgctgttggggttaatctgcttctgcctccctgtggggagtaacttctgtttactttgtaagtttcctttcttgattctgggcccccaaagcaaatgtatttttaaaggcaatgaggtttattaagaagagagaaatggcagatgtctccgagactgaaagtctcttgatcttgagagtagggtctggtctctgtctctttactctagcacattcttggtctttccttttcaagatggagtgcccttt

SEQ ID NO: 240928 - DNA, 1269 bp, Homo Sapiens
  misc_feature (934)..(946): n is a, c, g, or t
ggtctaagcacagtactaggtatgaagggagctttgtaaatgtctgaagctttctcaacccttgcttggttgtgcttaaacttggatatatgtcatcagggaaagaacagtgtctgggaattagatgagaaatgtagatgatgtgtccaaactcagaaaagttgtttaactttcaacagccttagttcctgtggccgtgaaatggggataaatatactattaatacttaaggttatgatggatttccagatacctagggtatgggaatgcactttagaaactgatgtcctgagcctgaatgagtttttccttggcaacttgatagacccttggtgtcttgggagcctgctcaaataggagcctgggcttcccctggcactgagcactggagtcacttccagatcatgagaggcaaaacagcatggtagctatgaaccatgttaaaattccggtgtctcacacttgctagttatgttactaacctcactgtgcctcagttttgtcacctattaaatggaaagaaaaatagtacctacctcattgggttaccagaatgaaatgatctttgggggataacagtaaccaccatgagttagtgcttttgagcaccatagtttcattcttaagtttcattcaaaaccctgcaattctaagacatcactgatgattacattttttttggtgtgaaagtcaagtctaattgtttctggagaacattgtgtcccactgtttggttttggatttatcccttgcagactgagaggtttttgttttgtctgtttatcttcttaatgtagtgtttagaaatttaatggagcaatttagtttccatttactgaagtagattatcaaaggaaacaggaacactaaagactaggttagcatcccagagtattgcctcacatatgatgtgatttttcatgttttcctgacnnnnnnnnnnnnngaatgagagtttctatttccttaagctggttcatggcaaagcctcttgcctcttgcctcatgcccagtcaactctctgggtaaccagatggttggaagtggggctaagagggtcacacagggacaaatccccacccagcgtgtcaggacagctttgttcttcttgccagatgtggtggcctagatcgctaaaagcccacatttttggcttagaggcctcaagcagtattgttcaactgggaaaccaaaattcatgaagagaaatcatggtggtccgctccattcgagtgaatgaaacacttcaggacaggtaaaatggaccaa

SEQ ID NO: 240929 - DNA, 1782 bp, Homo Sapiens
ttacatttaagagaaaaattacaaaggagaaatgagaatgaagagcagcagaacaaaacagcattgctcactgtaccagaaatgataatagttagccattactccagtttgaagatttcattgtgcttgataggatataaatggactgaagatataggacaaattaagttcaaagtgttgggattataggcatgagccactgtgcctggctgggttttagtatatttctcaattgtcctgatttcctcctgaagaggaaaaataacctgaaatgtgttggtggctgttgtttttttaacatgtctgttgactttcaggccctagactggagctggttacagacggaagaagaagagcacagctgcctggagcaggcctcatgatgtggggggactcgaccccctgacatggggcagcccatagcaggccttgtgcggtggggggactcgaccccctgacatggggctgcctggagcaggccgcgtgacgtggggctgcctggccgcggctctcacatggtggttcctgctgcactgatggcccaggggtctctggtatccagatggagctctcgcttcctcagcagctgtgactttcacccaggacccaggacgcagccctccgtgggcactgccggcgccttgtctgcacactggaggtcctccattacagaggcccagcgcacatcgctggccccacaaacgttcaggggtacagccatggcagctccttcctctgccgtgagaaaagtgcttggagtacggtttgccacacacgtgactggacagtgtccaattcaaatctttcagggcagagtccgagcagcgcttggtgacagcctgtcctctcctgctctccaaaggccctgctccctgtcctctctcactttacagcttgtgtttcttctggattcagcttctcctaaacagacagtttaattatagttgcggcctggccccatcctcacttcctctttttatttcactgctgctaaaattgtgtttttacctactactttggtggttgtcctcttttcggcaaagttggagcgagtgccaagctctccatctgtggtcctttctgccaagagcgactcatagtaaccaggatgggagagcagctgccttattctgaatcccaaaaattacttgggggtgattgtcacagaggagggacagaaagggtatctgctgaccaccagcctgcctacccatgcccatgtctccattcctgctcaagcgtgtgtgctgggccggggagtccctgtctctcacagcatctagcagtattattaaatggattcattttaaaaatagctcctatattttgtaacatgtctcaaacactcatactgggttccacaatccactgttagaatacctatggttagggcttctgaactaaaataatggaaaattttaacaatttgtatagtgcctggatcattactagtgccataaccctgcttcttcaacatttcacagaacttctcttttatataaaggcaagagcacaaaatgagttcagatgatcacaaacaggtgagttttgttggagaagaaagttggagtagagactttcacaagtggtttccatggagatagaatgaagcattctgtggtcaagtaagtttaggggagctattcatgtttcactttgctttgtggagattcacactatgcactgggaaagtatctgaaaacgtctaataataaagaaacaggcttaactttgtgtaagatcactgttttatcaatgtcatttgggctatagaaacatttt

SEQ ID NO: 240930 - DNA, 1561 bp, Homo Sapiens
ttggccttgacatttgagggggttttgttattgtacaggaaatggaatttggatcccagagatgctccaagactgttccttgtggtccctgcaggatgaatctcctccgaaacaacagctgcctctccaaaatgaagaattccatggcttccatgtctcagcagctcaaggccaagttggatttcttcaaaaccagcatccagattgacctggagaagtacagcgagcaaaccgagtttgggatcacatcagataaactgctgctggcctggagggaaatggagcaggctgtggagctctgtgggcgggagaacgaagtgaaactcctggtagaacggatgatggctctgcagaccgacattgtggacttacagaggagccccatgggccggaagcaggggggaacgctggacgacctagaggagcaagcaagggagctgtacaggagactaagggaaaaacctcgagaccagcgaactgagggtgacagtcaggaaatggtacggctgctgcttcaggcaattcagagcttcgagaagaaagtgcgagtgatctatacgcagctcagtaaaactgtggtttgcaagcagaaggcgctggaactgttgcccaaggtggaagaggtggtgagcttaatgaatgaggatgagaagactgttgtccggctgcaggagaagcggcagaaggagctctggaatctcctgaagattgcttgtccaggtcatagaggatgcaagccacaggaattcccatagcctttgtgtgtgtgtctgtcttctacctggaaaacaagcaaggtccgtggtcctgtcagtggaagcccggatagcatgaatgcctctcgacttagccagcctgggcagctgatgtctcagccctccacggcctccaacagcttacctgagccagccaagaagagtgaagaactggtggctgaagcacataacctctgcaccctgctagaaaatgccatacaggacactgtgagggaacaagaccagagtttcacggccctagactggagctggttacagacggaagaagaagagcacagctgcctggagcaggcctcatgatgtggggggactcgaccccctgacatggggcagcccatagcaggccttgtgcggtggggggactcgaccccctgacatggggctgcctggagcaggccgcgtgacgtggggctgcctggccgcggctctcacatggtggttcctgctgcactgatggcccaggggtctctggtatccagatggagctctcgcttcctcagcagctgtgactttcacccaggacccaggacgcagccctccgtgggcactgccggcgccttgtctgcacactggaggtcctccattacagaggcccagcgcacatcgctggccccacaaacgttcaggggtacagccatggcagctccttcctctgccgtgagaaaagtgcttggagtacggtttgccacacacgtgactggacagtgtccaattcaaatctttcagggcagagtccgagcagcgcttggtgacagcctgtcctctcctgctctccaaaggccctg

SEQ ID NO: 240931 - DNA, 1233 bp, Homo Sapiens
gatcaccctcacttagaaaagaggggcaggaggctcagagaaggaagggctgcatgattattcagtgagggagttgggcagcctcaggtccgattccaaagcccagcagggcagaaggtgtgaggggacgtggacatgggggaggcggggagagcactggcatgcaagtcagcctgtgacctgagggcacttgcgagccctccttccttagggccctgtctgtacattgggacactgattcctcctgagcacagtcctcagaagagctgggtctccagagacgcacttctggagtgggggacagaaacctgctgggcaccaggacaaaggaagtggtttccaatcgaccttccctgctgtgtgtctgccggggcctctcacctgggtcagcgtctgcacgtggatgatgttgatgaggcggaagaggaaggacatctgcgtgggcacctgggatatgtaggcgagcaggcggcattcagacagtacctcggcaactgtggagggaggcaggggtgcagcaggtcaggcttaggcccagtggctgggtcgcccaggcctttcgtggagccccgcttgggtcctgactctgaagctgggagctcatcatcaaaacagcttcaacgaaagctgactgtggcagaaagaaggacctccagctgtcctgctaccaggcaaagccatgttctcagagtgcccaggagcaccccacctcatcctccagaaccaagctcagggcagctctccctcagccctccccagactggctccagacccgtgccctccatatcacacacagaagagttccctccacaggaagatggatccatgacgctgcattaagaaaaacaacgcaaaagttccactccttctgcagaggtcctagtgcaactggttttccacaccagctctcaggtgagtccggcccagtgctgagaccacaaggcacaggttctgctccgtccactagtgtcggagcaactgcttcccgcacaactgggaggcagggcaataaccgaaggtaccaaaatctgtgtggctgttcccctgaaacagaccctctggggcagaaaaaggaagcaaacggctaaattaccaacaaccgggatacttcttgctatcaatgacagtgaccgtgacaaggaacaagtgcctgactttttgggggtgtgggggggtcacaaaccctcaggagaatctgctggatgccacaagccctctcctaggaaaaaccaa

SEQ ID NO: 240932 - DNA, 860 bp, Homo Sapiens
aactttgtacaaaaaagttggccggcttcctgctcaacaacttccacaacctgctgcgcttctggcagcagcactacctgcacaaggacaaggacagcacctgcctagagaacagctcctgcatcagcttctcatactggaaggagacagtgtccatcctgttgaacccggaccggcagtcaccctctgctctcgttagctacattgaggagccctacatggacatagacagggacttcactgaggagtgaccttgggccaggcctcgggaggctgctgggccagtgtgggtgagcgtgggtacgatgccacacgccctgccctgttcccgttcctccctgctgctctctgcctgccccaggtctttgggtacaggcttggtgggagggaagtcctagaagcccttggtccccctgggtctgagggccctaggtcatggagagcctcagtccccataatgaggacagggtaccatgcccacctttccttcagaaccctggggcccagggccacccagaggtaagaggacatttagcattagctctgtgtgagctcctgccggtttcttggctgtcagtcagtcccagagtggggaggaagatatgggtgacccccaccccccatctgtgagccaagcctcccttgtccctggcctttggacccaggcaaaggcttctgagccctgggcaggggtggtgggtaccagagaatgctgccttcccccaagcctgcccctctgcctcattttcctgtatctcctctggttctgtttgctcattggctgctgtgttcatccaagggggttctcccagaagtgaggggcctttccctccatcccttgaggcacggggcaactgtgc

SEQ ID NO: 240933 - DNA, 1546 bp, Homo Sapiens
  misc_feature (1044)..(1107): n is a, c, g, or t
caactttgtacaaaaaagttggctctacacttctgttgtggttaagtacacagacaacatcatgaaaggcttttctgcagcagcggccattgtcctttccaccattgcttcagtaatgctgtttggattacagataagtatgtcttagtttgtgttgagtttttaacatggaagagcctcccatttccttgattcatttaatcccttatttaaaagtggcagttggtcatactgtttacagaaattcctagctttgttactacagtttattccaccagtacagctgttcatagttgtgtgggatgtggctaagcagtactttggttgtttaggtggtcttagaggttaagacgaggggtgctagttctatgtgaaagtgaggggactttttttgcagtcaaggcctccctgtatttttaggtattgtatataggacaacttgagtgtctgaatgtgagaaggtactcaaggaaatacatataaagactttaggaaattattttcagcagtcagtttaaactatattggctcattatttagaagaatgtagaaaacatcttttagtcctccctcagcttgtactttccaactgctttgcatttgggtgtgagacggttttgaaaacaatcaaaatctagattttgtcttttgtatctttgtttcattcaatatgtaattaatacaaaactcattaatatagctggcattccagtaccactgctttgttagtcctaatataattttcccaactctcacacccagcattaatttggcttctaaattatttaagcaatgatattgacttaacatttcagggtgcttttatagtgtaataattttctttactgatcaattattataatataaaccaatgtatgaagaatatctgttaaatatattaagtaaaagagacctggcttatatttacatttcattttaaaattgactcctgtatataaatggaaatagtgttgtagaaattttagaaaaccatgtatagtctgtggcaaatcttgcctgtaccatttcttaactgtgcagccnnnnnnnnnnnnnnnnnnnnnnnnnnnnnnnnnnnnnnnnnnnnnnnnnnnnnnnnnnnnnnnnttgcctagtggtgttttcaggtgaagtgcttagagtagtgcttgacactacttaccaaccacttaccatttcagtatcaggtacttataggctttcccttagatgtttttctacctgatttgggtgaacttggctgtaattctgatctatctttatgttcaacaaaatccttataccattgctcataagaaatatataggaacagtagaaaatgcttttgtttaatgttcttactgatggtcaactagcatgtcttagcaatctttcagttaactgtttagatacaagtttttatcctaccttctccttttttgaaggcaaagctggtcttttttagttaggagtgaactaaaataaagcttgatgtcatataaatatatttatttgtcaagttaggacaagttatgatttggtttcttgcatcctgatttttaagatt

SEQ ID NO: 240934 - DNA, 1901 bp, Homo Sapiens
  misc_feature (1287)..(1310): n is a, c, g, or t
ctttgtacaaaaaagttggcagtgattacctcttagaatagtgcccttggaggtcattaaacaacgccttactgctcgctggattcatcccgccagtggccgagtctataacattgaattcaaccctcccaaaactgtgggcattgatgacctgactggggagcctctcattcagcgtgaggatgataaaccagagacggttatcaagagactaaaggcttatgaagaccaaacaaagccagtcctggaatattaccagaaaaaaggggtgctggaaacattctccggaacagaaaccaacaagatttggccctatgtatatgctttcctacaaactaaagttccacaaagaagccagaaagcttcagttactccatgaggagaaatgtgtgtaactattaatagtaagatgggcaaacctcctagtccttgcatttagaagctgcttttcctaagacttctagtatgtatgaattctttgaaaattatattacttttatttctactgattttattttggatactaaggatgtgccaaatgattcggatactaagatgcatcgtttgaaatcatctagtgtgttgtatgcagttatcctcaaaaacatcagcgatgtctgaacctttaaaacatctgttagagcaaaattaaaagagcatttggtagtaatctaactttttgttcagttaataagtggttgataaagtttccatatttttctggaaaagttaaaaaaagttacatgtcatttggagaaaatacgtaatcagaaatttgtgcatagattgatgccaaaaaagacatttccagcattgtggaacatggtgagacactatataaaattccagaaagaaagcaactggatttacagatttattgtgagacacaaattcactgctgcctttatactaagaaatgtatatgttaaccatatatgctgtatttattttgtcgttaagcatactttcagtttactcagaattttcaatttgctataaagatgtatcaattagcatatagaaaaatattactttaagatgacttgtttcctttgaaaatacctgtgtactgagggttatgatttgtgtcaaaaattgacataagtgcttttacaagcaccaaagttgaatgaattttcaacaaaatgtaattaaagtctatgttttcagttatgactcaggttaagaaatgtgttttaggatctacttgctggtttttctttttgatccaaatgtgtgatctgccctgataaataacaagttatagtaccatctcccccgccaatnnnnnnnnnnnnnnnnnnnnnnnncccgtggcactatgtaaataaagtaagcatactttgttgttagtaaatagatgaggcatgcctgggaaatgctcccttggcataaatagcaatcaattataattagtaaacaggtgtaccaataaaaagaatttacatgataggttaacaaggaccaggaaagtgagtttcctgaaggagttctttgttcctgatcaaagaaattgatacctgttagcattcactgccaccatattttaaggagaaagaactctattggtgtcgtctgagcagccatttaaaaattggaatctaaaggatggttgctgatgtactgtgtggtctggtagaagtggggaaatatgagagatggaggaaaaaacttgattatgtcttccatggcatatttactcttactttacttcgtgccaaatcaaatgaaacaagccgtcttacaagtcgttattgcctttaaaaatctgttccgtttttttcccaggtactttaaaatacaaagtgccagtagtgggttcttatgtgttttggggggaaattttattttcccctttttcttctgatattaaaaaattcatcgatctttcaagatgaaac

SEQ ID NO: 240935 - DNA, 1496 bp, Homo Sapiens
ttggcttattaaaagcagagctgcttttgccatatctcagcaaccaactactttttcaagatgtcgatttttagtacaagataaagggtcaatggtttgttattgatggagaagggagaaaaaggacctcatctacctgcagcaatgagtccctaagtgtgggaggaacctctgtcactcctcgccggatctcctggcggcagcgcattttcctcagggttgcttctcccatgaacaaatctccctcagcaatgcaacagcaagatggattggacaggaacgagctgctgccactgtcccccctctctccaaccatggaggaggaaccgctggttatattcctgtctggggaggatgacccagaaaagattgaagaaagaaagaaatcaaaagaactgaggagcttgtggagaaaagctatacaccaacaaatcttgttacttcgaatggaaaaagaaaaccagaaacttgaagcaagcagagatgaactccagtccagaaaagttaaattagactatgaagaagttggtgcatgtcagaaagaggtcttaataacttgggataagaagttgttaaactgcagagctaaaatcagatgtgatatggaagatattcatactcttcttaaagaaggagttcccaaaagtcgacgaggagaaatttggcagtttctggctttacagtaccgactcagacacagattgcctaataaacaacagcctcctgacatatcctataaggaacttttgaagcagctcactgctcagcagcatgcgattcttgtggatttaggaaggacgtttcctactcacccttacttttcagtacagcttgggccaggacagctgtcactgtttaacctcctgaaagcctattctttgctggacaaagaagtgggatactgtcaggggatcagctttgtggctggagtcctgcttctgcacatgagtgaagagcaagcctttgaaatgctgaaattcctcatgtatgacctcggcttccgcaagcagtacagacctgacatgatgtcgctgcaaattcaaatgtaccagctgtccaagctccttcatgactatcacagagatctctacaatcaccttgaagaaaatgaaatcatccccagtctttatgctgccccctggttcctcacattgtttgcctctcagttttcattaggatttgtagccagagtttttgatattatttttcatcagggaactgaagttatattcaaggttgcactcgacctactgagcagccaagagacacttataatggaatgtgagagctttgaaaatattgttgagtttctttagaacacgctacctgatatgaatacctctgaaatggaaaagattattacacaaggtttttgagatggatatttctatgcagttgcatgcctatgatgtggaatatcatgtgctacacgatgagcttcatgaatcttcatagtcctgtgaggatagtgaaactttggagaagctggagagggc

SEQ ID NO: 240936 - DNA, 1547 bp, Homo Sapiens
ttggctcccggcggcgacgactacgaccactaggagagcggacggaggcggcgcctgaagcggcggcggagcccatgccccgggacggcgggcggacccggagagacaaattcggggcccggggcatgtccccggggcccccgtgaggaggcggcggcggctatggagatcgcgccgcaggaggcgccgcccgtgccgggcgcggacggcgacattgaagaggccccagctgaggccgggtctcccagccccgcgtcgccccccgccgatgggcgcctcaaggctgcagccaagcgcgtcacattcccgtccgacgaggatatcgtgtctggagcagtggagcccaaagacccctggagacatgcccagaatgtgaccgtggacgaggtcatcggcgcctacaagcaggcctgccagaagctgaactgcaggcagatccccaagctcctcaggcagctgcaggaattcacagacctcgggcaccgcctcgactgtctggacctgaaaggtgagaagcttgactacaagacctgtgaggccctggaagaggtcttcaagaggctgcagttcaaggtcgtggacctggagcagacaaacctggatgaagatggtgcctcggccctcttcgacatgatcgagtactacgagtcggccacccacctcaacatctccttcaacaagcacatcggcacccggggctggcaggcggccgcccacatgatgcgcaagacgagctgcctgcagtatctggacgcccgcaacacgcccctgctggaccactcggcgcccttcgtggcccgtgccctgcgcatccgcagcagcctggcagtgctgcacttggagaacgccagcctgtcggggcggcccctcatgctgctcgccacggccctgaagatgaacatgaacctgcgggagctgtacctggcggacaacaagctcaacggcctgcaggactcggcccagctgggtaacctgctcaagttcaactgctccctgcagatcctggacctccggaacaaccacgtgctagactcgggtctggcctacatctgcgagggcctcaaggagcagaggaaggggctggtgaccctggtgctgtggaacaaccagctcacgcacacaggcatggccttcctgggcatgacactgccgcacactcagagcctggagacgctgaacctgggccacaaccccatcgggaacgagggtgtgcggcacctcaagaacgggctcatcagcaaccgcagcgtgctgcgcctcgggctggcctccaccaagctcacgtgcgagggcgcggtggcggtggcggagttcatcgctgagagcccccgcctcctgagactggaccttcgggagaacgagatcaagacaggcgggctcatggcactgtcgttggccctcaaggtgaaccactcactgctgcgcctggacctcgaccgtgaacccaagaaagaggcggtgaagagcttcatcgagacgcagaatgcgctgctggccgagatccagaacagctgcaagcgcaacttggtgctggcgcgggagaggga

SEQ ID NO: 240937 - DNA, 1688 bp, Homo Sapiens
  misc_feature (1067)..(1111): n is a, c, g, or t
gaagattctagcttttaaatggtttaatttgaaaaccaccaatcacaggggtagatgggaaaagaattaaacaaaaaggaattactaaatataagatgttctttaaaagtaaataacaagaaagaaaaacaaatatttcaaaatacatcttcaactattttgattatgtatcttactagcaagaatacccattactgcaaacaatcacattgtgcgagcgaattcagactagctatctctgctggttggaacaagacaaacgggtaagattagtatcctgtaaactctctgactttgctcagaggaaaataatgtcctcaggcccaggttagtcagttaatttagcagaggaagagtactaagcagactgcatcagagtctgagaaactttttgtacctactgctgggttgtctttctacatttcttcctccttcaaaaagcattatcattacatgagagaacaacacaatatagttaaaataagaaatggtaatggtattttttcttctcctgatcaaaacaagacactcttgcgtagaacacatctaaagagaaacaaaatcggttttttatagactcattttaaaactgtttccccattacatattgattactacaactgacttctacacgtgtgtaagaatttgacggttaaggtaaaaatcaacaatgatccaacttatcagtaagattacagaatgtatataacaaaagaaaagtatgtttaatagggtaattatatattaaatctatctcaaattaaatgcttctaaactatagtacataaaatgaatgcaacatatgttaatttcaatgcaaatatataacaaccttattttcaactgacaaggaatgtacaaataccttatatatttaatttatcattactatacttacccttaccttaagatacctaaatgaacaggaaaaaggccttctttatcatttaagttataaaccatactaataatattagtttccttaatgtttaaatctaaaaattgttttgggtcagacaaatattttaatgattccataatatgtaaaaaaaataatacttcctccnnnnnnnnnnnnnnnnnnnnnnnnnnnnnnnnnnnnnnnnnnnnntaggtgttagatgataacggcgattacagagggcatgaggtagaagataaactaaacagaaagcagaaaactaatttttctacacttaaaaaaattaattttagaaaagcaaaacgaaaaacccagtccttgaactttagttctaaaaaagcttgacattccttatattaaaatagtacttttaaattctatagcaaacttcccaaaagtatggttattaaaattaaaacactgctattctgtattatgtgaaagatctgaaataaagggaaaaacaatattctgcatttatagaattcctttccctgaggtcctcatagcactaaaaagcaaaattatatcttttgtggagaagagaggcaggtacatggagagaagtaagggtgttgagagaaagaatttcgataggagacaaaaattcaaacaaacccaaactttatacagcaatctttaatagtacttagcgccttacaatcctcacaacaaattacttccatgttgtattagacttgtagcttttaaaaatacctatttaagttatcatcttagttaagatacccactatatcttttgccaa

SEQ ID NO: 240938 - DNA, 1734 bp, Homo Sapiens
  misc_feature (386)..(394): n is a, c, g, or t
  misc_feature (650)..(680): n is a, c, g, or t
  misc_feature (1654)..(1675): n is a, c, g, or t
ggagaccccctccaaaccttggaatattattatagtaatgttaaagcatttttctcccaattaggagaaagttaagactctttgctttacatttttaacacctttctaaacacttgcaaataactgtctagtctttcatgatatacattttttggaggaaagccaaatcagaatgtaaaatccaacaataaaggaaagcaaacatactataataggattacataatctctgaagtaatgttttaggtacccaatatttgaaagtgaaagtaacatgagggttacatagcttactatttttaatccaaccacttttcttttttaatagaaaactacacttgagtataaaaatacgtcagcagattatacaaccaacaaaaatcacgnnnnnnnnnttaggattaaattaccaatgaactagaaataagagttgacctaatcttcaaacttttaggagaacagagaggtaaacatccatagacaatgacagaagggagacggacaaagaaagaggctgagggagatgtaacaaaatttaagagataacagagagacctttgttacacagaaagggaagggagttatgttcaaaatcagaatgcttgactgtaaaaaatttttaaatcacagtttcagaatttgaactacttnnnnnnnnnnnnnnnnnnnnnnnnnnnnnnnccagatcccttcccttgttacagtgtagtcattttttaaaaaatcaatttccagtaaattaaagtaagtaaaatcttgataagtgcatagtaggggattcagtgacctccacctgctcaagaagcttttcttactatctgtcacttgaggtaatttgaaggcccaattcactgcaaactcatttatttgtacctatatgaacttatatgctgtactttatgtgacttagcagagggcctttaacttttatattttattcacaataaaaaggacatcttagaaaactagtcattcatgtaccactctctgtatgggataaaggttaatacacaacacatattttatacagaaaatatacaaatgcagtgttatgggaggaaagccccataaacagaattatgaacttattcctaagagtgcaggtgaaaaatatcctcaaacttacagtacagcaagataaaactaaaaagctagaaatagaatattacataaaaaccttatggaaattccaaagtttaaggtttctgcaataaatgtaaaaatattcaaggtgtcattatttggcctagtaatacactatgataaaaagaaacactagcatatcacagcttcttggtcatatgccatttgctttgtataaccagcagctcattttttttaaaaagctgtcatatcctaacacacccattgcaagtaatacacaaccatgatatgaaaccatttgagattatgctttggagaatagcaatgtgatatgactgttcagttttgctttgttcaaggagaattaattacctgctttttcacattattccatcaattttcaatctctattttctaacagattagaaaatacagattccaagactagaacaatactagtctggagatgaaaatccaaatgaatactgtattttattgaccaaaaaattatctaataaattcttgtttgatacagaacttattcttccttnnnnnnnnnnnnnnnnnnnnnnttataattcaattcacaggtaaagtttcactctatattttacctgcataatcttgccaa

SEQ ID NO: 240939 - DNA, 3984 bp, Homo Sapiens
  misc_feature (2700)..(2994): n is a, c, g, or t
  misc_feature (3432)..(3440): n is a, c, g, or t
gaaggaaaagatattttttcaggctgagtaatgtagtaaagcactgattaaagagcgaagacaaattattaggggaaaaagtttcatgaaaatatgaaatcaacaagagggctgaagaaatttgtggatattctatatagactttccaaaatataagtaattttgaaaaaagatcaatgatttgctttgctggacaatattttcatattttgttctttgaaactataactgataccccttgaagaatatttttttctgggattgagaattaaacccagcagataaaacctatgctaactttatccaatgaaatattcgttcacttcatgcagttttgtttgcttgttaatccagtgttactagaacatccacctttaaagaactgggcacattttctaacagccaacatttcccatttatgcttacgaagtaacaaataaaccatttcccatttattcatcttaatgatggaattttttagagcctgatgtttcagaataaagtttcaatctttaaaaacatcaagtaggagaatatagatgggcttcccatatccccataaggatatgtatccaagtttattttgaataatttgcagttgtggtaggtagctatgaaaaaaatttacttggattcgatacaaaatacatgctactctttgaaaatgcatagtttataattttatacattcattcactaacattaaagacttctgttaagcaagtacttacctctgaatggtggtaaaattatatttcaaaagatctctaaacattggacagcattgccacctagcttttgagttagcactcaatgacatgtgaatgcctgtcatttccacacgagtgtcacacaggaaggactgctgttttctcttcattctttctcctttacttgtttagcaggcactaaaaagcaatgttttctactgattgcatttccactaaataccccattttaaatatttaataatttcattttaatattttagatttggtgtagaaaacaattcagaagatggcttaattttttaaagtttccttaaacattgtcatggactaagggcaacagaggttttgtgattactgttgttctctctctccagtcttctcatttgaaaaaatgaccgtaggccactcgcagttgcatctgatgatagtcatgaaccctttgggacctagcgattttttcttatcctgagttcttcttctaagtatataggattttgatacgcaaaacactttggaaactattctagtgtctggttattccagaaagcctatgtttaaatggctgatcactgtccaaccattaattacaaaaataggaattttagggtgtgttgtaggaaaatattgattcagggattttttttaaaaaaaacatgtatgatccacattcctgggttagtttacacccaggacattttcagttatcgaagtcatgggactagtatgttttggagattttttagttcttccctaaaaagctaagtcttttctaaagctttctaccaatgaccaaggaggttccccgaacagtcaggagactgtgaaaggaggggctttgctatcatcacaggtgttggtcacatcacagccatcgatttccaataagcagagtatggaaaaaaggtttaaaaagtaaaacaagggtttgtaatctgcaaagttatgtattgctcctcaaccttttttgggaaagtatgggtagtttatcatgaaactccgctgtatatccctgaggggtatattcacactctggcagccgctcttcctctttcctctcggtcccagccatctgtgcccaaaacataggaagggggctccagtggagtgagggacaagtgcttaacaacatgagtggactgaagtccttttctctttccataaatacgaaattataacaattatatgctgcaggagccacttccttttcacttactaaaggccaattctgctttcatgctctgtaattgtgggcagaagtcagagcctggagtaattaaacatggagccctcttgctctgtcctcattgtcccctcctaaggtggaacccagctcacattcctggttctgatcactctattagcctcgcacgtggagaggaccggtagggttggtgacttgcacggcgggctttgaggcacagtgaaaggattagctatctgccttgtcattctttacagtgagtctgaacaaatcttttgtgatgagcgtggctggctgtgtgactaagccgctctcctcatgatcacctaaaaccgttcagacagatggaatatttcccccgaagggagggaatagccacactgactgagccttacatcccagttatagtaatatttatccccttgcaccttaatttaagagagagaaagcagtagcacagaaacaagaatgtcccatcaggggctttggaactgaaaaaacattaacaacagcctggcctctagctcaggcagatgagggcaaaggggagggtaatctttcaatggcaaattcactggggcttgccaagatgggggaaagcaagactggtagctagaatggggactgttctcttttaaagctgtttcttgagtgctggttttcctcttaagtcaaggatgtagagagaattcagaagaaatagatgagcacctttgtttttttctgtttaaaggaaatttccttccttaatggtagtctcaccccagnnnnnnnnnnnnnnnnnnnnnnnnnnnnnnnnnnnnnnnnnnnnnnnnnnnnnnnnnnnnnnnnnnnnnnnnnnnnnnnnnnnnnnnnnnnnnnnnnnnnnnnnnnnnnnnnnnnnnnnnnnnnnnnnnnnnnnnnnnnnnnnnnnnnnnnnnnnnnnnnnnnnnnnnnnnnnnnnnnnnnnnnnnnnnnnnnnnnnnnnnnnnnnnnnnnnnnnnnnnnnnnnnnnnnnnnnnnnnnnnnnnnnnnnnnnnnnnnnnnnnnnnnnnnnnnnnnnnnnnnnnnnnnnnnnnnnnnctgaattaaaaatttagggaaaaggacctagcaagataatgtaatagttaattagacttgagaattgatttttagtattttcatgatataaataaatcaaggggatcttctctttagaagttggtagttattaactatgtggtggtgcctaacatgaaagaacattttaaaaaacaaggactacagtttaatcaccatctctgcctcctttcaaaatctgtggttacctgctttcggaaccatagctttcttctttctttcttcatgggtctttctacatcctgttattgtcatggcaacggcgctatgattcttttccatcagaagaggaaaggactaaactgtttcattctccaacactgtattactttagaaacataataataaatattattcatcaaaaaccctgttcatgatgtaggagtctggccaaaaagnnnnnnnnngaggctccttctagctccacaacccaactgcctgtgaatgactttacactcaagatgttacacctagtaaattaacgggagaaaggtaagatgaaatccattcatatattggactgccttttaatcattcacaatgaaagaaatctcaggcattgccaatgtcatttaaattgcattcatatttaaacatgacttaaccatattaccaggcgtttccaactctgagtttacagtatgttttgatttgatcattacagattataaatttgagctggttttaaaatttctggcattgacttaagtttatatacatagcaaatgttgtatgctagcagcaaaataaattttccccaaagagtcaaaacttttactcagaacatacatttagctaataaactcctataattaactaccaaattggctgaaatttagggattagggatctgctacagtaaagggattcatctggggataaatcagtttgcacttggcaacatgactgagtaacgggtgggctctttatgtctatgctgaaaggccccaa

SEQ ID NO: 240940 - DNA, 967 bp, Homo Sapiens
tttaaaaaacgaacacacaaagtccaaaacaatggaaagcaaaagaaattcaaaaaattgttttagagaacagcatttagaaaaacaacatcatttaaacattcaacaaatctatgtacaatgtgccagaagctggcaaggagcatggctgtggagcagtcaggtgaaaggtttatcaacctgaacctccacaggctgtatttacagtcagacaggtattcagaaatgtgtatcagaacatctggatttggctaaaaatcatataaaaagacacaatgccccttccccaataacttctaattaggtagcaaacaatccagtataaccttaagtaccaggtttagaaatgcgtgtttttttccccccgtattttacaaacagttgagaaactttctcaatggacactgaagagaaccagaatgacagaaatggagttctttatttccacattgtcagatgaaggaaaagatattttttcaggctgagtaatgtagtaaagcactgattaaagagcgaagacaaattattaggggaaaaagtttcatgaaaatatgaaatcaacaagagggctgaagaaatttgtggatattctatatagactttccaaaatataagtaattttgaaaaaagatcaatgatttgctttgctggacaatattttcatattttgttctttgaaactataactgataccccttgaagaatatttttttctgggattgagaattaaacccagcagataaaacctatgctaacttttccaatgaaatattcgttcacttcatgcagttttgtttgcttgttaatccagtgttactagaacatccacctttaaagaactgggcacattttctaacagccaacatttcccatttatgcttacgaagtaacaaataaaccatttcccatttattcatcttaatgatggaattttttagagcctgatgccaacttttttgtacaaagt

SEQ ID NO: 240941 - DNA, 1603 bp, Homo Sapiens
  misc_feature (143)..(157): n is a, c, g, or t
gacctccaaaagaagtgtcagatgagtctctctctccccttgtccccaaagtttttgtggggctctcccttttgtttccctctagaatggaaactgtgttgcccctagctacctgtatatgagaaaatgtagttgttcctggnnnnnnnnnnnnnnngacttggattttaccaagtttacttaaactggtatctttccaatcatctaggctggatattgcccatatctagtaggctatactcaccttagttctttgcaacatatgaggcacaacgtacatatagtacaccaagcatgtggtaagttagaaatgacaggaaagtgctccccaaagcagtgggagaggcaatgtggtctctcacatccattcaatgtgcattctttttcctggaatatctgttacccacccttctcaggaacaagaaccaggacgacggggagtatgtgtcaaataagtacaatcatcactgcactggtgcctgtaatcacccggtgcacatagtgagaaacagacattctggaaaggatttttgattctcccactaactgtccactggactggtcactagctctggatggtgctccaacaatggtcacttctcgcggagaacacaaacaccagcatcacagcgctgggttcccatggatgtcacgacttcccagctgtcgatgatagggtcataacattcaatgctacttagcagggaattaccatcatatcctgcaattgcatagagtctcccccgaagcactgtggcccctacatagcatcgtggagtggtcatactggtgacagttgtccaggaatcagtgcgaatgttgtatgcttcaacggaagaaaggtgggctgtaccatcaaatcccccccaccacataaatatggtcattcagcagggctactcctgcacctggggaaaatgaatgcattagcaaatgtatggtactaagcctagaatctgaattatagaaataaactacggtcactaatgactagctgagttctacagtagatgagggatatggaatgggcccacacgggcctagaataatctagtccagcacaagttattccatctataaaccctttggcttggacttgaaatgataaaagataaataataaaaatggttctcttctttactttcattaactcagagcccaacccttctaattaggagaaagggaggaagtgaaaaaaaggtggcaataaaggtagatggagggaaaggagttgtgattatggttctgaagcaatttttacccagagtaagtaaactagaacagcacagtgctctctccttttctatatcccagcctgctccacttcaaaaagctcttggtgaaggtaagtagctactcttttgtccttatgcattagagactttatttaacagatatttattaagcatgtactacacaggcaaaattgtactagatattctaaaacgtagggagagaacaaagacatgaaggcttttgctttcaaatttataatctagttgtaagtatcaactgtctttatcctagtatttagagaaaacagagacaaggaggagagcagaatctcatttttacattaatctacggtttgtcccatgcccaa

SEQ ID NO: 240942 - DNA, 1922 bp, Homo Sapiens
  misc_feature (1764)..(1786): n is a, c, g, or t
ttggcgcccttgctcttcccagtttctccgtcagcctgcgggtcccggctggcggctgcttccggtaggagagcggtgtagagcgagcaggtctcagctcctcgtcatgtcatacggtcccttagacatgtaccggaacccggggccctcggggccccagctccgggacttcagcagcatcatccagacgtgcagcggcaacatccagcggatcagccaagccactgctcagataaagaatttgatgagccagctaggaactaagcaggactcaagcaagctacaggaaaatctgcaacagttacaacactccacaaatcagctcgccaaggaaacaaatgaattgctgaaagaattagggtccttgccccttcccttatctacttcagaacagcgccagcagagacttcagaaggaacgcctcatgaatgacttctctgcagccttaaacaatttccaggctgtgcagagaagggtatctgaaaaggaaaaggagagtattgccagagcaagagctggatctcgtctttctgcagaagagaggcaaagagaggagcagctggtctcatttgacagccatgaggagtggaaccagatgcagagccaggaggatgaggtggccatcactgagcaggatttggaacttattaaagaaagagaaacggcaattcggcagctggaggctgacattttggatgtcaatcagatatttaaagatttggccatgatgatccatgaccagggtgatctgattgatagcatagaagccaatgtggaaagctcagaggtgcacgtcgaaagagccactgaacagttacagcgagctgcttactatcagaaaaaatctcgcaagaagatgtgtatcctggtgcttgtcctgtcagtgattattctaatcttgggacttattatctggctagtttataaaacgaagtgattgcctccgatcgttctcccgctgagctgttttcaagggcaagtgcttgttgaagtcttgccagaacaaactgatcacaagaagacagcatatatcagaacgtcctgtaatcatttagttagaaactaactactaactagtctttggaattcgtgacctatggagacagtaattatcaatttattgattctattgatttctcaaattaggaattaacttatgtggattttgcttcctcttgtattctgattgcccttcatcccaagtgtttactgaaaattccattctagatattcttgttttgacaaatgacactacagtctcgtaatattgtcttttatgtatatacaaaatttacctttttactagcatctgagatagagttactttctggtacccagtatattggagtctgtcagaaactctataataggccaccagtttttattatttaacatttttatttgaatttctaagaagcctattctctatctattttgaaagattttggcactatatttaattggaaggtaaaatattgtacatgtgatccagagtaaatgagaagtctctatctgagctggtcagttactggagtacatgttactaatctgggtttaaagtttacttcattatctgctagtgtcatccacagcagttcatcctcatccacactaagccatcctgttagcttttaaaggaagttaatttaattaacattaatatactctatgggctccctctcccacctgtctgcatagaaaggcagaattagacatagcatgctttggaaaagcaaataggaattgttgggaatgatttaatcnnnnnnnnnnnnnnnnnnnnnnncacttgtggttctacattcctggtgaatgatgaatgttgctgtcaaagggctgcccctaccttataagggttgctgggcatttgaaggcaggagatttttaaagatagattgagttggtttaaattattcctgtaa

SEQ ID NO: 240943 - DNA, 1556 bp, Homo Sapiens
  misc_feature (286)..(576): n is a, c, g, or t
  misc_feature (579)..(617): n is a, c, g, or t
  misc_feature (743)..(760): n is a, c, g, or t
ttgggttgtctgctccctactgcacacacggttggaaaagaaaagggaagatggagccaccattttgaacatgcctagtcccaggtggccttttcctattggcacaactgctggcattcacccatgcaagcttccagcttgcttgtacatgtgtgcagctccattttacaggctgctctttgttagaaacaagatgatttgggggctgcttttcattaaaaggaaaaccttactgagaacttcctcaccctcactatctgcctaaataatttctctttaactcctnnnnnnnnnnnnnnnnnnnnnnnnnnnnnnnnnnnnnnnnnnnnnnnnnnnnnnnnnnnnnnnnnnnnnnnnnnnnnnnnnnnnnnnnnnnnnnnnnnnnnnnnnnnnnnnnnnnnnnnnnnnnnnnnnnnnnnnnnnnnnnnnnnnnnnnnnnnnnnnnnnnnnnnnnnnnnnnnnnnnnnnnnnnnnnnnnnnnnnnnnnnnnnnnnnnnnnnnnnnnnnnnnnnnnnnnnnnnnnnnnnnnnnnnnnnnnnnnnnnnnnnnnnnnnnnnnnnnnnnnnnnnnnnnnnntcnnnnnnnnnnnnnnnnnnnnnnnnnnnnnnnnnnnnnnncttcccatccatgagtgtgggatgtgtttccatttgtttgtgtcatctatgatttctttcagcagtgttttgtagttttccttgtagcagtctttcacctccttggttaggtatattcctgagtannnnnnnnnnnnnnnnnngcagctgttgtaaaaggggttgagttcttgatttgaatctcagcttggtcattgttggtgtatagcagtgctactgtttgtgtacattgattttgtatcctgaaactctactgaattcattcatcagacctaggagctatttggatgagtctttagggttttctaggtgtacaatcatatcatcagtgaacactaacagtttgacttcctctttactggtttggatacccttcatttctttctcttgtctgatggctgtggctaggacttccagtactatgttgaatacaagtgataagagtgggcattcttgtcttattgcagttctcagggggaatgctttaaacttttccctgttcagtgtaatgttggctgtgggtttgtcatagatggcttttattacattgaagtatgtctcttgtataccgattttgttgagggctttaatcataaagggatgtgggattttgtgaaatgcttctgcatctcctgtgatttttgtttttaattctgtttctgtgatatatcacatttgttgacttgcatatgttaagccatccctgcattcctagtatgaaacccacttgatcacatcatggcaaatttcaagctaccaacatgaggtcaccgagcacagagttggaagacgggtacaaaattagctctccagaactcgtatcaacagactccaacccatggctgccatttctattaaagagacgtcgctgcaggtaatctgtattttctataactagtgactttacagttaaacattccccctgcctctgctcttttg

SEQ ID NO: 240944 - DNA, 978 bp, Homo Sapiens
ggcagtcaactcaatggtgcaaaagcacaggacagcgacaaggcattcacactacacagacatgtgatctcttactgacagcaggaagggaagagagatggagatccagggtgggaaagcgacaacatgcatcacaggagccatgtgagatgcggtgaggaccgctggtacgcagcgtcccttgccaaaggaatgccctcacagccatccgagaatgacaggcacgaaacatgaggaccttcctcgggtcagtcaagcatcatgctgggaggactcccacgtgtcccggtacacaggtcctggcactcatccgaccacagcttgctgtttggtccccaaaatgggcccacacccaggcgctgccaacacggcggctccgtctgagtcccttcgggtctccatcccatgggggtgcacgtctcagttttcctctaaccactgcttgagcagcctctgaaacattattttgctctcctgctgcctctctcgctggcgcttctcctctgtctcctgtggctggagtgccgcttcaggcagaggcccgggctggttggtgcctaggctgagagtcaagccactgaggccctgcaccagcgtctcccaggaggagggatgtggggccctgttactctccccagggatcccagaaagattcggcctgtggctctggcagtatcgacattcacatcggaatcgattctgacttctgtcacctaatggggagattctggcttccctcccaacagcatagggggccatgtgatcgcggtgtctcctcctcacatgccgcaggaatgctttcttcctctgaaggaactccagcctctcccaccgccgctcttccagggtcttctcctctctgtaccgctggcggagcagcccctctgggagaggcacggcctggctggggccaggaccggggctcaggttactgaggcccatcattaggctgttctgagccaacttttttgtacaaag

SEQ ID NO: 240945 - DNA, 1121 bp, Homo Sapiens
ttggcattacttccattcctgaacttgctgactacattaaagttttcaggccaaaaatttaacattaaactcctgattccagttgcagaaggcatgaatgaaatctggcttcgttgtgacaatgaaaaacagtatgcacactggatggcagcctgcagattagcctccaaaggcaagaccatggcggacagttcttacaacttagaagttcagaatattctttcctttctgaagatgcagcatttaaacccagatcctcagttaataccagagcagatcacgactgatataactcctgaatgtttggtgtctccccgctatctaaaaaagtataagaacaagcagataacagcgagaatcttggaggcccatcagaatgtagctcagatgagtctaattgaagccaagatgagatttattcaagcttggcagtcactacctgaatttggcatcactcacttcattgcaaggttccaagggggcaaaaaagaagaacttattggaattgcatacaacagactgattcggatggatgccagcactggagatgcaattaaaacatggcgtttcagcaacatgaaacagtggaatgtcaactgggaaatcaaaatggtcaccgtagagtttgcagatgaagtacgattgtccttcatttgtactgaagtagattgcaaagtggttcatgaattcattggtggctacatatttctctcaacacgtgcaaaagaccaaaacgagagtttagatgaagagatgttctacaaacttaccagtggttgggtgtgaatagaaatactgtttaatgaaactccacggccataacaatatttaactttaaaagctgtttgttatatgctgcttaataaagtaagcttgaaatttatcattttatcatgaaaacttctttgccttaccagaccagttaatatgtgcactaaacaagcacgactattaatctatcatgttatgatataataaacttgaatttggcacacattccttacggccatgaattgaaaactgaaatagtgggcaaatcaggagcaaaccatcactgatttactgatttaagctagccaaactgtaagagacaagcccatctatgttaaagctatccaggg

SEQ ID NO: 240946 - DNA, 1228 bp, Homo Sapiens
ttggctagcatttgggacagcactgatggctcttgtctttgttccaggtcaccgtagagtttgcagatgaagtacgattgtccttcatttgtactgaagtagattgcaaagtggttcatgaattcattggtggctacatatttctctcaacacgtgcaaaagaccaaaacgagagtttagatgaagagatgttctacaaacttaccagtggttgggtgtgaatagaaatactgtttaatgaaactccacggccataacaatatttaactttaaaagctgtttgttatatgctgcttaataaagtaagcttgaaatttatcattttatcatgaaaacttctttgccttaccagaccagttaatatgtgcactaaacaagcacgactattaatctatcatgttatgatataataaacttgaatttggcacacattccttagggccatgaattgaaaactgaaatagtgggcaaatcaggaacaaaccatcactgatttactgatttaagctagccaaactgtaagaaacaagccatctattttaaagctatccagggcttaacctatatgaactctatttatcatgtctaatgcatgtgatttaatgtatgtttaatttgatatcatgttttaaaatatcctacttctggtagccatttaattcctccccctacccccaaataaatcaggcatgcaggaggcctgatatttagtaatgtcattgtgtttgaccttgaaggaaaatgctattagtccgtcgtgcttgatttgtttttgtccttgaataagcatgttatgtatattgtctcgtgtttttatttttacaccatattgtattacacttttagtattcaccagcataatcactgtctgcctaaaatatgcaactctttgcattacaatatgaagtaaagttctatgaagtatgcattttgtgtaactaatgtaaaaacacaaattttataaaattgtacagttttttaaaaactactcacaactagcagatggcttaaatgtagcaatctctgcgttaattaaatgcctttaagagatataattaacgtgcagttttaatatctactaaattaagaatgacttcattatgatcatgatttgccacaatgtccttaactctaatgcctggactggccatgttctagtctgttgcgctgttacaatctgtattggtgctagtcagaaaattcctagctcaataacccaaaagggtgc

SEQ ID NO: 240947 - DNA, 2135 bp, Homo Sapiens
gaagttcaaaactaggttttaaagacacttttctgtacttaagaaaaagtgcaaagatagaaaatgaaatgtaaggtgttttgcaagaaatgctccctcgagaatggtgtttggatgtgggtggggggaaaacgatttttgttctccattgtaatctgacacctacgaatgaccttgtcttcaatgtccacaacactagtaagcatgtaataatcacggacatcgcaagattaaaaattaagtagcaaattccactaaaacacttgtattcattctatacaatcgaatggaaatccgtgagtgctactgaaaaaggtgttcacatgcacatgtccaatatgtgcattccactgaaggctaaaagcttaaaattctatttccagtgtttatgaatagcttcaatatctacattcatagccagcattctgcttgagttacctcttactttaatacttcacaaatgagtaagtacgtcttgggagattaggaaggtacctgttgtcaataactttctcttatgcttagaatgtgctgcaattgtttttaaactatttaaaatgaacacccctataataatgaaacactttatgccaagaagaaaattgatttgtttttagccaatcaagactaccctgcagatctgaaaactgtagattacatccttaggaaaggagaaaaggaggctcacaaatataaaggaatcctgacttttacacggacaaatttttaaaaagataaaatgtattacataagcgccataaacagtgaaatctgcttatattaaaaaaaataagtgaagctttgtttggacattatttccttgcaagagcagtacatatccttagtaaacaactaccatatttacaagttaatttccttgatacttagataggattgaaagccagaagaaatcatggaagagtgagctttgaaataatctttacagctaagttggtaacagtgaaggtacccagacaattcctaaagcagacttgtttattttgtagagtatttgactacgtctgggtagctagcttgctttgataaaggccaaggacaagttcaatccctattttggcctgttaaagcttttcccagaagaacaaatatctgctccatagtcattctaatcctaaccccagctagtctcaaaaaagaaattaggcaagaagactggggttatcatgaagttactcttactactaagaaaccaacataaagtgcatgtccatagatagcgagtcagcagtctcattttcatatatgggcagcacaattaaaatttgaatttcaaataacccaacatgactttcaacaaaggataaaaatcccttaatcttcaactggtctttaaatttgagatgttaggactgtgttagagatagtaatgaaatatgatcaagtgtgcactggtaccttaaatgacaaatctcaaaaacaacacaaattcgagactttcctattaacacacacatgtgtaccaactgcaattcatatgctaaaagtggttttatagtctctttcctccattttttcatttttgaggagcagacttgtaaatttaacttgtgctaggtagtagtggtttgtttttcttaaaccaaaactctgccaaacttgctgatcttctgcttcatctactcaggtagaataccaggtcaagctgctgctgtggctgctctcaccatatgaaaccagtttgtgtctgcattattactgtcttcaggaaaactttaaattcttcagttttctttactcctcccatatttcacttcctgcctaaatccaagttaaattatacaatttccactggtcttcaacacggtttaattctgcactgtcctttcctttgcatgtcacagtagctgttcacacattaaatattatagatatgttctgctcttgacatctacacacttacaaaagcagctttgtactttgtttggtgtgtttgttactatgttggctcacaaaaagcagttttctcagttctaagcatggtactttacaatttttaatgcattcatacaacagtgcattggaaaagtactgagcctctacaaaatagctttacatttttaaacaaatgaatgtgattttttttcacttacacaagcataggctttttaatccaa

SEQ ID NO: 240948 - DNA, 1151 bp, Homo Sapiens
ttggcctttttaatatccttttggggagagcagattggccacaaggttaagaagatatgtgattgctaccactgccacgtgtacccctatccaaacacagccgaggagcggagggagatccaggaggggctgaacacccgcatccaggatctctacactgtactgcacaaaaccgaggactatttgaggcaagtgctatgtaaagccgccgagtctgtctacagccgtgtgatccaggtgaagaaaatgaaggccatctatcacatgctgaacatgtgcagctttgacgtgaccaacaagtgcctcattgctgaggtctggtgtcccgaggcggatctgcaggacctgcgccgggcactggaggagggctcgagagagagtggtgctacaatcccctcattcatgaatataatccccacaaaagaaacaccccccactcggatccgcaccaacaaattcaccgagggatttcagaacatcgtggatgcttatggagtcggaagctacagagaagtcaatccagctctctttaccatcatcaccttcccgtttttatttgctgtgatgtttggagacttcggacatggctttgtgatgtttttatttgccctcttgttggtgttaaatgaaaatcatcccagactaaatcagtcacaagagatcatgaggatgttttttaatggccggtacatcctcctgctgatggggctgttctcagtgtacactggcctcatctacaacgactgcttttcaaagtcagtcaacctgttcggctctgggtggaacgtgtcggccatgtacagctccagccacccacccgcacagcataagaagatggtgctttggaatgacagcgtcgttagacacaacagcattttgcagctggatccaagcattcctggagtgttccgaggcccttatccccttggcattgatcctatttggaacttggccacaaatcgcctcacttttctaaactctttcaaaatgaaaatgtccgtgattttaggaatcattcatatgacttttggagtcattctgggaatatttaaccacttgcacttcacgaagaatttcaacatttacctgggtttccatcccggaacttctcttcatgctctgtatctttggataccttatatttatgattt

SEQ ID NO: 240949 - DNA, 1053 bp, Homo Sapiens
  misc_feature (372)..(482): n is a, c, g, or t
tgggcctggggaggtggaggaagttgagagaaatagggtgggctggagctggatgagggaggagaggggtatctggcgagtccccgtcttcctacgaagggcgtgtttttcaggtttcatcagtatgacccagagcactggggtgtgggcgcgagatcgcgctcaccttcccagagctccagggaccggggagggttgaggtcatcggcttgagagaaggtacatctgcatcctctggggtaaaggcagaatattggggtctatttcagaaatccgaagaacccaattgcttgatctggcttcaagcctgggcaacgtggcgagatcccctctccacaaaaatacaaaaattagccaggcgatgtgggacgnnnnnnnnnnnnnnnnnnnnnnnnnnnnnnnnnnnnnnnnnnnnnnnnnnnnnnnnnnnnnnnnnnnnnnnnnnnnnnnnnnnnnnnnnnnnnnnnnnnnnnnnnnnnnnngagtgagaccctgcctcaaaaataatcataaaaactgagtttggggaggttcattatgattgacgcacttgagttactgatttgggtcgagggttcagtgaagctttggtttacatcttgtgcagctaaccacgttgagcacagagcatgagacttcatcatgaggaggtaggattaaggattaggcttctggactcgtggttcgtgatgttgtcacattagaaacacatctagcatggttacaagtttagatcttaagtgacacaaaaggccccagctgtgataaagtccaaagccacattctctgagggtgccctactccctgggcagacccacccaaagtccttgctatgaagcagatcactggggctgaccttgggtgtattaagtgagttttggagtcgtggtcaccaaagtgtgagtttcacagttgaacacgatggttcagaagcagggtatagaatgaaaggcagcagataaaattgcatttctcaattgacatgggacgtgaataactttcctgtctagagagctgcctccttgaagtgtgacccaacttttttgtacaaag

SEQ ID NO: 240950 - DNA, 1041 bp, Homo Sapiens
  misc_feature (893)..(910): n is a, c, g, or t
ttggcaaccattatacacaccccgggctcctgccgccgcgccgccgccgcctcacaaaatggcggcgcccatagaggagaccgcggccgcctccccggccccattttgtgggaggcgagagatctgtcaacatggaaaacctctgctgaggatgcatccgagtttggaaaccccacttaagggatggagcctgggggatcacattaaacggaaaatgccaacgacttctaccacctctacgcgtttttagtttttcattttctcgaaggaagcgccagaagcctgtggagtaattgtaactagagggagaacggaaagctgaggtgactgctccggggacttggcgcggcgccttggtggctttggttgctcttccacgctcccggcagctgaccagaatctcttggagggtctcctgggccacctcggccgcgccagtcgtgcagtgagacttctgtagttttaaaatgccacagtccacggcccggtcggcaccgctcgcctgaatcgtgggctttgggaaccttggaggctgctgctccaggaactcgcggtcggccgggagccggggagcttcgttgctgggagcgggcggtattcgcggactccggcggccctggcgggtcgcggccgggatccgagccggggatgacgatgctgatggagctgatggggcaagagtgggaacggaggcacgtacactgaaatttaagtcatccaagttgggacttaagatagcaggttaatattgtctcaggcgagacttagaacgtcttttctggtatcccagtctgcagtgggcaaatctattgtctttatttctcatttaagggcagaatggagggatgacatatttttacttttcaagaggcggttgccacttttaagtcacnnnnnnnnnnnnnnnnnnacatacacaaacatacgatagtgtgttttcagagcaagtatcaaagctaaagacttggagtgatactagtgtttaaaagcctttttaaaaaaattaagatgtgatgagaaactggagattgacttttaaaa

SEQ ID NO: 240951 - DNA, 1248 bp, Homo Sapiens
gaaacttttagcaataggtgataaaatgaaaaccaaaatagattgaaacaagtggaaaattcatcaaggtctgatgatgcaatgtttccagccaatataagtatactttaacaacttgttctttactgtaatccaattgttaacatactgaaacaattttggggcagctcataagattgatcgtattcattagtattttttctgacagatactcaggacgttacatttacttctcagctggaaactatatgcaagtctgccagatatggcaaactgtgagtgtttggggagggggaaggctataaagctgttaaattgcctacagttctgatacagcacagaacatctggtctggagagcttgaggaaacaccattaaataggccgaaaagaaaaaaatctttgtgctaagaaacagtccaggttttgtacgctgttgtcagaggtataaaaaaaacttggcacaccgtattatgattggtcagtcacgtacagagccagacactctagcaatcggggtttgttagacatctggtctagttccaccagccccttcaatgagggaggggagatggaggaatagaaatgaagcagctactccagcattccaaaatgtacacatcagggctctgatagcaagaaaaataaacagaaagaaggaaaccctgtctagactgagctgctgctgaggctgctgcagaaacagggttggtatttacttgagaaggcctgccagactgctcttagaggcaaaaaggacagaaagcaaaaatagtagtaataatattaagggaaaaaagaataataaacctcctactaaccataaatgagaacgacagattcttcaatggcatgctggtaactaaactgagagtccaggagtgcccgggtaacgaatgagccatagtatgtggactgataccagcccacgtgaagatgatcaatgtttacatggcgaaggctccgcatcatttccatctgatattggacttcatcaaagtcagcatcatcctctgtgtgctgagggaaaggaaagcagttggtaatttcaagccgatcttctacaaccagacccaaaagcactccttgaacaacttcagttccttgtccttcttcttgataatgtttgattatctttaataccacaaggccatctatctgcacttgcttcacggctgaatctcccgagccgcctttgcctttgcctttccctgctgcgccggcggtggagctggaagaggtggcccaa

SEQ ID NO: 240952 - DNA, 1242 bp, Homo Sapiens
ttggcaatgtttatatcaaaaactttggggaagaggtggatgatgagagtctgaaagagctattcagtcagtttggtaagaccctaagtgtcaaggtgatgagagatcccaatgggaaatccaaaggctttggctttgtgagttacgaaaaacacgaggatgccaataaggctgtggaagagatgaatggaaaagaaataagtggtaaaatcatatttgtaggccgtgcacaaaagaaagtagaacggcaggcagagttaaaacggaaatttgaacagttgaaacaggagagaattagtcgatatcagggggtgaatctctacattaagaacttggatgacactattgatgatgagaaattaaggaaagaattttctccttttggatcaattaccagtgctaaggtaatgctggaggatggaagaagcaaagggtttggcttcgtctgcttctcatctcctgaagaagcaaccaaagcagtcactgagatgaatggacgcattgtgggctccaagccactatatgttgccctggcccagaggaaggaagagagaaaggctcacctgaccaaccagtatatgcaacgagtggctggaatgagagcacttcctgccaatgccatcttaaatcagttccagcctgcagcgggtggctactttgtgccagcagtcccacaggctcagggaaggcctccatattatacacctaaccagttagcacagatgaggcctaatccacgctggcagcaaggtgggagacctcaaggcttccaaggaatgccaagtgctatacgccagtctgggcctcgtccaactcttcgccatctggctccaactgggtctgagtgcccggaccgcttggctatggactttggtggggctggtgccgcccagcaagggctgactgacagctgccagtctggaggcgttcccacagctgtgcagaacttagcgccacgcgctgctgttgctgctgctgctccccgggctgttgccccctacaaatacgcctccagtgtccgcagccctcatcctgccatacagcctctgcaggcaccccagcctgcggtccatgtgcaggggcaggagccactgactgcctccatgctggctgcagcacccctccaggaacagaaagcagatgctgggagaacgcttgttcccactcatcccaacaatgcattcaaatctggctgggaagatcacgggaatgctgctggagatagacaactctgagctgctg

SEQ ID NO: 240953 - DNA, 1110 bp, Homo Sapiens
  misc_feature (924)..(932): n is a, c, g, or t
tgggctttaggggatgaggcagtataacaaatttaacttccacttagaaaagacaaatcttttccaaaaaacatttacccagaatacaaaaaaaggacagtatagtggtcagattcccagtgacaataaacaaatcctcctctcttcaatgtttactgtaaagccagttaactgccatttatttgaaagaagaaaagaaaaacaagcccccagattggtaaacacattggcaagttgctagactccaagctggctacccttgtcaaatctgttcgagttttttcaaaatacttgggctttttaacgcacccagcctgctgggcacagttaagtaaaaggcatttactataatctaagaattccctgctattatcatttttaaatgttttcacatttttaaaactgccttacccttttggatgtatttggattccataaaggtgagtacaatcaacgagaaactgaagtgggagattctacgactgcccagaggcagcagcatgcatggggctggttgtgggtgctgtgtgcagtccagaggaatcatgggagaaaggaagtcaagtccttaaacaccctacagaaacaaacactgcaatccagtatggcttattcggatgcatttaccatgaagctaccagaagaaattcaacctacgaggctactcttaaatgtaacaggatcggctatgttgacgatgtacccctcccatggccctcccccctatcccaacacagtctaccatttccagatttacttcactctgaatattgctcatcaattgttactcctgctcttttcatccagaacatagtatatttaaatgaagattttacctcttacccatttagtttgtacattaaaataacttgcatttgcttctaagctagactactacaatgcatctacaaaagcttgtggggnnnnnnnnngaagagtgaagtatagtaaatccttttctaaaattaactacttcgtggttcccctgccccaaccccctttatgcatttaaaattttacaaagacttgtaaaaaagttaaatggaatttggcaccttcagaaaaatcaaaagggaaactaagattaaaatgtgcagaaagaaaatccaa

SEQ ID NO: 240954 - DNA, 1023 bp, Homo Sapiens
ttggcacccgagcacacggagtacacggagcagcggccccggccccgccaacgctgccgccgggatgctccagaccttgtatgattacttctggtgggaacgtctgtggctgcctgtgaacttgacctgggccgatctagaagaccgagatggacgtgtctacgccaaagcctcagatctctatatcacgctgcccctggccttgctcttcctcatcgttcgatacttctttgagctgtacgtggctacaccactggctgccctcttgaacataaaggagaaaactcggctgcgggcacctcccaacgccaccttggaacatttctacctgaccagtggcaagcagcccaagcaggtggaagtagagcttttgtcccggcagagcgggctctctggccgccaggtagagcgttggttccgtcgccgccgcaaccaggaccggcccagtctcctcaagaagttccgagaagccagctggagattcacattttacctgattgccttcattgccggcatggccgtcattgtggataaaccctggttctatgacatgaagaaagtttgggagggatatcccatacagagcactatcccttcccagtattggtactacatgattgaactttccttctactggtccctgctcttcagcattgcctctgatgtcaagcgaaaggatttcaaggaacagatcatccaccatgtggccaccatcattctcatcagcttttcctggtttgccaattacatccgagctgggactctaatcatggctctgcatgactcttccgattacctgctggagtcagccaagatgtttaactacgcgggatggaagaacacctgcaacaacatcttcatcgtcttcgccattgtttttatcatcacccgactggtcatcctgcccttctggatcctgcattgcaccctggtgtacccactggagctctatcctgccttctttggctattacttcttcaattccatgatgggagttctacagctgctgcatatcttctgggc

SEQ ID NO: 240955 - DNA, 909 bp, Homo Sapiens
ttggagacattggttttggttttaacctatggtttgcatgttgatgttacttttagatgctggcaagtcaaccattggaggacaaataatgtatttgactggaatggttgacaaaaggacgcttgaaaagtatgaaagagaagctaaagagaaaaacagagaaacttggtacttgtcttgggccttagacacaaatcaggaagaacgagacaagggtaaaacagtagaagtgggtcgtgcctattttgaaaccgaaaagaagcatttcacaattctagatgcccctggccacaagagttttgtcccaaatatgattggtggtgcctctcaagctgatttggctgtgctggtaatctcagccaggaaaggagagtttgaaactggatttgaaaaaggaggacagacaagagaacatgcaatgttggcaaagacagcaggtgtaaaacacctaattgtgctaattaataagatggatgatccaacagtaaattggagcaatgagagatatgaagaatgtaaggagaaactagtgccatttttgaaaaaagttggcttcaatcccaaaaaggacattcactttatgccctgctcaggacttactggagcaaatctcaaagagcagtcggatttctgtccttggtacattggattaccgtttattccatatctggataatttgccgaacttcaatagatcagttgatggaccaatcaggctgccaattgtggataagtacaaggatatgggcactgtggtcctgggaaagctggaatcagatctatttgtaaaggccagcagcttgtgatgatgccaaacaagcacaacgtggaaagttcttggaatactttccgatgatgtagagactgataccgtagccccaggtgaaaacctcaaaatcagactgaaagg

SEQ ID NO: 240956 - DNA, 2217 bp, Homo Sapiens
  misc_feature (2095)..(2128): n is a, c, g, or t
agatgctcgcttgtaaagtttatgacaactgtttggtcccaacacacaaaacagcacttgaaccacaacaaaagtgttcaaacaaagtagacaactaagaaaaacatctctttcccccaaacccaatccaaaacaaacagtgcaagatgggaaagggggttttggtgataacttttgtcatttttttaaacagataaatttaatccggtatatctttccacccagaaataaagaattacattgtcttaatgctcaaacatcattttaccacatcatttaattaagcctctggataaaaaaatagatagcaattggactggccattgtggagtacattatgaacacaatgtgcttccgaagtcttctctctcattttcagacagcaattgttaagagtcacacacacgtcccagacctaagcagcaactccagtgaatggtactcagacacactcacgggacagcacagaacttgattcttctttgtctgttgcccaaagaacctgttctttgagtctgttccaggtgacttgtaatgatacctcttacggttttaaagtccaccactctttacatgctagcagaactgaagtccaagcgtgcaaactcagccttatgaaatcttagaataaggcaactgatgttctcaacaccaattattattactttgtttaaaagctcctttaaaaaaaattgcacatttgcatttcacttcctgtaacactatgtctgtagaggaaatgccttcaggaggattcggagagtgccataatacttacagggttttttccatggtgttctgtcttgactggggccatgtgttgagaactgggagtcactggcttcatttaaaagatttggggaacaaaaaatctgacttgtaaaaatctctctatagcccttattttgtggcattttatcaaaatgctatgaaatcagagtccattttctggctttctagaagttaccaaatataaacatttccccaaaagaaaccatctaactagtggaagaccttacgccaacaggttctttctgctctatgaatgaatccgccttttttgccggacaaatacaatccattgtaaatgtcaggtttctctagaggggggtgagaggccacccgtcagcggacacctcaggcacctagagaggaaggccattccacaccagacgccacaagaaacccagagatgcttccaacagcgagaagtaacgagagtaaaatcagacacgattaaaagatgctgagctgacatacacacacataaagcttcccagctaccgataccagctttaaaattacaataacaaggttaagtggatcaaccttggccttcctatgtgtaggtagaattcctgtctcttcccagtggaaatcgtattgatcccgctgctgctgaagcacctccccactcagctctgatttgtaatttatgcacttgatgcatattttagaaaatcaggctctttccaatgctgcctctcgacacacaataatgtgtgttgtaatccaaatgctgactttaaatccatgacatcgagaccatctccttttccttaacctaacccatatcaaactggaacacagaagggaagcttcaaacatcctcaactttctagaaagctcctaaatggaaccccaaagtagaaacgtttaaaaaaatttgtgatgaagccacttttgtcaactacagacatagtttaaataaaaaacaaggcacacttacaagtcacatggaagccaggaaccttcacattccaacctgaaaatacactccgaacccctcgcctacccttctcctttggtgtgtgaacacacaggctagcgggacaggctttgcttcaaagacatgccacgcactgggttaatactgtcggaaacaccagtaagcaaaggctgagagactctattatgctacatgtaggatgacaccaccgacgtggctcaatggaagcaaaaccgcttcctgctagttgagtttttagtgctttcttcttttggaacaccattgtatttcataatagttactaaaaatttggtaaaatatattaaggattctttaacaaatgccacaagttcttcaaataattgnnnnnnnnnnnnnnnnnnnnnnnnnnnnnnnnnncttcagctcaaagctgtgttcaatggaaaagaaaaacatgatagaacacaggtaagatgaagtcaatggcttcggggggttttcaccaa

SEQ ID NO: 240957 - DNA, 1874 bp, Homo Sapiens
  misc_feature (489)..(497): n is a, c, g, or t
aagcctagactgaaactcttctatcttgtgacagggagctcaccacaatgcaaggaaacccattctttcagtgagtagctctataattgggaccgtgtgtattaaactggggctgacatcagctgaccctggttttgccttccggaatagtatgagccaaatctactccattttttcagctgagctcttcaaagatttttgagagcactttcctgtgtcctacctagtttctccgccccccaccttcatgccatcttatttcctcttattttcactaccacgaaatgctttcctgcccttagggatttaaaaaattatttcatatcgacggattgagcctaacagctaaatactcaatattgcacttaaaataaaacagactttaaaaattatgacattaagaaaccaaaagttacagcaattggatacagtctgggattatccctttgtaattagatgagcattgactaacgaaagatgtttaggggnnnnnnnnntggaacagaacacctaaggcttgccaaaactgtgtatatttgagaggggggcatgataaatctattataatgaaattcatgtgctctaagacaatgactgaacttggtatttaagactatttaaaagtcacaagatgaattaggtcatgtttcagaaatgactctacaatctaaatttctcacaagcaagtcaggttaatgacaccagactctgctactttcaatggataaaacaagggatcgactcatatgttaaattttcttctagtggttatacatttggtactttcataagccataagtaagagacccaggataatttaaatccaggagactttatttagcctccggaatggcccctccaaccccaaatccatgcaagaacacaaagccaaggggtaaactaaaaaaaagaagagattgttttattgtgacatttatgacattgaccccttgtgacaggaatgaccgagggtaatcttggcatattgcacatgctgtgatgaaggatgcactggtgatcctctggccactgaggctgtttcctggtcctcccagacctctatgcacgtgtgggccagtcacagaaatttcattaccacttggtgtatacatttaacaagtctttggtcttaataagcaccattacaaaccctcacattaagggcattattattctagtttataaatgtttcaatgataaaaaatagcacgattacagtatacacacacttaatttacatgtaatgtattatactcataactgagataagctactgaactaactttggttgattgaaattaatgaagtattggaactgaatacttgtaatttggtttctaagttgtgtacatattacagtgcatttataaatctagtttgaaaatttactagcaccaaataggtaccataaatggacaacctagtacttgtatttggagaagcaaagtttacaaatttgcaaaaaatagagtagtccatcaattgaaagcacattcccatacgtttgctggaaggatggcatgtcagcataaatggccaacccccaatggaaatacacgtcccagttttcaagaatcaacacatatgacaaggtagcttagctacacacatgagaagcctgagaaagtggttgttttgaactagggtagtcacctgtaccttgctttggtaatacaaagaatagtgcttatttatacaaatttacttggtgaaagattgtacctatgatatgatgattctgattgggggaaaatatagttctacctatctatatttgtttttcttttaattatttggtctctggatggtgaattaatgaagcaaaacctggattttcatcttcagccaacttttttgtacaaagttgcctttta

SEQ ID NO: 240958 - DNA, 1001 bp, Homo Sapiens
  misc_feature (95)..(118): n is a, c, g, or t
ggcaaaaagcattaagtagttctgatttttaacaaacataaacaaaattttctgcttctcctcccttcaaagcttcaaggaaatagaaacaaggnnnnnnnnnnnnnnnnnnnnnnnntcagtgacagtaaagagaagcctttgcttgaattatcaattcgaaaaacagtacttttgccattttgtatatataaacaatcttgggacattctcctgaaaactaggtgtccagtggctaagagaactcgatttcaagcaattctgaaaggaaaaccagcatgacacagaatctcaaattcccaaacaggggctctgtgggaaaaatgagggaggacctttgtatctagggttttagcaagttaaaatgaagatgacaggaaaggcttatttatcaacaaagagaagagttgggatgcttctaaaaaaaactttggtagagaaaataggaatgctaaatcctaggaagcctgtaacaatctacaattggtccaagttgaagacaaaactgtccaaacaacatttaaagtctaaagtatgttgaaaactagttgcaaagtttttgctcctgtaacaatttacaaaacacgttcattttggtctcttttgcaattttcttattgtattcatttttaatataaagagttggatttttctcttctatgatgttcctctagtacaactgatcattaattttctactttagctatttttataagtacttgttaatcagcacagttaacttggggctaagccatatacacacatcccatactcataaatgaaaatttttaggatgtgaatatacaagatattatgtaagcaactgtccccctacttgaaaacttgtttccaaataattttttttaaaaaacatccctttcagtgtaacagaacatcacctagtaaaatatcaatagctatgacaattcatttctcttttcaagggaaatcacaaaacgggtgaacaaccaagtcaagccaacttttttgtacaaagttgg

SEQ ID NO: 240959 - DNA, 1188 bp, Homo Sapiens
ttggggtaactgtaggggccttttttgctagcaagtgaaagtccagggccaggtggggctaggtgtggctgggggccaggagagcaggaacagaacagagaaatgcccttggaagaagtggagttggtggatgggtgggcatggaacaggatgggcagagaaagggtagtgtgtgagggagctgagtaggccaggtaggcgattggaagagtgagcaggacacagaggggaggggaatgttttggcaagtttaggggcacaggagatgtagtcgttccagggctgggggaggtgggagggatcacgcctataggtgtgggcacatgaaacgacctggaacttgcttcacagccctgaggaaggtggacttacataagcagctgtattccattagatgagtgggatttagggaacgcagaaggcacatccctttggaatggaagcttaggggttctcaggtgatagggagaggtggctgttaacagtgggctgcttggacacgcgtgtgcatgtgcacgcatgctggtgtgcatgctgggctgcctggcaaatctggtggtggtgggattcctcaaggagaaaacattccctcttgcaatggcaagaactaggggcagttctctgtccctcctcccaacccctcctttcccctgcccttgtcctgatgcctcaaggcttagagagaaacattgtatccagaccgagggctctgctgcttctttccagaaagtgattggcaaggctttggagagaagagcagttctgcagctggccttgttccttcatcatcccccttccttgtgcattatgcacttgctgctgcctcctgggctctgatagaagggcagggctgttgagcctggatgggtggaggcttaggtagccggacctgcctgccaccctcctctcccactcaggcacaatggtgcctaaagtgtttccaatctctgggacctctgtacccaaactgaaactctaaattggggccctaactaattttccttttgaggttgtgggcataagtgctgatctagaatacagtctgggtcccacactgtgtctcagtgagactgttgatgccttgagatgaccatttcagatctgaatcccatgggtgtgagggtgatgggtactccaggactggcctatgctgtgatatgggctttggttcggctttatcaggggcca

SEQ ID NO: 240960 - DNA, 1826 bp, Homo Sapiens
  misc_feature (439)..(451): n is a, c, g, or t
gagactcgtcaggagtattgactcttctacagtttaatttgctgcttttgtggttttctgtgatgtcatcccacatgtgtaagctggaaaaatcccacgctgtgaaatgtaacctccctgtgtgtatttccacaatggagaatgttaggcttcgtttccctcggttgctacacatctgattacatgtgtcaggaaaacaaacttaaaaaatttcaggagacaaacctttcagcggaattgcctggaacccatgaagtgaggtcatagaacctacaactataataagctgtaggaagaaaagtagcctctgggctactttgtgtctagtcacattgactttccaggtgatggccctacaaaactcaaaccacctctattattcatgcctatacagtcttttaaaaaaatactagattgccattgaaatataagtattgannnnnnnnnnnnngaggatataaaaaagaatactccaccccgtgcctcccccaaccacaaaacaccctggttattggttcctaagttatgttaaaatggaatttgctgctaaatatgcttcacttgataaatactgcatcttggaaggattaatactgtccatattgtaagggaatattagtttaaatatgttcttattcagaaataaaatgcatggctctataataacacattagtactgtagagataagaatgtgtcatcagccatggcccctaagtggccattgatgacatggcataagatcacagttttaacctcctttaatatcaaactctcctggctctctgaaatagaagcataggaattacagctaagaacaaacaacaaaagaaaaactcagttcatatcctcttataattggaggaagggctaacatgccagatctaaggatttgggcatctaaaaagacaatgcccacgtaatgcaccataaaattctgtaaacctttttaatagtatatatatgtttggctttagtacaattaccaagtgtaatcagttacagtaattctgtatgtatctcagcagtattattttccagcatggctttacattttaaagaacttaataactatagaataaacagatgcatgctatacgagttggaatgtattagagctgggttcccttttgtgtgtgtttgtgtcacgtgtttagtttatccatagtcatgaatactatgttgcctagatacagtggggaacaccgggaaagtgaaatgcagttttgttttctggaaggcaaaccaagattcttggtacatatttttctgtttcaaagcataggaaaactgttgacccccaaaagaaggctttctcataaaacactcagagtgaattatgtaactgttgtcaattgtcttctaatgtgaaaaccagtccagaagacagaggcatcatggcattttaccttatctgagtatttttgtatttctcatgccattagtcactttaaagaccttgtgaaacatggctccctagtcaggcatttgaagagtgaagagttcaaggggatgctgcccaagccagcatctcataatatttaggaagttgataagcaagttgatttccttatcacattctgtgatgctcaacaggtaggttgcaagtgtttaagaaataggttcagactctgttaaaagcatcttttaaagattcctgcagccaagttggaaaaagaggatgccccatagagaaggttctttgtccaatatctacgaataatgatagcagacatgaactatacccatgaacatcacattccattggttgtagtttttgcaagcataaagagtctgcctaattgttaataagttgaaccttgcccaa

SEQ ID NO: 240961 - DNA, 1033 bp, Homo Sapiens
aaaaacttgttgttgtaaagggaatttgatttcagattaaaatacctaatgttttggaaaaaatttttaaaaagaatcacaatttatcatgaccaagacactgcaccataatttccattcctcacagcacatttatttcagtaattctgttatgtcggtcttagcatgagcatagtgttacacgattttcgtacatataatcacatccaaaacaagttctaaaatttaaattgtaaacattctcatatgtagaaatattttaattggtgtattaagttttgctaactgatcaaatttggaagataatataaatgagaacgtctattctaaactgtgtagtgagcattgtttattaattacatttctacaatgttaaataaagtaagaggcaaacctgtcctgtaagcatgtcaaattttaggtaaaacattaaaaagaaacaaacctgttaacaaaagaatgtcttgcaataaagaacattagatttttaaaatctattatgatacaaaaatgtaaagggtaaatagcatctttgttgacaaagtaggaggtagcatggatgcaccactttattgtctgagaaatgcaactggagtaaagaatatttccttaccacaaataatttccagaactatgtacatatttcttttagaaatacttgtttaaacaaatctccctccactttttagtataaaaaaaaccgttccatgtgattttaaaaaaaacacttacacatctagatagaatagtactctgccctatttgagtgaacagtctcaaactatgaagtacatgatatttaatgccctaatttgagtaaatttagtcagcggttcttggtattatacaaaacactaaatacatacaaacaaaatataatatcttatttttctatgcaagtcttgtggggaataaacagagccttgattctggtaacactgcaaaaaacataattgtccaataagtctgtctataagtatccatgtgcaacagtttattaagtggctgcttacccaacttttttgtacaaagt

SEQ ID NO: 240962 - DNA, 1106 bp, Homo Sapiens
actttgtacaaaaaagttggctgtgaagctcaacaggcagaggctgatagtatgcctggaggagtccctgtacatccacaacattcgggacatgaaggtgctgcatacgatcagggagacgcctccaaaccctgcaggcctgtgtgcgctgtcaatcaacaacgacaactgctacttggcgtacccagggagcgcgaccatcggagaggtgcaggtcttcgataccattaatttgagagctgcaaacatgattccggctcacgacagtcctttagcggcactggcctttgacgcaagtggaactaaacttgccacggcttcggagaaggggaccgtgattagggtattttccattccagaaggacaaaaactctttgagtttcggagaggagtaaagaggtgcgtgagcatctgctccctggccttcagcatggacggcatgttcctctccgcctccagcaacactgagaccgtgcacatcttcaaactcgagactgtgaaagaaaaacccccagaggagcccaccacctggaccgggtacttcgggaaagtgctcatggcctccaccagctacctgccttcccaagtgacagaaatgttcaaccagggcagagccttcgccacggtccgcctgccattctgcggccacaaaaacatctgctcgctagccacaattcagaagatcccgcggttgttggtgggtgccgccgacgggtacctgtacatgtacaacctggacccccaggagggcggcgagtgtgccctgatgaagcagcaccggctggacggcagtctggaaacgaccaatgagatcttggactctgcctctcacgactgccccttagtcactcagacatacggcgcagctgcaggaaaagcctacacagacgacctgggtgctgtgggtggcgcctgcctggaggacgaggccagcgccctgcgcctggatgaggacagcgagcacccgcccatgattcttcggactgactgaacttgacctgtgacctctgacccggggagcagagaacactggcttcacagaggactttgtgcattgctgctatgagtttgacctgagtcgggggagaggatggcagagactttat

SEQ ID NO: 240963 - DNA, 2299 bp, Homo Sapiens
aaaggcagagtaactcatgatatacagaatgctatataaacatacatttatttcaatgactgcaccaataaaaatgccatacagtgaagcatacaacactgaatatcactctgaacatactatgatgcctgattttgcataagtctagattagggagaaaagcagtttgaatctaatatctaggagcaatcatttccagcaaaactggcttttagctgaaaagttcaaaagtgacttcaaaaactccatgccccagctggttcataattttaggagatggatgtgtttctgaggatcctcatctctatatcctgatggtctgatcacaactgcctaagagaaaaacatggggaaaacacttccaatcaaagaactattatttagactgttttcactttttcaatcctataaaaatagaaatgcttaactacagtactcagttctaataattagatattaccttgaatttattcaaaataaattattccattgagtttcacaaatgcctaaatatattatcactatcatcacttgtactaacaacaatagcagcagctgacaagtgtgtacaatatgccagacccattctcagagtcttacatgaatacactaatttgatgttcacaaaaacctaggctttgggtatattacagcaaaccgatgagatactgaccctcctggacctttacgttctcctgagggtggtacgcgagagaagtaacaaattacgtaaataaaatactttctggtactgaaaaatgctataaatactacataagaatgtcaaattatgcagtatgaccaggtacgtgtttgtgaaagggtatttccaacatggtaaattagggaaggcttctctgaggaggtaacatttgaactgcgagccgatgtaagaaaagcttcatggagatcaatccaaatgaaaggaggaggtagtgcaaatgtgaatgcgaaagagcttgtcatgctcaagaaagagatgaaaggtcaatatggttgaagtatatggaaagagctggagctctggtttaagataaagctaaaaaaagaagtagtcatctgaactatggcaaggtgtctgaatttaagagcaacaggaagctggtggagcattttacacaaagctgtaacatgatctgatttattctttaaaatgacactctggcttctttgtggggaaggtatttaagggtagcaatctgaataagtgctaaatttcgattagcttaatgttatttcaaagactgccatgtttcctcttcatctctcttgatataccagatgataggataattagcctctaagtccttttcaatgtagacaggcattccctaaggatacttgactctgcataaatagtatttgaaaagtacagataacagaataaatagcttatttgtgccctaacttcttcaagaaacaaagaaaattcaaactgcataaggtacagtttaattctagcaactggctatgttagagcattctccagctaaaggtaaactgcttactctcttgatcctaaaggtaacttgcacgctaggtgaccttcatcaagttatttataatttatttaaaccagtgcattgaaaaagttaatgtgcaaatgaatcaccttggggatcttgtccaaatgtagattatggttctaaggatctgtgttgaaacccaagattctgcattcctcataggctctcaaagtaatggcaatatgactggtccaaggaccgcatcttgagaaggctttctaaactttagttttctcatcagtaaaatggagctaaaaacttgataggatttttgtgagaattaaatgaattaatgtagaccatgagcttaatacactggcaggtacgtagtcaatcttagctattattagctattgtttgaggtgaagagaatttgtcaaaagtaaatggcctaaatgacttctaaggtaatttccaatcctggattttataattcttttaaatcctttcatgattctttaagtaaataatatattaattaatcaaaatttggaaaataaatgagatacaatattaaacactcaaaaatattttaaggaagttttctggttcagatgcagtaagctaacttctcccgtctcccactgaattcacctaaaaatctgaacagaatgcacaaatcaagactctgaaaagtaaatggaaataaactacaattcaaggtatgacctatccagtgataggtctactcctgccctcttttccagcccatgctcagctcctacccaattctccaattcccaaagtacaaactgagtgcagacagaagccaa

SEQ ID NO: 240964 - DNA, 1237 bp, Homo Sapiens
tccccatctccccatgtactacttttccactacactggcatggctcccatgggagtttgttcatgtttaaaaatatagctcttttaacttgcttctatttaggcatctttcttaatttatctctatgtagttatataactttctttaaaagtctcatatatattaataaccaaacacactttttaaattgcagtttgtcactgctaagatgtagaaatgagatttttaaaaattgtgtatcctgcaacttcttgaattagtctttgttagtacatttttatactataagttttagcagttgtaaagccatgttaatagaaaatatttatgctactttccttatcttcctcattttgtgaatgctggcttttattgcaatgacaggtctctttaaccatatataaaaatagtgccaacactgtttactttccacttgagaaatgtttatgttttcccagtaggaataatggtagttcttggtttaagtacttaacagactccgagaagtctattaaatcattgccagagaaataattaaatcaagggtgaatgatgaatttttgaaaagttatctgtaattaatactttggattttactatttgttcttttgatgctgatttaatggctgttctgcttaacaccagccttataatcctgagtgatagtaaattatttgttgctgtattgtttgccaatattttattttgcattttgcatctgttgagaataaaatccttctaaaaatgtcttttagtactgagaacatgtctgcctcaaaagacaatttgaagcatactgtccttcatgatacatggatagacattatttaaacatttgaaaaagttcaccagtaagtccattagggtcaaagtccaacctgtcagaaaattatactgggttacaatatcccctaaatttttaaatgctttttattggtataacttctcatttcccacttattttgtattaagaaatatattcattttcttcatttctaaatcaacctttattttcgactaatttttcctatttccattatattcggctataccatcttttgcaacttctgattgttccttttctcaatttcttatgaataatctgtgatactgaaaatcttttcggtagatctggaataccttcaccttcattttatttatcatcttatgtatttctcattttaattactattttataggtctatttcaagtatttcagttgttctgttagatccaa

SEQ ID NO: 240965 - DNA, 2051 bp, Homo Sapiens
ttttcacatgtatcagtaaaccacaatttatgttcttattaacatttttgaatctcacttttttgcatacaatttgacatatatcaatattattgaatggctatataacattctgtgatagcactagcaatacaccaaaatttacttaaccatttccaatcgtgggcttttttcccccttaaagttatctgagtggaactgctagaaaactttgtacaaatagcttttctttcttttaaatattttcctgggcatatgccactcaaagtgagtatgtcaaaagatcagttataaagccctttttatagtcttctacacagttctcttaaaaggctactaatacacaatgctgctgctataaggacacatgcaattaaaacagttttgctaatacaatagcatgaactaagtcaaagttgcatttttaatattaggaaatttgaataccattcaaattgattttttatatcatttatacacgatcgctttataaatttgcctaagagtacaaacccttatggatatgcatatagttttacaaaaactgagtgcatccatgtgtaatgcaaatagcttcttttaaattccatcttgttttgtctttttcctatttactacacatttaaaactttttctcttagttgatctaccttgccaattgccatgaagttcctttataccactattggtgtgagacttgtagtatttttctttttatacttaacattttaattcatttggaatatcacatgtaaagtggatctaatctttccacactgacatctagctagtctttccaccagcagttattaatatttctttctttccattggcttattaatttcagttaaactttctacttggcaccacagaatattcagaaaggttgcttaatagcatgttttaaggatttggagagcaaggctcccattttttccccctaaattaaaaaaacttacatctttgcttgctttcctaaataatttattacaattatgccatattccacacagcaaccagttggaatgttaaatggaactgtagtaaatttcatactaatgtcacatattggcatttctttggatgtagctttatattttaaaacacattatctaacttaatccccacaataattctgtgaagtatttctcttctgtagatggtgaaatagatactaggagtgactttcccaagagtatacaactggtaagtagtgaaatgagaactgtaattctggttttcaaaaaaactccccatctccccatgtactacttttccactacactggcatggctcccatgggagtttgttcatgtttaaaaatatagctctttaaacttgcttctatttaggcatctttcttaatttatctctatgtagttatataactttctttaaaagtctcatatatattaataaccaaacacactttttaaattgcagtttgtcactgctaagatgtagaaatgagatttttaaaaattgtgtatcctgcaacttcttgaattagtctttgttagtacatttttatactataagttttagcagttgtaaagccatgttaatagaaaatatttatgctactttccttatcttcctcattttgtgaatgctggcttttattgcaatgacaggtctctttaaccatatataaaaatagtgccaacactgtttactttccacttgagaaatgtttatgttttcccagtaggaataatggtagttcttggtttaagtacttaacagactccgagaagtctattaaatcattgccagagaaataattaaatcaagggtgaatgatgaatttttgaaaagttatctgtaattaatactttggattttactatttgttcttttgatgctgatttaatggctgttctgcttaacaccagccttataatcctgagtgatagtaaattatttgttgctgtattgtttgccaatattttattttgcattttgcatctgttgagaataaaatccttctaaaaatgtcttttagtactgagccaacttttttgtacaaagttggctattaggaaaaaagc

SEQ ID NO: 240966 - DNA, 1551 bp, Homo Sapiens
ttggcctacgctatcttttagataaagatgagaaagatttaagatcaactccaaacctgagcctggatgatgtaaaggtgaaagtggaaaagaaagaacagatggatccatgtaatacaaacccaaccccaatgaccaaacccactcctgaggaaataaaactggaggcccagagccagtttacagctgaccttgaccagtttgatcagttactgcccacgctggagaaggcagcacagttgccaggcttatgtgagacagacaggatggatggtgcggtcaccagtgtaaccatcaaatcggagatcctgccagcttcacttcagtccgccactgccagacccacttccaggctaaatagattacctgagctggaattggaagcaattgataaccaatttggacaaccaggaacaggcgatcagattccatggacaaataatacagtgacagctataaatcagagtaaatcagaagaccagtgtattagctcacaattagatgagcttctctgtccacccacaacagtagaagggagaaatgatgagaaggctcttcttgaacagctggtatccttccttagtggcaaagatgaaactgagctagctgaactagacagagctctgggaattgacaaacttgttcaggggggtggattagatgtattatcagagagatttccaccacaacaagcaacgccacctttgatcatggaagaaagacccaacctttattcccagccttactcttctccttctcctactgccaatctccctagccctttccaaggcatggtcaggcaaaaaccttcactggggacgatgcctgttcaagtaacacctccccgaggtgctttttcacctggcatgggcatgcagcccaggcaaactctaaacagacctccggctgcacctaaccagcttcgacttcaactacagcagcgattacagggacaacagcagttgatacaccaaaatcggcaagctatcttaaaccagtttgcagcaactgctcctgttggcatcaatatgagatcaggcatgcaacagcaaattacacctcagccacccctgaatgctcaaatgttggcacaacgtcagcgggaactgtacagtcaacagcaccgacagaggcagctaatacagcagcaaagagccatgcttatgaggcagcaaagctttgggaacaacctccctccctcatctggactaccagttcaaatggggaacccccgtcttcctcagggtgctccacagcaattcccctatccaccaaactatggtacaaatccaggaaccccacctgcttctaccagcccgttttcacaactagcagcaaatcctgaagcatccttggccaaccgcaacagcatggtgagcagaggcatgacaggaaacataggaggacagtttggcactggaatcaatcctcagatgcagcagatgtcttccagtatcaaggagcagaatggttccccaaggtgaggccaactttgctccatctctaagccctgggagctccatggtgccgatgccatccctcctcctcaaa

SEQ ID NO: 240967 - DNA, 663 bp, Homo Sapiens
  misc_feature (158)..(182): n is a, c, g, or t
ttggccttgctctgaccactcagacaccgtgtcctcttgcctgggagaggggaagcagatctgaggacatctctgtgccaggccagaaaccgcccacctgcagttccttctccgggatggacgtggggcccagctccctgccccaccttgggctgaannnnnnnnnnnnnnnnnnnnnnnnnccctcaggggccaagccaacacaggctgctacgggatcccagggatgcccggcctgcctggggcaccagggaaggatgggtacaacggactgccggggcccaagggggagccaggaatcccagccattcccgggatccgaggacccagagggcagaagggagaacccggcttacccggccatcctgggaaaaatggccccatgggaccccctgggatgccaggggtgcccggccccatgggcatccctggagagccaggtgaggagggcagatacaagcagaaattccagtcagtgttcacggtcactcggcagacccaccagccccctgcacccaacagcctgatcagattcaacgcggtcctcaccaacccgcagggagattatgacacgagcactggcaagttcacctgcaaagtcaccggcctctactagtttgtctaccacgcttcgcatacagccaacctgtgcgtgctgctgta

SEQ ID NO: 240968 - DNA, 1318 bp, Homo Sapiens
ttgggtggacgcttggtgccagcggtgggtcagcttcagcctcctaaatcacagcctcagaggcagccagggacacacggctcccagtgcccagcgatgagggaggccaggagcactcccagggcctggtgctgcccagggtggcatcttggcactttgcagttggaagtgtggacttttcttcgaggaagtagacacagcacaggcgcaaggagcgctggacaaggggtcagatggaagcgtccctggcctctgtggacctcagcctgcctgtcaataatatgttcatttcagattagctcagtcctcaacctgcgccttcctcctggtcatcccaatgataaacaggcaccattggtcagcccaccctccccccagggcagctcccaggggacctttgcagaccccaagaaggccacaaagccagtttggaaactactagaagagatgggccctgaaggtttgaaatcagtggagggatggctgctaactaaataatgtgcaggggagagcagggagggacgggccaggctcagggtcgcggtcagccaccgtgtggcagcaggtgctagggaaggaagccagctgcaggggagtgccgagtccccagcggaatgtgccagccacttgagttctggaacacggtgtagcactccttgggggaaccggcgtctgcaccagcccatggtcgggaggcaggggaggcctcatggctgggcatgggtggggccctccgggtggcctcccataggtcaactgcgagaggctggcggccaccctggccagtggccctcccagccttgtcgagctgcaggcaatgtcgtcgtttctgtcagctttgctccttttctcagggttctggctttggaaacggggcccccggtcggaccatttggccttgtgtctgggctgatgctgagcagccaccctcctggttctctgatgccgagggtctcttcccaaagccacctctggtcccaatgcgagtgctgtattttctgcctcagtgcagcctgcagcatattcagcattccaggccgaaatccagtggtgttaacaagagggatcttttaaagttaaattagaattcacaggacccagtaattgagggctagaaagagcctcgaatttatttgtgcacttacaggctgctcttaccttgtagcctctatccggctgtggaggtcacgtctgggccgggtgatgtactccatggcaaactgtctgctcctgatgaagaagtgtcctttgttctccctatcttcgtggagggtgttttttcacctcatggttttgattttatgattgatgcttacaa

SEQ ID NO: 240969 - DNA, 954 bp, Homo Sapiens
ttggccatgctgacctgaggagtcgcggctgcgagcaggttagagttacttgttattggtaaatagccactatggaggctaaggaccagaagaaacacagaaagaaaaacagtggacccaaagctgcaaagaaaaagaagcggcttctgcaggatctccagctaggagacgaagaagatgcccggaagagaaatcccaaagcttttgcagttcagtctgctgtgcggatggctcgatcctttcacaggactcaggatttgaagacaaaaaagcatcatattccagtggttgatcgaactccactagagcccccaccaatagtggtagtggtgatgggacctccaaaagttggaaagagcactttgatacaatgcctcattcggaactttacccggcagaagttgaccgagatcagaggccctgtgacgattgtgtcaggtaaaaagcgcagactcaccattattgaatgtgggtgtgacattaacatgatgattgatctggctaaagtagcagatctggtactgatgcttatagatgccagctttgggtttgaaatggaaacgtttgagtttctaaacatctgtcaagtacatggctttcctaaaattatgggagttctcacccacctcgactccttaagcataataagcaactgaagaagacaaagaagcgattaaaacacaggttctggacggaagtttacccgggtgccaagctgttctacctttctggaatggtgcatggagaatatcaaaaccaagaaatccacaatctgggccgttttattacagttatgaagtttagcctctcacatggcaaacttctcacccttatatcctggcagacaggatggaagatttgacaaacccagaggatatccgaacaaacatcaaatgtgaccggaagtgtcactttatggttatttaagaggagcacacttgaaaaataaaagcc

SEQ ID NO: 240970 - DNA, 1707 bp, Homo Sapiens
ttggctaggctggtcactactccgagcctgtgacgtttgcggcagccaggccgtcgacgatgcccagtgaaactctctgggaaattgcaaaagctgaagtggaaaaaaggggaattaatggaagtgaaggtgatggagctgaaattgcagaaaaatctgttttcttcattggcagtaaaaatgggggaaagactactattattctaaggtgtcttgacagagatgaaccaccaaaaccaaccttagctttggaatatacatatggaagaagagcaaaagggcacaacacaccaaaagatatcgctcacttttgggaactcggtggaggaacctctttattggacttaatcagcatacccatcacaggtgacaccttacggacgttttctcttgttctcgttctggatctttcaaaacctaatgatctctggcccaccatggaaaatctcttgcaagccacaaaaagccatgtagacaaagtgataatgaaactgggaaagacaaatgctaaagcagtttctgaaatgagacagaagatctggaataatatgccgaaggatcatcctcaggatcatgaattaattgacccatttccggtacctctggtcataattggaagtaaatatgatgtttttcaggattttgagtctgagaagagaaaggtaatatgcaagacacttcgatttgttgcacattattatggagcatcattaatgtttaccagtaaatcagaagctctattactaaaattacgtggagttatcaaccagttggcatttggcattgacaaaagcaaatcaatatgtgtggatcagaataaaccgctgtttatcacagcaggattggattctttcggtcaaataggatctcctcctgttcctgaaaatgacattggaaagcttcatgcccactcacctatggagttgtggaaaaaagtgtatgaaaagctctttccaccaaagagtattaacacgctgaaagatatcaaggaccctgcgagagatcctcagtatgctgaaaatgaagtcgatgagatgagaattcagaaggatctgaacaggcacatctaaggagatatcctatcaagaagcaggacaaaacatcatgtgttgcggataaccaggattatttccaaggtgggatagcctttaagaagccattccaatctgtagatgtgtgtacctgctagccaagttcattttgatgaccaagcaccatttgaagaacaggccgtcctggtctaccacagtgcaaagaaaggatccagatgcagtttgtcctctccagctgcatgagtggcgaggtttccccaggtgatggggaaaatgaccaaacctggcagaggactgactactctgttttgatactcccttccccacaacatatacacttttgagtttatcattcaaattcctattttaattcctgccatttcatgaacacctgtggtcatatcaaaactcattggctttccccagcccacacagtggtattgccctggtgagaagaaatgattggcaggcaaggctccatattcaaggaaaaccccaatggaacacttcaacaccaatgcaacgcttcccgggtccaggagctgttttgtttggatgatgggaatcgcatcaaggaaatgaactgtacagcatttccaaaaaactggggtcctcagtttgaaacctgtgatttcagttgtacacaaaccccttt

SEQ ID NO: 240971 - DNA, 2038 bp, Homo Sapiens
ttggcaagattgtgatgatactgaagtagcctctctttgcctggaaggtataagatgtgcaatcagaattgcatgcattttcagcattcagctggagagagatgcatatgtccaggcactagcaagatttaccttactcacagtgagttccggtattactgaaatgaaacagaagaacattgacacaataaaaacacttatcacagtggctcatacagatggaaattatttaggaaattcatggcatgagattctgaagtgcatcagtcagttggagctggcacagcttataggaactggagtgaaacctcgatacatttctggaacagtgcgaggcagagaaggatctcttactggaacaaaagatcaggctcctgatgaatttgtgggtttagggctagttggaggaaatgtggactggaaacagatagcaagtattcaggaatccattggagaaaccagttctcagagtgttgttgttgctgtagatagaatattcacaggatctacaaggctagatggaaatgccattgtggattttgtccgttggctctgtgctgtgtctatggatgaattactttccacgacacacccaagaatgtttagtctacaaaaaatagtagaaatatcatattacaacatgggaagaataagattacagtggtctcgaatttgggaagttattggagatcattttaataaggttgggtgtaatcctaatgaagatgtagctatttttgcagtagactccttgaggcagttgtcaatgaagttcttagagaaaggggagcttgctaacttcagattccagaaggatttcttaagaccttttgaacatataatgaaacggaacaggtctccaacaattcgagatatggttgtacggtgtatagcacagatggttaattctcaagctgctaacattcgatctggatggaagaacattttctctgtatttcatctagctgcatctgatcaagatgaaagcatagtggaacttgcattccaaacaaccgggcacattgtcacccttgtatttgaaaaacactttccagcgaccattgattctttccaggatgcagtgaagtgtttgtctgaatttgcgtgcaatgcagctttcccagacacaagtatggaagcaattcgacttattcgccattgtgcaaaatatgtgtctgatagacctcaggctttcaaggaatacacaagcgatgatatgaacgtagcacctgaagacagggtgtgggtgagaggatggttcccaattctctttgagttatcctgtatcatcaatagatgcaaattagatgtaagaaccaggggtttaacagtaatgtttgaaataatgaaaacatatggccacacttatgagaaacactggtggcaggatttatttagaattgttttcagaatctttgacaatatgaaattgccagaacaacagacagagaaagctgaatggatgacaacaacttgcaatcatgcactttatgcaatctgtgatgtattcactcagtatttagaagtactcagtgatgtacttttggatgacatttttgctcagctctactggtgtgtgcagcaagacaatgagcagttagcgcgatctggtacaaactgtttagagaatgttgttattctgaatggtgaaaaatttaccctagaaatctgggataaaacttgcaactgcacactggatatcttcaaaaccacaatcccacatgcgctgttgacctggcgacccaattctggagaaactgcccccccacctccatctcctgtaagtgaaaagccattggatacaatatcacagaagtctgtagatattcatgattctattcaaccaacgtctgtggataacagaccacaagcaccactggtttctgcgtctgctgttaatgaagaagtcagcaaaattaaatctacagcaaccacaagtaagaaagaagatgcagaaaacttagctgcagcacagagagatgcggtggactttgatgttcgcgttgatactcaagaccaaggaatgtaccgcttttta

SEQ ID NO: 240972 - DNA, 812 bp, Homo Sapiens
  misc_feature (500)..(512): n is a, c, g, or t
tgtacaaaaaagttgggtgatgagaaccccgagtataaaccaccaaatggctcaggaagatgctcagcgtctctatcaagctggtgaggggagactagggaccgatgaatcttgctttaacatgatccttgccacaagaagctttcctcagctgagagctaccatggaggcttattctaggatggctaatcgagacttgttaagcagtgtgagccgtgagttttccggatatgtagaaagtggtttgaagaccatcttgcagtgtgccctgaaccgccctgccttctttgctgagaggctctactatgctatgaaaggtgctggcacagatgactccaccctggtccggattgtggtcactcgaagtgagattgaccttgtacaaataaaacagatgttcgctcagatgtatcagaagactctgggcacaatgattgcaggtgacacgagtggagattaccgaagacttcttctggctattgtgggccagtaggagggannnnnnnnnnnnnaatgaaaaaaaatttctattcatagcttatccttcagagcaatgacctgcatgcagcaatatcaaacatcagctaaccgaaagagctttctgtcaaggaccgtatcaggggtaatgtgcttggtttgcacatgttgttattgccttaattctaattttattttgtttctctacatacaatcaatgtaaagccatatcacaatgatacagtaatattgcaatgttttgtaaaccttcattcttactagtttcattcctaatccaagatgtccaattgaataaaaatcacagcaatctcctg

SEQ ID NO: 240973 - DNA, 923 bp, Homo Sapiens
  misc_feature (752)..(760): n is a, c, g, or t
ggttttggaaaaattttattgcattttgtttccatgtggaagcactgacagaattgaaaagtggcagcatgttccacttacttttctgaaaaatcacatggctagattaactttcgccctacccaggacaggattgaataaaccttaactcctacccccaccccaagcaaaagctaaaaaagggggtttctggcaattgcttaaaaaacaaatcaatgtgtgagaattccccgatggtcaataatcatatttgttatttttgcacttggagggcactccctacctccttcacctctatccaccatcaccacctccttcaaacaagactgacacaggaagtgcctctcaaatggaaaatctattctgtcccagtgccacaggcttaggtgtgtctgtggattctggccaatgggatggccatatgtcaactttgaaagggtggggactgtgaggtaaccccagcatcatggtcatctccatgccaggacaacagtctcccaggttaaaatatagataagacacaggtacgtgcacatttatgggggttaactatcagaaagtgaatccactttgaggtttataaaatgagaaggggatgatggtggggctgtatgtgttgggcactggtgcctattgcagtcagaattcacactgcttaattgacatcttgctggggaagagagggagatggggtggtgagagaggaagcagatgaaacaaaggaaaacgtagcttgcctgaaattgtgtaannnnnnnnncctcttgattgtataaggcattttgaactggaaaaacgtctttcctacacactcttccaaataatcacagggaatataattgctgattcagaatacaaataagacctctttcatctttctccccactcccccgcagaaatcattcccaacttttttgtacaaa

SEQ ID NO: 240974 - DNA, 2874 bp, Homo Sapiens
  misc_feature (189)..(209): n is a, c, g, or t
  misc_feature (240)..(249): n is a, c, g, or t
  misc_feature (500)..(508): n is a, c, g, or t
  misc_feature (983)..(995): n is a, c, g, or t
  misc_feature (2606)..(2651): n is a, c, g, or t
ccgtcctaactgtgacttggggtaaaccaccagaattcattctacataaatgagctatgttaaaacgataacaatatttcattgcatgatgacagggtacatttctagtccacacagtacttcaatgtgaccattctcttaactcggctaataattaatggaaagtacacttttacagtcacagcactnnnnnnnnnnnnnnnnnnnnntttacccttgctttgttacatgtttccaaannnnnnnnnnaaaaagtatttcctttcttatgatccttccccagaactaacatgctgacttaggaacagatgaagtagataaagtctatcctagtatagagagcaatgatttagttttacctaattaaatatttccttgtcatttatcaattgtcactgacctttttgatgtaattatttcctcattcactcatctataaatatttattagtacctattattacccatgtctccctgattttccagaaaaagaattcatgnnnnnnnnncttctcattgctaagctcacttagaaaagttgggcaccatttaaaagagttggagaacagaccagggtggcttcttgggcacagctggatggtgctggaagccaggcctgggatttggagagaagagtttccgacatataaacccacggaggtcaccagccctccccgcatctactctcctaacagctcaggacagccccgtcacactactgccagccctggtgactcactttgttggcaatttttaaagccctcttcattatgtacttcctactcttcagaacctctgtgataagcaatacccctgccatacagaacgctggatctcggtttactcagcctctccctgtagcgtcacaggctgtgcactcacctaggtgagcccctaagagcagggtttgcttctgcttcacctaacgccacgtcttccctcaaatgtgtggtcaccaaatgtttgcaaaaagggtctctagcnnnnnnnnnnnnnggcacattaagccctttaaaatacttctgacctatctttatactcagatctcacctcgtctcaaaaagttttatggggtaatgcgccaatgaaaggtacagtagtattagtgagttctgaagcttctaattacaaagaccacagaggctggctggtgagccatgcttctcatgctcccttctgtcacactgcagatgtctcttttacctcggcctcatcatcggttagttatctgtcagcaaaatgtagaaaggtgatgggcgtggatggagtcaaaatccaggacaattctgtcataagggtacagtaacactcttctcctttgcttgtttttctcaaagaatgctttctctttcttctccaaagcctgtgctctcagaagaggctgctgcatggagctccggaggatctttggagagccttgtgtaacttgaacgttggcttcgcttatgtgtcatgctttttagattctcattctgaatagtggttgggttgggactggaactaggcctcaaaatgacttgagaagtctccctaattccctccatctcatcgaaattttgattggctctgttggctggagcactattgttgttcagagtcacggtgctgggagttcggttcaggttgtaggctttctggcatgcaggccagttttcttcagggctgctggctatcaagctgcattcggaagggcttttcttgtcttctgaacaaatggacatccgagctataattggatcttgcaggccactcaggctatgtgggattccccgctttccgctgtgactgtcatcttccagctctatgagatttgccttttcaagctgggagtcatccgccacttcattgtgcagagagtgattgggagaactttcactggatctcactcctgaatccgatgaatcctttttgtcaaggagcgcatccgataaatactctttggctttaatgaaggttctgatcggctcagcactgtgttctggagacttcggcactctctctactttcccttcggcttttctgtctttgtcatctttgagcagtggagtgttatctgattcttctgtgccagattcatcctcgtcacttgggagtttttgatagcgcagcccacttcccttaagcttcaaatctgtctggaagaggcttgacctttcggaagatttcttgcctgggagaagcttactgcctgactgatctgatttttcatcttcttcagtgataggatccaggggggaagcatcgttggtggaaacccctgatgatgaataatcgataacatctcccctcttcattagaaaggacttcctcccatcatcgggctttggttcactatccttccccttttcttgctctaggtttgaatgaatagagccccctgatgaactctgacccatgtaatatgtgctatgtggagaagatctgccactaatggttgtagacccggggcccccttctaactgggacatctgagcaatgtattctctataggcatctctatactcggcctgcaccttatcagtaagctttgaaatttcaatactggaatcctgggaattgagactcgaaagacttggggttctgcgagtttgtgactgtgaagacagnnnnnnnnnnnnnnnnnnnnnnnnnnnnnnnnnnnnnnnnnnnnnncatcagcttaggaaatatatatgtacactaaccatttaaaaagtcatcaaaacatcaaattcttttaaaagaattctacataacacagattaacaaaagctgtgaccttataatgctgttactagaaagctttctataaattttaataaaatcagtttattgttaatatttaaaagtatgattaaacactgtattaacaaataatcttagcacttgtttctgg

SEQ ID NO: 240975 - DNA, 951 bp, Homo Sapiens
  misc_feature (791)..(799): n is a, c, g, or t
ttggatcctgttgactgatccctaatcgtaggacgatactttgatgaaatcagccaggacacgggcaagtactgttttggcgttgaagatacactaaaggctttggaaatgggagctgtagaaattctaatagtctatgaaaatctggatataatgagatatgttcttcattgccaaggcacagaagaggagaaaattctctatctaactccagagcaagaaaaggataaatctcatttcacagacaaagagaccggacaggaacatgagcttatcgagagcatgcccctgttggaatggtttgctaacaactataaaaaatttggagctacgttggaaattgtcacagataaatcacaagaagggtctcagtttgtgaaaggatttggtggaattggaggtatcttgcggtaccgagtagatttccagggaatggaataccaaggaggagacgatgaattttttgaccttgatgactactaggtagtcgacatgggtccggcaaaacgtgcctcaccctccagcatccaacccaaggagcatacccatggtggaatccaaacagatccctgccttacaattggaacatttccagaacttaatccatgagcattggatattgaaaagaaaaccgaaacaaaaccagacccagccctacactttggtttgtcatggtgtcagcgcagcagcctacaactaagttcctaaacgccactttggactaatttaaaaaagaatcccagtttttacttttactggatggtgaaattggttgctcttgtattttatgnnnnnnnnntgatttttttaaccttcatacatagaagcaaaaatactttaactgctgtaaaccttcaaaagttaatagaagtgagatcatactgggtttgtttcttattttgattggagaaaaattaaattgctgcatttcgcagtgacccatttacatgg

SEQ ID NO: 240976 - DNA, 937 bp, Homo Sapiens
ggttttatggggacaactgaaaactctctttaaaaaagtacgacttggtaatttaaaatttactggaacagttaaatatgtagacatgctagtgaaagagaacaaatcaacttgagtataaaggatgaataactcattttacctaccctagagacacttatagtgtatagagagatatttcacaataaacctttggatgtacaaagatcaacagaataaaaaaggagtgaaactctcctttcactaggtctggaagagagaaggaagcttagttcttaaaaaacaccacagagagttctgatgcatagcctagttgaaaagcatttctagagtgattttgtaaccactgtgctgccatttaacgaatttcctcgtttttgactcatagttaataaattatcactattaatatgcatttttttgtgtacaggtaatataatatgttcatcaagatggtaagctccttgaagaaaagcaccgtggtttatcattctatctgttttgctgagaccacttagcactgggatgagtatggaatagcttggaatgactttcaatgtgagtgaaatgtctggcaggaaaaggcaggctttgagaggctccccaggagggcacagcccactgctctgaggagtggaataaattcttggaggcaggatgggccagtgaaaactctctgtgcagaccctggtgacatcatctgctagctacatgtccttagtatcttaatgtccctacatccatagctataaaataccgtactgggggcctgacaataaagaaaacaacacatggcacagggacatttcagggagatggcattttaggagaaatggaacgccaactcacccggaccctggtcatttcttactcccagaggggatggattcctcccacgtggaaccccacgcctgcagccaacttttttgtacaaagt

SEQ ID NO: 240977 - DNA, 1452 bp, Homo Sapiens
  misc_feature (52)..(60): n is a, c, g, or t
  misc_feature (1284)..(1313): n is a, c, g, or t
gaattttagttagtttttatgttttaccagtgtgaaatattatgtctaattnnnnnnnnngaagacaaattgatatatacattactcgatttttatgcttactttcttttacatttcaaccatataattaatttttccatgagacagggtaggacacataatcttcttggatacattactgtttattgtttcaagtggatggaatatataaatcccactgagtagtttagtgtggccttgtatcttttataaacaggttaaatggagactttacactgtaatctgtgtatttatctgtctaccataaattgtcttcgtgacaaatgcagaatttcttttattacttggctcaaattaactgttgatccttttcactgataatatacaagggtaaaaaagcaggaagcctttaaaattgaaaaaagaaataagatattttccactaaattactgaaaattgaaatttttatgttgactgttgatgactgaaaagccaatgttaagaatcaatatcatccaatataaaatagtacattgaattatttaataaacagaatattaagagcttgtatatgctgactgggaacagtggtggctttttaaattctcagaaagtttaaacattttataattagaagaaaccactggtgatgatgaagatggtccatctctgtagcagccattacagtgaaaatcttgacagaaccttttcactatcagaaagataattttactggtattagtggtaaaggtaaggagagaaaaaggagtgaggagataagtctgtattagttttaaaagtgagaaaaggtaataaaacaacatggaaaagccagaaatttcttcttctatatgtgccttgctacaaataaaccaaaaagaaagccaagatgggtattttaaaagccaatgtggggaaacatccaatgataatgcccattattttactttatacttaaattacaccagtagaaaagttatgcttattaatagtttaatgtatgaaggaaacatccagatttctgaatatgaaggtacatatctcacattaatttaagtctacataaagtagagcctctatactgacatattgaaatttactttctgcttagccttttctgttatgtaaacaattgtacatttatttgccattctaaaacttcaggatcaagtttacataattttgctaaatttccgtgtttgctcagaagcagtttacagtactaaaaccaaccagccaaagaacagcttcaacagaaagttatgtccaaaggggaagagggnnnnnnnnnnnnnnnnnnnnnnnnnnnnnngctaactaaggtaaaacggatgatgatggggaatgggcagtcacaaatgttcacagaaaataggtcagttagtaagatcttctgcaaaaagcctacacacttcagtcaagcacatcagtagaatgatttgggagcataa

SEQ ID NO: 240978 - DNA, 865 bp, Homo Sapiens
atgagccaccgcgcctggccccttcttttgaatgggcctccttgcgtttccgtttcaatgccccgtgctacttttttgggagccccaaggctgtactgtttgattgactcctttttttcccctttctttttaacctaaattaaagctgccactgcagagccccgccatggaagacacgccgttggtgatatcgaagcagaagacggaggtggtgtgcggggtccccacccaggtggtgtgtacggccttcagcagtcacatcctggtggtggtgacccagtttgggaagatgggcaccctggtctccctggagcccagcagcgtggccagtgacgtcagcaagcctgtgctcaccacaaaagtccttctggggcaggatgagcctctcatccatgtctttgcaaagaacctggtagcgtttgtgtctcaagaagctggaaacagagcagtcctcctcgccgtggccgtgaaggacaaaagcatggaggggctgaaggcgctgagggaggtgatccgggtgtgccaggtgtggtgacctggaggcagccgccccgcgctgctcagcaggacacgtgaacaccccaacacccattcagggattcaggtctcacctccctccccggtggagggaggaactttggcattggcccttggagccaggaaaaaagattcgtgtttcaggcagattcttatttgggttactaagatcatcggggcatgagggggagggtggaccaggtcccggaggattcgtgaatggttctccccaggacctgaatcgttgcttgtgtttgagaattggaggaaggagtcagcaggcggggctcatggcccccccgggggcaggatcaattgtaggaggaaa

SEQ ID NO: 240979 - DNA, 1249 bp, Homo Sapiens
  misc_feature (329)..(355): n is a, c, g, or t
  misc_feature (1052)..(1066): n is a, c, g, or t
aaaaaaacaaatggatgatactatcctttctaaaaggtgtctgtttggcttatacaatggaattggtaaaagtacacttatttataatagaattcttggaacttaaaaaggagattcagaaaaacttattggatcaaattaaattgactagaacttcaagagaatactactttgaccaatactttaaaactataaaagtatttttaaacaaaaaagcacaatagacaataaaagaaatagaaaagttgagatactttaacaataatgacgatttctgtaggttgtaaaagtgtacatggtgcaattcccagagagcactacaagattcnnnnnnnnnnnnnnnnnnnnnnnnnnnttctaaatgtctgtgctgtgaccaatctccatgaccaagttaccatgaaaagtaacattatgaagttattgagactgaggtttccttatggactccacccatgcccccacttgccagagccattcacttttttataggttatatgtttgttttcaacattcgtttttgaatggatgttgaaagttaggctaaaatttttacctaatttttctataatgattttaataacagtttcaatgctttaataatagatttaaagggcactttggcctttaaatattttcagagaataaactgtaatttctctctcaaacaagcctttcttattctgaaagatgtcttttatcttacaggaaagaaaaaaaatgagtttctaggagcctctccattaaactggcaggctgatttcatttctgatcccatacagtttctgctgtctttcccttggctgcaaaggtgatcaatcaggaatccaaactgccatcaatacccctttgtaactgcaatggctcaagtgaactccttccgtcttcaataactgacacagtgtcaacatctgcttccaataagattgtttctttttttccttgagtagagtaaatctgctgactgagatcgtaaatggttgtgttttttcccccttttaatgcggaagattttttccaccatattttccaactttccttcaagtcaagtnnnnnnnnnnnnnnnttggataacttcaaaagaaatgttcttatcctaggtgccaaggaagtttgatatataactaaaaatataaactatggtgaatgaatgacactgtcctcataattttggacacagtaatttaaataaaattttggaacatgtaggaaaactgaattggacctacccaacttttttgtacaaagt

SEQ ID NO: 240980 - DNA, 920 bp, Homo Sapiens
actttgtacaaaaaagttggccagagagtagctccacttgggtgcgagaccgagaggggcatatccgttcacgccgatccatgaaaatgctttggaaattgacggataatatcaagtacgaggactgcgaggaccgtcacgacggcaccagcaacgggacggcacggttgccccagctgggcactgtaggtcaatctccctacacgagcgccccgccgctgtcccacacccccaatgccgacttccagcccccatacttccccccaccctaccagcctatctacccccagtcgcaagatccttactcccacgtcaacgacccctacagcctgaaccccctgcacgcccagccgcagccgcagcacccaggctggcccggccagaggcagagccaggagtctgggctcctgcacacgcaccgggggctgcctcaccagctgtcgggcctggatcctcgcagggactacaggcggcacgaggacctcctgcacggcccacacgcgctcagctcaggactcggagacctctcgatccactccttacctcacgccatcgaggaggtcccgcatgtagaagacccgggtattaacatcccagatcaaactgtaattaagaaaggccccgtgtccctgtccaagtccaacagcaatgccgtctccgccatccctattaacaaggacaacctcttcggcggcgtggtgaaccccaacgaagtcttctgttcagttccgggtcgcctctcgctcctcagctccacctcgaagtacaaggtcacggtggcggaagtgcagcggcggctctcaccacccgagtgtctcaacgcgtcgctgctgggcggagtgctccggagggcgaagtctaaaaatggaggaaatctttaagagaaaactggacaaataggattaaatctgcctgcaggg

SEQ ID NO: 240981 - DNA, 1374 bp, Homo Sapiens
  misc_feature (105)..(170): n is a, c, g, or t
  misc_feature (357)..(429): n is a, c, g, or t
  misc_feature (990)..(1001): n is a, c, g, or t
ttgggtaaaggtttgctgttttttcttctggacattttcctttgcgtcttcatttatatataagtgctcatattcttgttatacacagatacatttacaaacgtnnnnnnnnnnnnnnnnnnnnnnnnnnnnnnnnnnnnnnnnnnnnnnnnnnnnnnnnnnnnnnnnnnatatgtagtgagatatgttggggatgggacctaagactaaacattcatttatgttttatatactgtagacagcctgaaggtaattttatacaatattttcagtaattttgtgcacacaataaagttttggctgagctgtggctgtaacccatcatatgagttcaggtgtggagtttttcactggtgnnnnnnnnnnnnnnnnnnnnnnnnnnnnnnnnnnnnnnnnnnnnnnnnnnnnnnnnnnnnnnnnnnnnnnnnncacttctgtaacagagtagtttgaatgcttaattaaaatggcagttgaatattatgttaactttggttttatgattaaaccttttcaaagtttttgttactttcagatactcataagtaaggcatataacctctctagacctcactttccacatttgataaaggaacgatttgaattaaatgaaattgaaaatctcttagctctaagtataacaaattatgtgttaaattgtataattcatctcttagatatcatgaagaatgtgttgtttataatatgaaaaagtatgaagataaaaatcaaatatgactttgggtagcaagaagagattttgggggaagttgctaatgtgtacagttttttcccctaagagcggcgagagaatggcagctgatcagactggtggtggaatctgtctctattgcccagcttggcactatgaagtttgacctgtgtcgatcactcaaaactagctgatgacatctgaaagggagttttaccccggctccctgaagtttcacattacagctctacatttgtgttaacacaatgaatgcttcnnnnnnnnnnnngttatagaaatcaaagcttacataggcaaatctttgttagtgacttagttaaaaacatttcatgaataatagttgctcaagctattttaacccttttccctttcccagaagagaaacaagaaaatcccacacattttgctcagtcatggtatgtttgtaagctctcttgtcagaaagtgtcactgattctttaaatttcttttagttagctgcttttgtccagtagctcacttattttgtggtttgaagatgactgtacttctgacacttttctcacatactcctgctttaatttttcgaaaaactcaatggcaagaaactgaaaacatatacagaagtggagagaatactagaatgagctctcacgtcccta

SEQ ID NO: 240982 - DNA, 1216 bp, Homo Sapiens
ttggctggggtccggctcctggagaacatggcccggcctcccgggggctctggtcccctcctcgattcagagcattcttcactccagaataatgagcaaccctctttggccaccagctccaatcagactagcatgcaggatgaacaaccaagtgattcattccaaggacaggcagcccagtctggtgtttggaatgacgacagtatgttagggcctagtcaaaattttgaagctgagtcaattcaagataatgcgcatatggcagagggcacaggtttctatccctcagaacccatgctctgtagtgaatcggtggaagggcaagtgccacattcattagagaccttgtatcaatcagctgactgttctgatgccaatgatgccttgatagtgttgatacatcttctcatgttggagtcaggttacatacctcagggcaccgaagccaaagcactgtccatgccggagaagtggaagttgagcggggtgtataagctgcagtacatgcatcctctctgcgagggcagctccgctactctcacctgtgtgcctttgggaaacctgattgttgtaaatgctacactaaaaatcaacaatgagattagaagtgtgaaaagattgcagctgctaccagaatcttttatttgcaaagagaaactaggggaaaatgtagccaacatatacaaagatcttcagaaactctctcgcctctttaaagaccagctggtgtatcctcttctggcttttacccgacaagcactgaacctaccagatgtatttgggttggtcgtcctcccattggaactgaaactacggatcttccgacttctggatgttcgttccgtcttgtctttgtctgcggtttgtcgtgacctctttactgcttcaaatgacccactcctgtggaggtttttatatctgcgtgattttcgagacaatactgtcagagttcaagacacagattggaaagaactgtacaggaagaggcacatacaaagaaaagaatccccgaaagggcggtttgtgatgctcctgccatcgtcaactcacaccattccattctatcccaaccccttgcaccctaggccatttcctagctcccgccttcctccaggaattatcgggggtgaatatgaccaaagaccaacacttccctatgttggagacccaatcagttcactcattcctggttcctggggagacgccaggccagttt

SEQ ID NO: 240983 - DNA, 1444 bp, Homo Sapiens
tcttccataatactcgtatcaatctgatcctaaaacccagcctatcagcaacagaacttacctggcaagactccccaagattaccctggttcatgggcatgtatccagatgatggacttaaaaggctctggctctaggatgaaaaaataaggaaaaggttaagatgaagggagaaatctacattcaccatgggggcctttgagtagttaatctgggtatctgtagggtttgtgagggctcagggtgcaaagtgttgggtaattagaagttgtcttaccccacgtggccgattaagtgttccaactggtaggctgagggcggagcccagtgtggtggttgccaggttgtcctcctataaatccaagtctaggtctaggtctagttctggctccagctctacttcctctagcttcttgtttgtcagaccatggggctctggcccaggggctattccaggcccactctctctctatatcgataggtgattgttagggggaatcctggttccagccaactcctcctttttctaaatttccttagcacctcctactccctactcacctttatgaccagataccgtggtgggtctcgggccatcctggtgaactcattggctagttctttaaaggttgggcgaatgttctcatcaatcatccaacctggagataagatgtaggaggtagagacataaaagagaatacattccatggccgggcgcggtggctcacacagtggggcccatctcgaaaatgggcacattgagcacaagtatcagagccctgagtggaagagagaaggtcaggaagaatcagatcccaaggtcaattccatacctcccagcaaagaccaacccagacattcaggatcttctatctgcaggccctagcattatctggcctctctgtgctatccttagccatatcattccccagatgctccaagtattgccccttctctgtctcccttggagatcctggtgctactagtataccgagccattgcatgtggcagtgccctccatgggttggcattccgggtggcaggagaagcattcggcctcatgggcaaattctcgaggctccctgtagtggggaataaagggaggggggggtcacttccaagtcctgaccttcatgctccgatctcacaaccacaggtctcctacctcaatcccaccaaggcacatgcagaaagctgtctaaagacttttattgtatgccacctgaacagttccattgcagggccccacccccacccatccttgactggctccccttactgtacccattcagaaagttgcagtgggtcacacagacacctcctcggctataatttcgacaggacaagcactgaccagggcctgggccccagcatcccccagaggagcacagtgggtcacacactttgccctctgccactggaaaggaaggggtgggttagccaa

SEQ ID NO: 240984 - DNA, 1703 bp, Homo Sapiens
  misc_feature (36)..(46): n is a, c, g, or t
  misc_feature (1522)..(1534): n is a, c, g, or t
aactttgtacaaaaaagttggaaacttttcccattnnnnnnnnnnngcagacttctggttcaagatagctcactggaatacatgtttacctctttctttcctaaattgcattgaattgataggaaggatggcggaatcttaaagtgatacatgctaactgtagaaaaaaatagaaaatgcacataagcaaaaggaaacatttaaatgctatctttcaaagataactactcttaaaaccttgagtatcttttcagacctttttcttggcaaatgaatccatattgacatatttgatttttttaaaaacatggaaacgtactgttttgtaaattctttttaactgcacatctactgttcataaatatacctctgtaacataactttttgtggttctaatgtactctgttgtatagctaatacaagttaggatgcttttggccagaggtaacagtgtccaaatataattggcctaagtaacctaggaaattgtttgacataacacagggttcaggggtgtcattaaagacacactttttttgccttgacctcagttggtttgttttgccttaggctattccacctctcgatcacaagagctgctgctataacttccagttttacatctttgtaaaattgtatctcaaaggcagaaaaggccatttcgtctctcatttgttttatccatgaggaagatttttaacaaaagcctccagaagatttcccctcagtttccattgacttagatcaggttacagagaaaggcaatgtctgacatttttggtctctgttagaagtagactctgttgaaaagaaagaagctaagctaggtgtgaagaatggaattggaagcccactgccttcccataagaaaggtttaccataatttactcacttttttctgtgttagacattttgattatctgcagtttattactacaagcagtggcagagtgaatgtccttgtacattttgagttacatgcttaattatgtccttgagaaagtttctaaaagtggaatgattggtttgactggttcatagggctttaattatacaatttacccctctaattagtactatatgtatgtgacttccctccccctgccagaatactccttggtcaattgtaggtattctttttggtttaatttttgccaatgtaattaaaaaatggtatgtcatttttaaaatttgtatttctttcattacaaataagattgttatgtcagtattgttattggcttttcgtattcctcttaacgtgaaccgtctgttcattgtttttacctgttttcgttttagcaagtagtacttaatttaaagtgtgaacttaatatataagatgccaggaccatcatattgatgacaaaaatctattatgtggttgtagtgcatgtcttggagttaaactcttaagtatcaagaagtaaaataatttcattgtttctgttactaacattaaaagtgtgcaaattgtataaaattaggtacttcgattagtaaaagaaaaaaatttgaatgnnnnnnnnnnnnnattttattaagcatgcccagttatgccaagcatagtaaataaaggtcaagtagcatttataatagaggaagtattgttatccctagcatgagtgtaatgggtgatatgaaaaactttgtcttgtcattataataataaaaaaaatgaacatttattatggaatttcaaa

SEQ ID NO: 240985 - DNA, 1024 bp, Homo Sapiens
  misc_feature (549)..(575): n is a, c, g, or t
ttggtgttattattgttttaaaggagagcatcctaagttaataggaaccaaaaaataatgatgggcagaagggggggaatagccacaggggacaaaccttaaggcattataagtgaccttatttctgcttttctgagctaagaatggtgctgatggtaaagtttgagacttttgccacacacaaatttgtgaaaattaaacgagatgtggaaggagaacctcagtgattttattccctagtgaggcctctgagggcctccacactgcctggcagaacataccactgaactagtatgtgctagaggagggcacaaacatccgctccttccctaggcctgctggctctggttttctatgcagatgattcattggattgggggtgagtgttttgtttttctgggggcagtgtgagctttgagggttggaatattgggaggcattccttagtttcctcaactagcctggaaagttaggagtctagggtaattaccccccaatgagtctagcctactattcactgctttgtgtgcatttttttctccctctttnnnnnnnnnnnnnnnnnnnnnnnnnnngtagatagtgctaaatattttagctcatgaaacttggttaggatggctgggggtacaagtccccaaactacctcttgttacagtagccagggagtggaatttcgtcaaccggtacttttaaggttaggatgggacgggaaaagtgaagcaggatattagctccttataccttctcccttccatttctgagatctcacattccatctatcacagggttttcaaagagatgctgagggtaacaaggaactcacttggcagtcagagcatcatgctttgaggtttggggtgctcaagctgggagggtagaatgccattccagaggacaagccacaaaatgccttaatttgagctcgtatttacccctgctgatagtgacttgagagttcccgggtttttcctcttgtccttccctcccttctgtccttccatgtgtggggaaaggtgttttt

SEQ ID NO: 240986 - DNA, 963 bp, Homo Sapiens
  misc_feature (418)..(429): n is a, c, g, or t
  misc_feature (759)..(768): n is a, c, g, or t
ttttctttttttgtgagaaaagccggcataaagcacttttattgcaataataaaacttgagactcataaatggtgctgggggaagggtgcagcaacgatttctcaccaaatcactacacaggacagcaaaggggtgagaaggggctgagggaggaaaagccaggaaactgagatcagcagagggagccaagcatcaaaaaacaggagatgctgaagctgcgatgaccagcatcattttcttaagagaacattcaaggatttgtcatgatggctgggctttcactgggtgttaagtctacaaacagcaccttcaattgaaactgtcaattaaagtttttaagatttaggaagtggtggagcttggaaagttatgagattacaaaattcctgaaagtccattagaaaaaccacaggatgnnnnnnnnnnnnggccacaaagaaggcttcagaggtccctgctggcccagggacagatacctgtagtgtccagcattgcagtgaacatgatctactttcaaaggcagagggtttaaggggagggtgggtgggaatggtggaggcaaaggctctccccatccccacctcagttttaggtagggcttttaatttaacccaaagacatctctcaacttggagagtaattcagtcctcaacagcgcctcaaatctgctatggctttgcagcgcagcagcaagaatgtttaatatataatagataaaaatttcatccaaaaaattaaaataaaatattcttgcaaannnnnnnnnnaacaccaattcctattctaatgttaacctaccacttgtgctgttaatacttgaccatgtacttaattggaaacctatatccaaaagactgaaactgaatcttcaccccaaaatgaaaacaaaataaaatgaataacttgaggtttatggcatatagtttaggtaaacacacatacgaggagaaaggggaagccaa

SEQ ID NO: 240987 - DNA, 1506 bp, Homo Sapiens
ttggataaattgttcaaggtcacatggcaagtgaatgatggaattgagttttggacccaggtgggctgatttgagccttacctgtgctcttaacgacttttctaaactgcctccctgccaagacctgccacacttgtcatagagcaactgtattgccttttaaaaaaatcactcagtcaaattgtcattgtcattgtcataacaataacatctgaatcagcctttacagtttggaaatcacattatttctttcagtcttcacaagatccctgtgaagtttgcaggcatgtgcaggacaaaggaagagaccttcaactccaaaatctctatatctttactcctggaagtctttgaagttttgttgttccagagctgtgaccagaccaaagaactgtgatatttttttctcttaactatgctaggctttttgttgttgttgttttttaaaactaaaggagttctctccacagaccttctgcttctttccaggtcacagaactctgtatgtgggagttcggatgccgcttggccggcagagccatcggcatcaccgcactcatggccagaagcaccggagacgagggcggggcaaaggagccagccagggggaggaaggcctggaagccctggcccacgacacaccatctcagcgtgttcagttcattcttggcaccgaggaagatgaagagcatgtgcctcatgagctgtttacagagctggatgagatctgtatgaaagagggagaagatgctgagtggaaggaaacagccaggtggctgaagtttgaagaagatgttgaagatgggggagaacgctggagcaagccttatgtggcaaccctttcattgcacagcctgtttgagctaaggagctgccttattaatggaacagtcctcctggatatgcatgcaaatagcatagaagaaatttcagacctgatcctggatcagcaagaactgtccagtgacctgaatgacagcatgagggttaaagtgcgggaagcccttctcaaaaagcatcatcatcagaatgaaaagaagagaaacaacctcattcccattgttcgctcctttgctgaggttggcaagaagcagtctgatcctcatttgatggataaacatggtcaaaccgtgtctcctcagtctgttccaactacaaatcttgaagtaaaaaatggagtgaattgtgaacatagtcctgtggatttaagcaaggtagaccttcatttcatgaaaaaaattcctactggggccgaggcctccaatgtcctggttggagaggtggatattttggaccgtcccattgttgcctttgtgaggctgtctccagctgttcttctctcacgcctaacagaagtgccaatcccaacaagatttttgtttatcttattgggtccagtagggaaaggtcagcagtaccatgagattggcagatccatggccaccatcatgacagatgagatttttcatgacgtagcatataaagcaaaagagcgagatgatctcc

SEQ ID NO: 240988 - DNA, 978 bp, Homo Sapiens
  misc_feature (329)..(363): n is a, c, g, or t
  misc_feature (410)..(566): n is a, c, g, or t
  misc_feature (590)..(607): n is a, c, g, or t
caacttgtcaaagaagtcatgggatcctgggattctgataaggatttcactgaatctgtagatcaatttgtaggtactgctgtcttagcaatgttaagtcttccaacccatgaacacagaatgtcttccaatttattcggttatttaatttatttaaacaatattttgtagttttggaggtaaatgttttttgctcttttgtcacatttattcctgtgtatgttgttctttttcacactatgatgaataaaattgctttatttcattttcaggttgtttgctgttaagtacagaaatacaatcgagtggcaggcacagtggctcacacnnnnnnnnnnnnnnnnnnnnnnnnnnnnnnnnnnngcatcacctgaggtcaggagttcgagactagcctggccaatgtggtnnnnnnnnnnnnnnnnnnnnnnnnnnnnnnnnnnnnnnnnnnnnnnnnnnnnnnnnnnnnnnnnnnnnnnnnnnnnnnnnnnnnnnnnnnnnnnnnnnnnnnnnnnnnnnnnnnnnnnnnnnnnnnnnnnnnnnnnnnnnnnnnnnnnnnnnnnnnntgacaagagcgaaactccatctcnnnnnnnnnnnnnnnnnntttacaattgagttttatatttttatgtatttatcttgtatccagaaaccttgctacaattgtttatgaactttaatagtgttgttttacttttttagctacatacaagatcaaatagagacagtatagtttgacttctcccttcccaatctgagtaatttttatttcatttccttgtacaattgctcttactccagtataatattgaagggaaggagtaaaagcagacatccttgtctcgctcctgatcttagaaggaaagcattcagtcttttactattacatacatttgcttagatttttcacagatgccctttagcaggtgagaggctctcttctaatcctagtttgctgattatttacatcatgaa

SEQ ID NO: 240989 - DNA, 1834 bp, Homo Sapiens
  misc_feature (917)..(1015): n is a, c, g, or t
  misc_feature (1017)..(1032): n is a, c, g, or t
  misc_feature (1053)..(1156): n is a, c, g, or t
  misc_feature (1178)..(1221): n is a, c, g, or t
ttctttggaacaaacttcgctcaaaagatgaacacttcgaaaataactataatagtaaagaatttaatgaatcaccaaaaaactaaaatttataatctgatttctttttaaaaacatgtatcatttagcctaagcttcctcaactctctggacaaagaaaaagattctgagtttttaagttcttccaataggatttcctctggggaaatttgctttgaatactgtgtgggaatccatttctgagagaagcccagaataaagggatcgcctcaggctgctccatggagaagtaccctcatgggagacagtacagctctggggggcagagctatgggggcagactacctggttcataccccagcatccacttattaactgtgtgacctttggcaagttgcttatcctctctgtgcaccagttttctcagttataaaatgggaatatgaactgtatcaatcacacagatgtaaagctgttgtaaaggggacaaactaaggtaagtactcattaaatattagctattattatctgataaaaaaatttgtacatgtgtgtatgtgtatctttgggaaaagaagaagacatcttgtttactatttttttggagagaggctgggacatggataatcacataatttgctattattactttaatctgacttgaagaaccgtttaaaaataaaattttagcatgtcatatattccttatagtaggcttatttcaccttttttctgtccagagagagtatcagtgagaaagattttaagggtgaaaacatgaattggtgggacttagtaaagagctgaaaaactactacaatgtgggctacggttattataaaatgatagagatggaaactagagtaagtttattttgtctgttaaacctggaagtgagctaggcatggtcactcatnnnnnnnnnnnnnnnnnnnnnnnnnnnnnnnnnnnnnnnnnnnnnnnnnnnnnnnnnnnnnnnnnnnnnnnnnnnnnnnnnnnnnnnnnnnnnnnnnnncnnnnnnnnnnnnnnnngccaggcatggtggtgcactnnnnnnnnnnnnnnnnnnnnnnnnnnnnnnnnnnnnnnnnnnnnnnnnnnnnnnnnnnnnnnnnnnnnnnnnnnnnnnnnnnnnnnnnnnnnnnnnnnnnnnnnggacacagtgagaccctgtctnnnnnnnnnnnnnnnnnnnnnnnnnnnnnnnnnnnnnnnnnnnncttggaagtggggtatactcaaaaatataaaattatctagagaaaaacaatgctcagaaatatatagcattactgtggcagggcaagtgcacccaatatggcagtttacaaggagcagaaagcaaaggctcaagtgaggggcctggtcagagttcaggctccaagtgttctagaataagaaactcaagtcaggcaccgtggcacatgcctataatcccatctactcgagaggccaaggttgggggatggcttgagcccaggagttcaagtccagtcttgatgtcttcccttgagagacagggcaatatagtaaggacttgtctcttaagggaaaaagcaatgaaagaaagaagctcagttttccaaattagtagcaaggactccagaaatggcttccttactcctgcctctgccaaagatttaggaggcaaatatccctctgctggcttactagcaacctgagtcaggcaaacaattttatgaaacactgctacagtttagtttgtttgacctcctccaaatctcatgttgaaatttgatcctcagtgttggaggtgaagcctaacgggaggggtctgggtcatgggggcagattcccccatgaatggcccaa

SEQ ID NO: 240990 - DNA, 927 bp, Homo Sapiens
ttggccagtgtgtccaccctgaagagtgaagacataaagatccgccaggacagcgtcaccaagctgctgacggacgtgcagctgatgaaggggaagcaggagtgcatggactccaagctcctggccatgaagcatgagaatgaggctctgtggcgggaggtggccagccttcggcagaagcatgcccagcaacagaaagtcgtcaacaagctcattcagttcctgatctcactggtgcagtcaaaccggatcctgggggtgaagagaaagatccccctgatgctgaacgacagtggctcagcacattccatgcccaagtatagccggcagttctccctggagcacgtccacggctcgggcccctactcggccccctccccagcctacagcagctccagcctctacgcccctgatgctgtggccagctctggacccatcatctccgacatcaccgagctggctcctgccagccccatggcctcccccggcgggagcatagacgagaggcccctatccagcagccccctggtgcgtgtcaaggaggagccccccagcccgcctcagagcccccgggtagaggaggcgagtcccgggcgcccatcttccgtggacaccctcttgtccccgaccgccctcattgactccatcctgcgggagagtgaacctgcccccgcctccgtcacagccctcacggacgccaggggccacacggacaccgagggccggcctccctcccccccgcccacctccacccctgaaaagtgcctcaccgtaacctgcctggacaatttggctcgcactccacagatgtctaagggtcgcccgcctcttcccctgcccctcttcctctcgcatggccaagtccagccagggaatgagctcagtgaccacttgggatgctatggactccaaacctggattaacctg

SEQ ID NO: 240991 - DNA, 2257 bp, Homo Sapiens
  misc_feature (1192)..(1203): n is a, c, g, or t
attttggttaaagacctaggcaacacttccacatgcaggtgttaagaggttaagggtctgtgcaactgttgcccagctagcacagataaagggaatgaatataacaaattcagaattataatacccaacttgctcttgacataccagtctcttgttatgttcatattctttcttgacaagggtagtaaggaggtcatgccttcttagggcttcttctatcttgaagggggacatgaagttaagtaggttaataatgctgttcactaaattcttaaggataagctcttctcatttaaattcctatgcttaagactgacagtaacttacttcatcttggagtttcttctttgatcgattttctctacatgcttctttcttaagctgttcaacctgtgcaatttgctgtttccacattttgcttagtgttgggccagaaacataaagaaacggaaactgctccagcataaggggcaggagactgtgttcacttactttcactgcaaggtaaaataagatgttcttaatctgagacgtggacaagaactgtcatccaacatccctggtagatcaaagcttatgtaagtgatgtggttttgatcctgaaaagaacaattctaaatgtacttataataatttgcattactcctctgattggagtaagccaactactggtaaggataaaaataagctcaatagttctggattgatgccatgctggtcctgggaagtccatcctaattgctcagccgcttcagtgcctgtgggtagattctctacgtacggtaaaacaagactcctcaacctttcccggtaggcaagtgcttagaagaaaaagtttctggtctaaaggatagagtaggagggccagcagtctttgggtgtaacaggaagcctggcatttctcatgactttgtttcttgtaacaagactctacactcattggcactgtcaatatataggaggtggacaggccatctgcttgccttggagcatccctttcattctaccaacctcccagaaatagacaaaaaggcagtcaaagtgagtaagcacacgagtgaggctaacgctggagcagcaggtggcagtcctggcattccttgggtgccaatatataggcctccctgaagtacttccttattgaagagttttagccctctacggaaaaccagccacatggcagtgattgggnnnnnnnnnnnnctttcttcggctaactggtggatgttagctttcagtgctgtgtccttggaatgttgcacatgctttcaaaggttgccagttttccataaagtacaattctgtggttcttacttggaactgctttatttggctttgggaggccacctcttagactctgcgttgtggtttttctagagtaaatcttccagggctgactacattctggagttcctttacgaacagcttctcctctgtatattttttccttagaagcagatataaaacagaataaaaataaaaggtctaacagttctttcatacatcatcttaaatattacatactgacaaaaacagctaacggtagttttttagttttttagctaacagtaagccaaaccaccttacttcaaatttgtaaaatctggttaatattcatttactctaagttaaatgcaccttttggcctctggcatcccttggaatttgaaaaagcactgaatctttttcaagtttcagtcaccatagtcccacaccctaaatacaaccactattaatcttttttttaaccattaatgtttcaatgtacttctctttttccatgtagatttaaaaaattctcaggcaactatgcagtatgcttagttgtaaccatactgtactttatatcctgttttgttcatgaatattttagcataagcattttccccatgatttcacttagtttctgtaaccattcttttgaaaggcaatgaaaacttctgttttgggtttcttacaaccaggtctatagccaactaggatgttctgtcttctcttactcttctttaattttgtcagcctagagtagtttttaagcccctggtgaactgctaagtcaaataaacccttaaaaactgatgggaagttttaagtagcggaaaaacactacttttctttggaaccatgtctcgtcatattttagcaacctgaatgccttattaataagcaagtcctgtatcatgacatgaaatcctgccttttcctaaagagctcatgattaaggccctgttggccccttcttcttttaaaaagccaa

SEQ ID NO: 240992 - DNA, 1082 bp, Homo Sapiens
aaagatggtgccaagtgtgagcaagaataagcaagcggggctcttgaggccctcccagagctcattgcagtcagggcctgtggcagagcctgggaggcccttccactccgactcccacctgagtccctcccagcacatgtccctaagtcccgcctcactcaccaggttctcctctttgtacttaatggactgagtgtggtgccgcatgaaacccacagtgaggaagaggtaaatgacagcaaagatggtgtgcagccaaaggaggtcattgctgagagggaaaccacctgccatcagggctgggatcccaggcagggagctgggggtgcagagctggggcctggttaccctcagtgggcactgaactgaggaccaacagcttcactgcaagagatgcctcccacagaggttgtgtggccagcacccctcagcccacagtgaatacttcagaggggtccccatccctgtcctgacaaatgaactccagatccacaggaccctccgtgtttcttaaaaccctggcaaaacagtgtctgcctgtggcatgttcatgcccacagctcaacaacacactagctgcaaggggccttcagataccagccggccccctttggagtacctctggcctgccccgggctcctgacctgccttctccttgatctcacccatcagcacctatccccacgggctccatactcactcagtctgtaggtttgctattgttgtcctcccaaaactatacgggtctttgtccagcaagtcccctgagaggttgacaggcaggatgacacacagggacaaaaagctgaccaccaccaacaggaagatgatgtgcctctggaaggacaggtagtggatggcgtcctccccacaccattccaggatctggtcatcatgcagacggaagatggcagtcagccagggacagcatcccagctcattttcaaagtcttgttgacctgaggaggaagtcgatgacaatctctgaaatctggactcgctgtctgcttctgacaccagggcaatgcggccatagtcccagaatcttcttcttataatagaaaacaccaagattaagccaa

SEQ ID NO: 240993 - DNA, 937 bp, Homo Sapiens
ataaaagccaactttgtgtaaaaaagttggctaggctgggtgtggagctgcagcgtatccacaggccccaggatgcaggccctggtgctactcctctgcattggagccctcctcgggcacagcagctgccagaaccctgccagccccccggaggagggctccccagaccccgacagcacaggggcgctggtggaggaggaggatcctttcttcaaagtccccgtgaacaagctggcagcggctgtctccaacttcggctatgacctgtaccgggtgcgatccagcacgagccccacgaccaacgtgctcctgtctcctctcagtgtggccacggccctctcggccctctcgctgggagcggagcagcgaacagaatccatcattcaccgggctctctactatgacttgatcagcagcccagacatccatggtacctataaggagctccttgacacggtcaccgccccccagaagaacctcaagagtgcctcccggatcgtctttgagaagaagctgcgcataaaatccagctttgtggcacctctggaaaagtcatatgggaccaggcccagagtcctgacgggcaaccctcgcttggacctgcaagagatcaacaactgggtgcaggcgcagatgaaagggaagctcgccaggtccacaaaggaaattcccgatgagatcagcattctccttctcggtgtggcgcacttcaaggggcagtgggtaacaaaagtttgactccagaaagacttccctcgaggatttctacttggatgaagagaggaccgtgaggggtccccatgatgtcggaccctaaggctgttttacgctatgggcttggaatcaaatctcagctgcaagattgcccagctgccctttgaccggaaggcatgagtatcatcttcttcctgcccctgaagtgacccagaatttgacc

SEQ ID NO: 240994 - DNA, 1202 bp, Homo Sapiens
  misc_feature (404)..(425): n is a, c, g, or t
ttttccctagaagtggaatcctttacgtttctcagaggctaaactcccaaagctacagtcagcaattttttcatcagagcccaagggagaggggccagggtaaaagagacgagactgtagagaggcatagagagaccagtaggaagagggtgggagagggcacttatttctctctgtcctctcagtgggttacaaatccagatctggtgacaacactgaggggggccaggtcagggtatgtggatgagaaatgacactggaaggaacatcaaagccccagctacaaaaagaaagtcatcaagccccaaatagaaggggagcctcccagtgcacctcagaaatgggggcaacgatggggaaggagcagaatggagagcacacaaagggttaggggtctttaaaannnnnnnnnnnnnnnnnnnnnnattaaaaacatttcctaaaaaatgtgtcttttcctttatgtctgggtgatatatatgactataagctggccttgagcactgtgtggagaggaaaaaggacagctaggagtcttcccaagcatcctatttgtggcttcagagatctaaagggggacagatgctcaacactcccacccaaatgggtaaagtcaacccttcaggtctcaggtccttggcccgaacaacttggaagccccaaattctcttgatgattaactacaactcccaaaactcttggggtcggcaaaaggaaaaatgggtgttgtcaatcatcaaggatttatggaaaggagcccctcccctacaagctgtcccactttccctgaatctaggcagctgggataataggtgtagcaggggacaggagctcagaaggaggccgccctcctgtgctgcccccaccccgcatttgaggattgcccctcccaggccccacaagcccaccctgctgttgatgctccatcctttccattcctacccctgatcccaacccagaggtccagaatgcctaggagagtgggagaagggtgtcaggaggtgggagcagttgtcccaggccccagcagaagcctggaaaatagctccaagcggaaggaacacagtggcctcaactcattccagggagaagacatggctctgactcagatcataggagtatggggacctagaggtgagagccaggtggcctgccccatccaggtcaatctccatgggctgggccaacttttttgtacaaag

SEQ ID NO: 240995 - DNA, 1339 bp, Homo Sapiens
gatgattaactacaactcccaaaactctggggtcggcaaaaggaaaaatgggtgttgtcaatcatcaaggatttatggaaaaggagcccctccttacaagctgtcccactttcctgaatctaggcagctgggataataggtgtagcaagggacaggagctcagaaggaggccgccctcctgtgctgcccccaccccgcatttgaggattgcccctcccaggccccacaagcccaccctgctgttgatgctccatcctttccattcctacccctgatcccaacccagaggtccagaatgcctaggagagtgggagaagggtgtcaggaggtgggagcagttgtcccaggccccagcagaagcctggaaaatagctccaagcggaaggaacacagtggcctcaactcattccagggagaagacatggctctgactcagatcataggagtatggggacctagaggtgagagccaggtggcctgccccatccaggtcaatctccatgggctgggcttggagtgggaaaagtgagtagaagaggagagcaggttggggtgggaaaggggttcccagtttgcaggccatggccagtttccccagtagcacccagacagcagcaggaacagggtgggggctcctcttgaaacattggtggctacaggctgtgagggagggttggaggggagaagggttaatggtgtggccttggcctggccttgccccagccagtgccggtctcctaggagagcccaccctgcctcccgagaggctgaccactgcaggcccttttcatcctcttctccgagagtggccggtcccccctagtccagctgccaaggggtcagggggctcactcacctctcatgatctctgatgcctggggcctcagcatcttccttggtagcctcttcctcttcaccctcctcttcttcttcctcttggggaggcccccggccagagccgggctcagagagggtgctattcttttccacctccataggaaggggcctctcaacctccaaggtggctgcctccttctcctctccttcagggttttctgcctccttgggacgtttaggagagtcctaggcaggatcaacagaggaagtgggctgaggctggagagggaggccaccagccacccactcctctcctccggggctccttcccaggctgacacccacagtccttccccaaccctactagctgaaatgccttctgtgtcccatctggtcagctggggactccccaagactaggggctggatcgacctctcagactgggcacccctgaggcaaagccctgctcctgtgggataccccatggggaatgttgagccaa

SEQ ID NO: 240996 - DNA, 977 bp, Homo Sapiens
ttggctttgagtccaactcattaaaaaagaagaatctctgtcacctcagccaagtgatttattttttgctcccccttttttgagtcacaggccgagctgcagcctaggaaacccaaatagggtttggtgggccacttagtgggcatggttacattggtttatagcatcccaagaactgtagatccctaggcccctgagagctggacagagcagagaactacagggccaagggtccagagaagtgataacttggcccagggccacacagcagaggtagagggtccttggccagcacactatctaccactctaccccacctcccactgcctgccttgctcccctttcctcccttttcaataccctatcttcccttgttgttaagatggccaaataatacatttactctaaattgattgcctggaaactacctgccttcgtcctgagagcttctgtgtgtcaggctgctggaaagaagactccattcccaggacagaggcccttgagtacaggggctgctttcttcctgcctagattttcaccatctctgcacagctctgagagaatggatgctttctgttgagaaaccagtaccttgtggaggcaggttcttgggctgctactccagggagtggatggaatccttggtcccctaggccagacttcactgccactgtgccagacagctccctgcagctgggccctagccactcttaggaaagactattgggagtatttgctggccagagaatgggactctatcagctttacacatgtcccaccagctgtttcagatagatccttacagctggcagagtaaaagtggtcccgctaccattggggaatcaggaaaggaaagactgagatggttgccaggacttggggtggcccacctgtggagaggactggctgccctgtaggagaaagggaggaagtctacacagaggagcaccaggacgctggaatttccatatgtgctt

SEQ ID NO: 240997 - DNA, 975 bp, Homo Sapiens
  misc_feature (765)..(780): n is a, c, g, or t
ttggctgacacactgacagtgctgagcagagcaaggttgggttggcgctcctctggcagaacctcggctctcaggaggtccttgttccagggaacagctgcttctctggggctgggctctactccctgcagcccctcgcactacccagctggaaccagggacaacgcctgagtccaaccctcgtgtctattttccagaaaacgggcaatgctgtgagagccattggaagactgtcctctatggcaatgatctcagggctcagtggcaggaaatcctcaacagggtcaccaaccagcccgctcaatgcagaaaaactagaatctgaagaagatgtgtcccaagctttccttgaggctgttgctgaggaaaagcctcatgtaaaaccctatttctctaagaccattcgcgatttagaagttgtggagggaagtgctgctagatttgactgcaagattgaaggatacccagaccccgaggttgtctggttcaaagatgaccagtcaatcagggagtcccgccacttccagatagactacgatgaggacgggaactgctctttaattattagtgatgtttgcggggatgacgatgccaagtacacctgcaaggctgtcaacagtcttggagaagccacctgcacagcagagctcattgtggaaacgatggaggaaggtgaaggggaaggggaagaggaagaagagtgaaacaaagccagagaaaagcagtttctaagtcatattaaaaggactatttctctaaaactcnnnnnnnnnnnnnnnnctcaagatagtaaaagcacctagtgtgatagattatcggttaggtcatttgtgggttgattcttcagaaacagcagttgatacctagcagcgttattgatgggcattaatctatgttagttggcaccttaagatactagtgcatgtagatttcatttaggaaatcaccagtaaccttgactgaccaattgatttt

SEQ ID NO: 240998 - DNA, 465 bp, Homo Sapiens
tgagcagatcaaaaacaaggcaagaggggtcaggacacacaggcagaggctcgttccctctccttccagagctgagaataaaactgcagtagactttcaccagggaggaggacaagacaaaaccatgacaacaatcaggtcccttggtgacgacgtgccccatcagcaaggctacccacctacggagtgggaaggttgccgtgccaacctcccctagggcaggagaaacaactggcatatgttcaaatgatcaatatcccaccccccgcaacaaaacttttttctgaaatttcatatagcaacgtgctttcttgaaccgagacgtaagactttacatttagccattacactatgaagagtattgcagatctaacacccaacacatcttgcccagcactcttctttgccttctatatttttattcaagttatgccaacttttttgtacaaagttggctttttaagg

SEQ ID NO: 240999 - DNA, 1445 bp, Homo Sapiens
  misc_feature (461)..(483): n is a, c, g, or t
  misc_feature (650)..(666): n is a, c, g, or t
  misc_feature (742)..(770): n is a, c, g, or t
  misc_feature (1172)..(1194): n is a, c, g, or t
ttggcttatggctacaaagagggcaaaccgtgcattattataaagctcaaccgagttctaggcttcaaacctaagcctcccaagaatgagtccttggagacttacccagtgatgaagtataacccaaatgtccttcccgttcagtgcactggcaagcgagatgaagataaggataaagttggaaatgtggagtattttggactgggcaactcccctggttttcctctgcagtattatccgtactatggcaaactcctgcagcccaaatacctgcagcccctgctggccgtacagttcaccaatcttaccatggacactgaaattcgcatagagtgtaaggcgtacggtgagaacattgggtacagtgagaaagaccgttttcagggacgttttgatgtaaaaattgaagttaagagctgatcacaagcacaaatctttcccactagccatttaataagttnnnnnnnnnnnnnnnnnnnnnnncctactagtcttgaacaaactgtcatacgtatgggacctacacttaatctatatgctttacactagctttctgcatttaataggttagaatgtaaattaaagtgtagcaatagcaacaaaatatttattctactgtaaatgacaaacccccaccccagcccccaggnnnnnnnnnnnnnnnnngacctaacaccacaggaaaagactatggagtatgttaaaaatgctcatcgatgggccattacctttgaaagagccnnnnnnnnnnnnnnnnnnnnnnnnnnnnnttaccatgccagttttattcccgttgaatatttacaccttggacagcaaaccttgctcacataaagtagaaaacagatacaataaaacatggcttgaaaaatgaccagagtatgcacctgtagtactgtacactaaataaaatacacaaggcagcaatacttaggggccagaaacactgcttactacaagtcagttacggaatcataatttacagtaaaaatgggcacgtcccaaggctcaatttttctttttcttttgtcatttacagtagaataaatattttgttgctattgctacactttaatttacattctaacctattaaatgcagaaagctagtgtaaagcatatagattaagtgtaggtcccatacgtatgacagtttgttcaagactagtaggnnnnnnnnnnnnnnnnnnnnnnnaacttattaaatggctagtgggaaagatttgtgcttgtgatcagctcttaacttcaatttttacatcaaaacgtccctgaaaacggtctttctcactgtacccaatgttctcaccgtacgccttacactctatgcgaatttcagtgtccatggtaagattggtgaactgtacggccagcaggggctgcaggtatttgggctgcaggagtttgccatagtacggataatactgcagaggaaaaccaggccaa

SEQ ID NO: 241000 - DNA, 1432 bp, Homo Sapiens
ttgggtttgctacacagcagcgacgacgcaggcggcggccccagcgactcgcaactgcctccctgaccacagcggccaccgcccaacacccccgagaagccatcgccaccaccggcaggagaacctagggtccataaagccatcttcgcgatcgactaaagctacgtcaacaactatggcgggcgacgggcggcgggcagaggcggtgcgggaaggatggggtgtgtacgtcacccccagggcccccatccgagagggaaggggccggctcgcccctcaaaatggcggcagcagcgatgcgcctgcgtacagaactcctccgtcgcgccagggccggcgggaagtgaggttctcggacgagccgccagaagtgtacggcgacttcgagcccctggtggccaaagaaaggtccccggtgggaaaacgaacccggctagaagagttccggtccgattctgcgaaagaggaagtgagagaaagcgcgtactaccttcggtctaggcagcggaggcagccgcgaccccaggaaaccgaggaaatgaagacgcgaaggactacccgccttcagcagcagcactcagagcagcctccgctacagccgtctcctgttacgaccaggagagggctgcgggactctcattcctctgaagaggatgaagcatcttcccaaactgatttaagccaaacgatctcaaagaaaactgtcaggagcatacaagaggctccagcagtgagtgaagatcttgtaatcaggttacgtcgaccccctctaagatacccaagatatgaagccaccagtgtccaacagaaggtcaatttctctgaagaaggagaaactgaagaagatgatcaagacagctctcacagcagtgtcactactgttaaggccagatccagggattctgatgaatctggagataaaaccaccagatcatctagtcaatatatagaatcattttggcagtcatcacaaagtcaaaacttcacagctcatgataagcaacgttcagtgctaagctcaggatatcaaaaaactccccaggaatgggccccacaaactgcaagaataaggaccaggatgcaaaatgacagcattctgaaatcagagcttggaaaccagtcaccatcaacctccagccgacaagtgactggacaaccccaaaatgcatcttttgtcaagaggaaccggtggtggctacttcctctgatagctgctcttgcctctgggagtttttggttctttagtactcctgaggtagaaaccactgctgttcaagagttccagaaccagatgaatcaacttaagaataagtaccaaggtcaagatgagaagctgtggaaaaggagccaaacattcctggaaaaacatcttaatagctcccatcctcggtctcagcctgctatcttactgctcactgctgcccgagatgct

SEQ ID NO: 241001 - DNA, 1049 bp, Homo Sapiens
atatgctcagaactgtaaaaaatcatagtaatttgtataacataaaaggattatagtttttcggaattcaaaatctggataagaacattcatgatgctgaaagttaaactgaatatcttgcaaacatttactgttaatgagagagtgcacttcttgtgccttgattcttgatggctaagtgtctacaaggtagatgggagcaccagcatttgcgctacctctaatccatcaagttgggaggtagcaaaattggccggaaaattttccagtgtgtgttctgtgtttggagaactgtctaattaggtaccctcctgtagcccctgtatttttacgttataaagtataggattatcaatcttcctttaaatcaattctcaggttaacataagatcacaatgaaggtgttcattctgaagtgaaggcatgggtgcaaaagctttaaactcatcaggttgatggtttaaagctatgtgtaattaaaagaactgtacaaatacctaccacggtgtgccagatggattttaaatctgccgtaacactaaatatttgtcaagttggctacgtttgaggttttgcagacttgaagcggcattgtaacactttcataatcttgaatgctgtcatgactggtctcaacagacaaaaggaccgataagaccagtggcattaaaatacagatgactcttttggggtggggtgcaggatacgtgcggattgctggggttaagcacaatatttgaagattaaatagtcacaaagattagtaacaattcatatcacgacccaagaacctaatttataacatttttaaactctgaattacaaccataagatttatatctcctgtagcaaatgtattttgtaataatgcaacatgtagtagaaccactgtctcctaagtgatctacttaaaacatctcacatgttgctgtgtatttcagtgtttccggaacaatacatcctgttccccactactgaagatgcaagaatattgcacttttccctttaggaggtaccaataacaaaagctgagctgagtgatcacccaa

SEQ ID NO: 241002 - DNA, 476 bp, Homo Sapiens
tagctctttcttaggtactatttgcatggtttatcttttcaattcttttactttcagtctatttatgtctttaaatctaaagtgtgtctatcatacatagcatacagttggatcatgttttttcaccccttctaccaactctgccttgtgattacatttataagttgtgattgctctgagaatacaatgaacaccttaaaataatcaaattaataccaacttaatttcagtaatacataaaaactttgctctaatatgtctcttccctcctccctcatatgtataactattgtcatacaaattacatatctacatgtcataagcccattgacacagtcttctaattatctcttcatgcagtcatctttcaaaatcagatagcaggtaaaaagagttacaaacaaaaataatttgtacttttatatttacttatgttatctttactggtgctcttcatctcgttatatggattccaa

SEQ ID NO: 241003 - DNA, 1044 bp, Homo Sapiens
ccaactttgtacaaaaaagttgggttcagagtctaccttgatcaaggaacacagatcttcttaaacaacagcattgagaaatcgggctggctatttatccaattatatcattcttttgtgtcatctgtttttagcctgtttatgtctagaacatctatcaatgggttgctaggaagaggctcaatgtttgtgttttcaccagatcagtttcagagactgcttaaaattaatccagactggaaaacccacagacttcttgatttaggtgctggagatggagaagtcacaaaaatcatgagccctcattttgaagaaatctatgccactgagctttctgaaactatgatatggcagcttcagaaaaagaaatacagagtccttggtataaatgaatggcagaatacggggttccagtatgatgtcatcagctgcctgaacttgctggaccgctgtgatcagcccctgactttgttaaaagatatcagaagtgtcttggagccaactagaggcagggtcatccttgcccttgtcctcccctttcatccctatgtggaaaacgtaggtggcaagtgggagaaaccatcagaaattttggaaatcaaaggacagaactgggaagaacaagtgaatagtctgcctgaagttttcagaaaagctggttttgttatcgaagctttcaccagactaccatacctgtgtgaaggcgacatgtataatgactactacgttctggatgacgctgtctttgttctcaaaccagtataaacacgtggaggtcgaagtcttcagagtccgcaccctccgggatgtgcccttggaagagggtctgtgttcacaattacgtgaagggaggacccttggggaccgccattctaaatatcatgtaggaatttaaaaagccaaaatactaattatttctttgtagtgtgtaaaggaatgtttttaaaagacaaaaacccaactctttgtggatttttatcaactctttactcagagccactctccgatgcaggtcacactccaattatgatggaatatattttt

SEQ ID NO: 241004 - DNA, 846 bp, Homo Sapiens
gaaaacaagctcaattcccactgccccactttgagatcttgcagcaatatttgctaagccttttcctatagctcagcttctggtcttgtcacaatccccttcgagtcatgccacagggcgtgggcaactaggaaacacagtgaaagacgtgagcagccacttaaccagcctgggagagaatacacccgtgagcaggctgatggaagggctgctgtgattgggggtggctctggcagccgtgagcccccacaaaacctcccatctgttggtacttactgtaactctgaaagtgaagacgtcatcatgtctctccttaggagatactggtcatccataaaggaaccgagtggcctccaaactcaggggaccaagggaggctggcacagccctggtccttcaagtgactaatgccacacagctgcaaggctgaggtgctgtgctgcttgcagtgcagctagcactaagcagccagctgaagaggaggatcccagttctgggaactgcagagagaatttctaattttcctgcatagcagatacttcccatagcctgattcctccattggtaaaactcttaaagagttgaaaagcaaatcattagcttctcttttgtccatattaccaagggaaagaagggagagtatatgagattactattccttctttcttgagatgactcataaaattttatatttaaacattccaaaagttaccttggctgggctcattatcttcggaaaagtgtaagaggagcatccttccggactttggcctaggtgactaaatggtgtatgaaatgttgcctgcagaggcaggagagaaaagaaaaccatcttttcatgtgtga

SEQ ID NO: 241005 - DNA, 1356 bp, Homo Sapiens
  misc_feature (139)..(179): n is a, c, g, or t
cccaccagcaaggggctagcataaagctgcaaagtcacttattcgaaaatcaaaacatggcaacaatttctttcttagagaacaggctcttgagcctgtactaaaaaatctctgatgacattcgtgtttcattcctttnnnnnnnnnnnnnnnnnnnnnnnnnnnnnnnnnnnnnnnnngacgtcttttgattaacccgttttggtggctagatttccattccagaatttgaataccattttccaaaagaagataccagatcatctctgtatggaattggtaactttgtttgctgagtatttttccagtcacactccagcttccattgcttcactggcttctgttacattttcttcactttgaaatcaatggtggcattaagttaatcaaagctgttcaatggaacacctaaatcgcttatttactagagtatacatgttatttcctaagatgtaaatccttcaaaactagagtgcgatgcagcaggaaaatctcaagcatcttttcaaagtatgtttttctgatgagctggcgactagaggaagaaagggcttttaggtatcagtcaccctttttgcttcaataataggaacgcgcagtgcagctgcctatgttacagaagcttgaatctacatgacatgcaacagggtaaatgctactagggaaattatatcaatgacattataatttgccctttgcagagtagctgtgaagttatttggtcctgacattctgtggaactgagcatagacttgggtccatagaatataaatggagagtaggagatgccttggtacaaatgagaaataaatagataccagtcagcctagggaacaaggaaatttctctgtttagtagaagtttctagatccctaaggccaccagtcaatataattttaaccagactgtccttctgccactgtttacacttattatattgggcaattttcactaatattggaaattgcctcatgactcaaaagcaaaacgggtttgaaattattggctgcattacagagttaagagaattggcttggggtgattccaaagtgacagctaagaagtttcaaacacacactacatttaagggacaatcaacttctctattaaagtctacaaaaatacatttcccagaagggttcaatagccaatcaaaggaaaccatgaacacaattagcagcaccaggtgtccagacacaaagatttttgtttgtaggaattactgaaaatgctgctgttttcagcccagaggtcattccttcttcctggtacctgtgtgtctaattgtcaaaggaaggatacatcattgtaaaataatggccaagttgtcttaaaagtatcttctatcttttccaa

SEQ ID NO: 241006 - DNA, 1050 bp, Homo Sapiens
  misc_feature (58)..(91): n is a, c, g, or t
ttggcttccttctgccctaccatgttgcttggacaccagggtggaatagcagagaacnnnnnnnnnnnnnnnnnnnnnnnnnnnnnnnnnncgatagatttctgaactgagacatgtgactccctaggcctatttctgcatgggtcggagagtgggcgggactgctttactgagttatagtgaatgtagttttaacctaagcgcctcacatgactaactcctcatccatcaagaatgagctcagctctcacttccccactcctcacccccctgtaaagtaacctttctccaaggttatgcttcaacaggaatagctaacatttattaaattgtggcacgtaagtatcttggatatattggctcattgaatcctcacacctactattttacagagatgccagtggggcttgagattgaatcacttgcccaggctcccactgctggtaaacagtagagggggctcctgacccataagtctggcttgacaacccattccctcaactgcggatcccggattcccttatcaccctgttgatttctccatagctgtggtaacatttgttgcatgaatggaccgttgaaatagggcctggcagggagaaattcaggaaatgatgaatgaatggttcttccctggcagcctcgatgacttacgagccctcaaggggaagcattttctcctggaccccttgatgccggagctgctggtgtttcccgcccagacagatctgcatgaacacccactgtaccgggccggacacctcattctgcaggacagggccagctgtctcccagccatgctgctggacccccgccaggctcccatgtcatggatgcctgtgccaccccaggcaataaagaccagtcacttggctgctcttctgaagaaccaaagatctttgcctttgacctggatgccaggcggctggcatccatggccacgctgctggcctgggctggcgtctcctgctgtgagctggctgaggaggacttcctggcggtctcccccttagatccgcgctatcgtgaggtccactatgtcctgctgga

SEQ ID NO: 241007 - DNA, 619 bp, Homo Sapiens
ggagtggagctgagaaagatgctcaaggtggaggagtaaatgattggagggaggggaaggaagcacctaggatgactcggtttctggcttgaccaaatgggtggaaaacggtgacatctgttagattaaactggggatgtactaagtgtaaagtctgagaggaaagatgaatgcagcgactgtggcatctgtggtgcattcatgtgaacctaaggagggaagaatgcaaaagggaagtctacactgggcggtgagaatcaccaggtgggaggcaggagctaaagttagagaaaaaacggagagctccggaagaatgtaggatggggctcctaggagttcgatgtttaagggatgcgaggaaaacaaaccttggagatggagaaactgctggaaaggtaggaacaaagcccagagagcaaagtcacaactatccaaccacttctcttcccagtaccccagacacctccctagatgaggacagccagggctctaagctctcacctggaagcccgaccctgataggagaaaccttgtctcttgaaataactacataaacggagcaggtcttgagagtgttcacacgcacaaatcgaggcagctgggaggctaggtaggccaa

SEQ ID NO: 241008 - DNA, 1069 bp, Homo Sapiens
ttgggtatgtcaaggccgtgacccgtgtattattgtccgagtggccggaacgggagccaacatggcagcggggttcgggcgatgctgcagggtcctgagaagtatttctcgttttcattggagatcacagcatacaaaagccaatcgacaacgtgaaccaggattaggatttagttttgagttcaccgaacagcagaaagaatttcaagctactgctcgtaaatttgccagagaggaaatcatcccagtggctgcagaatatgataaaactggtgaatatccagtccccctaattagaagagcctgggaacttggtttaatgaacacacacattccagagaactgtggaggtcttggacttggaacttttgatgcttgtttaattagtgaagaattggcttatggatgtacaggggttcagactgctattgaaggaaattctttggggcaaatgcctattattattgctggaaatgatcaacaaaagaagaagtatttggggagaatgactgaggagccattgatgtgtgcttattgtgtaacagaacctggagcaggctctgatgtagctggtataaagaccaaagcagaaaagaaaggagatgagtatattattaatggtcagaagatgtggataaccaacggaggaaaagctaattggtattttttattggcacgttctgatccagatcctaaagctcctgctaataaagcctttactggattcattgtggaagcagataccccaggaattcagattgggagaaaggaattaaacatgggccagcgatgttcagatactagaggaattgtcttcgaagatgtgaaagtgcctaaagaaaatgttttaattggtgacggagctggtttcaaagttgcaatgggagcttttgataaaaccagacctgtagtagctgctggtgctgttggattagcacaaagagctttggatgaagctaccaagtatgccctggaaaggaaaactttcggaaagctacttgtagagcaccaagcaatatcatttatgctggctgaaatggcaatgaaagttgaactagctagaatgagt

SEQ ID NO: 241009 - DNA, 1571 bp, Homo Sapiens
ttggccacaccctgtgtcaccccactctgtcctggcttcctataattcccaattcccacccaattcatgttttgcttctggcccttctcatctgtaggaatctttgccacctcctcatagctctggattcttgggctctaagcctgagggcccaggccctcaggcagagtccagagatacaggcacagaggccctgacccctcacatctggaaccgtttacatactgccactagccgaaagagttaccggcccagctccatggagccttggatggagcccctgagtccttttgaggatgtggctggcacagaaatgagtcagtctgacagtggggtggacctgagtggggattctcaggtgtcatcaggtccctgcagccagcgaagttcccctgatggaggactcaagggggcagcagagggaccccccaagaggcctggaggctcctcacccctgaatgctgttccttgtgagggtccacctggctctgaacctcctaggagaccaccacctgccccccacgatggggacagaaaggagctgccccgggagcagcctctgccccctggccccattggcacagaacgatcacagcgtacagaccgaggcacagagcctggccccattcggccatcccatcgacctggtcccccagtccagtttggcactagtgacaaggactcagacttacgcctagtggtaggagacagcttgaaagcagagaaggagctaacagcatcagtcactgaggccattcctgtatcacgagactgggagctgcttcccagtgctgctgcctctgctgagccacaatccaagaacctggattctgggcactgtgtcccggagcccagctcctcaggccagcgcctgtatcctgaggttttctatggcagtgctgggccttccagttctcagatctctgggggagccatggactctcaattacatccaaacagtggaggcttccgccctgggacaccctcactgcacccttacagatcacagcccctatacctaccccccggcccagcccctccctcagcactgctctctggggtagctctcaagggccagtttctggatttctccacaatgcaagctacagagctggggaagttgccggctggaggagttctctaccctccaccttccttcctctactctccggctttctgccccagtcctttgcctgacacatcgttgcttcaggtacgccaggatctgccatccccttcggatttttattctactcctctgcagcctggtggccaaagtggctttctcccttcaggggctcctgcccagcagatgcttctacccatggtagactcacagctgcctgtggtgaactttggctccctgccgccagcaccacctcctgccccacctcccctttctctgttacctgtgggccctgctctgcagccccccagcctggctgtgcggcccccacctgctcctgctactcgggtgctgccttcacctgccaagcccttccccgctagcttggggcgagcagagctgcatccagtggaactaaagccgttccaggattatcaaaaactga

SEQ ID NO: 241010 - DNA, 1161 bp, Homo Sapiens
  misc_feature (1014)..(1032): n is a, c, g, or t
gccctagtgacgccggtatagcgccgactaggccccggctcctcctctgctgggctccggaccctgccccgcacccacccctttctcctacgcctcttcctctcccacccgggtctcttcctttctagaggccgggaagttaaacttgtagccaccacctccgctcttcccgtcaccctcgcccccacttcgggccgaaagcacggtacagaggctgttggtggctttgccacgccaccccacccaccccggatcgcggctgtcttaagggacctggattcatcaggggctcttcggggcctgtgcgagtgctgatctgctccgtttttgcaaaaggcgcctgtgtctggcagagctggtgtgagacgagacaatcctgccccgccgccgggataatcaagagttttggccggacctttgagcatacaccgagagagtgaggagccagacgacaagcacacactatggcgctgaaacggattaataaggaacttagtgatttggcccgtgaccctccagcacaatgttctgcaggtccagttggggatgatatgtttcattggcaagccacaattatgggacctaatgacagcccatatcaaggcggtgtattctttttgacaattcattttcctacagactaccccttcaaaccacctaaggttgcatttacaacaagaatttatcatccaaatattaacagtaatggcagcatttgtctcgatattctaagatcacagtggtcgcctgctttaacaatttctaaagttcttttatccatttgttcactgctatgtgatccaaacccagatgaccccctagtgccagagattgcacggatctataaaacagacagagataagtacaacagaatatctcgggaatggactcagaagtatgccatgtgatgctaccttaaagtcagaataacctgcattatagctggaataaactttaaattactgttccttttttgattttcttatccggctgctcccctatcagacctcatcnnnnnnnnnnnnnnnnnnngtttacctccctccattcattcacatgctcatctgagaagacttaagttcttccagctttggacaataactgcttttagaaactgtaaagtagttacaagagaacagttgcccaagactcagaattttt

SEQ ID NO: 241011 - DNA, 955 bp, Homo Sapiens
  misc_feature (808)..(826): n is a, c, g, or t
ctttgtacaaaaaagttggcgacatcttgtggctgtgtcgtgcgcgtgagccccgtagggccggggaggcaccagctgccgcgcggggaggaggccgaggccgcagcttgagggaggccccggcccctctgcgcctgtgtctggcagagctggtgtgagacgagacaatcctgccccgccgccgggataatcaagagttttggccggacctttgagcatacaccgagagagtgaggagccagacgacaagcacacactatggcgctgaaacggattaataaggaacttagtgatttggcccgtgaccctccagcacaatgttctgcaggtccagttggggatgatatgtttcattggcaagccacaattatgggacctaatgacagcccatatcaaggcggtgtattctttttgacaattcattttcctacagactaccccttcaaaccacctaaggttgcatttacaacaagaatttatcatccaaatattaacagtaatggcagcatttgtctcgatattctaagatcacagtggtcgcctgctttaacaatttctaaagttcttttatccatttgttcactgctatgtgatccaaacccagatgaccccctagtgccagagattgcacggatctataaaacagacagagataagtacaacagaatatctcgggaatggactcagaagtatgccatgtgatgctaccttaaagtcagaataacctgcattatagctggaataaactttaaattactgttccttttttgattttcttatccggctgctcccctatcagacctcatcnnnnnnnnnnnnnnnnnnngtttacctccctccattcattcacatgctcatctgagaagacttaagttcttccagctttggacaataactgcttttagaaactgtaaagtagttacaagagaacagttgcccaagactcagaattttt

SEQ ID NO: 241012 - DNA, 1320 bp, Homo Sapiens
aaaaaggtagcttcagttgtgactgctagtttaataagttagcaaagtatggctgccaaaaaagtaagttgctttaacgacaaaacaataccaattcaatctgcccttacaaaaacagttttcagtgttactgtacactcccagcagtagtagaaaaacttggaaactgatatttaggtatgtagcatgatttgaaaagaaattagaaagcatccaagaaggtgaaaaacaggtgtaaaattttaaaaacactcgaattatggcagcatctgcctaagttgtttctttttctcccttaagtgattctactcaataaagtttgggaaatgctactgctacagtctctctccatgagattcaagtgcagtatatacacatatgaaacttttatacaatgccttgccttttgaaaaagcttttttgtacttactgaactcataaaatcaaaaaacaattaatggtgaaatagtgttaattattacaacttcacctgggatattcatgcggagaccggaaaacttgttacatataacgtaacagatgcctattaagagaccagaattgatctacagatctttcgaagattatataattttagactgtcattaggtagaaacaacctatcatggttacataaaacatgactgaagatttgtctaaaaattaacccaggaaagcaaagtcagaattttcctagagtggaaacctcaggattcaaaagctctattaagtttaggtatatcataccattcttggtaaaaaggccgcaagttagtgtgagatgtccaagtggtttgggattgaaaaatacagaagtctattaaaataaattttgctattataagatgagatgaaggtaactcattaggcaaataatgcctactcaccacaatttgaattttaacaacttctcacaaagtatctttaatcaacaccactaaaagaacaaaaattataaaagtaactttattgcttccccatctcttaccaaaaagctgccataataaaaatactcagataagtagatctaagaatgaagctttattagacaatgagaacagcttatttcactagaaatatttacctttagaaattgttaaagcaggcgaccactgtgatcttagaatatcgagacaaatgctgccattactgttaatatttggatgataaattcttgttgtaaatgcaacctaaaacaaaaacttttaagtattttattcaaataaaaacaaacatcttttaaagcaaaacttaaaataatcaagccacaatgttaaaaatgtcatctattagcatagaagttctaaatattatagccaa

SEQ ID NO: 241013 - DNA, 1070 bp, Homo Sapiens
  misc_feature (786)..(804): n is a, c, g, or t
  misc_feature (934)..(944): n is a, c, g, or t
tttgtacaaaaaagttgggcgcacaaaactgctcttaagtcattgcagagctaccgcttcggttagccagccacgaagttctcgcgagagtcgtctcctcgataccaagcgcctgtgtctggcagagctggtgtgagacgagacaatcctgccccgccgccgggataatcaagagttttggccggacctttgagcatacaccgagagagtgaggagccagacgacaagcacacactatggcgctgaaacggattaataaggaacttagtgatttggcccgtgaccctccagcacaatgttctgcaggtccagttggggatgatatgtttcattggcaagccacaattatgggacctaatgacagcccatatcaaggcggtgtattctttttgacaattcattttcctacagactaccccttcaaaccacctaaggttgcatttacaacaagaatttatcatccaaatattaacagtaatggcagcatttgtctcgatattctaagatcacagtggtcgcctgctttaacaatttctaaagttcttttatccatttgttcactgctatgtgatccaaacccagatgaccccctagtgccagagattgcacggatctataaaacagacagagataagtacaacagaatatctcgggaatggactcagaagtatgccatgtgatgctaccttaaagtcagaataacctgcattatagctggaataaactttaaattactgttccttttttgattttcttatccggctgctcccctatcagacctcatcnnnnnnnnnnnnnnnnnnngtttacctccctccattcattcacatgctcatctgagaagacttaagttcttccagctttggacaataactgcttttagaaactgtaaagtagttacaagagaacagttgcccaagactcagaatttttnnnnnnnnnnntggagcatgtgtattatgtggccaatgtcttcactctaacttggttatgagactaaaaccattcctcactgctctaacatgctgaagaaatcatctgagggggagggagatggatgctcagttgtc

SEQ ID NO: 241014 - DNA, 1662 bp, Homo Sapiens
  misc_feature (100)..(134): n is a, c, g, or t
  misc_feature (642)..(650): n is a, c, g, or t
aaaccaaattcagaacatccttttggaaaacagctcccaccaaacccaacactggcttttagaaactggtttccatttctctggtccatccaatcgctgnnnnnnnnnnnnnnnnnnnnnnnnnnnnnnnnnnnacagagcacttatggagttaatgctgcttattctctgggcaagaaaagcatttgctgccagtttggaaagctctgaagaccaagtattagtggtgaggatcttttctctgggaacccagtgctcatatacagcacacagggcctgcacagctctctggccctctggagtttcatcccctccaatcagtactctgtctgggttctttaggtccttgatggctgttccctctgccagaaactcagggttggacagcacctgtaaattcaagttgggttttgtgtttgcatcaaatatgcgacggatactttctgctgcccgcaccggaactgtgcttttctcagtcacaattttgtacccatttgagttttgcacaatgcgtttagcacaagcttcaatatacttcagatttgctgcccggcctttccccattccataggtttttgttggagtattcacagaaataaatacaagatcagcttctttgatggcatcatcaatattggtagnnnnnnnnngattttttcctcgacaggattctaccacttcttttagtcctggctcataaataggaagtgtaggagaattccacgcattgattcttgattcattgacatcaacaaccgttaccctgatttcaggacacatatgagcaatgacactacatgtgggtcctccaacatagcctgcaccgatgcaacagatcttcttaatttcaaacatgattgtactagaaggaaaacagtaagactgttctagtattgaaaacagaaaatttaaagaaataatattgtacattaattatactttataaaaactgtcaaggtgacagatatctggaaagatttcctacattcgctctgaggaattatggaaatagtgatttaaaaaataacattccaattggatgacctagcctgttctcagctgcactagcatgaaacatatggaaataattacagtaactgatattactgaaggggagccacaaagattataatgacctaatatttagaaagtaaagaatcaaagtaaatccttccttaggtctataatacactaggacaactttgattgctgagagaaagctccaggatgaacatacttgtacgattcttgcttaaataaatgctagtgtacaaagatgagtttataacaggtttagattacgatgatatagaataagattagttccacagtccagaattggcctctgagattatatgccctacacactactttggctttcaaagtttacttttaggtactaggcaataatcttaaactccatttcaactttaatcagaaaccataaggtggttaaagaaaatgtaatttctgtaattaccaaagctgttacacagattttttttcttcccaatgccagcagaaaagtgggttacacagattttgatagattttcaaaagcattaggtgaactgattcacactaatcaaaatgacaaggaactgatttatacataagtatgctcatttatccgttataatgagaactgtcaaactgatccaa

SEQ ID NO: 241015 - DNA, 2083 bp, Homo Sapiens
  misc_feature (1775)..(1775): n is a, c, g, or t
aaggcatcattttcgagggtctaaaattatctggtaaaacaaatgaaattaagtgatccaaagctgctgaagtatgtttgaactctccagtgccctatagctgcaagagttgaattagtcatgcagtcatatggcagcaggttggtgattcagtccgaccttctttaggtaaccgagcatttatttaaccaactataccactgcattgggacgtctgcacttgagcttctacaatctgatataaatctgaatacaggattattctgtttgaaaactttgctatgtgtgaactgtaatacttgatacatttttggtttgaagactttgtctaagcctcattatactgaagttgaagaaaccaaatgagctccaccctcactttgcctgccctgatatgatcacttgttgagtcactggagttcctttcattttggcactgatgctgttttctcttgtctgatttgaaacagtactggtaataatatggttgttgaaaatgtgatcacctttatctaaagtgggagaagatacatacacagtatggcaaatggataaaatattgtggcatcaactacttttaaagtagaaaagctatccattttatacaatcactgatacagtctatgtcaaaaaaccaacagaccattattcctcttgaagttagtttgattttatctttgtatggttgtctacaatttgttttcctgtaaatgcagatagttaaaatctaaaggatagaatgctttcctaaaacagaacattagcctttaaggttaaatagactttacattgtatctaagttaatctttataaagcactagaatttttggtcaaaagtcaaaatagtattagaatattgaaattattgatagctttcataatctcagcttttttgaacttccacaatttttggaatatgtcataatttttttccctgtttcaaatgtgttcagaggaaatagaatgtaaaacatcacaaaaaaaattgcagtacataaaatttctggactatgttagttacttgatctggaagtttaaaatttggactaaaaggttttattgaaataaagcctcttaaaatgaaaaatcatatacttttaacatcacttttaagctaataaatataagaattcttttggaaattagaggtggaaacacactggaacctcatgataattgaccctctggatcaccagattagtttaatttaacagatatgtccaaggaagttgagctatagggagtaagaaaaagcatcatgataacgtctagtcaataacatggcacttcagcagagattcatagatgatggtatgcccatgcatcatttgctcttcaaatatctatgtgcttggagccacagtttcctaagcgcatagtttttggtcctgcctcatgtaaaatagttaatgattatcatttacttggaaagattttacctgtgaagtgaaattctttcattgggggtaagggtatgaggtgatcaggaagtttcttctggaattttatcaagtccttgtattctaaaatagccaagcaaaatgatagtaaattctttgtctttgttctttcagtcagaggtatttattaagtacctactgtgtgctcagcactaaaggtttgttgataaaatgacaattaaaaaatggcatttagccaaaggccttttcagccaggagtaagaaaagatggttagtgatatttggaaatacctggatatttgctagaggaaaaatgaaagcaaaacttcgtacacagtgccttgcccataatgngtactcaataagcaattgttcctcatagagtcttttgccatgatttatggtgttttttgaaatttgtcttaattgaaaaaagaccaaatatttcaatgagcttataggcagctgtggccagtgaaaaatatggggttgtacagttagtttctaaaatgttattttgcactagttgtcacttaaaaagatgggttccctggaaaatttttggtgctaaagggatactttgtcattatgaatgatctaagtgttaagtgtccgaataactagcccccagaataggtcccttccgccgggtcggtttttcc

SEQ ID NO: 241016 - DNA, 1279 bp, Homo Sapiens
  misc_feature (290)..(310): n is a, c, g, or t
  misc_feature (416)..(424): n is a, c, g, or t
caaagttagataagttcattaaattcaactccccaaacaattacgtttatctatgatgctaggcgagaaaggcctgtgaatctataaggtaggagaatggggaactaagattttaggccttaaaatatgttggaagaatttttcctagttcccacaagcagctactgtaatgaaataacaggagaaaatacagagctgatggttttgctattgtgcttaaaaaactaggcttcctcagtgaagcacctgataaacttaggtggttggattacagtggaaagtccactttnnnnnnnnnnnnnnnnnnnnnaaaactggcgactttttccatccccaatccctgcactgctgagacacaaaatgagttttatggcaaaggatccttaatccccagagacgctttggcttgtggtgcnnnnnnnnnaaggcctctctgctctgcccggtaccatgggtcgaacgaggggtgtataaaatgggggccttgggaagcctccacggtacagggctgcaggcccctcagatgtgaacatgagacacccacccagcaagacctttacacagggaacttaaatctaaccttgataaataaaaccaaacgtttatttacaccaaagaattccaacactggatctttcacatatgaaggacaaagtattatatatatacacacagcaaggggtggcggggctgtaacaagagagtttatagttttcccacaattacaggtctaccatttcagcttcaatggagatagtggctctgctcctacctctcaagatacatttacaagactgaggagcaggtcttctcactggatggcatgtgagggaaggggacggtcggaggaaaagaaggtagaaagcttaaaatggaagtcagtgtggccacatctcccattagctctagcatgaaacctgtacagacaatgtttgtttcttttgtaaaaagcagtaagttatgcccagtaactaaatgaattcaaaatggccaagacaaagaaaactaagaaagattttgccttccctctcctaccagctatggagcacagcatgttgggagatgaacagggaaaagaccaaggtaaggagcctgggagggaaggtatcaacattttaaactgaactaaaaataaaagtataaatgagttggatttagggttagatcagtaagacatgattcttactgaacagaagtttttagtatctgtctgcattttgggtagattttcaacatctcgatgtaactaagacacacttccacaagagccactagccaa

SEQ ID NO: 241017 - DNA, 935 bp, Homo Sapiens
  misc_feature (211)..(231): n is a, c, g, or t
  misc_feature (337)..(345): n is a, c, g, or t
aatctataaggtaggagaatggggaactaagattttaggccttaaaatatgttggaagaattttcctagttcccacaagcagctactgtaatgaaataacaggagaaaatacagagctgatggttttgctattgtgcttaaaaaactaggcttcctcagtgaagcacctgataaacttaggtggttggattacagtggaaagtccactttnnnnnnnnnnnnnnnnnnnnnaaaactggcgactttttccatccccaatccctgcactgctgagacacaaaatgagttttatggcaaaggatccttaatccccagagacgctttggcttgtggtgcnnnnnnnnnaaggcctctctgctctgcccggtaccatgggtcgaacgaggggtgtataaaatgggggccttgggaagcctccacggtacagggctgcaggcccctcagatgtgaacatgagacacccacccagcaagacctttacacagggaacttaaatctaaccttgataaataaaaccaaacgtttatttacaccaaagaattccaacactggatctttcacatatgaaggacaaagtattatatatatacacacagcaaggggtggcggggctgtaacaagagagtttatagttttcccacaattacaggtctaccatttcagcttcaatggagatagtggctctgctcctacctctcaagatacatttacaagactgaggagcaggtcttctcactggatggcatgtgagggaaggggacggtcggaggaaaagaaggtagaaagcttaaaatggaagtcagtgtggccacatctcccattagctctagcatgaaacctgtacagacaatgtttgtttcttttgtaaaaagcagtaagttatgcccagtaactaaatgaattcaaaatggcccaacttttttgtacaaagttgg

SEQ ID NO: 241018 - DNA, 1569 bp, Homo Sapiens
gagtttgcaaaggtaagaacaaggatgagttgaggatatcacttatgctggaaagtctgttgcaagagaaaaacaaaacctggtctattctaggacccatgtgtttccttaaagtcttaattcgattatgtcacatttagcacgaatgatgccattttggttcggtttggtctgttgggacctagtgctcagtccaaaacaatggcctcccatcattttgtttaaaaaattccccctttgtcaggttgtcacttaggcaagagtgtgaccaaaacttaggatgttagcgccactctccgttactatcattttggatttccagtctcagcatgtcactcatcggtttcggtgtcctcgtggtcacacatttctttcagctcttgtcattccagttgaagagagaccatctgacgttctaaagatggcttcatgcaaacatttaaaacctttgagagaatacagtgcaccagggagactattcttatgactactgagagggttaacaccaagaatttggagtatgctccttagccagggtccccataaaccagaccacctaaactcaaatagaccattctttgacttaactcagtggtcttttcgttaattccctacaacagactctctataacacctgatgttttctccataggccttaagtgccagcatctgcacaggtactttcctgtttagccaattctattttttagcataactttcacaagagaatttaacatctgttgtgtagcctttacagtagaatctgctacagagtctaccatgagggatatgtttctagtcattgcctttttaattccaaaccatggaaaaaggacctaacaaatgatgcccttctagaagagggaaggcctcttggcaatggtctctttaacccatgctgtgggttaagaggagtgaaccaatgttctgcttctgaatgattatgaggcaccatatgtaccattgaagtttctcacctatgatacactgggccttcatctttatctatcaagttataagattatccatgtataaagctggctgcaaagcccttcacaaataaaagtataccccataagtgcacaaaacagacccccttctcacttctgttgttcacagaggcggaagcaacggaaaaacattcaaagataagagtctcatgatagtaagaagtcttgatccatgatcttcagaaagagctgctcacatcaaggatgccatcttcttctggggagaaacttccctgattagctttaccttaagggtttcaatggatgtagagttccaagagtgaccctgctcagttgtgagattatgaccccaaggttcaagatcctgatgttttgttgcagtgatgatgccaagggcagcttttctctgatgttctcagaagatcccatctttgggttccagtccaaatgatgtgattttgaagttactagaaacctgtattccacagtgcttttcagggtcctccccatccgttcacgaacctcgagtctctctctgatcgaccacgtgttcctgtcggctcacagaggccgcctcagggtcctcccccattgccaa

SEQ ID NO: 241019 - DNA, 1424 bp, Homo Sapiens
ttggcattaatgaagatgaagactgttactcagatgaacgatatcagtgctataatcaagagcaaaatgatacagagggtccaaaagacagagaaaaggatgtcagtgaatatttttatgagaaatccctacctagtgtgaatgatatagaagcctcagttaatagaagtagaagccttaaaatagaaacagacaatgtacaggacatttctggggtacttgaagcccatgttcaccagcagtcttcagtggattcacagatttcttcaaaggaaaacaaagacctcatttctgatgccacagaaaaggtttccatcgctgcagaagatgacactttagacaataccttttccgaagaattggagaagcaacagcagtttacagaagaggaagacaacctatatgctgaagcttcagaaaagctttgtacaccacttctggatcttttaacaagagaaaaaaaccaactggaagcccagctgaagtcatcactaaatgaggaaaaaaagtcaaaacaacaactggaaaaaatcagcttactgacagacagtttactaaaagtctttgtaaaggacacagtcaatcaactacaacaaatcaaaaaaaccagggatgagaaaatccagcttagcaatcaggagcttcttggtgatgaccaaaagaaagtaacaccccaagacctatcccaaaatgttgaggaacagtcgccaagtatttcaggttgcttcttaagttctgaattggaagatgaaaaagaagagatttcctctccagatatgtgtcccagaccggagagcccagtatttggtgccagtgggcaggaagaacttgctaagagacttgctgaacttgaactcagccgggagttcctgagcgcgttaggagatgatcaagactggtttgatgaagactttggtttgagctcttctcacaagatccaaaaaaataaggcagaagaaaccattgtacctctaatggcagaacctaaaagagtaacccaacaaccatgtgaaacattattggcagtcccccatactgcagaagaagtagagattcttgtacataatgcagcagaagaactttggaaatggaaagaattaggccacgatcttcatagcatcagtattcctacaaaactgcttggctgtgccagtaaaggtctagatatagaaagcactagtaaaagggtctacaaacaggcggtttttgatttaacaaaagagatttttgaggaaatatttgctgaggatcccaacttaaatcaacctgtctggatgaagccatgtagaatcaactctagttatttccgacgagtgaaaaatccaaataaccttgatgaaatcaagagcttcatagcaagtgaagtactcaagttgttcagtcttaaaaaggagccaaaccacaaaacagattggcagaaatga

SEQ ID NO: 241020 - DNA, 1513 bp, Homo Sapiens
actttgtacaaaaaagttggaaaggaaaggccttagaaagccctaaaagagtttgagcagctgcggaaggttaatccagctgcagcactagaagaactggaaaaaattgaaaaggccagaatgatggaaagaatgagccttaagcaccaaaacagtgggaaatgggccaagtcaaaggcaattatggccaaatatgacctggaggctcgccaagctatgcaggaacagttgtctaagaacaaagaactgacacagaaactccaggtagcctctgagagtgaggaagaggagggaggcacagaagatgtggaagaactccttgtccctgatgtagtgaatgaagtgcagatgaatgcagatgggccgaatccctggatgctcaggagctgcaccagtgacaccaaagaggctgcaacccaggaggaccctgagcaactgccagagcttgaggcccatggagtttctgaaagtgagggagaagaaagaccagtggcagaagaagaaattttgttgagagaatttgaggaaaggcgatcccttagaaaaagatctgagctcagccaagatgctgagccagcaggcagtcaagaaacaaaagattctggcagccaggaggtgctgtctgaattgagagtactatctcagaaattgaaggaaaaacatcagtccaggaagcaaaaagcaagttcagaggggactgttccccaggtccagagagaggaacctgccccagaagaagcggaacccctattgctacagaggtcagagagagtacaaactctggaagagctagaagagctgggaaaagaagattgttttcaaaataaggagcttcccagacctgtgttagaaggacagcagtcagagaggaccccaaataatcggcctgatgcccctaaggagaagaaagagaaggagcaactgatcaacctacagaacttcctgaccacacagtctccttccgtgaggtctttggcagttcccacaataatagaggagctggaagatgaagaggagagagaccaaaggcagatgataaaggaagcttttgctggggatgatgtcatcagagatttcttgaaagagaagagggaagctgtggaggcgagtaagccaaaggacgtggacctgacactacctggctggggcgagtggggtggtgtgggcctaaagcccagtgccaagaaaagacgccagtttctcattaaagcccctgagggtcctccaagaaaagataagaatttgccaaatgtgattatcagtgagaagcgcaacatccacgcagcagctcatcaggtacaagtgcttccatatccatttacccaccatcggcaatttgaaaggaccatccagacccctataggatccacatggaacacccagagggctttccaaaagctgactactcccaagtcgtcaccaagccaggccatatcattaagcccataaaagcagaggatgtgggctaccagtcttcctcaaggtcagacctgcctgtcatacagaggaatcc

SEQ ID NO: 241021 - DNA, 1889 bp, Homo Sapiens
ttggggaaaaaccagttgatttgcagaactttggtctccgtactgacatttactccaagaaaacattagcaaagagtaagggtgctagtgctggaagagaatggactgaacaggagacccttctactcctggaggccctggagatgtacaaggatgattggaacaaagtgtcggaacatgttggaagtcgtactcaggatgaatgcatcctccactttttgagacttcccattgaggacccataccttgagaattcagatgcttcccttgggcctttggcctaccagcctgtccccttcagtcagtcaggaaatccagttatgagtactgttgcttttttggcatctgtggtggaccctcgcgtggcatctgctgcagcaaaagcggctttggaggagttttctcgggtccgggaggaggtaccactggaattggttgaagctcatgtcaagaaagtacaagaagcagcacgagcctctgggaaagtggatcccacctacggtctggagagcagctgcattgcaggcacagggcccgatgagccagagaagcttgaaggagctgaagaggaaaaaatggaagccgaccctgatggtcagcagcctgaaaaggcagaaaataaagtggaaaatgaaacggatgaaggtgataaagcacaagatggagaaaatgaaaaaaatagtgaaaaggaacaggatagtgaagtgagtgaggataccaaatcagaagaaaaggagactgaagagaacaaagaactcactgatacatgtaaagaaagagaaagtgatactgggaagaagaaagtagaacatgaaatttccgaaggaaatgttgccacagccgcagcagctgctcttgcctcagcggctaccaaagccaagcacctggctgcagtggaagaaagaaagatcaagtccctggtagctctcttggttgagacacaaatgaagaaactagagatcaaacttcgacattttgaagagctggaaactatcatggacagagagaaagaagctctagaacaacagaggcagcagttgcttactgaacgccaaaacttccacatggaacagctgaagtatgctgaattacgagcacgacagcaaatggaacagcagcagcatggccagaaccctcaacaggcacaccagcactcaggaggacctggcctggccccacttggagcagcagggcaccctggcatgatgcctcatcaacagccccctccctaccctctgatgcaccaccagatgccaccacctcatccaccccagccaggtcagataccaggcccaggttccatgatgcccgggcagcacatgccaggccgcatgattcccactgttgcagccaacatccacccctctgggagtggccctacccctcctggcatgccaccaatgccaggaaacatcttaggaccccgggtacccctgacagcacctaacggcatgtatccccctccaccacagcagcagccaccgccaccaccacctgcagatggggtccctccgcctcctgctcctggcccgccagcctcagctgctccttagcctggaagatgcagggaacctccacgcccaccaccatgagctggagtggggatgacaagacttgtgttcctcaactttcttgggtttctttcaggatttttcttctcacagctccaagcacgtgtcccgtgcctccccactcctcttaccacccctctctctgacactttttgtgttgggtcctcagccaacactcaacgggaaacctgtagtgacagtgtgccctggtcatccttaaaataacctgcatctcccctgtcctggtgtgggagtaagctgacagtttctctgcagtcctgtcaactttagcatgctatgtctttaccatttttgctc

SEQ ID NO: 241022 - DNA, 905 bp, Homo Sapiens
cagaaagataaaaagataaatgattatatagcattatccatagaagcataagacaaagcaaaaaactgcaagagagcaaaaatggtaaagacatagcatgctaaagttgacaggacctgcagagaaactgtcagcttactcccacaccaggacaggggagatgcaggttattttaaggatgaccagggcacactgtcactacaggtttccccttgagtgttggctgaggacccaacacaaaaagtgtcagagagaggggtggtaagaggagtggggaggcacgggacacgtgcttggagctgtgagaagaaaaatcctgaaagaaacccaagaaagttgaggaacacaagtcttgtcatccccactccagctcatggtggtgggcgtggaggttccctgcatcttccaggctaaggagcagctgaggctggcgggccaggagcaggaggcggagggaccccatctgcaggtggtggtggcggtggctgctgctgtggtggagggggatctgcaaacatatccaagagtaactcgttattgctggaaatacaagagactcaggaaagagcctattcagtgaaaaaaagacacagaagtcctttccttagtggcaggcaaccaatgcaccctgtgaggcattgattccactgtggtctatgcaagtcaattccttctgaacctctagggcactgctcaagttgcttagcctaaccctagtggctggggagtgggaggtgtctgaatttcccccaccctccttccaggccaactccttccaagaatcgctccaggccctttcagaagttaattttgattgcattgtatttcaagggttctaattttatttcttcagttaaaaaataagctccttcctgggacagttctatgtcttgtttttcttcccg

SEQ ID NO: 241023 - DNA, 2489 bp, Homo Sapiens
ttggctgacatttagaaccagctcagctagtgagcaagaaacacaagctccgaagccagaagcgtccccgtcgatgtctgtggctgcatcagagcagcaggaggacatggctcggcccccgcagaggccatccgctgtgccgttgcccaccacgcaggccctggctctggctggaccgaagccaaaagctcaccagttcagcatcaagtccttctccagccctactcagtgcagccactgcacctccctgatggttgggctgatccggcagggctacgcctgcgaggtgtgttcctttgcttgccacgtgtcctgcaaagacggtgccccccaggtgtgcccaatacctcccgagcagtccaagaggcctctgggcgtggacgtgcagcgagggatcggaacagcctacaaaggccatgtcaaggtcccaaagcccacgggggtgaagaagggatggcagcgcgcatatgcagtcgtctgtgactgcaagctcttcctgtatgatctgcctgaaggaaaatccacccagcctggtgtcattgcgagccaagtcttggatctcagagatgacgagttttccgtgagctcagtcctggcctcagatgtcattcatgctacacgccgagatattccatgtatattcagggtgacggcctctctcttaggtgcaccttctaagaccagctcgctgctcattctgacagaaaatgagaatgaaaagaggaagtgggttgggattctagaaggactccagtccatccttcataaaaaccggctgaggaatcaggtcgtgcatgttcccttggaagcctacgacagctcgctgcctctcatcaaggccatcctgacagctgccatcgtggatgcagacaggattgcagtcggcctagaagaagggctctatgtcatagaggtcacccgagatgtgatcgtccgtgccgctgactgtaagaaggtacaccagatcgagcttgctcccagggagaagatcgtaatcctcctctgtggccggaaccaccatgtgcacctctatccgtggtcgtcccttgatggagcggaaggcagctttgacatcaagcttccggaaaccaaaggctgccagctcatggccacggccacactcaagaggaactctggcacctgcctgtttgtggccgtgaaacggctgatcctttgctatgagatccagagaacgaagccattccacagaaagttcaatgagattgtggctcccggcagcgtgcagtgcctggcggtgctcagggacaggctctgtgtgggctacccttctgggttctgcctgctgagcatccagggggacgggcagcctctaaacctggtaaatcccaatgacccctcgcttgcgttcctctcacaacagtcttttgatgccctttgtgctgtggagctcgaaagcgaggagtacctgctttgcttcagccacatgggactgtacgtggacccgcaaggccggagggcacgcgcgcaggagctcatgtggcctgcggctcctgtcgcctgtagttgcagccccacccacgtcacggtgtacagcgagtatggcgtggacgtctttgatgtgcgcaccatggagtgggtgcagaccatcggcctgcggaggataaggcccctgaactctgaaggcaccctcaacctcctcaactgcgagcctccacgcttgatctacttcaagagcaagttctcgggagcggttctcaacgtgccggacacctccgacaacagcaagaagcagatgctgcgcaccaggagcaaaaggcggttcgtcttcaaggtcccagaggaagagagactgcagcagaggcgagagatgcttagagacccagaattgagatccaaaatgatatccaacccaaccaacttcaaccacgtggcccacatgggcccaggcgacggcatgcaggtgctcatggacctgcctctgagtgctgtgcccccctcccaggaggaaaggccgggccccgctcccaccaacctggctcgccagcctccatccaggaacaagccctacatctcgtggccctcatcaggtggatcggagcctagcgtgactgtgcctctgagaagtatgtctgatccagaccaggactttgacaaagagcctgattcggactccaccaaacactcaactccatcgaatagctccaaccccagcggcccaccgagccccaactccccccacaggagccagctccccctcgaaggcctggagcagccggcctgtgacacctgaagccgccagctcgccacaggggccagggagctggagatggcctccagcgtcagtgccaagactgagcgggccctccagtgttgtccaaaggaaatgtagaatcactttgtagatatggagatgaataagacaaatctttattataatattgatcagttttatgccgcattgttcgtggcagtagaccacatctgttcgtctgcacagctgtgagcgatgctgttccatctgcacatga

SEQ ID NO: 241024 - DNA, 1366 bp, Homo Sapiens
  misc_feature (194)..(240): n is a, c, g, or t
  misc_feature (757)..(766): n is a, c, g, or t
tttttgtatgatgatactacctaaaatgctttagtcctgcacccattaacctacagatgtttacacattcttgttaatgtttatttcatcaatctattaggaactgaaattaaactaacaatgttaatttaaaaaaaatctgctaaacttcacctgctaattctttactatttctagtactaaggctcaccacnnnnnnnnnnnnnnnnnnnnnnnnnnnnnnnnnnnnnnnnnnnnnnnggcaaaactctggaaatctacagatagtaccatctctgtgcacagaaagtgaaaattgtggtgtgcgggtgtcatttcagaggttacttagcatacctacttcctatcattcaaatcactctgtctgcactgcttatagtcttgaaggcttctgccttttgtaaaatcccataacattaatttatatacttttgctaaaggcttagaaaactgaaaagtatgtaaaatgagaggaaggtatatctgcatttgcttatataaacataaactatctctagaagaacacacacaacagacacacccactaacaacactgcctcctgagaaggaaactgaatggctcggatatggtgtcatcaattacatattttgaattttaaaccacatgtgaatgctccacttattcaaaaaatgcaggttattccagacctgagaatcagaatcctccacaagatttttatcagtaatttaaaaaaattaccttcccaaatcctgtaacattcaaatatccatgagnnnnnnnnnngtaagtcatatcaagtaacaactgctactttaatgcagattagttttcagtcccaactgatggatatggaaatccctgaaaataaagatacgggtggataaggtaaaaagaaccaagaatataaaagaagtaacgaccctatggaaacctaattatgttctttgaaataattacttgattaaaggaattcaggatcaagaatttgaataagcaccaagaggcaatctagtaggataagtaggaatagacctcagaccattttcatcataccttgtaactgaaaaaacatttctgtgacttccataagggaacctgcagagctctcataatgtaaagggaggggaaggggcagagaaatggagataggtctaaagatgtatgactgagcacatcagtgtctgtgtttttatacagatcaaatccaccttattcatcactgagccataagaacactatagggggaaaaaatatactctgacagcctttggcactgtaaaatgcataatgattaaagaaaattttgtttctagccatatttgaaaaatatttgctagatgattctaagcattaaggcactcatggccaggcgcagtggctcag

SEQ ID NO: 241025 - DNA, 972 bp, Homo Sapiens
  misc_feature (284)..(293): n is a, c, g, or t
  misc_feature (358)..(767): n is a, c, g, or t
ggggcattattcaatgtcttcaaacaaagaatccttgacgaatttccttcagaaccaagcactgggcaaaaattttcttccttctgacgaactgtttcctaaaattgcacacaaaaaagaattctgcaaccagttttctttttataggttggtggacagctcagaagtaagttttatgtttaattgctcttattcctctcattcagaatttattgctattgtttcttctttatcctttattttttggttcatgttggttcttagaacagtttttacaacctcannnnnnnnnnctgaagtgggtggtataaaaaagttgcaattaattcaggaattaaaaatgtggctcctaagacannnnnnnnnnnnnnnnnnnnnnnnnnnnnnnnnnnnnnnnnnnnnnnnnnnnnnnnnnnnnnnnnnnnnnnnnnnnnnnnnnnnnnnnnnnnnnnnnnnnnnnnnnnnnnnnnnnnnnnnnnnnnnnnnnnnnnnnnnnnnnnnnnnnnnnnnnnnnnnnnnnnnnnnnnnnnnnnnnnnnnnnnnnnnnnnnnnnnnnnnnnnnnnnnnnnnnnnnnnnnnnnnnnnnnnnnnnnnnnnnnnnnnnnnnnnnnnnnnnnnnnnnnnnnnnnnnnnnnnnnnnnnnnnnnnnnnnnnnnnnnnnnnnnnnnnnnnnnnnnnnnnnnnnnnnnnnnnnnnnnnnnnnnnnnnnnnnnnnnnnnnnnnnnnnnnnnnnnnnnnnnnnnnnnnnnnnnnnnnnnnnnnnnnnnctaatggcactgcattcccctgtcagaatatttgctcctccctctccattgtttatttacttgaagtgaaaaaggacaaaaaagcaaaagacagcaaattgatggcagaaggtttgcctggaaaattccgagggacaaagaaagaactggcaaataatgcccccccgaaacagataggtcctggggagaaatatgatttccccaa

SEQ ID NO: 241026 - DNA, 933 bp, Homo Sapiens
ctttgtacaaaaaagttggatccgcaccaaccagcaccatgcccatgatactggggtactgggacatccgcgggctggcccacgccatccgcctgctcctggaatacacagactcaagctatgaggaaaagaagtacacgatgggggacgctcctgattatgacagaagccagtggctgaatgaaaaattcaagctgggcctggactttcccaatctgccctacttgattgatggggctcacaagatcacccagagcaacgccatcttgtgctacattgcccgcaagcacaacctgtgtggggagacagaagaggagaagattcgtgtggacattttggagaaccagaccatggacaaccatatgcagctgggcatgatctgctacaatccagaatttgagaaactgaagccaaagtacttggaggaactccctgaaaagctaaagctctactcagagtttctggggaagcggccatggtttgcaggaaacaagatcacttttgtagattttctcgtctatgatgtccttgacctccaccgtatatttgagcccaagtgcttggacgccttcccaaatctgaaggacttcatctcccgctttgagggcttggagaagatctctgcctacatgaagtccagccgcttcctcccaagacctgtgttctcaaagatggctgtctggggcaacaagtagggccttgaaggccaggaggtgggagtgaggagcccatactcagcctgctgcccaggctgtgcagcgcagctggactctgcatcccagcacctgcctcctcgttcctttctcctgtttattcccatctttactcccaagacttcattgtccctcttcactccccctaaacccctgtcccatgcaggccctttgaagcctcagctacccactatccttcgtgaacatcccctcccatcat

SEQ ID NO: 241027 - DNA, 926 bp, Homo Sapiens
actttgtacaaaaaagttgggacagcttggagatagggcccggaattgcgggcgtcactctgctcctgcgacctagccaggcgtgagggagtgacagcagcgcattcgcgggacgagagcgatgagtgagaacgccgcaccaggtctgatctcagagctgaagctggctgtgccctggggccacatcgcagccaaagcctggggctccctgcagggccctccagttctctgcctgcacggctggctggacaatgccagctccttcgacagactcatccctcttctcccgcaagacttttattacgttgccatggatttcggaggtcatgggctctcgtcccattacagcccaggtgtcccatattacctccagacttttgtgagtgagatccgaagagttgtggcagccttgaaatggaatcgattctccattctgggccacagcttcggtggcgtcgtgggcggaatgtttttctgtaccttccccgagatggtggataaacttatcttgctggacacgccgctctttctcctggaatcagatgaaatggagaacttgctgacctacaagcggagagccatagagcacgtgctgcaggtagaggcctcccaggagccctcgcacgtgttcagcctgaagcagctgctgcagaggttactgaagagcaatagccacttgagtgaggagtgcggggagcttctcctgcaaagaggaaccacgaaggtggccacaggtctggttctgaacagagaccagaggctcgcctgggcagagaacagcattgacttcatcagcagggagctgtgtgcgcattccatcaggaagctgcaacccatgtcctgttgatcaaagcagtccacggatattttgattcaagacagaattactctgagaaggagtccctgtcgttcatgaatagacacga

SEQ ID NO: 241028 - DNA, 2604 bp, Homo Sapiens
  misc_feature (1276)..(1292): n is a, c, g, or t
  misc_feature (1538)..(1546): n is a, c, g, or t
cgttacacgtccatttattaaacaagttccttcatgacaatttaatacaatagttatttaacgattagtgttgagaaaattatttccctctacatacaaaaatacagatttgaacactatgaaaaagatcaagacaagtaccatgaaaaactggtccttcaaatgaaagggggaaaattgagggcaatgtgaggctttgcctgctgtcggggacaaatcaatagcagcaaagctttggggccccaacccactccatacatacagacttgaacccaaaagccaggccagccaggggacgcccacccagggcttccacgtcagctgaaaaaccaaacacataaacctaagtttgcccaacgggcatcgcctcagaaagcccacagttgtgtctttaaactgccgaaatgaaagagacttgatgagtaaattgtgatagttgttaacattgccccccaaaagtgccaccaggtgaagtaccacggagaaatcatattggaaagttactacttagccatctgacttgacttccttggttatcaaataattacatattctgacccttcagaaggacaccaaaagctacaattttatgtttcaatccatctgtaccttcatttgcaatggctcagctagtttactcaagggttttgggaccagacataactcacgtcctgcaggaaggagaagcaaaaggagccggtgaagagtacgtgtctgtgtcttggtgtcatctagctcctcacagcaaacagcctgttttgttcaggcctgaagcctggaaaaggccgccgagcctagccagagcatccacaacgaaccaatctgagatccgagtggaagatgagagccccggagctggctgaggtcccccaggaagcttcccactctgcagtggcaggaaggccatgcctctgcaggacgctcgcactgattctggaaggggcccaggccagagaatacacttgggctcagttcaccagcccaaaccacaggggaaggagccggacaccggcctctcaccattttacacccaaagacaggaggtcagggctctgatgctactcttctgtttgtaaaatatggaaccactttctttgtactgtttgaggtgagcagtggctccaaactgagcaagtggttaaaaaatgccaaatgcaattatactgacttataattatttcacagaaatatactcttactctcagactatttaaataagcaggaacaagatgcaggagaagcagcagcagagaggaaagaggaatagccagggaannnnnnnnnnnnnnnnncttctttaaaatacatacgaagtgtaaagagaaaatggccaaaacctcaaaactaccattgttgaaaacaatattaaaaggacacaatctaaaatcatgctacaaaaatagtgttatcttgtttaactaaatgtacatctttttttccaattccatgattgacaagagtgcttatgcgacgcatggaaggcaccagaggtgaagtgattatttgccttaaaatatacaaagaattgcctactttgnnnnnnnnntagtcatacttgtaaataaatagtttagtgtttctgccatgggttcctgaacccctacaaatttcaacatatacaaatagtttcaattcctaccattctcttagagggaaccacgtcaaacaaaatcaagttaggaaaagcactgattttatccaagtaggtcaatttgaggcaagattcaaaaactcattttaaaatgggttacagagtgaaagagttgggaacaggcagccccctttgggcctgggtcagcctacgagtccatcccaggtgtcctgccctcacatctgccagccctcaggccggccaggtctcccttcaaaccctgagtatttgccttcctcacttctgcgaagaggggaacagaatcttgaagcttgcaaaatcgattctggaaaaagcaggcaagcaaagcagggcctgtggggggaagcagcgtgagtcaggcctcaccctggtgcaagggcaccagcaggtctccctcctctcccctcctcaccatccctacgcgtctcctcaccatccctacgcgtgactgactttcctgataaaaatgggatacttcctactgggtgtcagcactgtcatcctaaggcaactcagacgtgatagttttagactatgatcaaatctcacacaaaccattatcagaatcttgtttcacaccatctctcttttcaggcagttatgaaaagaaactctgacctggccctaaatcccatcagcaaagctgactaaggtggtctgagatatgttcttactcctaaactcaaactttaaaagtttcaatagctccctgggggtccaagccaaaggctccctggcctttgtgtattatgcatcccaaagaaaacacgccaccccaggtgtctagatagcaagtcacctgaattaaagcctcagcataaaaaaacaaacatagacaacaaacttaccctatgaaatagatacacagttcaaggacccatcatctgaacttttctaggcaagttgccagtgattcaaactcagcaggtttgtgggtgattttttccttactgttacgtttgtggagtagg

SEQ ID NO: 241029 - DNA, 1487 bp, Homo Sapiens
ttggcacagacggagacccgagtgaccccggggtccgggtgggcgtggggaatggacccatagacccgggacgagcggcgcggagcccgcagctggccagcttcagccaccttgggagacgcagtgcagctgccgctgctgacagacaagaccaaggctcggctgggccccaccccagatccggcctgagcgccttccgcgctgctcggcctcaaggcgtgagtcaccaagggcaagtcccgtgacttggtcctcagggtctccggcctcggcacattaatcttcagacccggctttttcgacgccgagctgccgcccagccccaatggcagggccttccagggagtcccagtcagactgctccccagctcccgcagctgctcggtccctgcaaagcccccgggagcgtttctactctcccctgagcccacgccatcccgtcactcctaggaaacttttcgcgcagaaactcctggagaacagccccggccgccaggtactcgcccgcccggaccgcaaagcccacagagcttcaattcgcaggaaggggagtggggagccctgagctggggtgttcctggaagaggtcggggagcggggggagaggcattccaggctggaggcctggaaacgtttggaagctttgctaaccttggagaccatgtcaggaaagaagcgtacccaggccgtctgctgtgtgcccaccccgatccccatcagtgccccacgcactcgagctcttcttcggcgtctgcagcctcttcatccgcgcggagaggcggaggtctcccggaaacagtgtccgactgtggcaccccagagcgtccaatgcgagctcaggcctttcccgcaagtctggagttttcttatccagttgaggccgccttcgctgtactcactctctgcctcccaccccatcttctgccacccgacctccatctttgatggttagcgccttcagccctcaacagcttcgcacaaccaacccctagaagccgtggagtcagaccggccagggtgggacctaggttttaactcgggttctggctacacacgctgcgcctccatacagtttgtcccaggtttggcagcaggccggctaccttcaggaattctttgctttggcttctgtctgttcctgtctgttgggcaagtttctagctaccccactgagagaaccatagaacaaggaccctggcatggcatacagacaaggaatgtttgctgaattaatggagctggtgccttgcagcttcccttttgttccttgaagttgcccttgctctcctccacatcagctccctctcctcctcagctacttattccccaccctggcttcttctagtcgcagtccccaagtacttgctgaatcctgtatggacagcctaaacctccatttctgacaattcctgtggccccgctccatttgttttttagacttctccctcctttttgtccccatccccatgttataaaactatacacgc

SEQ ID NO: 241030 - DNA, 816 bp, Homo Sapiens
ttggctgtagcatagctcattttattgtttaaacagtttttgcataggaaatatatccgcttccagtaattgactgcagtatgagcagctgctagcagtataggctggatataacagtaacaatcacattaagtcaagcttgatttacaccagtttaaaacttgtggcaattgagttcatttgcaacccacaaaaagtacccaaagaacgttatcctccaaccgggcacaataaaaccttcactaacattctggcccagtctggggttgatcccagaggcctgaactctagaaattaagtaactgtcgtataatacatcctactgctaaaggtttgttacatggagattgtgcatgtgcctccttttgtaaaaaaatttaattaaaatacaaggttctgtatttatggcccatgaggacaaaatgccaaaagttttaaaatggatcaaccctggtgtgtagctagcaagcaataactgactactcgtcacctacagttgtactaaatgtatctaaagaaacacacagtcctacaaaagttgttctcagagaaatatcattgaggtgggggcagctcttcccaggatgctaaaagttctatatgatataagcacaaattaacagcttgatgaagacataatcctactgcagctttgagaaacctatgcctgggatgtagttacccctcacattctacaatgttgtagagattttttttcccaagaaaatgtcatttgaaacatatttacaactgaactcaacagagactgtgaaattgaacaggcactgctcatttgtttgagttttttggtaaaca

SEQ ID NO: 241031 - DNA, 1929 bp, Homo Sapiens
  misc_feature (1271)..(1280): n is a, c, g, or t
  misc_feature (1597)..(1613): n is a, c, g, or t
ttggctgtattttcttctggggcttccatctcttctcaagccttttcacctcctccaaacctagtgtgcagaggagaacaaaccataactggcaccagcctgaaccagcctttggaggccttatttcggtatttctgagggcagccctagcattggaggatgggagatcttgggaaaaatgttgtattggttacgctgcaaacttttatcctgtctaaccccctgcccccaggtgaaccagtgtgttattggtactgcccaggatagaagctgcccagaaactgctgcctggctttttttcttccgagcttgtcttatctcaaaccccttccagtcaaggaactagaatcagcaacgagagttggaagccttcccacagcttcccccagagcgaagaggctgtagtcatgtccccatcccccactggattccctacaaggagaggccttgggcccagatgagccagtacagactccagacagaggggcccttggggccctccaacctcaggtgatgagctgagaaagatgttcacgtctaagcgtccagtgtgcacccagcgctccatagacgcctttgtgaactgaaaagagactggcagagtcccgagaagatggggccctggctttccagggagtgcagcaagcagccggcctgcaggtgagcatggaggcccggccctcaccgcctcgaagccatgccccagatgccactgccacagcgggcgctcgctcctccctaggctgttttagtatttggatttgcattccatcccttgggagggagtcctcagggccactagtgatgagccaagaggagtgggggttgggggcgctcctttctgtttccgttaggccacagactcttcacctggctctgaagagccacttttacctcggtcccctcccagtggtcccaccttctccaccctgccctgccaagtcccctgcatgcccaccgctctccatcctccctcctctccctcttcctcccgtggagacagtatttctttctgtctgtccctttggcccagacccagcctgaccaacgatgagcatttcttaggctcagctcttgatacggaaacgagtgtcttcactccagccagcatcatggtcttcggtgcttcccgggcccggggtctgtcgggagggaagagaactgggcctgacctacctgaactgactggccctccgaggtgggtctgggacatcctagaggccctacatttgtccttggataggggaccggggggggcttggaatgttgcnnnnnnnnnngttacccaagggatgtcagttttttatccctctgcatgggttggattttccaaaatcataatttgcagaaggaaggccagcatttacgatgcaatatgtaattatatatagggtggccacactagggcggggtccttcccccctcacagctttggcccctttcagagattagaaactgggttagaggattgcagaagacgagtggggggagggcagggaagatgcctgtcgggtttttagcacagttcatttcactgggattttgaagcatttctgtctgaacacaaagcctgttctagtcctggcggaacacactnnnnnnnnnnnnnnnnnaagatgcggtaatgaaaccggttagtcaattttgtcttaatattgttgacaattctgtaaagttcctttttatgaatatttctgtttaagctatttcacctttcttttgaaatccttcccttttaaggagaaaatgtgacacttgtgaaaaagcttgtaagagagcccctctcttttttctttaaacctttaaatgacaaatctaggtaattaagttgtgaatttttatttttgctttgttttatgaacatttgtctttcagaataggattgtgtgatatgtttaaatggcaaaacaaacatgattttgtgcaatt

SEQ ID NO: 241032 - DNA, 2353 bp, Homo Sapiens
  misc_feature (1943)..(1982): n is a, c, g, or t
ttggggttggggtaagatggcggctgtgagtctgcggctcggcgacttggtgtgggggaaactcggccgatatcctccttggccaggaaagattgttaatccaccaaaggacttgaagaaacctcgcggaaagaaatgcttctttgtgaaattttttggaacagaagatcatgcctggatcaaagtggaacagctgaagccatatcatgctcataaagaggaaatgataaaaattaacaagggtaaacgattccagcaagcggtagatgctgtcgaagagttcctcaggagagccaaagggaaagaccagacgtcatcccacaattcttctgatgacaagaatcgacgtaattccagtgaggagagaagtaggccaaactcaggtgatgagaagcgcaaacttagcctgtctgaagggaaggtgaagaagaacatgggagaaggaaagaagagggtgtcttcaggctcttcagagagaggctccaaatcccctctgaaaagagcccaagagcaaagtccccggaagcggggtcggcccccaaaggatgagaaggatctcaccatcccggagtctagtaccgtgaaggggatgatggccggaccgatggccgcgtttaaatggcagccaaccgcaagcgagcctgttaaagatgcagatcctcatttccatcatttcctgctaagccaaacagagaagccagctgtctgttaccaggcaatcacgaagaagttgaaaatatgtgaagaggaaactggctccacctccatccaggcagctgacagcacagccgtgaatggcagcatcacacccacagacaaaaagataggatttttgggccttggtctcatgggaagtggaatcgtctccaacttgctaaaaatgggtcacacagtgactgtctggaaccgcactgcagagaaatgtgatttgttcatccaggagggggcccgtctgggaagaacccccgctgaagtcgtctcaacctgcgacatcactttcgcctgcgtgtcggatcccaaggcggccaaggacctggtgctgggccccagtggtgtgctgcaagggatccgccctgggaagtgctacgtggacatgtcaacagtggacgctgacaccgtcactgagctggcccaggtgattgtgtccaggggggggcgctttctggaagcccccgtctcagggaatcagcagctgtctaatgacgggatgttggtgatcttagcggctggagacaggggcttatatgaggactgcagcagctgcttccaggcgatggggaagacctccttcttcctaggtgaagtgggcaatgcagccaagatgatgctgatcgtgaacatggtccaagggagcttcatggccactattgccgaggggctgaccctggcccaggtgacaggccagtcccagcagacactcttggacatcctcaatcagggacagttggccagcatcttcctggaccagaagtgccaaaatatcctgcaaggaaactttaagcctgatttctacctgaaatacattcagaaggatctccgcttagccattgcgctgggtgatgcggtcaaccatccgactcccatggcagctgcagcaaatgaggtgtacaaaagagccaaggcgctggaccagtctgacaacgatatgtccgccgtgtaccgagcctacatacactaagctgtcgacaccccgccctcacccctccaatcccccctctgaccccctcttcctcacatggggtcgggggcctgggagttcattctggaccagcccacctatctccatttccttttatacagactttgagacttgccatcagcacagcacacagcagcacccttcccctgaggccggtggggaggggacaagtgtcagcaggattggcgtgtgggaaagctcttgagctgggcactggccccccggacgaggtggctgtgtgttnnnnnnnnnnnnnnnnnnnnnnnnnnnnnnnnnnnnnnnnggctctcgccccaggatagaagctgcccagaaactgctgcctggctttttttcttccgagcttgtcttatctcaaaccccttccagtcaaggaactagaatcagcaacgagagttggaagccttcccacagcttcccccagagcgaagaggctgtagtcatgtccccatcccccactggattccctacaaggagaggccttgggcccagatgagccagtacagactccagacagaggggcccttggggccctccaacctcaggtgatgagctgagaaagatgttcacgtctaagcgtccagtgtgcaccagcgctctatagacgccctttgtgaactgaaaagagactggcagagttccgagaagatgggg

SEQ ID NO: 241033 - DNA, 936 bp, Homo Sapiens
caagcccagatcaacatcataccgccttgtagctttgtacttggctcttactcttttcaaatctcagtttagatgtcattttctcaaagaaatctgccctaataataaaagtggaggctgagtacctcttgttcccttacagtacctgttatagctcctttgtaatgtttacactgtactattaaagcacttcattaatgatgagttttcttctctaaatataaactcagttgggacaaggcctgaggtggtctcctgtggtatagccccagtacctggcttataaaatatgctgggaagatgttcattgtacatagttatcttcttaatatttactgaatgcctaaatgggaatcaaaattatcttcactttacttaggcacacttacacagacaatgttgaccctttgttgctaatcttcaaaacaacggtaaaacagtattacaactttcttatgcatagattctctctgcagactacttcaagtatccaaatggggaagattgcacctaaaatggaaaagtcaaagtcacttactttgacatgggtttgttgccactgtcctcctttgccttccttccttcttctacaggcttgaggttcaacagtggagtcacttcagcattgccataaccagcaaaggtgattgcagcggtgccattttcttcatctatctcctcaatctccgcttcataacactgtccatcttcactccagactgccatacacttgtctcctactttccatgaatgagtaggttgagtagaagcaaaactgtctgaacttgcaagcgtctcagaaggttgagttgacagaaggtctttggttagttctataacttccattaattacttttcctccctcaagtctgagttctgaaactgctccttcatcgacagatgggcagcagttacagccaacttttttgtacaaag

SEQ ID NO: 241034 - DNA, 555 bp, Homo Sapiens
actttgtacaaaaaagttggggcatcctcagtacccattctccctgagagcgtagttactgcttcccatcccttgggggcagcctcgagtgtagtccattagtaatcagattccagtttggacagggtggctggattgtatatctcgttagtaatgtacatgctcttcaggttctagggctcctgttaggggagggagaaatgttgaatcaagagggaaaacaactactatgatttataaacatattttaatgtaaaaatttgcatttaaaaggagtggccctgttttctgtgttaaaaccccatttggtgctattgagtttgttctttattcttttatcccagtgaaaattgttgatcttgctgtagggaaaaattaaactctttgaatctccaaacaaggaagtttcagcattcccttatggatcagaggaaccttagaggcctgaaattgttgcttccagtttagctgcccctcaaattcaagtgaatattttcccttctccctttacccttctccagaaataaagcaggtgacagggttttcagaatctta

SEQ ID NO: 241035 - DNA, 1048 bp, Homo Sapiens
atgagccacagcgcccaggctgtagctctcttaaggaggaacatatctcatctgagacaaacctgaaatgccaaaccaaactgagttagcccctctctgtctgttgtatatattggagtaataacctatttgtcttgataaagggattgcatgcttgaattgcaaaaacctttatttcttttgggttgcccaatgtgcaagactaagagttattttgataaatttctcaccaggctgactgtctctctgtggggtcgggggagttttcagggtctcacgtattgcagggaaggtttggttgtgagatcgagaataacagaagcagcggagcattctggaaatattactatgatggaaaggactacattgaattcaacaaagaaatcccagcctgggtccccttcgacccagcagcccagataaccaagcagaagtgggaggcagaaccagtctacgtgcagcgggccaaggcttacctggaggaggagtgccctgcgactctgcggaaatacctgaaatacagcaaaaatatcctggaccggcaagatcctccctctgtggtggtcaccagccaccaggccccaggagaaaagaagaaactgaagtgcctggcctacgacttctacccagggaaaattgatgtgcactggactcgggccggcgaggtgcaggagcctgagttacggggagatgttcttcacaatggaaatggcacttaccagtcctgggtggtggtggcagtgcccccgcaggacacagccccctactcctgccacgtgcagcacagcagcctggcccagcctctcgtggtgccctgggaggccagctaggaagcaagggttggaggcaatgtgggatctcagactcagtagctgcccttcctgcctgatgtgggagctgaaccacagaaatcacagtcaatggatccaccaagccctgaggagcagtgtggggggacagacaggaggtggatttggagaccggagactggatgcctgtcttgagtaaactgggactcaaaaatcatctcacctttgaggccaccccc

SEQ ID NO: 241036 - DNA, 880 bp, Homo Sapiens
  misc_feature (525)..(642): n is a, c, g, or t
  misc_feature (707)..(774): n is a, c, g, or t
  misc_feature (781)..(814): n is a, c, g, or t
aaaacaaagtctgatattaaacaccatggctcctatgacacaaggccacctaagtctggccttgtaattcctattttaggcatttctctctactgagcctcttgactggaatatatagccttgaagatagataacttacttttctttcaataatccccaacccaaaaccaagccctaacaattgaggtcttgaatgcatgttttctagagaaggtgcatttatgatagtgatatgagaaagaatatccttcatagacaattagcggttttcctttcaaaactccaatactgcaggctaacaacagaatgcatttccaatttcatttggagaaaagatcctcaagcaatccaaacacgtttccattttaccttccttgatattataatcctttatgatgctaaatgacagacgtctccctttctgctggaatattttttatccattaataaaggtgactgaggatctactatgtcaggcattgttttagatgttggggaatagaccaggcacagtggctcacttannnnnnnnnnnnnnnnnnnnnnnnnnnnnnnnnnnnnnnnnnnnnnnnnnnnnnnnnnnnnnnnnnnnnnnnnnnnnnnnnnnnnnnnnnnnnnnnnnnnnnnnnnnnnnnnnnnnnncatggtagtgcacacctgtagtcccagctactcagcaggctaagacacaagaatcgcttgaaccnnnnnnnnnnnnnnnnnnnnnnnnnnnnnnnnnnnnnnnnnnnnnnnnnnnnnnnnnnnnnnnnnnnntgtctcnnnnnnnnnnnnnnnnnnnnnnnnnnnnnnnnnngatgttggggaagccgggtgaaatgttcactaaatatatgctaagtccatttgttccatggtacag

SEQ ID NO: 241037 - DNA, 1368 bp, Homo Sapiens
  misc_feature (273)..(328): n is a, c, g, or t
  misc_feature (1039)..(1057): n is a, c, g, or t
  misc_feature (1133)..(1155): n is a, c, g, or t
tgtacaaaaaagttggcttaacttctctgtgaaacttggactcagccatgtcttagttttcctcaggtctatatattaacttaattttctagggctacttcccctcatagtggaatggtgtccctgggtaggaaggcatggatctaggtgaaagttaattatatgtgaagtgttccttctcagtgtagatcagttattttgtaatgtgttttgatttttcttgaatgagaaatgaaatagagcatgagaatattaacatgaggatcaacttcnnnnnnnnnnnnnnnnnnnnnnnnnnnnnnnnnnnnnnnnnnnnnnnnnnnnnnnnatgtgaaagatttagggcatataggattttgtcagctttatccctaatttagtaaactttaggtatgtccagctatcaaacttaaatttttttctttctctgtagagctgctctggataaggctaccgtgcttctgagtatgtctaaaggtggaaagcgtaaagatagtgtgtggggctctggaggtgggcagcaatctgtcaatcaccttgttaaagagattgatatgctgctgaaagaatatttactctctggagacatatctgaagctgaacattgccttaaggaactggaagtacctcattttcaccatgagcttgtatatgaagctattataatggttttagagtcaactggagaaagtacatttaagatgattttggatttattaaagtccctttggaagtcttctaccattactgtagaccaaatgaaaagaggttatgagagaatttacaatgaaattccggacattaatctggatgtcccacattcatactctgtgctggagcggtttgtagaagaatgttttcaggctggaataatttccaaacaactcagagatctttgtccttcaaggggcagaaagcgttttgtaagcgaaggagatggaggtcgtcttaaaccagagagctactgaatataagaactcttgcagtcttagatgttataaaaatatatatctgaattgtaagagttgttagcacaagnnnnnnnnnnnnnnnnnnnaagcacttgttttgggtacaaggcatttctgacattttataaacctacatttaaggggaatttttaaaggaaatgnnnnnnnnnnnnnnnnnnnnnnncgagggggcaaggagggacagaaaagtaacctcttcttaagtggaatattctaataagctaccttttgtaagtgccatgtttattatctaatcattccaagttttgcattgatgtctgactgccactcctttctttcaaggacagtgttttttgtagtaaaatcactggtttatacaaagctttatttacggggtaaagttaagctgctaaaa

SEQ ID NO: 241038 - DNA, 1308 bp, Homo Sapiens
  misc_feature (823)..(847): n is a, c, g, or t
ttggcccatcccttccccttatcccccagcccaaaagggcccggtctgcgccccacccccgcccgtccgcccgctacgccgccgccatgtcggcgcaggcccagatgcgcgcgatgctggaccagttgatgggcacctcccgggacggagatacaactcgtcaacgaatcaaattcagtgatgacagagtatgcaagagtcaccttctcaactgttgtcctcatgatgtcctttctggaactagaatggatcttggagaatgtctgaaagtccatgacctggctttaagagcggattatgaaattgcatccaaagaacaagattttttctttgaacttgatgccatggatcatctgcagtcattcattgcagattgtgatcgtagaacagaagtggccaagaaaagattagcagaaactcaagaagagattagtgctgaagtagcagcaaaggcagaacgtgttcatgagttaaatgaagaaattggtaaattgttagccaaggtggaacaactaggagctgaagggaatgtggaggaatcccagaaagtaatggatgaagtagagaaagcacgggcaaagaaaagagaagcagaggaagtttatcggaattctatgccagcttccagttttcagcagcagaaacttcgagtctgtgaagtctgctctgcctatttaggacttcatgataatgacagacgactggctgatcattttgggggtaaactgcacctgggatttattgaaataagagagaagcttgaagaattaaagagagtcgtagctgagaagcaggagaaaagaaaccaggaacggctgaaacnnnnnnnnnnnnnnnnnnnnnnnnnaagggagaagctgaggaggtcccgatcacacagcaagaatccaaaaagatccaggtccagagagcatcgcagacatcgatctcgctccatgtcacgtgaacgcaagaggagaactcgatccaaatctcgggagaaacgccatcgccacaggtcccgctccagcagccgtagccgcagccgtagccaccagagaagtcggcacagttctagagataggagcagagaacgatccaagaggagatcctcaaaagaaagattcagagaccaagacttagcatcatgtgacagagacaggagttcaagagacagatcacctcgtgacagagatcggaaagataagaagcggtcctatgagagtgctaatggcagatcagaagacaggaggagctctgaagagcgcgaagcagggggagatctaactagctgtgtacattttcttcagtccttaagcttcctacgga

SEQ ID NO: 241039 - DNA, 1932 bp, Homo Sapiens
  misc_feature (285)..(332): n is a, c, g, or t
  misc_feature (1319)..(1343): n is a, c, g, or t
ttggctttgtttgactggtgtgtaagtccttcttccaggtttgtacgctcttaaacgcgttattctaccctctctaactcctcccagcagcaaaagggagacacttcagctggaacaaaatagtggaagaaatggcgtctggggttcagtggggattcgcagtgtgtatgcaatgtttgcaagattattttttatgtttttcaattactgtaaataaaaatatatcaatgcttagtgtcaagaagggaacattgtataccagtataaactctcttagtgggtctnnnnnnnnnnnnnnnnnnnnnnnnnnnnnnnnnnnnnnnnnnnnnnnnaaggagttggactcgataatctttaaagtccattcctgctctaaaatcctatgcttttctgaagtactctatttaacagaatgcattgctttctcactttgactatttgaattatgtatgcagtacacttactgcaactgcatgttgtctaaaatagtttttctataggatgtatataaaaactaatccctcttgagctgatttataatgtgtgtatatagccacacataaaaagctagtaatagtagggctctcagaaaatactttccagttgtctaaccttgaatgttattaactcttctatattacaggagatacaactcgtcaacgaatcaaattcagtgatgacagagtatgcaagagtcaccttctcaactgttgtcctcatgatgtcctttctggaactagaatggatcttggagaatgtctgaaagtccatgacctggctttaagagcggattatgaaattgcatccaaagaacaagattttttctttgaacttgatgccatggatcatctgcagtcattcattgcagattgtgatcgtagaacagaagtggccaagaaaagattagcagaaactcaagaagagattagtgctgaagtagcagcaaaggcagaacgtgttcatgagttaaatgaagaaattggtaaattgttagccaaggtggaacaactaggagctgaagggaatgtggaggaatcccagaaagtaatggatgaagtagagaaagcacgggcaaagaaaagagaagcagaggaagtttatcggaattctatgccagcttccagttttcagcagcagaaacttcgagtctgtgaagtctgctctgcctatttaggacttcatgataatgacagacgactggctgatcattttgggggtaaactgcacctgggatttattgaaataagagagaagcttgaagaattaaagagagtcgtagctgagaagcaggagaaaagaaaccaggaacggctgaaacnnnnnnnnnnnnnnnnnnnnnnnnnaagggagaagctgaggaggtcccgatcacacagcaagaatccaaaaagatccaggtccagagagcatcgcagacatcgatctcgctccatgtcacgtgaacgcaagaggagaactcgatccaaatctcgggagaaacgccatcgccacaggtcccgctccagcagccgtagccgcagccgtagccaccagagaagtcggcacagttctagagataggagcagagaacgatccaagaggagatcctcaaaagaaagattcagagaccaagacttagcatcatgtgacagagacaggagttcaagagacagatcacctcgtgacagagatcggaaagataagaagcggtcctatgagagtgctaatggcagatcagaagacaggaggagctctgaagagcgcgaagcaggggagatctaactagctgtgtacatttcttcagtccttaagcttcctacggagttacgtactattgtttagttcacagctgttcaagtgacagtgagcagatcccagacaccagatccagctaggctagatgtacagtatctaacttgatctgaactgaaccctgttttccttgatgatgcc

SEQ ID NO: 241040 - DNA, 1489 bp, Homo Sapiens
  misc_feature (966)..(990): n is a, c, g, or t
ttggctgaaatcatctgcagctccacgtttttgtttgaactgaataacttaggactttgagaagtcaaagccgtcagaaagtaacatgaagtccattcagctgaataaatgtcatattttgctattagcatagaaaagaatctttaaaacttctttccaaaaagcactcagtattgacccatatgttccagtatagttgtgaaccatgtacaactgatgtttgacttatttgactcaacatgaaaggaatttaaccagctgcccttgctgaatcttgtctcctgaatatggagatacaactcgtcaacgaatcaaattcagtgatgacagagtatgcaagagtcaccttctcaactgttgtcctcatgatgtcctttctggaactagaatggatcttggagaatgtctgaaagtccatgacctggctttaagagcggattatgaaattgcatccaaagaacaagattttttctttgaacttgatgccatggatcatctgcagtcattcattgcagattgtgatcgtagaacagaagtggccaagaaaagattagcagaaactcaagaagagattagtgctgaagtagcagcaaaggcagaacgtgttcatgagttaaatgaagaaattggtaaattgttagccaaggtggaacaactaggagctgaccggaatgtggaggaatcccagaaagtaatggatgaagtagagaaagcacgggcaaagaaaagagaagcagaggaagtttatcggaattctatgccagcttccagttttcagcagcagaaacttcgagtctgtgaagtctgctctgcctatttaggacttcatgataatgacagacgactggctgatcattttgggggtaaactgcacctgggatttattgaaataagagagaagcttgaagaattaaagagagtcgtagctgagaagcaggagaaaagaaaccaggaacggctgaaacnnnnnnnnnnnnnnnnnnnnnnnnnaagggagaagctgaggaggtcccgatcacacagcaagaatccaaaaagatccaggtccagagagcatcgcagacatcgatctcgctccatgtcacgtgaacgcaagaggagaactcgatccaaatctcgggagaaacgccatcgccacaggtcccgctccagcagccgtagccgcagccgtagccaccagagaagtcggcacagttctagagataggagcagagaacgatccaagaggagatcctcaaaagaaagattcagagaccaagacttagcatcatgtgacagagacaggagttcaagagacagatcacctcgtgacagagatcggaaagataagaagcggtcctatgagagtgctaatggcagatcagaagacaggaggagctctgaagagcgcgaagcaggggagatctaactagctgtgtacatttcttcagtccttaagcttcctacggagttacgtactattgtttagttcacagctgttcagggtgac

SEQ ID NO: 241041 - DNA, 911 bp, Homo Sapiens
gaatcagttctttctgcagaggctcaagtgaaatgctttttgcgaaatgtgcaagttcctttgtacatttacaaaagctttatttactctgttaactttttcctcattcataatgtttatcttcttaagattagtggtaactggttttgctttgtttttagccttaaagtttttttggctggctatgtgaaatacattcctggacttcggccctcttaatttgttcttggccattgtctagaaaagaaaataaattcaattaaattgcccacatttatgaaccgtaagtcaattttaagtttttaaaggtaccaattaaatctaaaaaattctatcttactcttgattatttttaaagttggtgcatatattatttccaagtctttcactcctagtagattttctgctctttgagtacagagtatgtatctaattcttccctgtatccccagtaatgggcccataggaggcatccaattaatatctgctggttgaattcactaatatcatcaacacaataactgttattctcagcagtacctcaccacccatccttctgttagtctatatactactatgctattctggttcctatcatactttagagactgattctgcctccttcttgacttcttttttattcctttttactctccccactttctctcctgtgcatcccatcaaaatcagtccttaatcctccatttcctacctccctctctcccttaatttacttttatgacttccatattacctctatgtgaacggcccttgccttgaagtgttggatactgtctttcctccgtagctagagatgcattaagccagtaaattctaccttaaaacatctctcagatctgcctttaataatgtatatgaggaataatttttaaaatattaagttaacccaa

SEQ ID NO: 241042 - DNA, 1150 bp, Homo Sapiens
  misc_feature (413)..(429): n is a, c, g, or t
  misc_feature (431)..(630): n is a, c, g, or t
  misc_feature (743)..(804): n is a, c, g, or t
  misc_feature (848)..(935): n is a, c, g, or t
  misc_feature (977)..(991): n is a, c, g, or t
tcaggaaatagaacacacagagctgctccggcagggtctctgacagcctctgcgcatagtccacgatgtgtcatgcaggtaccggctgttggtgttgagcacctggttctgctcatgtgctgcttggaccacgagagggtggcagtgcccaactggaagagggccgcctccgtcacacggctggctccactcagccagtcccactgggcctcccccagccccacgctataaacccagccagaagagatgtagttctagagggagaggtagaaagagggcagtctgaaggcagagcagggagagagaagctggttctggaaaggcagatccaggagttcctgagattctggcagaaggaaagccgcttcagcagaagaaccctgtctagaaagcccatgtctttaaggaggacnnnnnnnnnnnnnnnnnannnnnnnnnnnnnnnnnnnnnnnnnnnnnnnnnnnnnnnnnnnnnnnnnnnnnnnnnnnnnnnnnnnnnnnnnnnnnnnnnnnnnnnnnnnnnnnnnnnnnnnnnnnnnnnnnnnnnnnnnnnnnnnnnnnnnnnnnnnnnnnnnnnnnnnnnnnnnnnnnnnnnnnnnnnnnnnnnnnnnnnnnnnnnnnnnnnnnnnnaaggccttttgaggcttgtatgacaaaggtggggtggggggtgactgtcaactggtttcacttcaccagccaagggggctggtggtaatcttgattgtcaaaggccaaggatnnnnnnnnnnnnnnnnnnnnnnnnnnnnnnnnnnnnnnnnnnnnnnnnnnnnnnnnnnnnnnaaattaacacacttaattctccaaacaccttaaagtgggtaccnnnnnnnnnnnnnnnnnnnnnnnnnnnnnnnnnnnnnnnnnnnnnnnnnnnnnnnnnnnnnnnnnnnnnnnnnnnnnnnnnnnnnnnncagggatttgagcccaagcagtctaagactagagtctctgcnnnnnnnnnnnnnnnaacctcaactttattcatcttccatgtgcctgctgagtctcagactccctttctttccatcagctctggcagcctcatcaagatgactgaattcctacttcagctcccttgcctagcacctgagatggccaatggggctgaagcactgccatgacccaa

SEQ ID NO: 241043 - DNA, 1404 bp, Homo Sapiens
  misc_feature (253)..(275): n is a, c, g, or t
  misc_feature (414)..(505): n is a, c, g, or t
ttggctcggccccgcgccggggctggctgggaacggcgggagcagctgcggtcgcgcggagcgaggggagctggggaccgggcgggcccggggctgcgggaggcggcgccgccgcacaatcgccccggaatgcccgccagggcgcgcgtggggtgcggccgtccggccctgcaactcgagctgctgcccctggttaaaaataccccctgcccggccctccccctccgttccccgcggtgcccttccgccgcgnnnnnnnnnnnnnnnnnnnnnnngcgctggcccctccccggggactgctctgccttttactaatttgtcctctcgcggaattggcccccggcctgcggagggaggggcggggagacaccgtgagtaagagatagtcagagaccgtgccggagagataagggnnnnnnnnnnnnnnnnnnnnnnnnnnnnnnnnnnnnnnnnnnnnnnnnnnnnnnnnnnnnnnnnnnnnnnnnnnnnnnnnnnnnnnnnnnnncggggaggagcgctcttcctggttgggccctgccctgagctgccaccgggaagccagcctcagggactgcagcgacccccaaacacccctcccccagttccttgtgctgtctggaggctccgccctgccccacctgacctgctggctcactacagagctgcaagcccctgacaatgggatccgggaaaggagaggatgtcggaggagatcatcacgccggtgtactgcactggggtgtcagcccaagtgcagaagcagcgggccagggagctgggcctgggccgccatgagaatgccatcaagtacctgggccaggattatgagcagctgcgggtgcgatgcctgcagagtgggaccctcttccgtgatgaggccttccccccggtaccccagagcctgggttacaaggacctgggtcccaattcctccaagacctatggcatcaagtggaagcgtcccacggaactgctgtcaaacccccagttcattgtggatggagctacccgcacagacatctgccagggagcactgggggactgctggctcttggcggccatcgcctccctcactctcaacgacaccctcctgcaccgagtggttccgcacggccagagcttccagaatggctatgccggcatcttccatttccagctgtggcaatttggggagtgggtggacgtggtcgtggatgacctgctgcccatcaaggacgggaagctagtgttcgtgcactctgccgaaggcaacgagttctggagcgccctgcttgagaaggcctatgccaaggtaaatggcagctacgacgccctgtcaagggcagcacctcagagggctttgaggacttcacaggcggggttaccgagtggtacgagttgcgcaaggctcccagtgacctctac

SEQ ID NO: 241044 - DNA, 1614 bp, Homo Sapiens
ttgggccaaacctattcctcaaaccccagaaagtgctggaaataaacacagcaacagcaacagtgtggatgataccattgttgcattaaacatgcgtgctgctttgcgaaatgggctggaaggaagcagtgaagaaacgtcttttcatgatgagtcacttcaggatgaccgagaagaaatagaaaataattcttaccatatgcacccagcaggtattattctcactaaggttggttactatactattccatctatggatgaccttgctaaaattaccaatgaaaaaggagagtgcattgtctctgatttcactattggtcggaaaggttatggttcaatctattttgaaggagatgtgaatttgacaaatctaaatttggatgatattgtgcatatccggaggaaagaagtagttgtctacttagatgataaccaaaaaccacctgtgggtgaagggctaaataggaaggctgaagttacattggatggagtttggccaacagataaaacatctcgttgtttaataaagagcccagatcgccttgctgatatcaactatgaaggaagattggaagcagtttcaaggaaacagggagctcaattcaaagaataccggcctgaaactggttcttgggtgtttaaggtctcccatttttctaagtatggccttcaagattctgatgaagaggaggaggagcatccgtctaaaactagtacaaagaagttgaagactgctcctttgcctcctgcaagccagactacgcccttgcagatggctcttaatggcaaacctgcacctccacctcagagccagagcccagaggtggagcagttagggagggttgtggaactggacagtgacatggtagatatcacccaggagccagttttggataccatgttagaagagagcatgcctgaggatcaggaacctgtgtctgcctcaacacatattgcatcttcactgggaattaatccacatgtcttacagatcatgaaagcatcattgcttactgatgaagaagatgtagatatggcactggatcaacgcttcagtcgcctgccttccaaagcagatacttctcaagaaatctgttctcccagactccccatttcagcatcccactcgtcgaaaactcgttcactagttggtgggttactacaatcaaaatttacaagtggagcttttctttcaccaagtgtctctgtgcaagaatgtcgtactcccagagcagcatctttaatgaatatcccatccacatcctcttggtctgtccctccacccctgacttctgtgttcacaatgcccagcccagcccctgaggttccgttgaaaacagtgggtacacgtaggcaactaggcctagtccctcgtgaaaagtctgtcacctatggcaagggaaaactcttgatggacatggccctattcatgggacgctcatttcgtgttggttggggccccaactggactcttgctaatagtggagaacagctgaatggctctcatgaactagaaaatcatcagattgccgattccatggagtttggattcctgcccaatccagtagctgttaaacccctaactgagtccccattcaaagttcacttagaaaa

SEQ ID NO: 241045 - DNA, 104 bp, Homo Sapiens
ttgggatctaaatttctacttgctaccttccctggtgccctatacaggcacgcatgcacacatcaatagctgtcctaaccttgacacacagccccaggctaaag

SEQ ID NO: 241046 - DNA, 812 bp, Homo Sapiens
ttggctctgcttccttacagcacccccacctgccagagctgatcctccctaggccctgcctaaccttgagttggcccccaatccctctggctgcagaagtccccttacccccaatgagaggaggggcaggaccagatcttttgagagctgagggttgagggcattgagccaacacacagatttgtcgcctctgtccccgaagacacctgcaccctccatgcggagccaagatggggaatggaactgaggaagattataactttgtcttcaagggtactatcgtggtgcagtgggggccctcctggtgtttgacctaaccaagcaccagacctatgctgtggtggagcgatggctgaaggagctctatgaccatgctgaagccacgatcgtcgtcatgctcgtgggtaacaaaagtgacctcagccaggcccgggaagtgcccactgaggaggcccgaatgttcgctgaaaacaatggactgctcttcctggagacctcagccctggactctaccaatgttgagctagcctttgagactgtcctgaaagaaatctttgcgaaggtgtccaagcagagacagaacagcatccggaccaatgccatcactctgggcagtgcccaggctggacaggagcctggccctggggagaagagggcctgttgcatcagcctctgaccttggccagcaccacctgcccccactggctttttggtgcccccttgtccccccctcagccccaggaccttaccctgcccttttggttcaagatatcagactgttccctgttcacagcactctcagggtcttaagg

SEQ ID NO: 241047 - DNA, 1140 bp, Homo Sapiens
gaacattaatgctttctcattgtgggaaatgagaggtgggataaagacatgctcaactcaacagaacaaacacaacctatatgtgactttatgttagtctaggaactgtgcactgatgcacacccaggaggcactaagttaacacacatgcatgcatacctgcctgcctgctgggtaaggagggctgggcaggggaggggggccgccctggctgggggacacggctggggccattgttgccactttctcctctttgtagacatcaatttttacaaagggccgaatgataaaggtccacaagacctcacccagaacggctgttgcaggaagcagaggcctgagcagcctatagccagaagcccaggcagggggtgtgccaactacacaggcccacatgaagagcctccatgaggaagacgttatggcaagaatcctctaagtctccaagggacgagatcagaacaatgtatggaaggtgaagtgatacagatttcagcttaataaaaggaaggcggcccgaaaaatggaactgttcaaaaccacaatggcttcatttaatgggttcgatgtccccagtctgcaggaatgctgtagaagattcaggtagtgagaaatacctcaacagacaagaaagctacttcaaggacttccttcggcaaggcctttcaaacaagttttaacattgaaaacacccatccttcaaagagcttgaagccccaagtgtccatcttccaggatgcacaagactccccaagccttcatcctcccattactatttaatatccacactacattgttcggcacttggtttccctccagtatgcaccgtggcagccagtaagacacccccagggagcacaaccgcagctcactatttttctccccatgctcaataagttcagtaagtgcttgatgattgactagcatcaggaataaactaggagcattttacattcacactatctagttaaacattccaaatgacagatttccagaaaaatgttgcaacaaatgtaagtatttatagacatgcctggtaaggtatgtagcatttggagaaataataactagaacagagtactgtacaaaagaaaatggtacacttttgtatgagtctaagatatattggacaaatgccaa

SEQ ID NO: 241048 - DNA, 1024 bp, Homo Sapiens
ttgggtgagtgccacgaacaggccaataaggagggagcagtgcggggtttaaatctgaggctaggctggctcttctcggcgtgctgcggcggaacggctgttggtttctgctggttgtaggtccttggctggtcgggcctccggtgttctgcttctccccgctgagctgctgcctggtgaagaggaagccatggcgctccgagtcaccaggaactcgaaaattaatgctgaaaataaggcgaagatcaacatggcaggcgcaaagcgcgttcctacggcccctgctgcaacctccaagcccggactgaggccaagaacagctcttggggacattggtaacaaagtcagtgaacaactgcaggccaaaatgcctatgaagaaggaagcaaaaccttcagctactggaaaagtcattgataaaaaactaccaaaacctcttgaaaaggtacctatgctggtgccagtgccagtgtctgagccagtgccagagccagaacctgagccagaacctgagcctgttaaagaagaaaaactttcgcctgagcctattttggttgatactgcctctccaagcccaatggaaacatctggatgtgcccctgcagaagaagacctgtgtcaggctttctctgatgtaattcttgcagtaaatgatgtggatgcagaagatggagctgatccaaacctttgtagtgaatatgtgaaagatatttatgcttatctgagacaacttgaggaagagcaagcagtcagaccaaaatacctactgggtcgggaagtcactggaaacatgagagccatcctaattgactggctagtacaggttcaaatgaaattcaggttgttgcaggagaccatgtacatgactgtctccattattgatcggttcatgcagaataattgtgtgcccaagaagatgctgcagctggttggtgtcactgccatgtttattgcaagcaaatatgaaaaatgtaccctccagaaattggtgactttgcttttgtgactgacacacttatactaa

SEQ ID NO: 241049 - DNA, 982 bp, Homo Sapiens
  misc_feature (389)..(398): n is a, c, g, or t
tagggcgtctctcattgaatcaagacagttatttctggcacgtataagcttaagatgaaagtagaagcaaaaagatttacaagaatctgcagtaacaagattgatgttcaagagacataattgtacattgtattatacatacattgtatgggtttaagctggctgaatattatatatttcaagtttaaaaatgcactacatatagagtgtcccagagtttaaggcgaaattacagctcagaactgttgtcctttctaattttgtggaagcttctttgacaactaaaaaagaagaaagacttggatgttcataacacataaacaatttcccttcattgtcagttcagcgttagacttctccttcacttaaatattttgtatgccaagtgnnnnnnnnnnctagcgaagttgataaacaacttcaatatttgcctttttgtgagaaaaggtatttcacagtatttaccactttgatgtcctcgcagttttattaaatgtatcctctctgtaaaactttgcctgttttaaatgagcctttccttgatttaaaaaaatacctgtttacacatcttctagattcttgagaacgccagacacagttcttaaggccaaatttgtatcgttattgttaagaatcgtcatcaaaagtgtctttggaaccatacaaatctgctagtttcttaaaacgaggtccccagttctgtagataatcatagtccaagtctgaatctgtggtggccgactctagggagctcagggacccggccactgagcccctgccttcataaccgtagatttgaatggagtcataaggaggagccgtggggtcattgtctgcctcctgtattctcgtgttgatgaagtcatcgacatccacgctgttgggcgctggccggagcccaggtctaggcatgtactgatactcaggtttgatgtctttgcgggggataaatccattgataccatcaggattctggagccaa

SEQ ID NO: 241050 - DNA, 1604 bp, Homo Sapiens
ccaataaataaataaagtgacaagagtgactaatctgtatccacatcttcagagcaggaatacagtaaatgagtaaatgcttagaggagtcttgctgaaaatgagaaaaaatgcatctcactttagtataatttttctaaattctcactgaagctctaattctcttgtgctggtgacaggtggacagggtttttaaatgcaaagtattctccctacaccctgagtatggatgcatcagttgtttaaaattctgtggaaagtttccttagaaaaacataaaatttaaagtgatatactgatgggaaattgaatatattaattgtggaagaatatcagctaactaattaactaagtagacatttaaatctggactctgttgaagaatcaaggttaaactctgcattatgtgcactaatgtcagccatctaatatcaaagtcagataagtaaactatctttcactttatacatagtgcatttagtaaataaattctcttaccagcaacataaagcccttgttggagcaaaattaaagtattaagaattgaattaacttacaacaaatatctgaagggtaagtggaacatttttcaaagtataaagatgttatcacatatattcaccatgaatcctcttaaaggttttataacaccattaaattatatcaaatatccaacagatattgtcattttcttctgtgatttataaaggaaacattccttttgtacaaatcagaagtatcttaaaaatcaaccttaacaccaaaatatacatgtaattttaacttggtttaggaaaacatgaaagaactgtcacattttggtgtgaacaaggttctgaaaaccccctatcagaggtctcattcacttttttccacatatcacttgaaggttttgaaactggtaaaaacagaattcagctcgatgtacatcaaaactttaacagttctgaaaaagacgtatttcgtaagggccaaaatgtacagcacagcaatattacaatgttacagtataaatatgtcaagccaatttgtaataaaataagacagttgtcttcaaaagagctgtttgactatagagcaaccaaatagatctagaacatctttggaaaaaccacaaagtgcctttacagaaagttaagtttagactacacttaattaaaagataatactctaaactcaaaattattttctctatatgaggaattttgacacttgttttcacacctgccaatattcaatatttttaactcacacttcttttcatacatctgccaatatttaatattttattctatgcccctgcactgaattgatgtaagtgtgaagttccactattattattaccacacatgctaatacctaataactggtctgtcattatgtagtggttaaataagcaaatgctgaactcagcacagctctagcaaaatgcaaaggaaataagaaaagcctcacctcagaatgattacaccataaacagaaataaacattttcaaacacaaagtttcacaaaataatatatcatcactttaaaagaaattcagaactctattttgctgttgatcaaacttgtgcatacactcaagttactaaacacaatccaa

SEQ ID NO: 241051 - DNA, 994 bp, Homo Sapiens
  misc_feature (371)..(379): n is a, c, g, or t
ttttttgagcccacctggctgaaaacaaaacctttaggtgcatttcaaaggttcgttatttggttaagtgaacatattaaatttactgaaaagcaaaaaagagttactgttaccacagtacaagatcctaatatagtaactgagcacagccaaataaacagctataattattccaagctgcttttgctatgtatctggtatattaaacaagaaagtggattacttttaacactgcacaagtaaccaaaggtagcaaatccagcaatattaaaaccggatattaaatagtattcaaacattacaacaaaaacaaaataagaacttctagaactagaactctaccctatgaaaggaatgtacacagatggttnnnnnnnnnccaataaataaataaagtgacaagagtgactaattctgtatccacatcttcagagcaggaatacagtaaatgagtaaatgcttagaggagtcttgctgaaaatgagaaaaaatgcatctcactttagtataatttttctaaattctcactgaagctctaattctcttgtgctggtgacaggtggacagggtttttaaatgcaaagtattctccctacaccctgagtatggatgcatcagttgtttaaaattctgtggaaagtttccttagaaaaacataaaatttaaagtgatatactgatgggaaattgaatatattaattgtggaagaatatcagctaactaattaactaagtagacatttaaatctggactctgttgaagaatcaaggttaaactctgcattatgtgcactaatgtcagccatctaatatcaaagtcagataagtaaactatctttcactttatacatagtgcatttagtaaataaattctcttaccagcaacataaagcccttgttggagcaaaattaaagtattaagaattgaattaacttacaacaaatatctgaagggtaagtggaacgtttttcaaagccaacttttttgtacaaag

SEQ ID NO: 241052 - DNA, 1144 bp, Homo Sapiens
ctttgtacaaaaaagttggcgatcatctaacgaagtgttgaatgtgatacaagggaacacaacagtagatgagttaatgatgagactcatggctgcaatggagatcttcacagcccaacaacaggaagatataaaggacgaggatgaacgtgaagccagagaaaatgtgaagagagagcaagatgaggcctatcgcctttcacttgaggctgacagagcaaagagggaagctcacgagagagagatggcagaacagtttcgtttggagcagattcgcaaagaacaagaagaggaacgtgaggccatccggctgtccttagagcaagccctgcctcctgagccaaaggaagaaaatgctgagcctgtgagcaaactgcggatccggacccccagtggcgagttcttggagcggcgtttcctggccagcaacaagctccagattgtctttgattttgtagcttccaaaggatttccatgggatgagtacaagttactgagcacctttcctaggagagacgtaactcaactggacccaaataaatcattattggaggtaaagttgttccctcaagaaacccttttccttgaagcaaaagagtaaacacggcccagcggtggaaccagccattccttgacaagccagcagcctgcgtcaggagaagggctcctcgccaacccacccacacgctcgtctcactcaattcaatgtcacacttctgcctcttgcaaaattgctggaaaaagtaataataaatatagctacttaagatttcccatccatgagtatatattcccaacccttattacagagaattacaactctgccaccctcccctaccccctgcacttcaccctccttcaatgacgaatgcattgttcaagtgtgagtgatcactaaatagaatttttacctctccagtgcccatcttttccccacagtgtctaggacagttctgtctgttctgtgacaccaggatgctgtatatttgatatatgtctttttattttcatgactgaatttctacttcatcacctaattttaaggggcagagggaaaaaaagtcaaatgagacattgtcggcatggagattaaacattgtaggaaaaaagtataccatttttgttagaactttctgatggcttt

SEQ ID NO: 241053 - DNA, 1030 bp, Homo Sapiens
actttgtacaaaaaagttggctctcgagcgtcctcagcgcagccgccgcccgcggagccagcacgaacgagcccagcaccggccggatggagcgtccgcaacccgacagcatgccccaggatttgtcagaggccctgaaggaggccaccaaggaggtgcacacccaggcagagaatgctgagttcatgaggaactttcagaagggccaggtgacccgagacggcttcaagctggtgatggcctccctgtaccacatctatgtggccctggaggaggagattgagcgcaacaaggagagcccagtcttcgcccctgtctacttcccagaagagctgcaccgcaaggctgccctggagcaggacctggccttctggtacgggccccgctggcaggaggtcatcccctacacaccagccatgcagcgctatgtgaagcggctccacgaggtggggcgcacagagcccgagctgctggtggcccacgcctacacccgctacctgggtgacctgtctgggggccaggtgctcaaaaagattgcccagaaagccctggacctgcccagctctggcgagggcctggccttcttcaccttccccaacattgccagtgccaccaagttcaagcagctctaccgctcccgcatgaactccctggagatgactcccgcagtcaggcagagggtgatagaagaggccaagactgcgttcctgctcaacatccagctctttgaggagttgcaggagctgctgacccatgacaccaaggaccagagcccctcacgggcaccagggcttcgccagcgggccagcaacaaagtgcaagattctgcccccgtggagactcccagagggaagcccccactcaacacccgctcccaggctccgcttctccgatgggtccttacactcagctttctggtggcgacagttgctgtagggctttatgccatgtgaatgcaggcatgctgggctcccagggccatgaactttgtccggtggaacgctttctttctagagagggaattctcttg

SEQ ID NO: 241054 - DNA, 930 bp, Homo Sapiens
gacacttttgtgggtttttggcaagaaacaccaggatgaaaaatgctgtggtgaaattctaaggtggtgcctagtcctgggaggtgtgaacacatcaatgtctagtgggtatgtttgtgagtgggtggaaatcttgaggtggcagtggtgggaaaaggaggtctgctataagagctcctttcctctaagttttcagtcctctctcacagtgggagtgggaggagacctcaaatcccaggacaatgggcagtgtgacagcctgtgtacaggagagcagagtctctcattcccagacgcccagagttccattccaggccaggcctctgagatgtctttcttctggcaccaaaactgtaatgtttgctgaacaccaagcaattcttcaaaaccaacacattgtctaaaatttgaattatgaccccacttaagagtcagcacagaccctgatccagggctcaatctcacaacactgtcttcactgcagacaccagtcacaaaccctataggtccatctatgcttttgagctactgtttaaaaattcaggactcccataaatctctcaagttcaataattttatagagctgctcacagaactcagcaaaatactgtagttatgtttacccatttattatacaaaatacaacccagaaaactcaagtggaaaaaatgtataggacaaagaaaagacgtggggaaagatgaagcacatagataatcctggtaaatagcgttaataaaattctctatcctttgtgttctccaggaacagtttatggaaagaaacatcctttcattatgacttagatggtgctctcttgtctgacttatcacataaccagacactgactctgcacattttcttcttttttgtattaaaaaattagctaaatttgtcttcagtggtcaaaataaaatgcttttttgccaa

SEQ ID NO: 241055 - DNA, 1420 bp, Homo Sapiens
  misc_feature (136)..(145): n is a, c, g, or t
  misc_feature (185)..(248): n is a, c, g, or t
ttggctttccaaatgttgaatgaaaaacaaattttccaatccatttatccctggggaaggattcatttgttgcgagtgccagtatacttaaatgtatactttatatacatttaagcagaaatttaaaatgtggtcnnnnnnnnnnaaaagaaacacttctgtgtcagaaatgaaaataaatcatnnnnnnnnnnnnnnnnnnnnnnnnnnnnnnnnnnnnnnnnnnnnnnnnnnnnnnnnnnnnnnnnttattactaagcccttgctcttatttttggcagaataaacattgattttggttggggctgcaaggatgcctttacaggtgcacaagaacgctagagtggcccatgcattgctgtgttctcttctaaaacaagctactaacaagagagagaacacatgcaatttattaccagtaagcataagtcatatttaacattggaataactaagcattttatacaaagatttttctttgacccagtttgcatttgtacattttatttttttagttcaacagctgctctgtcacataatactttgtaaatactagtgtgaaaaacagataggatgccttttccagtggtaggagcatctgtaagtgcatttaaatcattagaagcttttttccaaaactagaaacccttattaaaaaatagacatttttttctaaagattattagttaaaaataactaaaagagttccttagagtaatcatttcaaccaaatgaatttcaagcaacaacttacttactatttatcaaaaagggatttaattattttgaatataattataaattaaatttcaaatatttaaaaatactattttatataattccttatgacattttaaactttatattttaaaatatttgaatacgaaaagatcagtctacctctactccattctagacaaagtattaatccttagtgaaagtaattaattaaattgccaacttggcattattattaaacttgataggaacgcaacattaaatttaaaaatgttttcccgtgggtaattttctattatatattttcatatgggcaaagggaaaaaatgataaatcctctgtaatcacaaaccccaatttcgttttgtttattcagcttctaaaatattgaacacccagacttttaattcaacctttaagaaccttatcatttatgtttcagtagatatcaaagtaatccatgtttgtgtcaaatgatcatagaaaataaatagaagagacagtgaagcaagtaaaaagaaaagcattgttttaatttgtttgcattattttttttcatttgtcaaatgcttcttttgttgccacagtaaagaacagtttttattgttttgtaagtaaaattacgtagctgattttgtatgtaaagattaattccataataaaaattattggtatgtttactg

SEQ ID NO: 241056 - DNA, 3066 bp, Homo Sapiens
  misc_feature (422)..(431): n is a, c, g, or t
  misc_feature (1058)..(1077): n is a, c, g, or t
  misc_feature (2578)..(2592): n is a, c, g, or t
tggagcccacacaaaaaagctcagtttcagccaccacatgccaaagtccttgactgtagaggaaatatttcagtcatccaaacctttctcagaaaatgaactcagtttccattggggcacagcccttattgttagctaaaagttagtttcgggccttcaaccttttagtctgcaaggtaacgtcatattcaactgcctaatgtgccgtttttaaccataaaatggcaagtcaattatgtggcaatgtaaaatgcttgcacaactccactgtcattctcagagatttccattgggaagccatgcctactttatattaacacatggctaggggccaaactcagccagtgaaatggattacatatcggagtaacacatatacaatcatatttacacagatacacactcatgccacacacgaaagnnnnnnnnnngggagaaggaacaaattttggaaaacgatgccaaggatgctacactacatgaaactacatgactttttttagcaacagtaatttccaggcctttacataatattacatggttatggttcaattattagacagccaggaagtaatcccgagccaaaacaaaggaaggttgtaaagcctcattgtagacaaggcctgagcatccacagagaagatacaatgtttatgtgaatcctggtgtgcccaagtgtgatctactctcttcactgactactctgagtgctgatgagaatatatatattatcctctgactggcttgaatagctaagacaatacagaaaggtaacagagtggtttcacaccctcatgtgcttctgaaataaaaccatgggctcattagtgggtagctcactatctgtggcaaagactagacattttatgcaaaacacaaccactgcaaacccagcccaaagatgcaaaactctcagctaggatacttacccctcagctaaaaaacctgaacagctatctagagataaacccaggttctcagggaaaactggatgaggaaaggttacaaaataagcctgcaactcagctggaaagaggtcacttcaattttcaactcannnnnnnnnnnnnnnnnnnnacctttggcaaggggtatgatcatttcttggcctgcaagcacaatcatgccaaccattaatgtggacaatgtggaaaaaaccctaaaaatccctgcaaagcccctgtcaagacatccaaatgccgcttgctaacagtttttgaggtacctatttgggagagccaagtggaactcttgaagcaaaataagtgtttcccagccttcacatcctaacactgtcaatgaactctcttaagttgagtgaagtggaagcgtgctgagttactgaagtgccaggtctttaatccaatcagctcacaacctctttcctgacttttgcgatatagattgtcaataaaggttagccgtcccttgaatgctcatggcaaagaaggtaccagctggccctggctagcacacagcatgattaaccatttctgagcaccaatcctaatgtcctttaagaatcaccccctaatataagccctggcaggaaatcagctgcttcttgatcccaactttttatgaaagttagaatggtaatagaatttgaattttcagtaggaatcagttctcttcctttccatgctttttcttccttgacttcctttggattcaaacatctttaattgagcagacagggaatctgaaaaggaaggttttcatcggagcccattctcagttccttggcattctagggtcagacctctggttagccctaaagcccttctcctcaagctagaaacataaaaatactttttctgattttgtagttttttggggtctagaattttaaagtgctgacacttcctctggctggctttcctgtaacctattattaattgttattattagaagtttgcccaatgatttagattcaaacattaaatttaattctagttaattctcttcccctagatatgacaccaagagatattctcttagtaaaataatactatgtgccttaaaacttctctaagagaggacgaatgtattcctgcggaggagatgcatgtcaggtggtctcttgaataatgtgtatgtcctgcatctctcaccacttacatagtgattacttaaatcactctttcaaactaggccacccaatcccaaaattatatgcagtaatttagtttgatttggtttgtttgggtatatatgaccataacttagaaaaattgttcaccaattaaaagtggtgtagacaacagtttctaatacacttttcctggcttctgtaataactcaagtctcagtctgagtgacggtccattgacacttctctgatttcctccaaaaagtaataaataaaggcttacttccaaagctagctaaaaactaacctcctgaactaaatttgcctttcagtgaaggttggttaggtaacaaaggcaatgacactgaagtagttactggaatttggataggtagcacaggaaatccaagtggaatgccactttagaatcccatacacataataaggcagtaagacttttgtacacatccaacaatttttaaaggnnnnnnnnnnnnnnnagcaaaaatgcaactacatcccctccatgtgcatttcatacactaaaggccattttgtggtggtgtggtgggttttcccagggttttctaaaatccttttcaggtacatttcctgccccgccccctgcaggtcttccaggatgcaaagccagaaaaaaaacactcttctcaaagtgaggtgccaggccaccgagcgtagggtccttcagcagtgcacaggatgtgggctctggcttcttcaagtaccgtggaccacggcccttgggtcaacagcaccggcggctggcttgcatggttggcttctcaactttgattgttccattgtttccattttcatgggggtccaagggtgggatctggcggctgattccttgaaagagctggtgggatattaatagcattttttgcacttgtctcaaccacgatggcacctatggattcagcgtattcgcttttttctatacgttcagggga

SEQ ID NO: 241057 - DNA, 747 bp, Homo Sapiens
  misc_feature (397)..(438): n is a, c, g, or t
aaatggggaaaccagcaattccccccaccccacattacaacaaattaaattgagacaaaattacaaacacatttcagtacatgattattattaataaaaatcagtttctttttttatataaagttgcccaaaatgcaagggatgtgcataggtttacaacttagtcataatagcattttattcttattcccctgggtgtgccccatgaacggaatgtagaatgtactttgctgtagattacagattgttttgtccaacacagacacaccgacagcataaacgctcgcgactgtccacatgcattaagagtcaagacccaacttcaaatctctaaaaggtttacagggtgcttcaaagagacagtatcacattatctggatgttacataaaggacttnnnnnnnnnnnnnnnnnnnnnnnnnnnnnnnnnnnnnnnnnnggcctttaaaaatttatgactgttttgtaatcactacactaattatttcaaataaataaaggaaagaaagatatcccaatattccaatccataaaatcagactctaaaaagaatgtagtgttccacccccagtcaaggtaacagaatcattgttttattattattaaaatagattatagaaagcagcatctattttgtgcagtttttaggggccttggaaataaaaagctatgatttccaaaaatataacattccaaaggattgaataatacatacatttaaagatacattttattaaagtttagccaa

SEQ ID NO: 241058 - DNA, 1482 bp, Homo Sapiens
  misc_feature (1234)..(1283): n is a, c, g, or t
ttcagtcccataacttttacctgttccaaagccaatacgaagacctcccaaaaattggttggttaatttgtaatggtcccagacagtaagctctacacaggcttccatcagatcttcaggcctgaacccatcatacaccatagtgtggttgaagatagggttggtggttttccctacagctcttgtcttctggcgacttttcctacttgtatctggaaggatggtacatttaacaaaagaatttagatgacttccccttagcagtggtagatcaaggcattccttcacccagatgtgcacttctccagttgtaggaagctttttaccagggactggctctgggacatactggagagctagtttcatttcacctctgttttctgcttcaagggcaactggtgctgtctgaaaagtgaagaaatgtcagcaggtgggagacaaacttttcatcctgtttgttggtataggtctcattacagaaccatatctgtcccatttctgggaccatgtgtcactcatgagtgctctggattaaaatttctctctgcatcagaactagactgttgccttaatacctgggaaaactaggttgtatatcttgaaaaatcttgcaggatacccagaaaatatttcaaggcctttagtctcaaagatggtgaagaaaccagaatggctttcttggagatgggagaggtttctttgaatgctttaattttgatcaaaacacaaatattttgttagctattcagccagcatataaaacaatttatttgtattccctttatttgaaggagtatgagatagtgtgtgaaagtaaggggggaaaggccatatcttacattttcaaagctgcactaatctgattattttaggccaaatgcatagaagtctgtaagtataacaaagactgaacaataattttttaaacttctatctgttattttcaagtacacgttgaatattccttatctgaaatgcttgggatcagaaatgtttcagatttcggatttgttttttgaaattcgtaatatttgcatatacgtaatgagatatcttagggatgggacccaagtctaaacacaaaattcatttatgtttcatatacatcttctacacatagcctgaaggtaattttatataacatttttaataactttatgcaacccatcacatgaagcaggtgtggaattttccacttacggcatcatatcggcactcaaaaagtttcagattnnnnnnnnnnnnnnnnnnnnnnnnnnnnnnnnnnnnnnnnnnnnnnnnnntaagaaacctgcataagatagttttttactttcaaattctggctctttagagctttattttcaaaatatgggtatgtatcagaaacgtaatggtagccagttaaaaatgagatgcttttgatatcttctgaggagttcaggtcttgggtagggctagaaataagtgcttcaagtgattttgatataacatttgagccaa

SEQ ID NO: 241059 - DNA, 1227 bp, Homo Sapiens
  misc_feature (959)..(968): n is a, c, g, or t
ttttcaagatcagattccaccggtttagtagttctcagtggaggagccagtggaatttgggctcatttggaaatcttggcaatcaaaagcattatgagaggcagtgttgcttcaatccaagtattgggggagtttaccatcttctcccagagagcaacttcctctgaagtagagtccatccagtccacttcagtcccataacttttacctgttccaaagccaatacgaagacctcccaaaaattggttggttaatttgtaatggtcccagacagtaagctctacacaggcttccatcagatcttcaggcctgaacccatcatacaccatagtgtggttgaagatagggttggtggttttccctacagctcttgtcttctggcgacttttcctacttgtatctggaaggatggtactacaaaaagaggcatgattgtgggagcattttagtaagatagtgaacattcatgctttcaatacataacaacacagctattaaagattgacaatggaggaaaagatgtggagagatagtggtggtggtggtttggcagacagtggggtagggggtaggaacacatcatgctgaaaagactctggacctagagtcagctatacttggtttgaatcctgactctgctacctcctgggtatgcattttagggaaagttactcaaccttacggacacttgcttcttcatctataaaatgggaatggtgatgctgatttcataaggctaaaattagaattaaataacatatgcaaaacacttagctccatgcctgcatttagtaagtgcttaatatgctagtaatcatttgaggattcctttaaaatttgcaagcacaggctatcctgattagctgtgatagcctaagacatttgtgttatacagaatagaaaaagaagagaaacctctcccaattgctagatttgactttggaaataaattatgtaannnnnnnnnnacaatcacttacatttcatttatgataacaattaaatgaactttaacctaccatgcctcttgtaagtggcaatataagacaatacaagtggcaacacaaggcaagaaggtctgtgaatggtctcagaatgtgactgactgacttggtcttagaatgaggctgacttgagccaaaaaaatcttaccagctgacatctataaagataatgtgtagggaaaatcataaataatatcatctatgctacttagatatatgccaa

SEQ ID NO: 241060 - DNA, 1193 bp, Homo Sapiens
gagcaatgcttttctataaaggcgcaactttgtacaaaaaagttggctaccagttcccctaccttctctccttccctggctctgaacatcattcagaacaggaacatggggaagccagcccagcctgccctgagccgggaggagctggaagcactcttcctcccctatgacctgaagcggctggagatgtattcacggaatatggtggactatcacctcatcatggacatgatcccggccatctctcgcatctatttcctgaaccagctgggggacctggccctgtctgcggctcagtcggctcttctcttggggattggcctgcagcataagtctgtggaccagctggaaaaggagattgagctgccctcgggccagttgatgggacttttcaaccggatcatccgcaaagttgtgaagctatttaatgaagttcaggaaaaggccattgaggagcagatggtggcagcgaaggatgtggtcatggagcccacgatgaagaccctcagtgacgacctagatgaagcagcaaaggaatttcaggagaaacacaagaaggaagtagggaagctgaagagcatggacctctctgaatacataatccgtggggacgatgaagagtggaatgaagttttgaacaaagctgggccgaacgcctcgatcatcagcctgaaaagtgacaagaaaaggaagttagaggccaaacaagaacccaaacagagcaagaagttgaagaacagagagacaaagaacaaaaaagatatgaaactgaagcggaagaaatagtgaagagaaactcgggcatctgtgtttgatcatgggaagatactctcactaactgaaccctctctggctggactgttaaaagcaacgagaggccccggcacacctggaagctggccgcgaattcggcctctgggcctgtgtgtctgtgagctcaacctggctaaaggcagagtcactcccaaatgggtctctttagaacttgatggctgggcactgccatctctagaattgccacgagtctctctcttcctgcccagtccagggccctcctttcctataagttcatattttgctttgagccagctttttagtctcattcccacacatgtggaagccacgttgcctctcgaccgcctgaggcccttaagtacatcgctttctggtggtgcccaggaggctgctgctgg

SEQ ID NO: 241061 - DNA, 1065 bp, Homo Sapiens
  misc_feature (834)..(872): n is a, c, g, or t
  misc_feature (919)..(966): n is a, c, g, or t
ttttaataaaaacaagtaactcaaaagcactgaattttccagaccctctaacacatttccctccggatcctgtgagagcctgagatcacttatgacgagattcacctggacctttccggtcagtgagctcagaacacctcacaccacagcgtcactcaactcaagtccctcctcacatcagagggctcctcgaagggaggccccaggacggttctctcagatttgctggtccctcccctcctagaatcttcacgtacaacattctgtttttgtttttaaagacctcagggaactagaactcggttgtgggaaccctgcaccaaggagagttgagggccagctccttagcgcagcacagcacggactgtgttctggtgggcagggcccctgctggacccacccgaggagagtccatttcacatcctatcagaaacactgcctgatccatattgcagagagtgggaacgggtgtgagtccgtaagacccgtagcatcaatctcacatataccacggaaaaacacatgaaaaccaagttacgttgtttttggaacatcagaaaaacaagtagtgacatcgtgaagtgccctagcctgttgtgacacacggtgtggggatgaacacgccgccctagcccgtgacacacggcgtggggatgaacacgccacataatgcactggtgaccctgttttgtaagcagtactcccaacttcactgccttttccgtgaggatattccatcattcccacttctgcccacaagaacaaaataattcaaactttatgcactgaagtaactctggaaggtagaagtgccgggagagtcccttggagatnnnnnnnnnnnnnnnnnnnnnnnnnnnnnnnnnnnnnnncaactgcagccgggggcggtggttcacgcctataattccagcacttnnnnnnnnnnnnnnnnnnnnnnnnnnnnnnnnnnnnnnnnnnnnnnnnaaaattaaaacaaaggggtagtacagccaaaataaataagaacgtaaattgccgtattttttttctaatggtacaagaacaatttagtaaataacccaa

SEQ ID NO: 241062 - DNA, 848 bp, Homo Sapiens
  misc_feature (127)..(170): n is a, c, g, or t
  misc_feature (712)..(725): n is a, c, g, or t
ttggcagggtggtccctttttaataaaatgacctcgtgatctgcccgcctcagcccttgtttgtttttttaagtagagacaaggtctcactacattgcccaggttggtctcaaactcctgagctcannnnnnnnnnnnnnnnnnnnnnnnnnnnnnnnnnnnnnnnnnnnatgaaccactgtcaggctcttttgtcagtcctatcaacctctaacatcctcgcaccagacaggacaggtgtctgtattgaaactttattacaaaattataaagcagagctctgtaacaaaataatacacatttgggtttgctttaacctccaagtaagtctgagaaaatcttaataaaagccacttgaagtaacaattcacatccaagagatttccacaaatttatacaatgtatattgagcactagttcctgtacagcttattcttattagtttggatccaactattccaatgtattatgaaccagtcagctatctgtcttttgaaacaagtcttaactgaaatctcagagtaatcagcaaaagctacggaataattctaagaattagatgtttccatatcattaaaaccaaggatccatgaggggcagaagggaggattcaaagatttaaaaaaaatcaaattttagaccttggttaaatattaactggaatgggatcttggaactcccaactttaatttggtgtaataaaaatgatgcnnnnnnnnnnnnnntcagggttgtttgacaccttttttcctaaagggaaaccttcaccaaaaggggataaaagatttaaaggcaaaataatatactgatagctggttagtaacctcagccaacttttttgtacaaag

SEQ ID NO: 241063 - DNA, 1340 bp, Homo Sapiens
caaaattatggactttaaggaaactgttgggagatatttttctgtggtttcatgataatctggctatactctggtagaatacccacgaattttcacatcaaggcagtaataatacagtttttagaactgtaaacatcaacaccggactctcaggttaatgtctaggtaaaggaccccgcagggtgcctccattccttattacactgtgggcatctctttttcctcccttactcataatgaatatgagaattaaaccactattgtgtttttcttctaaaatgaagggtagggttgtgccagaagaagagatacaggaggttagtaggctctggaattcaatttccaggtgtggttttcacaaatgaacagtctcttaagttagtatctctctgaatataaaaagaataaataccatacactgatgataatgggataaaattattacctagtttaatcaagctgctttcctgaagaaaatttcagcatgagtttatctttaaaggtatactcacccatcatttataatttctgttttggatgatagttctgaccaccaccttttaatgactgcttgaagccagtttaaaccaactataacatatctgaaatgacattttgttacaaaattcaagtgttttcatctaagaacccttcttataaaagatgatactttccctcccaaaaaacacacacacacattggtcccttcccttttaaaaaattgttaccttcatgatctattacacaaaagtatatttcatgtaatttgtttagagatgcttttataattgtcctttagtcatttcatattcttttcctaattgtactattagcttcttgaaaacagaaaccttgcatgtctcatggagcccaatctactatgtactcacaaagcacaaaatcaaggatgctgaaaaagaaaaatgaatcaagattcagattagcacttactcttcaaatttgcttttaagtagtgactttactagaggcaacaagtcaacacagcagccaagtgagatatattgtttttcttcctgtaaactaaaataaataccaagttataaaaatatggatgggccataatttgacctcctttaatcttattttttttctgaaaaatattgtttttaccaattggtgagcacaggaaggcaatctaccacaacgccaagatcttctatcctgagagtataaaaagaatagcattgccttagagagctgatttccttatttactttcatattatgattattcacaccgcttttgagaaattcattcatttaacaatgtcagtatctacaatgagtcatgtctgtggatacagcaatgaacaaagccaa

SEQ ID NO: 241064 - DNA, 928 bp, Homo Sapiens
  misc_feature (592)..(646): n is a, c, g, or t
ttggcaaaagtgtcctcggcatggatcttgaacagaaccagtatctgtcatggaactgaacattcatcgatggtctccatgtattcatttattcacttgttcattcaagtatttattgaatacctgcctcaagctagagagaaaagagagtgcgctttggaaatttattccagttttcagcctacagcagattatcagctcggtgacttttctttctgccaccatttaggtgatggtgtttgattcagagatggctgaatttctattcttagcttattgtgactgtttcagatctagtttgggaacagattagaggccattgtcttctgtcctgatcaggtggcctggctgtttctttggatccctctgtcccagagccacccagaaccctgactcttgagaatcaagaaaacacccagaaaggccttaatgacctcataggcactcttccaaaaagacaacagaactggaatgagaggcctgggtctgtctcctgccttagcaggcctatcaatttcttgtcaatctctttttttccttgctcacattaaaaggaagcatggagttctaatgctcccataaactatgtatnnnnnnnnnnnnnnnnnnnnnnnnnnnnnnnnnnnnnnnnnnnnnnnnnnnnnnntttggactaggtgttccctggtattctgtgatctgcctcttgctgccattctttctctcctctgcttctctgtatttttcttctgttatccctgggggtgctcaggttcacttgattgtctgtatttctgtgtggttgtagcaaggactcagcctcatgtagcacgaataggggtgtggttcatggcgtgttgacccagcagagcactccctcccactaactttgtttctgcatgtgtacagtcttcccatattttttttaaagcaaccctttacccttttt

SEQ ID NO: 241065 - DNA, 1588 bp, Homo Sapiens
ctttcatagtagctggggtaagtcctcatttctgaaagaagatctaggtgtaacattataacatcaatcacagtgacaaatttataggttctgcaagttccactgtggcttgctgcctacattcacagttgaagaaaagactgaatttcggttagagattagtggaaatgaaaatgtaattttaaaatcctatccaaattcacaaaccccacatggaccccaggttaagaatacttgtgagtgagaagggggccccatattcagagaggctggtcaggctctgttgtttgctggaacacagtaagctgtcttctgctgtagggaaaaatgagcagattgaacctaagcattaaaataaaaaaatgagcagggaaagtgtgttttccagagcaagaatgatgcccaggaacaaagcaagtcagagaggatagagtccacagtaccagagaaaagacacagattgatgtgcagctgcctgagtctacttttgaattacagattttaatccttcatgaaaccaaacaatacctccagttcttggtgtagaaacactcctatgtctttataatgttattttctcatgtaagctagtttaagtaggtttctgctgcttacaagctgacgtatcttgttgaatacagagatactttaaaactcctcccttaacacacacatacacagaaattcttgaaatttgcaggagtttggggtgaggagcatctagcaaggaacatggagttgggaatggttgaagcattgctgctgggatctattaaggctctgagctctccatgaaagtattggctttctctttgatggcctttgctgtattggataactcacctacaaaaatgacttatttttaatgtagaactgtgataaacttcaacattttgatgattatcatgctttaaaacgagaataaagatagctattatattttttaatttgacagagtagtgcaggcaataatgaaatggtattcatctgaatagcaatctttatttttaaaatccaaaggcactcaataatgtgatctgtgcactttgctattatgatgatatatagcatataaaatgttaagcacgtctaacatttaattcatttcaatcataccagtcaagatataataaatcaacaaaaccaacaactccctcccaaacattacctagtgaactactcttagcttttttatttagtcacgaaatttgaaaattatctctgaattagcatagctattcacattattttccccaacaacaaaagaaatgccactgtaatagttgcttagtactttttaacatgaaattgatgttagtgacagattttcaagcatgtaatttgtctcaacatgtgtgtccttttatttgtaaaaactcccaggactgaagaatgaagtttcaaaaagttatttattgtgtctcctggcagggtagaatccacggaaaacaatcaactaacagaactgtgtgatggtctataagatttggaattataccattgttatagaggggaaataaaagacatttctcctgtaccagcttctcctcccccaccacccctagtaagaaggggaaaatgaatccaa

SEQ ID NO: 241066 - DNA, 2175 bp, Homo Sapiens
  misc_feature (1717)..(1753): n is a, c, g, or t
caatgctttttctattatagccaactttgtacaaaaaagttggggttagcctgcagcagagccgcagcagcaacagccaccaaagcgggggctgaaagggaagagaacttagatttgacctgtgcaaggacctcagcagcttggacacagcccactgcagagatgaaaggagaagctggacatatgctacacaatgaaaagtcaaagcaggagggacacatctggggctctatgaggaggacagctttcatcctgggctctggacttctctcatttgtggccttctggaactcagtgacatggcatcttcagagattttggggtgcttctggctacttttggcaagcccagtgggagaggctgctgactacatttgaagggaaggagtggatcctcttctttataggtgccatccaagtgccttgtctcttcttctggagcttcaatgggcttctattggtggttgacacaacaggaaaacctaacttcatctctcgctaccgaattcaggtcggcaagaatgaacctgtggatcctgtgaaactgcgccagtctatccgcacagttcttttcaaccagtgcatgatatctttccccatggtggtcttcctctatcccttcctcaaatggtggagagacccctgccgccgtgagctacccaccttccactggttcctcctggagctggccatcttcacgctgatcgaggaagtcttgttctactattcacaccggctccttcaccacccaacattctacaagaaaatccacaagaaacaccatgagtggacagctcccattggcgtgatctctctctatgcccaccctatagagcatgcagtctccaacatgctaccggtgatagtgggcccattagtaatgggctcccacttgtcctccatcaccatgtggttttccttggccctcatcatcaccaccatctcccactgtggctaccaccttcccttcctgccttcgcctgaattccacgactaccaccatctcaagttcaaccagtgctatggggtgctgggtgtgctggaccacctccatgggactgacaccatgttcaagcagaccaaggcctacgagagacatgtcctcctgctgggcttcaccccgctctctgagagcatcccagactccccaaagaggatggagtgagagacagcctaagtgtcatcctggctgtccctcagccatgggatgcagacacggcttcctgattgcacctaacaatttgcctccttcggccacacgccctaatgatggcaccaccagggtagagggaaggtcggcttcccggaaaagcagggccaaggatgaggctttcttcaaactactgcccttgatgtccctcaatgggatcaggagttagcttaagaaaaaggaaaacacagctccccagactggaggctggtcagagggaggagacccctggtcctctgctgtggaaggagaggggttcagccccagataactcctttgtggcctgggcaggatgcagagaatgacaaggctgaaaggagggggactggaggctgcctggctccagcgagagctccttctgggaccagagggtgggacggccaggtatcactttgccccttcctgccccaaaaggctttcacatacccgactcaggccagagccaagacaccctggcaaatcattataggtctcaattcatgacataccagatgccagtcgccacttnnnnnnnnnnnnnnnnnnnnnnnnnnnnnnnnnnnnntctgagtgagtggtaaaggccccgttttaactctggcccaccgcaaacaaaaggtttccctctgtgggggagaaaaagaaatccaggagctcctccctggattaaaaccaacgaggtgcagaccaaactttaacacctttagccttatgtggaaaccaaaaaccaactgctgggaaactgtgaaaagcccttttacccacaaggggaggggtcaaagttgctgccctttggggacacccgagacccctaattagcctatctgaatgagaccaaagttagagccctctttctccccgaagaaagagcccggaaaaacatggcagagcaaagagcaaaatcctttctcccccgaatgctttaccagtttctcagcaacatttattcagatgatttttaccaggaaccttatcaaaggcaaaacc

SEQ ID NO: 241067 - DNA, 1518 bp, Homo Sapiens
  misc_feature (269)..(286): n is a, c, g, or t
  misc_feature (427)..(462): n is a, c, g, or t
  misc_feature (494)..(505): n is a, c, g, or t
catcttaaataacagtacagtttaatatagtatctatcttgcatccagcttccttgcagtacactgactttaaaattaaatacaaaaggtggaaaggggtaagggtgcagagagctctacagagttgttggacggaaagagaaagaaggggtttcatttgtattctctttgccagatccaggcctaccgcaaggtcacagcacagttttgtatagaatgttgcagaaaacaggatggagaagccactactgctgctatgaaggagtgcnnnnnnnnnnnnnnnnnntcccacagaacctgctttccaaacgctgctgctgaacactggccttgaaatgaacaccaggacaatctgtgtgtgatgggaatgagccacctcagatgtggagggccctgaagaatccatataggagggcaggctcttcannnnnnnnnnnnnnnnnnnnnnnnnnnnnnnnnnnnagaatccaacagcagtcgtttgcaacagaacnnnnnnnnnnnnaaagaaataaagaaaacagtgacttatcccgctacccaagcgtgtagagccgcgcgctgtactgcttccgatatgtgccacagagcagcaacgagaagtggacagagccgcaatggttacaactgtaagaggttatttcttaaaagaaaaagaacacctaaggactgagtcccatatgcacttttgagcatttctacagcatgcgattctaagagtaaacccacccaatatggcaaacaatcaaaatttttaaaatttaacttagaaagtctgagatcattattttcaaaacattgatttgtacattgtttcatacacaaataattgactgactatccaagcacaggacaggcatctctcttgaaaacagaggttcctcctagttgggggtggggtagtgttaggctattataaacttccctccaacttcacaaggaaacccaaagtgagattaaaaactcaactgagaagatagacaggatgggtcaggaggaacatggtgctggatctgagctcacttttcagcaaaggtgaaggattctctgatcacgcatttgagaccgtccccgcatgtgcttggccccatggcttctgaacatgttcttttctatgccacgtttgtgtgcaacaatgatctgtgacatcagacagaaaattaaaaaccagggactgaatttacatcattgacaacatcagagaggctgccctagactctctggttttgattaactgttgaacacaaaggaatacattttaaaaaggaaatatgaatgcttccaaaatcttgctacaaacatgactgaaatttggacacgatgaccagatgaacaaagccctcagcatgttttgcatgaatgccacaaaacagggtcactggtctaaaattcaaatacactggtggaaaagtgtgtctgtctgacaattacactcaagtttaccttctggttaacatttttattatatatttccttttatataaatgcattcaagacaaaccaacttttttgtacaaa

SEQ ID NO: 241068 - DNA, 1289 bp, Homo Sapiens
  misc_feature (263)..(280): n is a, c, g, or t
  misc_feature (421)..(456): n is a, c, g, or t
  misc_feature (488)..(500): n is a, c, g, or t
taacaagtacagtttaatatagtatctatcttgcatccagctttcttgcagtacactgactttaaaattaaatacaaaaaggtggaaaaggggtaagggtgcagagagctctacagagttgttggacggaaagagaaagaaggggtttcatttgtattctctttgccagatccaggcctaccgcaaggtcacagcacagttttgtatagaatgttgcagaaaacaggatggagaagccactactgctgctatgaaggagtgcnnnnnnnnnnnnnnnnnntcccacagaacctgctttccaaacgctgctgctgaacactggccttgaaatgaacaccaggacaatctgtgtgtgatgggaatgagccacctcagatgtggagggccctgaagaatccatataggagggcaggctcttcannnnnnnnnnnnnnnnnnnnnnnnnnnnnnnnnnnnagaatccaacagcagtcgtttgcaacagaacnnnnnnnnnnnnnaaagaaataaagaaaacagtgacttatcccgctacccaagcgtgtagagccgcgcgctgtactgcttccgatatgtgccacagagcagcaacgagaagtggacagagccgcaatggttacaactgtaagaggttatttcttaaaagaaaaagaacacctaaggactgagtcccatatgcacttttgagcatttctacagcatgcgattctaagagtaaacccacccaatatggcaaacaatcaaaatttttaaaatttaacttagaaagtctgggatcaattattttcaaaacattgatttgtacattgtttcatacacaaataattgactgactatccaagcacaggacaggcatctttcttgaaaacagaggttcctcctagttgggggtggggtagtgttaggctattataaacttccctccaacttcacaaggaaacccaaagtgagaataaaaactcaaatgagaagatagacaggatgggtcaggaggaacatggtgctggatatgagctcacttttcagcaaaggtgaaggattttttgatcacgcatttgagaccgtccccgcatgtgcttggccccatggcttgtgaacatgttcttttaatataccacgtttgtgtgcaacaatgatctgtgacatcagacagaaaattaaaaaacagggactgaatttacctcattgacaacatctgagaggatgccctagactctttggcaagataaactgagaacacaaaggaatacattttaggaaaggaaatatgccaacttttttgtacaaag

SEQ ID NO: 241069 - DNA, 1533 bp, Homo Sapiens
  misc_feature (239)..(274): n is a, c, g, or t
ttggctacgtgacacgacgtcaagtggcaatggcggcggacgagggctgtgcccccggcccgccccgttaggagccgcgagtaaggcgagtgtccaacgccgagctggctgacagagcccggccgcggcctccgcgggcccaggggcctccaggccccgtgaccaccggaccgagcaccctggaacggccccagcttggcctcgggacagtccgcgcgctcaccgactccctggtgaannnnnnnnnnnnnnnnnnnnnnnnnnnnnnnnnnnnagaagcggaaaccggcgcaaggacccggtccccccggcgccgtacgtggagtgagcctgcggtccgccccgcgcgctccgattggctctggggcctggcccgccccttcccgacactgtcattggcctaggcaaagccgtaagggtggggaatcctattggcccaggggtgcggcttgtcctctcccggtgctctcattggccgagcgcggccgttgggggtgaggccgcgtcgggggagggcaacaaagggccgcgggcggcgggcagtggtgtcccagtctcccggtgcttccctgaggctgaggcgcccggcctcccgcccgccgcgctccagatgaagtgtgagcactgcacgcgcaaggaatgtagtaagaaaacaaaaactgatgaccaagagaatgtgtcagccgatgcaccgagtccagcccaggaaaatggagagaagggagaattccacaagttggctgatgccaagatatttttgagcgactgcctggcatgtgacagctgtatgactgcagaggaaggagtccaactttcccagcaaaatgccaaggacttcttccgcgttctgaaccttaacaagaaatgtgatacctcaaagcacaaagtgctggtagtgtctgtgtgtcctcaatctttgccttattttgctgctaaattcaacctcagtgtaactgatgcatccagaagactctgtggtttcctcaaaagtcttggggtgcactatgtatttgatacgacgatagctgcggattttagtatcctggagagtcaaaaagaattcgtgcgtcgctatcgccagcacagtgaggaggaacgcaccctgcccatgctgacctctgcctgtcctggctgggtccgatacgccgagcgggtgctgggtcgccccatcactgcccacctctgcaccgccaagtccccccagcaggtcatgggctctttggtgaaggattatttcgccagacagcagaacctgtctccagagaagattttccacgtcattgtggccccttgttatgacaagaagctggaggctcttcaggaaagccttccccctgctttgcatggctcccggggcgctgactgcgtgttaacatcagtgaaattgctcaaataatggagcaaggtgacctctcagtgagagatgctgccgtcgacactctgtaagtggcttctctggggagagtcctctggggggcaggacctctcgtcagccctgccagccacctgccagcccagggctgcctgctttat

SEQ ID NO: 241070 - DNA, 1574 bp, Homo Sapiens
actttgtacaaaaaagttgggttcctgctattccggcgcctccactccgtcccccgcgggtctgctctgtgtgccatggacggcattgtcccagatatagccgttggtacaaagcggggatctgacgagcttttctctacttgtgtcactaacggaccgtttatcatgagcagcaactcggcttctgcagcaaacggaaatgacagcaagaagttcaaaggtgacagccgaagtgcaggcgtcccctctagagtgatccacatccggaagctccccatcgacgtcacggagggggaagtcatctccctggggctgccctttgggaaggtcaccaacctcctgatgctgaaggggaaaaaccaggccttcatcgagatgaacacggaggaggctgccaataccatggtgaactactacacctcggtgacccctgtgctgcgcggccagcccatctacatccagttctccaaccacaaggagctgaagaccgacagctctcccaaccaggcgcgggcccaggcggccctgcaggcggtgaactcggtccagtcggggaacctggccttggctgcctcggcggcggccgtggacgcagggatggcgatggccgggcagagccccgtgctcaggatcatcgtggagaacctcttctaccctgtgaccctggatgtgctgcaccagattttctccaagttcggcacagtgttgaagatcatcaccttcaccaagaacaaccagttccaggccctgctgcagtatgcggaccccgtgagcgcccagcacgccaagctgtcgctggacgggcagaacatctacaacgcctgctgcacgctgcgcatcgacttttccaagctcaccagcctcaacgtcaagtacaacaatgacaagagccgtgactacacacgcccagacctgccttccggggacagccagccctcgctggaccagaccatggccgcggccttcggcctttccgttccgaacgtccacggcgccctggcccccctggccatcccctcggcggcggcggcagctgcggcggcaggtcggatcgccatcccgggcctggcgggggcaggaaattctgtattgctggtcagcaacctcaacccagagagagtcacaccccaaagcctctttattcttttcggcgtctacggtgacgtgcagcgcgtgaagatcctgttcaataagaaggagaacgccctagtgcagatggcggacggcaaccaggcccagctggccatgagccacctgaacgggcacaagctgcacgggaagcccatccgcatcacgctctcgaagcaccagaacgtgcagctgccccgcgagggccaggaggaccagggcctgaccaaggactacggcaactcacccctgcaccgcttcaagaagccgggctccaagaacttccagaacatattcccgccctcggccacgctgcacctctccaacatcccgctctcagtctccgaggaggatctcaaggtcctgttttccagcaatgggggcgtcgtcaaaggattcaagttcttccagaagaccgcaagatggcactgatccagatgggctcc

SEQ ID NO: 241071 - DNA, 2220 bp, Homo Sapiens
ctttgtacaaaaaagttgggcaggagctggctttccctcccacctttgccattcctcaagctgcaggcctttccgttccgaacgtccacggcgccctggcccccctggccatcccctcggcggcggcggcagctgcggcggcaggtcggatcgccatcccgggcctggcgggggcaggaaattctgtattgctggtcagcaacctcaacccagagagagtcacaccccaaagcctctttattcttttcggcgtctacggtgacgtgcagcgcgtgaagatcctgttcaataagaaggagaacgccctagtgcagatggcggacggcaaccatgcccagctggccatgagccacctgaacgggcacaagctgcacgggaagcccatccgcatcacgctctcgaagcaccagaacgtgcagctgccccgcgagggccaggaggaccagggcctgaccaaggactacggcaactcacccctgcaccgcttcaagaagccgggctccaagaacttccagaacatattcccgccctcggccacgctgcacctctccaacatcccgccctcagtctccgaggaggatctcaaggtcctgttttccagcaatgggggcgtcgtcaaaggattcaagttcttccagaaggaccgcaagatggcactgatccagatgggctccgtggaggaggcggtccaggccctcattgacctgcacaaccacgacctcggggagaaccaccacctgcgggtctccttctccaagtccaccatctaggggcacaggcccccacggccgggccccctggcgacaacttccatcattccagagaaaagccactttaaaaacagctgaagtgaccttagcagaccagagattttatttttttaaagagaaatcagtttacctgtttttaaaaaaattaaatctagttcaccttgctcaccctgcggtgacagggacagctcaggctcttggtgactgtggcagcgggagttcccggccctccacacccggggccagaccctcggggccatgccttggtggggcctgtgtcgggcgtggggcctgcaggtgggcgccccgaccacgacttggcttccttgtgccttaaaaaacctgccttcctgcagccacacacccacccggggtgtcctggggacccaaggggtgggggggtcacaccagagagaggcagggggcctggccggctcctgcaggatcatgcagctggggcgcggcggccgcggctgcgacaccccaaccccagccctctaatcaagtcacgtgattctcccttcaccccgcccccagggccttcccttctgcccccaggcgggctccccgctgctccagctgcggagctggtcgacataatctctgtattatatactttgcagttgcagacgtctgtgcctagcaatatttccagttgaccaaatattctaatcttttttcatttatatgcaaaagaaatagttttaagtaactttttatagcaagatgatacaatggtatgagtgtaatctaaacttccttgtggtattaccttgtatgctgttacttttattttattccttgtaattaagtcacaggcaggacccagtttccagagagcaggcggggccgcccagtgggtcaggcacagggagccccggtcctatcttagagcccctgagcttcagggaaggggcgggcgtgtcgccgcctctggcatcgcctccggttgccttacaccacgccttcacctgcagtcgcctagaaaacttgctctcaaacttcagggttttttcttccttcaaattttggaccaaagtctcatttctgtgttttgcctgcctctgatgctgggacccggaaggcgggcgctcctcctgtcttctctgtgctctttctaccgcccccgcgtcctgtcccgggggctctcctaggatcccctttccgtaaaagcgtgtaacaagggtgtaaatatttataattttttatacctgttgtgagacccgaggggcggcggcgcggttttttatggtgacacaaatgtatattttgctaacagcaattccaggctcagtattgtgaccgcggagccacaggggaccccacgcacattccgttgccttacccgatggcttgtgacgcggagagaaccgattaaaccgtttgagaaactcctcccttgtctagccctgtgttcgctgtggacgctgtaaaggcaggttggccagtc

SEQ ID NO: 241072 - DNA, 1380 bp, Homo Sapiens
  misc_feature (236)..(289): n is a, c, g, or t
caatggtagacactgaaaaagaaaacctttaatagaaaagaaaaagaacaatttaaaattagattttgttgaaggggtgttataagtgcaactttatccatatgcattccttttaaggcattttcattgtccaaatatctcaacatgtacatcaaggtttatattataaaatgggctccttttgtattcattcaagacttaaagaaaaaatacatctcaggactaagtgtagctgnnnnnnnnnnnnnnnnnnnnnnnnnnnnnnnnnnnnnnnnnnnnnnnnnnnnnntcatttagtatacattattactccccattgtaattccagatttggtacagtatctttttcatttcctgacataaaccattaagacagcacaggctgtagtacttcattgtgaggtggctacaactctataatatgcacagtgattttaaaataggctttttgcatgccttgcatgaaaggtgctacatacaaacctgttttgtgaactctttggtaaccaccaatttaaaaatttggatgaaagcatttccacatggacagatctgaagcacattattggagctctgagccaaagctattaccctgtatattgattcttcagtttccttgaggggttaggtgttgatttagaatacagccagataatttaaagcatgtcaggccccggttaggaaaatgaaaatggctccgattcgtttccagttggctttattattgtttggcagaagttgtttaggggagaagagtggcttcctacaaagtttgcttctcaaggtatactggagaaagtaaaatattcatgtggttactactgtctagtcgtttcttgaaatggtatgaaaaaagtgtgatgaatataattgagattattcatatttttgtagtctcaatgtgttcccttggttgtctctttaattgtcccttctcagggtcagcctactcagattcagtactttacacgttgttttcagcattttctgcttgaagcactaatgcacttaacccagcatgttctgtattttaggatattagtgttctggagaggtcaagctgtaatgtcattcgccctcattgggctacatcaccacccattaaatttcagcttttcagtaattgttctgggatgtgttctagttgtgcaaattagatgctagctaatataaatctaagttacccactaactgtatttagccataacataatttctatgtttacttttatccacctaaaaatgaatgtacattttttgacatgcaattgtctctagactgctctgatacctattaccaatgtgctacttgaatccagggagttatgagagagagagatgtttcaaagtctacggaaaaggttttagatatttctgccaa

SEQ ID NO: 241073 - DNA, 930 bp, Homo Sapiens
ttggacaaattccacataagacttctctatgaaggaccagtcatttacattgctcatttcattctgtgttcagaagtcagtattgtctttctccaataattaaggtgcaatacaaattaaatcaaccttgattttccagactatttgaataataacttgcttttatggctttaaactccaggtctttcctttttaaaatatttctgcattctcttttatgaactagatcaggatgccttgtttttcctgtgctttcacccccaaaaggttttgtgcatgtgtatgaatacacataatattagtgaatgtgaacccatgttctatacgcactaaacacacagttaatatataaacgcctgcttcatttgtttcaacaccttcattatcaatatgattcatattgatgagatatagtgatgcataatgagccaggcagagagctgaaatgatatcagttaatgatgtcacagtgttagcaccctgcatggatgtggtcaaaatatcattcaagttgtacttcctagtttttatcatcatactactatgtcatatgattttcagactaatttaacatgagaaatgttttggccctaaaggatttcacttaacctagttaccctatttcagtaagtattttggaattcaaccctcgaattattttttctcatttcagcatagtgataggggatgcaatgaggcttcattattttttatgacctgcccctcatttgctctgatgttccctaaattctgtaatcatatcataacttttgttatgaatagagaggaatgggctcactgaaacctgacactagaaattggtgggtgatgctcataactgcaaacacttagcttattgaagtgcctctatttacatgttctttagttataatatgtatttttctaacagaaatacacgtctgtaattgg

SEQ ID NO: 241074 - DNA, 2115 bp, Homo Sapiens
gaagaaataatttagaaaacttataaaagcaattgagtttaacacagattttattgccctatagacagttatgatgtgaccagtggatatcaatgaaacttcttaattatttgagtctgaaaatgcatatttaaaacattaaaagattgactccactttgtgccaagctctgcgggtaggcatatttcatatcttaaaaaggcttgtaattcattcagggaggcaaaagcaaaatctgtaattagaggttagccataatgttatgaaagtgccatgagaatagagagagagaataaaatcataaagatataaataaacatatttgaactacaggtgatgtattgtcttaaattacttctatatcatatgccagagggccttcaatggaaaatcctaggtagaaagacactctttctatgttcctaccacttctgagtggacctgaataaacagatattactggtatttttattttttcctctgttccatattctacagagattagcttgccttcagcctgaccagttagacgacgcaggaggtctttgacttcattttttttccacacatccccactgtgccagagggaatttgtattttgtgctttatcaaagtactgctctattttggccttgtgaacaatactgtttagacccttccttttgcccagatagaaaagtgtgcttgcctgcttggacctgcacatgcgcttgtactgtcccctgaaggatctatttaaggatgaaacatacttttctattagtttggaatcttgatctagctcttgattttctggccagaacaggaggcaggccaagaaataaggacctggatattgatgacttagtcctacaaattgcaagacctctcggagttgtttttttagcgtggtaagtggttgaattaacttggagttgggctttagacaactcagaataatgttggccaaaatggaattttgtttctcatttgtcatgggcttttttgagttttgctgcagtaggaaggcatattcattcactatactttccatggtggtagcatctttgtagtttggattaagatattccaagagtccagcaaacctatctgctctcagagcttctagctttttcctgcaattctcctcctggagtaattgactctctttactttgtaatagacatggatccaaatgacagaaaagttctgtgtatttcctgaaacaacgactgactttcttgcttaacatgatttctgcaatttctttttgggtatacctcattttcagaagaaccatataatcaataaaaaagtcaaagcaccttttcagatctgattgtaaattttttaggtgggatgtgaacttgctaagagccaaataacattcatttctgggatcaggaggaatggtccactttcctgataaaaattgcaccatatgttttttggataattcattttctttgtggaaaaagggagtgagctgaagaatctggatagtgtaaagaccaacttctatttcacccaagaaacaagctgtgttatacatgtcatatcgtctctgggacttctgtggtgaccagttctcggtttcatagtttttactatcagtttgcctttgggattctttgaaagctcttgaggctttttccgcagcttctaggagatgtgttaggtcattaacagtaatgctcctacagtttttgttcccatccaaccaccatttgatttcacttttgtagacttgacctagtgtatctgaaatataggaatttttaggtgctttcattttggcctgacgtgcccagtccagagctgtgttaaagtccttctctttaatgtagaaatgtcttgctaaggcttgacaaatgaatgcattttgtgggaatcgtctacttcctgcactcaagaccttttcaatgtctttattctgtaaagcttccattaatggggaaaacagagtgtctgtttcatctccatacaccttgcgctgtcttgtaagcagaagagtttgaacatcatgttgaaatttgtctcttcctattccagaatcatagaataaattctcttctaatatattcaatgcaatttgacatttatccaagtgatagcttctttccagttcttttccaa

SEQ ID NO: 241075 - DNA, 1272 bp, Homo Sapiens
actttgtacaaaaaagttgggtgaatcattactctgatgaaatgggattttgtgaccttgtagtaactggactgatattactatatccattataaatgtctagtagctgaatttccaatgagaaactcctcttctctccccaacagtgttaagaaaggattttcagtagcaaattatttatccaaagctattttctttacaatgaaagatgaaaaatggttataatgatattcaactctaaagaatttcaaactctatttataaataaataaaagtatacctatagaggtaaaatcattattataagactcttcctgattttaggactttgaaagtttgttacttggagggacaaaatctatttgaggactcagactatgatgggacctagctccaccattagaaagcaacattaaaccaatgtgacagtaaaagaaatgcaggccataaactgttttttttaaatatctatataaaaaataatgagcaatttacagatctttctctaatcagaacctcaagtgtatatataaaggtactgtacaatatataaacatttacaaccagtacatccacattttgctcagcattccaaggccacattgctaagtcagtatataatcagtacagagtttacttaggaagaaccacataggacaacatatgacatcaaagttatgtcacagttaacaaaaataggattcgttatcactaattgtggactacagggaaaataataaataatttctggggtactaaattcttagtatttatcaagcctcctaattttgctctatttgaatagttacaataggtgggtaaatatagttctggatgaaaaggggatttcaaaaatctcactctgggaagcatgtcttatgtacagggggtggtggagttgttgggttaaagagtttcacagtcagactcccagagggaaggacctggacctaatgtgcttcacaacaagatgaacccaggtgacagaacaagtgtgttcacacactccataaaatagttttattctcagaaggtgcctttatttatatagatgctactgaatgctgcttcagggaactgaaaaacctggatctattttatggaagttgttaacagtctccaacttctagggaaacatctttaactggacttttaaaaggaattctgaaaatgtgtacaagttaagcagatgtttagtctccctttcttgtttttaaataagagaagttatgtttaaagtagctaaaagccaacttttttgtacaaaggtgg

SEQ ID NO: 241076 - DNA, 1853 bp, Homo Sapiens
  misc_feature (1041)..(1050): n is a, c, g, or t
  misc_feature (1556)..(1569): n is a, c, g, or t
tacagggaaaataataaatatttctgtggtactaattccttagtaataatcaagcctccctattttgctctatttgaatagttacaatagggtgggtaaatatagtttggatgaaaaggggatttcaaaaatctcactctgggaagcatgtcttatctacaggggctaattgagttgttgggttaaagagtttcacagtcagactcccagagggaaggacctggacttaatgtgcttcacaacaagatgaacccaggtgacagaacaagtgtgttcacacactccataaaatagttttattctcagaaggtgcctttatttatatagatgctactgaatgctgcttcagggaactgaaaaacctggatctattttatggaagttgttaacagtctccaacttctaagaaacatctttaactagacttttaaaaagaattctgaaaatgtgtacaagttaagcagatgtttagtctccctttcttgtttttaaataagaaagttagttaatgtagctaaaagttaaataagatccagtaagtactgtctacacatttgtcctcatttgctgggcataccctacacaggttgtttttaaacacccaagcttgtgcacctgctaccagaagagttggtacttggactgtgaaactggtttcatgattaagtccctcacataatctatataatatgtttacttttcaaatatgtattatgtattaaagactaatgactttagtagtaggtacagccaaaatatccagaaatagttggtggtttttcttcaaagagcaataaacactatttccacatgcttctttatggtttcataattaaataactgaaataaaaagggtgacctgagatgctgtaagtatacatcgaggttggataacacagcaggagatgaactctattgcttaaagtactttcttatttcaaacattcaattgtaagtaatatctttaacagttatttgaaacaacttatccagccaaattaaaataaaaagccataagaaagcatcaatattggaatacannnnnnnnnnctttaaagtagtgatgtttgggggttttatttttaaagtgggacatcatcagtagctgttagaagagacaacggccatctttaacgatgagttaacagtctctttttctgcaaggactcacatatttctctctgtaaacatgcaacatgctattgagatcatcaacttccaagccaaacctaactttttcattactgtggaaacagctgaacaaaaaggataaaaacagacatgatacagtagataacttggcacaaatacaaagtgagttgtgaccacattgttaatatcaacatatgtcatttgttcagacactcatgaagacgagctgggcagcctgagcagggcgggtcagatgagcatgtggatgcagctccttcctgagagcgagggagggcagccggccagggggacagttggttcttagcaatcctaaaggcccttcatgcagcctaggtaacttgaggctcacattaacatgtacttatctgtttcagaatatttgnnnnnnnnnnnnnnggctttttctggaaaaatgctgctgtaagaaaagattacaacttgtttttctttgttttatactaaaggttactgccgtttctcagccataccaatagtgcctgtgactttatttccacttggaaccttccagggccctggagttatcagtgttttcttaactggagaactgctttccggtttgaaccttccagtctctttgtttttgtcagctgcctctagttctttccctttgtgatcttctgttttgtttgaaactaccttctcttcgggttcttgcccaa

SEQ ID NO: 241077 - DNA, 1925 bp, Homo Sapiens
ttggggaccttactgaagttattaccggaaccctgtggaatctttcatcccatgactcaatcaaaatggagattgtggaccatgcactgcatgccttgacagatgaagtgatcattcctcattctggttgggagcgggaacctaatgaagactgtaagccacgccatattgagtgggaatcggtgctcaccaacacagctggctgccttagcttctggtttcccctcaggaatgtaagctcagagaggagtgaagctcgccggaaacttcgggaatgtgatggtttagttgatgccctcattttcattgttcaggctgagattgggcagaaggattcagacagcaagcttgtagagaactgtgtttggcttcttcggaacttatcatatcaagttcaccgggagatcccacaggcagagcgttaccaagaggcagctcccaatgttgccaacaatactgggccacatgctgccagttgctttggggccaagaagggcaaagggaaaaaacctatagaggatccagcaaacgatacagtggatttccctaaaagaacgagtccagctcgaggctatgagctcttatttcagccagaggtggttcggatatacatctcacttcttaaggagagcaagactcctgccatcctagaagcctcagctggagctatccagaacttgtgtgctgggcgctggacgtatggtcgatacatccgctctgctctgcgtcaagagaaggctctttctgccatagctgacctcctgactaatgaacatgaacgggtggtgaaagctgcatctggagcactgagaaacctggctgtggatgctcgcaacaaagaattaattggtaaacatgctattcctaacttggtaaagaatctgccaggaggacagcagaactcctcttggaatttctctgaggacactgtcatctctattttgaacactatcaacgaggttatcgctgagaacttggaggctgccaaaaagcttcgagagacacagggtattgagaagctggtgttgatcaacaaatcagggaaccgctcagaaaaagaagttcgagcagcagcacttgtattacagacaatctggggatataaggaactgcggaagccactggaaaaagaaggatggaagaaatcagactttcaggtgaatctaaacaatgcttcccgaagccagagcagtcattcatatgatgatagtactctccctctcattgaccggaaccaaaaatcagataagaaacctgatcgggaagaaattcagatgagcaatatgggatcaaacacaaaatcactagataacaactattccacaccaaatgagagaggagaccacaatagaacactggatcgatcgggggatctaggcgacatggagccattgaagggaacaacacccttgatgcagaagatttagcaccactatctccgttccatctgggcttatatgtacttttattttttggtggtgaaattgactgatgattttcctttttcttcgctggactattgtgccaactgccaggctgcctcctgcccttacagccctaagtggctgccttctttccatcaactcccaacttcttcctgtgaagtttaattgtctcaacgcctccccctcccccattccctccatttttctcccaagaaacctgactcaattatttgcatattttgagaaactgctgcagattagttctttttgccagttttccctggaactcctggccttttgtggaggggagggatggagagaataggaatcttcactagaagccgtgggaagaattggaagttacatgctgtatatgcaatgtccagcagtctgataaactgacgattcttaatcaagatttttttcctgatggggaagggacttttattttcttttagagaggggaaagtgtgagctctt

SEQ ID NO: 241078 - DNA, 900 bp, Homo Sapiens
ccaactttgtacaaaaaagttggcgttaagatggcggctgggctgcggaaacgcggccggtccggttccgcggcccaggcagagggactctgcaagcaatggctgcagcgcgcctggcaagagcggcgcctgctgctgcgggagccgcgctacacgctgctggtggccgcctgcctctgcctggcggaggtgggcatcaccttctgggtcattcacagggtggcatacacagagattgactggaaggcctacatggccgaggtagaaggcgtcatcaatggtacctatgactatacccaactgcagggtgacaccggaccacttgtgtacccagctggtttcgtgtacatctttatggggttgtactatgccaccagccgaggcactgacatccgcatggcccagaacatctttgctgtgctctacctggctaccttgctgcttgtcttcttgatctatcaccagacctgcaaggtacctcccttcgtctttttcttcatgtgctgcgcctcttaccgtgtccactccatctttgtgctgcggctcttcaatgacccagtggccatggtgctgctcttcctcagtatcaacctcctgctggcccagcgctggggctggggttgctgctttttcagcctggcagtctctgtgaagatgaatgtgctgctcttcgcccctgggttactgtttcttctcctcacacagtttggcttccgtggggccctccccaagctgggaatctgtgctggccttcacgtggtgctggggctgcccttcctgctggagaaccccagcggctacctgtcccgctcctttgaccttggccgccagtttctgttcactggacagtgaactggcgcttcctcccagaggcgctcttcctgcatcgagcctttcacc

SEQ ID NO: 241079 - DNA, 940 bp, Homo Sapiens
gaaaatgcctcacctaaatgtgttcagtactcaaagttctgcagtcaggtcgcccacattttcatttacaatttctattttctaactttctaaattataagaataatttcgatagataccacaaaacacatatatacaggatataccacagcactgggcatcaacttaaaatactcatgaggtgaatgtaaggcactttcgcggtttacaaaagtgaatgcctcaaagttagatatttatcaaaaatggaaaaatatccctatacaagtttataggagccctgaaaaatcaagtacgtatgaatcattaccaatcttggccaacattttgagagccttagtgtgactaaagatcagagatataatagataaataacttttttaaattggagttctatacatcagtgtcaggattctaaaactgctctcataaaaatctgtctcttctaagttatttcagttctcagccacagagattgaagaacaggacaaccactcagtgtaccactgtttagatttcatgatgataccataccacatcagttacaaagagactggaaataataaaggctttgagtttgttttgttatttcctacaaatattataattaagatagaaacttattcaaactactcaaaaatgtaaattttatgtattttcttgaaatcatgaatttttaatttccaaatacaaatattgttgctctaaataatgtgagttttgtgactcttcaaaattaaaagaatgtaacctacaatataatgtattttcttgtctatgagagaccaaacgagcttaggtagcgtaatgctaaaaaattgatttaaggaaataatctatttttatgccatctttctccaaaactcttaaaaagccaaatcttctctaggtcatggttggtaaggacaggtcattaacaaagtcagggattcagggctga

SEQ ID NO: 241080 - DNA, 1449 bp, Homo Sapiens
gcctggtgagactttcttcatgtgttcctgtagctctgatgagtgcaatgacaacatcatcttctcagaagaatataacaccagcaatcctgacttgttgctagtcatatttcaagtgacaggcatcagcctcctgccaccactgggagttgccatatctgtcatcatcatcttctactgctaccgcgttaaccggcagcagaagctgagttcaacctgggaaaccggcaagacgcggaagctcatggagttcagcgagcactgtgccatcatcctggaagatgaccgctctgacatcagctccacgtgtgccaacaacatcaaccacaacacagagctgctgcccattgagctggacaccctggtggggaaaggtcgctttgctgaggtctataaggccaagctgaagcagaacacttcagagcagtttgagacagtggcagtcaagatctttccctatgaggagtatgcctcttggaagacagagaaggacatcttctcagacatcaatctgaagcatgagaacatactccagttcctgacggctgaggagcggaagacggagttggggaaacaatactggctgatcaccgccttccacgccaagggcaacctacaggagtacctgacgcggcatgtcatcagctgggaggacctgcgcaagctgggcagctccctcgcccgggggattgctcacctccacagtgatcacactccatgtgggaggcccaagatgcccatcgtgcacagggacctcaagagctccaatatcctcgtgaagaacgacctaacctgctgcctgtgtgactttgggctttccctgcgtctggaccctactctgtctgtggatgacctggctaacagtgggcaggtgggaactgcaagatacatggctccagaagtcctagaatccaggatgaatttggagaatgttgagtccttcaagcagaccgatgtctactccatggctctggtgctctgggaaatgacatctcgctgtaatgcagtgggagaagtaaaagattatgagcctccatttggttccaaggtgcgggagcacccctgtgtcgaaagcatgaaggacaacgtgttgagagatcgagggcgaccagaaattcccagcttctggctcaaccaccagggcatccagatggtgtgtgagacgttgactgagtgctgggaccacgacccagaggcccgtctcacagcccagtgtgtggcagaacgcttcagtgagctggagcatctggacaggctctcggggaggagctgctcggaggagaagattcctgaagacggctctctaaacactaccaaatagctcttctggggcagctgggccatgtctaaagaggctgcccctctcaccaaagaacagaggcagcagaagctgctcctgaactgatgcttcctggaaaaccaaggggtcactcctctccctgtaagctg

SEQ ID NO: 241081 - DNA, 1117 bp, Homo Sapiens
  misc_feature (153)..(169): n is a, c, g, or t
  misc_feature (533)..(541): n is a, c, g, or t
  misc_feature (933)..(941): n is a, c, g, or t
caatttttagacctgtggaaagttttcatgctaaagataaaagccattggttaatgggcaacttactttgtgttttagaaaccagggttgctgctatactttaaaatgttggtcactaaatattatggaccctgaactgggcttctatgcctnnnnnnnnnnnnnnnnntgggttaactatcacttaggtgacatctatatttccttcacttcagaagactaatccatagtgcctctcagctgtttcttataaaataagaatcgtgtaaccaactgcttcccatgggataagaacaatggtaacagtgggttcaactgactatacacaattatgctaatattttattaattcaaaagcactttacaagaaaatataagtatggcttccaataggaatgttatacctggacttggtaccaagctcacagatttgagtttgcaaggaaaaacaggctttcaagttaaagaacaatttgtaaccaaaactttaatcccaaggattctcacaaaacatattacaaatgacagcatgnnnnnnnnntcttgcacagtaactcaaagttcggctctacaatgtacccttaaactggcaggacatttttgaaatcacaaatttgcacataaagaatgtcacgaacagccatgtatccatatacagcaatcaaataaggaacttatgacctaaagcaaaggtaaactttcttgaaacttaacattctataccaactaggcaacctctgcccaggatgagagttggatttttcaaaaacctctaatttaatagtgcagcatttcgttttccctgatggcctgtgtttcacagcagtttttaaagactgcttgttcaactatagctgcagcctatatcccagctatggaaaaaaaagtaaatcttagttcaatttttgccagttgtttctgtatttaaatttnnnnnnnnncacacttccgctgggcaggtttagaggtttattatcagtctgtgcataactaaaagttcaaagcaaattcaattttgcttaagggaacattgtaaagtaacaattcttggtattacatgcctcgtatgatccatttcaaaccatagagaattacacctttgccaacttttttgtac

SEQ ID NO: 241082 - DNA, 643 bp, Homo Sapiens
  misc_feature (70)..(78): n is a, c, g, or t
  misc_feature (470)..(478): n is a, c, g, or t
aaagaacaatttgtaaccaaaactttaatcccaaggattctcacaaaacatattacaaatgacagcatgnnnnnnnnntcttgcacagtaactcaaagttcggctctacaatgtacccttaaactggcaggacatttttgaaatcacaaatttgcacataaagaatgtcacgaacagccatgtatccatatacagcaatcaaataaggaacttatgacctaaagcaaaggtaaactttcttgaaacttaacattctataccaactaggcaacctctgcccaggatgagagttggatttttcaaaaacctctaatttaatagtgcagcatttcgttttccctgatggcctgtgtttcacagcagtttttaaagactgcttgttcaactatagctgcagcctatatcccagctatggaaaaaaaagtaaatcttagttcaatttttgccagttgtttctgtatttaaatttnnnnnnnnncacacttccgctgggcaggtttagaggtttattatcagtctgtgcataactaaaagttcaaagcaaattcaattttgcttaagggaacattgtaaagtaacaattcttggtattacatgcctcgtatgatccatttcaaaccatagagaattacacctttgccaa

SEQ ID NO: 241083 - DNA, 1179 bp, Homo Sapiens
  misc_feature (213)..(226): n is a, c, g, or t
  misc_feature (990)..(998): n is a, c, g, or t
ttttacatcatgatgatcagcttagaattccccatgcaacacctcaaattataaaatggaagcaatttttagacctgtgaaaagttttcatgctaaaagataaaagccatttgttaatgggcaacttactttgtgtttaagaaccaggttgctgctatactttaaaatgttggtcactaaatattatggaccctgaactggcttctatgcctnnnnnnnnnnnnnntgggttaactatcacttaggtgacatctatatttccttcacttcagaagactaatccatagtgcctctcagctgtttcttataaaataagaatcgtgtaaccaactgcttcccatgggataagaacaatggtaacagtgggttcaactgactatacacaattatgctaatattttattaattcaaaagcactttacaagaaaatataagtatggcttccaataggaatgttatacctggacttggtaccaagctcacagatttgagtttgcaaggaaaaacaggctttcaagttaaagaacaatttgtaaccaaaactttaatcccaaggattctcacaaaacatattacaaatgacagcatgaaataaaaatcttgcacagtaactcaaagttcggctctacaatgtacccttaaactggcaggacatttttgaaatcacaaatttgcacataaagaatgtcacgaacagccatgtatccatatacagcaatcaaataaggaacttatgacctaaagcaaaggtaaactttcttgaaacttaacattctataccaactaggcaacctctgcccaggatgagagttggatttttcaaaaacctctaatttaatagtgcagcatttcgttttccctgatggcctgtgtttcacagcagtttttaaagactgcttgttcaactatagctgcagcctatatcccagctatggaaaaaaaagtaaatcttagttcaatttttgccagttgtttctgtatttaaatttnnnnnnnnncacacttccgctgggcaggtttagaggtttattatcagtctgtgcataactaaaagttcaaagcaaattcaattttgcttaagggaacattgtaaagtaacaattcttggtattacatgcctcgtatgatccatttcaaaccatagagaattacacctttgccaacttttttgtacaaagt

SEQ ID NO: 241084 - DNA, 905 bp, Homo Sapiens
ttttgggtttcaacaagctagaaatggtgaggtgaggctgccggactgacggccaggaagaatttgctgaaaaggttttgccagatgttgcgttggatttagttggttggcgaagggggtgttgtggatttttcctgcttttttgttagccgaaggctgctgctgtagttgttgtgaagacatttggtaaataaacagctgagctgattggccaggaatgtgtgggcggtcgaggtggctgctgccgatttggttaaggttggagagaaggctgagagaaaacagcatgctcgggaaccaaagggcggtgcaacctgacgactggccagcctgggtcatgtgaaacgacaccagccaagctgaatggggcgcgctggtcacatgacgctgaaagggctagttgactggctaatgcagattcagagggtggtgagaagagacatgatggtgactctgcgacgaggtggaggactcctcctacgataatcatctcgagggcgacgaccccaagagggaggtgggccacgatttctacttcttttttcaccattcgacagttccactcttacacggcagccacatagtgttcttccatctagctctcggactgcatcagctgcatctcggggatcttcaaattcaacaaaagcaaagccgggtgggtttctagcaacccacacacttcggagtggtccatagtagccaaaagcccgttccaattccgtcttgttgccattgtttccaagattgcctacataaaccttacagtccaatggacaggaatcacgatgcatttcgagatctagggttaaaaaatgcggcggctcaaatccacacgctccgatgagtcttcccgctttcctccggcccaacaccaaccaactctctcactcacccggcgccaa

SEQ ID NO: 241085 - DNA, 983 bp, Homo Sapiens
  misc_feature (251)..(261): n is a, c, g, or t
  misc_feature (420)..(470): n is a, c, g, or t
  misc_feature (517)..(554): n is a, c, g, or t
  misc_feature (928)..(943): n is a, c, g, or t
tttcctaagggagccatcccagaatggcatctgttgtttagctcgtggttgtgatgaaggatattgttatcccaaactccagccctgtggaaaactacttgcatttttatgacctccatgttcctcctcttcatcagatgaatctgcagcataagccaccaagccaaatcccttctctgtagttttcatcttcttggctggataatctagaatagagaaaaaacaaccccaaccccatccccgccaagggnnnnnnnnnnntaccataaattcgttaattaaaaaaaagatgttaattttaagtggttagttggacaccattttgaggtcacagggtcaatggtcacccaaaaacgttgaagatcacacgaaaaacagcaccagcatcagcaaatgtgaatccaccagaaccatgtaagnnnnnnnnnnnnnnnnnnnnnnnnnnnnnnnnnnnnnnnnnnnnnnnnnnnggaaagttagcaagtgagtctcttgagggctgatatttcaccttttnnnnnnnnnnnnnnnnnnnnnnnnnnnnnnnnnnnnnncgtattttcttctgttcatttttatgagtacaggcaaagaataaaatatcccatgtacctctacaggatttagagttctggaatgctaaaaggcaacattttcctaacagccacaaactgaccattactgaccaatagagttataaggggaggtgtggctcagctcccaatataaagcaaaatcaacctttattaagtccgtatcagatgacctcctggtattcacataatataggcaacaggattttgaaatgacctaccactcattactattcactgatgctatgtataaaataagtcgactaactcttttctagatacacgttggttggaaacaaaaggttgtctgtatacaatttttttaaaactatttnnnnnnnnnnnnnnnnggcacacgtttgttggaaataaaaggttgtctgtatacaa

SEQ ID NO: 241086 - DNA, 1130 bp, Homo Sapiens
  misc_feature (397)..(408): n is a, c, g, or t
  misc_feature (567)..(617): n is a, c, g, or t
  misc_feature (664)..(701): n is a, c, g, or t
  misc_feature (1075)..(1090): n is a, c, g, or t
taaggaaccctttaagaaaggggtgcattgaatctctaattttgcaagaggtccagatgtttcccagcacaggccccagagtcttgttaatcaaatgcatgcattattgctaagaagagtcactgagggtcaaaattctgttccactgtttcctagggagccatccagaatggcatttgttgtttagctcgtggttgtgatgaaggatattggtatcccaaactccagccctgtggaaaactacttgcatttttatgacctccatgttcctcctcttcatcagatgaatttgcagcataagccaccaagccaaatcccttctctgtagttttcatcttcttggctggataatctagaatagagaaaaaacaaccccaaccccatccccgccaagggnnnnnnnnnnnntaccataaattcgttaattaaaaaaaagatgttaattttaagtggttagttggacaccattttgaggtcacagggtcaatggtcacccaaaaacgttgaagatcacacgaaaaacagcaccagcatcagcaaatgtgaatccaccagaaccatgtaagnnnnnnnnnnnnnnnnnnnnnnnnnnnnnnnnnnnnnnnnnnnnnnnnnnnggaaagttagcaagtgagtctcttgagggctgatatttcaccttttnnnnnnnnnnnnnnnnnnnnnnnnnnnnnnnnnnnnnncgtattttcttctgttcatttttatgagtacaggcaaagaataaaatatcccatgtacctctacaggatttagagttctggaatgctaaaaggcaacattttcctaacagccacaaactgaccattactgaccaatagagttataaggggaggtgtggctcagctcccaatataaagcaaaatcaacctttattaagtccgtatcagatgacctcctggtattcacataatataggcaacaggattttgaaatgacctaccactcattactattcactgatgctatgtataaaataagtcgactaactcttttctagatacacgttggttggaaacaaaaggttgtctgtatacaatttttttaaaactatttnnnnnnnnnnnnnnnnggcacacgtttgttggaaataaaaggttgtctgtatacaa

SEQ ID NO: 241087 - DNA, 1217 bp, Homo Sapiens
  misc_feature (413)..(455): n is a, c, g, or t
  misc_feature (616)..(722): n is a, c, g, or t
tttaaacgggagtccaacaaaccacagcccataaggaggggaaggatccaaggagtggttggtagctgatgagactatctttaacaatctaacttctcaaaaggagaatgaattcatgcatattgggtaatttagaatggacttaacttttaaaaagcaatatacagattggaaattaaagtgtgatggtgtatgtgaatgagtaaaggctgagctcatcgcacccggctttgctgcctctgcatgatccttatagctaatgaggttagttcctaaaatgaacctcacaggtgttaggctgggatgtggcccaggatacctctcccctatttcctcacaacccagattggggctcaggcacccggttaccagacatgattgaagctacaggtttcctcaggccctccgcttannnnnnnnnnnnnnnnnnnnnnnnnnnnnnnnnnnnnnnnnnngggcattcagcaccttccagatttggaggcttcttctgtccctaatagctgggatcagaagctctcaggggtccaggcatgagggttatattctgaggggtcggcacctagtgggctccacgaagggataaggcctccagtgaggagcttgacatcattannnnnnnnnnnnnnnnnnnnnnnnnnnnnnnnnnnnnnnnnnnnnnnnnnnnnnnnnnnnnnnnnnnnnnnnnnnnnnnnnnnnnnnnnnnnnnnnnnnnnnnnnnnaagtgggaccagaacccataactgtctgtccccagagctcatgctccactcctagtgcctgaccaaatcctaccaatttgtcaaggtctagcttaaatgtgacctccaggaagcctagaggggatcacccacttctcaaattcaaagtacatatgacattcagctaactatagtcattcatgaacccactgtatctccttactaggagggtagagatcatgtctgattcaactctgtattccaagcacagagcctgacaaatagagggtgttcggtatgtgtctgatgaatacataaatgaatgaatacacaaatgagtgaatgaaggcagtttcaggtaactgcctaagactcctatgaggtcctgagtacctttgcccagctcaggggtgctgtcatcctaagctctcttggaatcaaattcagcctaggctccttctaaaacaggtctccaatatcctttattattttgcaaacatactcacatgcacccaa

SEQ ID NO: 241088 - DNA, 1506 bp, Homo Sapiens
ttgggtgatgtgatgtctccgaggaggggagagaagactttgtttccgactcatcaccctccaagagggcagcgctcccagtggtgggactcagcccagactgccctggggcagcttcctgggcccgctgcgctcagagggtgctggttggaggccagagctcggcagagtcacccaccctgcccttccccaggacccctgagaggggcttattggtgatggctgtgggaatcccccacttccaagatgtgcccaggatgtgaggagctggagtggaagctgcacctttgggaagaattcctctccagacctggcagagcctggtgtggggtctgagacggccggagaacctcccaggcagggctctgtgttttgtctgttacaacctccgtatgacgccacgccacccgctgttcacgtcccgtcggcctcctgcacagcccacacgctgcgcccggaaggcccctgctgtggagaagccggacccatccccgaggtccccagcgaggacacactccacgagagcagcccctccactctgcccaggagaggggccgaccctcctcgggaaccggccagccgcgtggctcccagcatccatcaggacaagcccacgtggggtcctccctgcgtgctcagagggtctgtccagccctgggaagcgaccttggcctcagttcacagcctggtgctcatctgctggcaccgggcatccacccatcagcccccgccctgtccctccgaaggacacccagcaggcaccccccggggaggcaggggcagaggtcagaaggggtgtctgggacctggatggccagcagggacaggggcattgtcatctcaaaggcccaacccccagaggccacaccagtcctcccagggagtcctcgagtcgccctgcccagagccctggcaccagagacgccaagagcctgtggggtgactcggagcagcaggtgtggccccgggcgggcggcaccgcgtccagggcagcctccctccgctgagtgacacgggacaccagtgcccggccgacgcgcctttgcaggagaaatgtgcaaacctctgtggataccatttcatttccattcttgtgttgtctccaaggcccttttggagatatacttggtgttggttgtgttttttggttccttttcagagaactgtaaaccgaggctgacgtgctccactgactgtgccgaggggcgggggcaggaggacggcaagacctatttataatatttagcgaactcggtctccctcagatcccccgcgagggaggctgctggacccaccccgctgtcccccatgatagaagtctgtaaataccttggtgaccaatgcccacttcccctcctgggtcacctctgatggctgctgtccactgagaacgtgggcagtgtccaaattcctgtactgtaaagactaaaagcgtttgctctgagactgacaaaggcggaacttccatgtgtctcctgccaggctctgtccccctacggccatccc

SEQ ID NO: 241089 - DNA, 1074 bp, Homo Sapiens
tttgtacaaaaaagttggctcacgtcgtgttgcaaagctgaccaccttgaacttcggagacggtccagacaggaacaagacccggacattccaggccacagtcctgggaagtcagatgggattgaaaggatcttctgcaggacaactggtccttatcacagccagggtgaccacagaaaggactgcaggaacctgcctatattttagtgctgttccaggaatcctaccctccagccagccacccatatcctgctcagaggagggggctggaaatgccaccctgagccctagaatgggtgaggaatgtgttagtgtctggagccatgaaggccttgtgctgaccaagctgctcacctcggaggagctggctctgtgtggctccaggctgctggtcttgggctccttcctgcttctcttctgtggccttctctgctgtgtcactgctatgtgcttccacccgcgccgggagtcccactggtctagaacccggctctgagggcactggcctagttcccgacttgtttctcaggtgaggttctttgctccagtcctgcgggagcagggaatggggtgggggtgggggttgtaaccggggtagagcagatccttggacttttcctcaaagactgctgcttctgagtccccgagaacctcttcaaccacagctctcccttagggactgggaacaatttgacaccgtcagcattcaatatttttctaattactttaacttttttattataaaatagttaacacttatgtagaaaagtccaatagtataaaaggacagcttggcaaattattataaagtggatacttataaataccactgagtagaatattaccagctgtccagaaaccccccatggtcccttccttcctgacaatgccctctctctccctagaaattactgtcctgctttataatgtattgccatgtatgtattcctaaataatatagtttggttttacttatttttgaaactatgtagacagaatcatacacatttcttttgtggcctgacttctttcagcaacattgtgattttcaggactcataactagttcacatcc

SEQ ID NO: 241090 - DNA, 1423 bp, Homo Sapiens
ttggcacaaagctgctcatcgcggaggtgaagagcaggcctgggaatagccagtgctgcgactgcggggctgcagaccccacgtggctcagcaccaacctgggcgtgctcacctgcatccagtgctcgggcgtccaccgcgaactgggcgtgcgcttttcgcgcatgcagtcactcaccttggacctgctgggcccctccgagttgttgctggccttgaacatgggaaacacgagcttcaatgaggtcatggaggcccagctaccctcacacggcggccctaaaccctcagctgagagtgacatgggcacccgcagggactacattatggccaagtatgtggagcataggtttgcacgccggtgcacacctgagcctcagcgactctggacagccatttgcaacagggacctcctgtcggtactggaggcctttgccaatgggcaggactttggacagccgctgccagggcctgatgcacaggcacctgaagaactcgtcttgcatttggctgtcaaagtcgccaaccaggcttccctgcctctggtggatttcatcatccagaacggtggtcacctggatgccaaggctgctgacgggaacacggctctgcactacgcagcactctacaaccagcccgactgcctcaagctgctgctgaaggggagagctttggttggcacagtaaatgaagcaggcgagacagctctggacatagccaggaagaagcaccacaaggagtgtgaggagctgctggagcaggcccaggcggggacctttgccttccctctacatgtggactactcctgggtaatttccacagagcctggctctgacagtgaggaggatgaggaagagaagcgctgcttgctgaagctcccggcccaggctcactgggccagtgggaggctggacatcagcaacaagacctatgagactgtcgccagcctgggagcagccacccctcagggcgagagtgaggactgtcccccgcccttgccagtcaaaaactcttctcggactttggtccaagggtgtgcaagacatgccagtggagatcgttctgaagtctccagcctgagttcagaggcccctgagacccctgagagcctgggcagtccagcctcctcctccagtctgatgagccccttggaacctggggatcccagccaagccccacccaactctgaagagggcctccgagagcccccaggcacctccagacccagcctgacatccgggaccaccccttcggagatgtacctccccgtcagattcagctccgagagcactcgctcctatcggcggggggcgcggagccctgaagatggtccctcagccaggcagcctctgcccagaaggaacgtgccggttggcatcactgaaggagatggctcaaggactgggagtctcccagcaagttc

SEQ ID NO: 241091 - DNA, 1247 bp, Homo Sapiens
  misc_feature (161)..(206): n is a, c, g, or t
  misc_feature (212)..(225): n is a, c, g, or t
  misc_feature (227)..(264): n is a, c, g, or t
ccttagcctcctaaagtgttggtatcacaggcgtgagccactgtgcccggcgttaacaatcttctgccccagggtcggccacagttggacaggagcaccctgcctcccctgtagcattcgtccccgtgcccggagttaactcctggacgacgtacacctgnnnnnnnnnnnnnnnnnnnnnnnnnnnnnnnnnnnnnnnnnnnnnncataannnnnnnnnnnnnngnnnnnnnnnnnnnnnnnnnnnnnnnnnnnnnnnnnnnntaaaccttggctcaagcaatcctctcaccttggcctccagagtgttgggattacaggtgtgagccactgcatctggcttgagtttttatttaaagccccaaacattaatgagtccctgctgtgtgctgatacccacaactgacagcttatggccacacggtctgtaggatagacaagcccataaataattctgtacacaatggtaaaacaagaactgctgttgatgtgtgtaccagaagggcagtgacatcagcctggagagttggcctgggcctggcagggagtaaggaaagaattctgggtgcagaagacagcaaataccaaggcctaaaaaagaatgaattatttgctgtttgggaaatggaagcccacgctgagtgctgaagcacagggactctgcgcaggaagaggaggggaagcaagaaatgaatttgggtccttgtgatggcagtggctgctgccatcacgctgtgtggctagggctgcacacttcatggagccggtggaagccccgtccctcatgagttgggactggagccgcaaaccgctgctgcagacccaggccttctgctctatggagcaggcaggagccccaccctcttgggcagggctacagccacccaaactgcagctgtggatccgagcctctctgctcctgggggagccgggaacaggcagaatttgcccttccagatgcagctgcagccgcgcaggcaggagccagggacaagtgggagccctgcctcttccaagttggcggggtgggagctcccaggtgcagctgtggctgcccccccaggcacaggacgagggcatctctgcagcctgcaccatcggccatcccaggaaggacagcccccttcaccctccatccctgcaggctcagggtgtctgcttccactgcctggcctctctccactccagcaactgctctgatcttggaggggagtcggagccaagacctgcagccatgaatggccagc

SEQ ID NO: 241092 - DNA, 1012 bp, Homo Sapiens
tacaaaaaagttggatttctccttgaagaccttcagtgactccatggcgcgcagctcgtacgaagcgaagccacacacctcccggatcatgtcccgctacaaacttggaacagaaatgaataaaagtcgctggcagagtagaagacgacatgggagaagaagccaccagcagaacccttggttcagactccgtgattctgaagacaggtctgactcccgggcagcacagcccgctcacgattccggccacggtgatgacgagtctccgtcaacctcgtctggcacagctgggacctcctctgtgccagagctacctgggttttactttgaccctgaaaagaaacgctacttccgcttgctccctggacataacaactgcaaccccctgacgaaagagagcatccggcagaaggagatggagagcaagagactgcggctgctccaggaagaagacagacggaaaaagattgccaggatgggatttaatgcatcttccatgctacgaaaaagccagctgggttttctcaacgtcaccaattactgccatttagcccacgagctgcgtctcagctgcatggagaggaaaaaggtccagattcgaagcatggatccctccgccttggcaagcgaccgatttaacctcatactggcagataccaacagtgaccggctcttcacagtgaacgatgttaaagttggaggctccaagtatggtatcatcaacctgcaaagtctgaagacccctacgctcaaggtgttcatgcacgaaaacctctacttcaccaaccggaaagtgaattcggtgtgctgggcctcgctgaatcacttggattcccacattctgctatgcctcatgggactcgcagagactccaggctgtgccaccctgctcccagcatcactgttcgtcaatagtcacccagcaggaatagaccggcctggcatgctctgcagtttccggatccctggtgcctggtcctgtgcctgggtccctgaatatccaagcaaataa

SEQ ID NO: 241093 - DNA, 1048 bp, Homo Sapiens
gagcctttaagtaatagtacttttaattaaaattaagttctaatagcacatttaatacatttacccctcccccttcttggtttctctgcattttgtgcaacatcactttgacttgattattcttgggtctgttttatttcccgcttttattttgcttttgaaatctttttccttggtggatttgtacgtgtcttcactagatgcctcaaattaagtctgaccacaatcctactctactttctacagtggagagaccatcctccctgccccagggctgtctccacccacccccccttccccacccgcaccctcgagtggggaaggggaagccctccccaccccagacgctaccatcccaaactagcggggtttctaggacaaaaagagcagggggaatctgtccctaggtggggcgagaagagtaaattgggtagagggagatgtgtttggggtctagggccagggagggggatggcagagtcattggtgtaatgaagcaggctcctcctgccaaaaggagagccaaggggcccctccaaccccttggataggaggggaaggcccagtgattgcaagctggggttggtagaaggcaagtgctttaaaaatgttgatttctcacacgcagaagccaagccctccagttttgtgtggggagggcaatgtgttcccaggccagggtacagtagatgacccctacctgaacacatatagatggaggtgaactggagcagagggtcagggttagggtcacccaaagtccctgtgcctttccccagcctctgtgcccatggggatgcctttctcccaggccttcaaggacagtgtttccactccactccgtgggaagtccttcttggaatctaacttttatgagacaagaaagcactttgcaagtaggtgaagaacgagtcagctttaaagaacaattactgagattgttactgctactgctgccatggaggtcaaagctaagtggaaagctggatgggaacaggggtaggggactgatcgcctcagtgctcttgaagctctgaaggtgagccaa

SEQ ID NO: 241094 - DNA, 1554 bp, Homo Sapiens
ttgggctgcttgtttccatggctcccctcaccaatgaaatccggcctgtcagcagctgcacccctcagcatattggaccagctatcccagaagtcagctctgtctggtttaaactgtacatttatcatgtcactggacaaggaccaccatcccttttattgtccaaaggtacaagacttcgaaaactgccagatatatttcagagttatgatcgattgctaataacatcttggggtcatgatcctggagtagttcctacctcaaatgtgctcacgatgttgaatgatgctttaacacattctgcagttttaattcaggggcatggtctgcatgggataggagaaactgtccatgtcccatttccatttgatgaaacagaactacaaggagagttcactcgtgtcaatatgggtgttcataaagcattgcagatactaaggaacagagtggacttacagcatctctgtggatatgtcaccatgttgaatgcttccagccaacttgcagatagaaaactcagtgatgcttctgatgagagaggagaacctgatttggcttctggctcagatgtaaatgggagtacagagtcatttgaaatggtcattgaggaagcaactatagattcagcaacaaagcaaacctctggtgccacaacagaagcagattgggttcctctcgagctgtgctttggaattccactgttcagttccgaattaaaccggaaagtttgtaggaaaattgctgcacatggcctttgcagaaaagagagccttcaaaacctcttacattccagtagaaaactctctctgcaagtccttaactttgttcactcattccaggaaggtgcttcaatattggatattcacacagagcccagtttttcaagtttgctttcacagtcatcgtatgctgacatgggtgttccacttcctgcaaaaaacttaatatttaaagatggtgtcttatcagaatggagtggacggtcaccttcctcacttcttattgctaatctccatttgcaataatttggttacaccatttgttgctcacactttctgccttttttctttcttaacgttagctttatagtgtcagccactaaaaagcatcctgctgctgcagtgcaattcttgcttaactaatattaaaagttggggaacatattcatgttttctgaagttttgctcattattgcacatcttattgcgacaaagtgctttttagcagccagcactgtattttttaccttgagacaatctgcatttcttttataaaactaagtatatactttataggctttatgatgactgttatgtttataagcagtcactatgaaaattgcaatggtaattttatatgttagtttatcaaacataaatcttgtttaattttatattttgttacctatactttgggggatcaaagggaagagatggaactcttcctctgaaaaggcttcttggttacttaaagtagtaaaactataaaacaataaacatccagtattgagagatgatatgatagggcattatgaattcctatgggtgtctgtaa

SEQ ID NO: 241095 - DNA, 1399 bp, Homo Sapiens
  misc_feature (100)..(117): n is a, c, g, or t
  misc_feature (867)..(909): n is a, c, g, or t
gaaaaacccagagcattcatgggttgttgcaatctcacttcagaaattaacaagttaaattaactcactcttccagctagcctatataattaaagttggnnnnnnnnnnnnnnnnnnctagaaatgtttatgtttggctttaattcttcactacatactacgttctaatggggaagacagtaagaaatccaagcactgacatagtaacttcaatagaacattctagaatgccactgaaggccaggcgcagtagctcacgcctgtaatcatttcaggccaattcaatccagtttggctcagaggtgcctttggctgagagaagaggtgagatataatgtgttttcttgcaacttcttggaagaataactccacaatagtctgaggactagatacttaaaaagaaaaagttatgacagttttgtgtagtggtaattatcaattttcaattaaaatagtctatcaattcattttatgcttgtaacaaacaatttagcacttcaaaacagaaaatgtatcacgggtatatatccagtggcaatataaataaaagtagtctgtaaattgtgaggcactataaaaatgcaataaaaacaccattcacatcaaagttatagtcatttcttttcactgatctcacaagacttaagtgccttccctagaaattcttcatgataaatacaattagccccaggatttcaacttttataccagaacaatacaaaataaattctccagaataatggttttcaaacatgagggatacttttaaatatctgttgactaagattacaaaagttaccatgaacgaataaatttttaaatgattttgttaatcactggagccaaaacagaatgggaaagcagctnnnnnnnnnnnnnnnnnnnnnnnnnnnnnnnnnnnnnnnnnnnagtagacaggaaacataaaagcatttaagtctaaaatgacatcaattctcaaaacattaactgtttctgaaaaacaatttcagatcctacagcattcgctccaatatcttaagctaattaattattggggatgggtttaaccattaaaaacaattcagtgaaaataacagtaaataagataaaaggcaagctggtttatattgtttcagataaaaaataagataggactgaagagaaaccaagactgatctgctatgtggcccctggcttttccacaagatgtgaattcaaccccaagaagactttttacaactgagccactgctcgattataatagcttatatgctttcaatcggtttacttgtaaaagtcatagttttactgtcaaaatgcacaagctcaagagctaaagtatgcccatgtaatagctgcattcttttttttccctgatacaaagtgatgaaaagtcactttacatcattatagccaa

SEQ ID NO: 241096 - DNA, 1534 bp, Homo Sapiens
  misc_feature (403)..(417): n is a, c, g, or t
  misc_feature (861)..(890): n is a, c, g, or t
  misc_feature (1062)..(1104): n is a, c, g, or t
ttggcggagtccgaggaggatgatgaagaggatgaggatgacgaggacgaggatgaagaagaggaagatgatgagaatggggactcctctgaagatggcggcgactcctctgagtccagcagcgaggacgagagcgaggatggggatgagaatgaagaggatgacgaggacgaagacgacgacgaggatgacgatgaggatgaagataatgagtccgagggcagcagctccagctcctcctcctcaggggactcctcagactctgactccaactgaggctcagccccaccccagggcagccagggagagcccaggagctcccctccccaactgaccacctttgtttctcccccatgttctgtcccttgcccccctggcctcccccactttctttctttctttnnnnnnnnnnnnnnntacggtgggggtagggggctggaggagcccaggccaggactctgcagcctcagagacatcagcccttgggggtcctcctccagggacagcaactatcagactaagccagcaccggaccagcctggcccaccccacccacttctgcacttgcggttccggcatggacaatggaccggagagtgggggtggggggtcccaaagagtttgatgaggccctccacacctgcggcccaatccaaggtgggggggaagcttggggaagacccattccttcccagaggggcctgccacctggacccctgcattggaactggaggcagggaacatggggaggaggagggtcggtgccttcaagaaaacaggcactgccctggtggccctctcccctgccccctgcaggaaggagctgcctggacccgttcatgggggagggggcagaagtgnnnnnnnnnnnnnnnnnnnnnnnnnnnnnnaagctctgagctgtcaacgagacgtttcctaccgatctcggctgccgtctctgttgtcatttctgggagagggagggtttaggggtagatttggaaccttttaaaaatggtcttgatgtatgtggaagagagtatgtgtatgtgtgttcctgtacatagcatgggtgcagcnnnnnnnnnnnnnnnnnnnnnnnnnnnnnnnnnnnnnnnnnnnaaaggggtctgtcctagagcccacatcagtttgttgtgaatctggaaaaagggtcggtgagggccgggagatgttgaccctggtgggagcaggctgaggctgccccgttctccacatcctctgttttgcccagtctctgattccattagggggagtgtgctgaagccattctcggatgcttcccagaccaggctctctctgccagagtcacatgcatccgagctgctggtctccattgtccagcagaaggcggaaaggcaggcaagatggtgtgaagcttaaagcttgtatttgatggaaaaggtctcccctgttcatctgagaggccaagcctggccaccccaaggctcagacctgggcttcaagaaatgtgctggagctcctaacttacacatccctccagccttccttgaatcctcccaccaccccc

SEQ ID NO: 241097 - DNA, 2034 bp, Homo Sapiens
  misc_feature (200)..(209): n is a, c, g, or t
ttttctagtttgtgtagtagtacatgagtcagaagtttcaactggacagtacttaaaagaggcaaaactggacatttctatttgatatctacaactcaactgagttgaaaagacaaatgtctgagactgctgttaaatacaaaaattagtttaaatgtttcaaataatacatttcccaactcacatcttaaccaaatagnnnnnnnnnnctacacaaactgtgaaagctattaaaaaacttgaagcccatttttctagtatcttacaatgttataaaagaagaaaaactttggtattttaaatacaggtttacaaactttacattatttacaaaccctccacactaaaaaattatgttaaaaataagctttcttaaaacaaaattaatttggcattcaagtatttctaacttacgagaatataaagtaatgatcactcactattatagtttaaaaaggctagtaaaaactataggcagaagataaaatttggccaagacttggtaactgggtgaagttagacttttataagcaattattttctgtttaacagtattcacattaaattagttacaacattttagaatgttttaacacgatttacgcaatcagtcaagtggctacatttactagtttattgaatatgaggtttatccatttagcaatgtaaggaaaactttagttctgtttctcagttatcaggagtgaacataaaactattctaaaccacaattagtttaccagcatagtacaaaataaaatgacaactaacgaaataaagcaattaaagtaacttatttttactcataaggttaccataataataaaaattcctttaattttcaaagcactcttcatgaaaagtagttggggtaaaattactatttgttcaaagtagaataaaagggaaggatgctctaattaaacattttattaaaattaaactctctatatgaaaggtagaaatttaatctggaaacctagatagattttcaaattcagataaaatgggttgacaacctataagcaggtaatattacagcaaagaaaatgtaggcaattacagtgacattcccaataagagggtgccccacattaattcctaacactggtggttagcagcccaaagtaaaccaaaccaaaataaagacctttcacatttcatataaaattagaaaaaaagtaacgagataaataaatacactaaagtttaagtattttaactttttaacttacatggctaaagtagcatttatgaatacctataatagtcaaaggcctaatttatcttaactagatattctgaagacaaaaattctaggagcaaaattaaattccatccgatcttgaaaacttacaaattgttaatcatataaggctttttttccccaaatgctatcaaattcataagtcatttttttaaagacacttaaagggatcatatgcagtgactatcatagaagtcaaaaacaaatgggtgaagcccttttctggttacccattagaaagtgcttcttcataaagcaattctttgacaaaaaagtaccaggctatgtatcacctggtacttttcaattagcatagtttataatctccatacatgagtactggttagtttaatacttcccagtctactggccacaaaatagggggacaaatttaatttttattcaactgtagcatatgacaaatgaattattatatctccctgattttctatttttcacggcacgccaagactattcaaagggaatttctaaaatatctaagatattgatcataaaattatatatgtgtatacacatatacacatacatatgtatagtgattaacaactttaaaaatgccacaggctttaattttatgtatcactaggtttggtcagtaggttcctattatatttaaatggcctctgagaagtaaaagttggtcagttttaccagttatctattacaatgtatgctaggtttatatctttgttcagaagggcagcttgaaccaagaggtattatgtaacccaacttttttgtacaaa

SEQ ID NO: 241098 - DNA, 901 bp, Homo Sapiens
  misc_feature (171)..(181): n is a, c, g, or t
ggaggtttcaactggacagtacttaagaagaggccaaaactggacatttctatttgatatctacaactcaactgagttgaaaagacaaatgtctgagactgctgttaaatacaaaaattagtttaaatgtttcaaataatacatttccaactcacatcttaaccaaatagnnnnnnnnnnnctacacaaactgtgaaagctattaaaaaacttgaagcccatttttctagtatcttacaatgttataaaagaagaaaaactttggtattttaaatacaggtttacaaactttacattatttacaaaccctccacactaaaaaattatgttaaaaataagctttcttaaaacaaaattaatttggcattcaagtatttctaacttacgagaatataaagtaatgatcactcactattatagtttaaaaaggctagtaaaaactataggcagaagataaaatttggccaagacttggtaactgggtgaagttagacttttataagcaattattttctgtttaacagtattcacattaaattatttacaacattttagaatgttttaacacgatttacgcaatcagtcaagtggctacatttactagtttattgaatatgaggtttatccatttagcaatgtaaggaaaactttagttctgtttctcagttatcaggagtgaacataaaactattctaaaccacaattagtttaccagcatagtacaaaataaaatgacaactaacgaaataaagcaattaaagtaacttatttttactcataaggttaccataataataaaaattcctttaattttcaaagcactcttcatgaaaagtagttggggtaaaattactatttgttcaaagtagaataaaagccaacttttttgtacaaagttggc

SEQ ID NO: 241099 - DNA, 1506 bp, Homo Sapiens
tcaatgttcctcggagtcgtccatagtttaaaatgacttctgcactttcttataacttgattgaagcgtgttgaagagtaactgctttgccagcatctattccatctctataatttcctaaaaataagtaatggagaagtgcagctgtaactaagtatatacatgtaggcttttctagaaaagtacagaaccaatttagaaagcagatgaattaggcctttactgtgttactgaccataatatggcataacaatataactaaagcagactatgcttctcctaagtttattattggtttatcattacttatcccacttttgaagtctagagttaccgggcaatttttaaaacactgatagtcacagtttttaaaaaacctagtgttgggccgccacgcttgctgtgaggtgggcaagcggcagacatggcaccctccaggagtcttgcagttccgctggcagtcctggtactgttgcttgggggtgctccctggacccacaggcggcagagcaacgtacgcatcatcacagacaagaactggagagagctgctggaaggaggctggatgatacaattttatgccccgtggtgccctgcttgtcaaaaccattaaccggaatgggaaagttttgctgaatggggagaagatctgaggttaatgttgtgaaagtagatgtcacagagcagccaggactgactggacagtttacaataactgttcttcctactatttatcattgtaaagatggtgaatttaggcatcctcagggtccaaggactcagaaggacttcataaactttataagtgataaagagtggaagagtattgaacccgtttcatcatggtttgtttcaggttctgttcagatgagtagtacgtcagcactctttcagctatctacgtggatcaggacttgccataactactttattgaagacattggattgccagtgtggggatcatatgctgtttttcctttagcaactctgcattctggactgttactaggactctgtatgatatttgtggcaggttgcctttgtccttcagaaaggcacacaccacagccatacccttcaaaaaaattatcagaatctgctcaacctttgaaaaaactggaggaagaacaagaggcggataaagaagatgtttcagaagaagaagccaaaagtaaagaaggaacaaagactttccacagaatgccataacacaacactctctgggtccatcactggtcacagataaattgtatagttatcttaatatcatgattttgataaaaacagaagactgattatttcttttggtttgaagtgaactgtgacttgcttgtatattacagcattcagtctagattgtcattaaattgaagactctacattcagaacataaaagcactaggtatgtaagtttgaaatatgatttaaggacagtatggtggtttaactagttctctaatttttgaaaaatcttgccaaacaataagatttatgtatatttgccaa

SEQ ID NO: 241100 - DNA, 831 bp, Homo Sapiens
ggtttctagcactaaatttaaatcatccctcccagtccaaacagcaaccaactaaaccctccctaatgatagtttcctggcaattattactaatactttaatatcacacaaatcaacaaggacaactacaaaactggatagtatttaccaaattacaaaaataatatataaaatataaataaagtgaatatttgtctcaccaattatgtatacctacgtattctttacctatactcctttaatcagcattaaaagttgaatatttactgtcttgtccagtgtcctgcagagtgtgctcctcggctgccatacgcgccagcttcctctttaaaatgatttgtactgttagcttggcaatacctgcatcagcagctcaaccatttataaagaaacaacatacaaggaaggctgagctgaggaatgcagatgtttatggtaagaaggaacaaaaaaatgtaattcatcattcctaaggcaaacaattaataagaaaaatacatttactgttagtgaaaaatacaaatggtaatccatacttcatggaactacgggcttcttccatggggaaaatggacttaacattcagatgttgacaatttcggaaggcagcttatattgtcatctacaatctgaactgaaactcagaaatccaggggatgcatggtcaggaaataaaattcttcaacttattttttcttggagaatttaatgagattttataatgcaaactgtatgaagactgcttgatggcttgagcagtgttcagatcacagcatacatattcaaatgattttaatatttggaaagactgtcagagggttgtgtccgtgt

SEQ ID NO: 241101 - DNA, 875 bp, Homo Sapiens
ttggaaagatgaaaataagaaaaaatatttctgaaattcgggaacttgagaacatagaagaacaccagtctgtagatattgcaactttggaagatgaagctcaggaaaataaaagcaaaatgaaaatggttgaggaacatatggagcaacaaaaagaaaatatggagcatcttaaaagtctgaaaatagaagcagaaaataagtatgatgcaattaaattcaaaattaatcaactatcggagctagcagacccacttaaggatgaattaaaccttgctgattctgaagtggataaccaaaaacgagggaaacgacattatgaagaaaaacaaaaagaacacttggataccttaaataaaaagaaacgagaactggatatgaaagagaaagaactagaggagaaaatgtcacaagcaagacaaatctgcccagagcgtatagaagtagaaaaatctgcatcaattctggacaaagaaattaatcgattaaggcagaagatacaggcagaacatgctagtcatggagatcgagaggaaataatgaggcagtaccaagaagcaagagagacctatcttgatctggatagtaaagtgaggactttaaaaaagtttattaaattactgggagaaatcatggagcacagattcaagacatatcaacaatttagaaggtgtttgactttacgatgcaaattatactttgacaacttactatctcagcgggcctattgtggaaaaatgaattttgaccacaagaatgaaactctaagtatatcagttcagcctggagaaggaaataaagctgctttcaatgacatgagagccttgtctggaggtgaacgttctttctccacagtgtgttttattctttccctg

SEQ ID NO: 241102 - DNA, 2889 bp, Homo Sapiens
  misc_feature (288)..(298): n is a, c, g, or t
ttggctcacactgctctactgctcagaaaccaccaagactgttgatgccttagccttgcactccagggccctacctgcatttcccacatgactttctggaagcctcccaactattcttgcttttcccagacagctcccactcccatgtctctgctcatttagtcccgtcttcctcaccgccccagcaggggaacgctcaagcctggttgaaatgctgcctcttcagtgaagtcatcctctttcagctctggccgcattctgcagacttcctatcttcgtgctgtatgnnnnnnnnnnncccccttcactctaatggactgttccagggaagggatgggggcagcagctgcttcggatccacactgtatctgtgtcatccccacatgggtcctcataaaggattattcaatggaggcatcctgacatctgttcatttaggcttcagttccactcccaggaactttgcctgtcccacgagggagtatgggagagagggactgccacacagaagctgaagacaacacctgcttcaggggaacacaggcgcttgaaaaagaaaagagagaacagcccataatgctccccgggagcagaggccactaatggagagtgggaagagcctggaaagatgtggcctcaggaaaagggatgagagaaaggaggtggtatggaagactcagcaggaacaaggtaggcttcaaagagcctatattcctctttttctcacaccgatcaagtcaactcagtactcacgggagaaaaatagactttatttacaagtaataacatttagaaaagatccatccccggcccttaaaaaccttcccatcactccaaatcccaccccagtgcaagtctggggaaggtagggtgtgagctgctgctgaaggctgtcccccaaccccactcctgagacacagggcccatccgtcctgggaaagagcatcctctggcaggtgctcccaccaggtcagacccagtcctggacttcaagagtgagggcccctgctgggcccagccaccaggacagcaggaaccagggcctactcctcttatggtcccttctagatccagaggctaagaggaagactggccaggcccaaggacccagccatcaaaaccagcctcaaatctggttgtgatggagaagtgactttgctttaagaaaaaaggaggcaaggtagggagagcgcccacactgtccatgctccaggccccctgggccagctccgagaaggcgccagtgaaggaccagggaccaggccagggtgcgggcaggcatcactgtctctaggggtttggctactgttggcctgggagctgagagaaggcactgagagggacagtaggcggaggaccaggtgacggcagcatcggggacacaggtggggccactcactggtactggccctttagtgctttgccttgcccttggctcgaggggtggcaccaatggcggcagcagtggcggcgctggctgtggtggtggcaatgcgcggagaacggcgggttccactgcgagtgttgggggaagccttggacagggccttctttgaggctccccgccgcagaaggctgttccctagcttcttgggtgtgttgaggatgctgaaggccatcgactggcgccggtcagcctgcaaggaagggctgtcagaccgggagacccaatgctgccttcccaggccagcgtgctgtgccacgctgtaccagcaaggtcccgccagggcgtcgcttcatcccccttcagccccagcctcacctgtttagtagaagctggagctgctttcttctgggcctcagtagtgctctgtttgcgcccttcatgtcggtctcggggagtcatggggcgtgggaaacagctggtggccttcttagactatggagaagaggacagttaggcagacagtagcaagaggagtcacatctgaagccaggtgtcttgtcctctcagagctgagtggaccttgtaagtcaacgtgcaacctgctccccttcccaactctgggccagatccttcccttcccaacagttcccatccatgggtcaggcccttggagagagggaaagagagggggaagtgagggaaggagagagaaggctccctttagtccttggtgagctgggcctgacctgagcacagtgctggagtaacacccaggagccaccgcgcctacctcaggagttccagggccctggtggggctctagggagacccgtttgcgctgctgccgggtggtgatgccagtgccctcggctatctggattggctgcatgctggctcggcgcagggtctcttgggggtctccagttttcatctcctcatctgtgatggtgcccaggctcagggaaggctgcatgggtggaagaggtggtcagtggaccatagctgtatggagatggaggaggacctggggctgtcccagaactctacactcgcccgacacttatggtcgggacccttcctgcctcacgaggtagaaagacacaaggcctcctttcctgttctgctttctacctaagccctgggcaaatggccacaagcagtgcagtcctgaccagattcctctctgagctcctgcctacccccagggacttcacccctgagtgccctcccagctgtctgttccacctggaaacatgagaaggtcaccctccccctcctcggccagtcagtgatccagggccctagtgctcaggctagatcagcaggtgggattccaagggagggcagggatgggaggccctgcacagtgacctcaggcctcaccctggactccaggggatagcacgtcttcagatgtggggggcacactcgattgcgctgctgcagctctgcaatgcggttccagtcatccagctgctcaagctcatcctggtcaagtgccc

SEQ ID NO: 241103 - DNA, 1095 bp, Homo Sapiens
tttttacccgcttttaagatggcccaatcctcctctcccccccacccaaagacatgtgagcaactgctaatgaaaagcagtaaacagccgcttaggctatagcagtttcaactccactctgaggtgaagattccaattacattcgagacttaagttctttcaattttttcctaacaaaagttcctgagtccagtatttacaatattacagcactagcagatcagtgtctacaactcatctttttctgctgtatcctcttcaccagttgggggagggcctgcacttccatagagtttgctgataattggttgaacaatttcttccagttccttcttcttagctttgaagtcttcaatgtcagcatcttggtggctttccagccattcaatcttttcttctacagctttttccatggtctccttatcttcagaggaaagtttacctcccagcttttctttatctccaatctgattctttagagaataggcatagctttccaactcatttctagtatcaatgcgctccttgagctttttgtcttcctcagcaaacttctcagcatcattaaccatcctttcgatttcttcaggtgtcaggcgattctggtcattggtgattgtgatcttatttttgttccctgtacccttgtcttcagctgtcactcgaagaataccattcacatctatctcaaaggtgacttcaatctgtgggaccccacgaggagcaggaggaattccagtcagatcaaatgtacccagaagatgattgtcttttgtcaggggtctttcacctagaagttacatacagaaaaacttgttagttgttactgacaagcattagcacatctagatccccgcatttcagtctgaagcataaagtgacacttttggttttatcgagctaaaagtaatttcatattggtctacaaggagcagcaactagtactaacaatgagttaggttactaactcaactgaattttatctattttaaagtactgtgaactcctttttcttgtactctaggagccagctcagatgctattattagtgagaatgctaatcattggctgggtacagtggctcacacctgtaat

SEQ ID NO: 241104 - DNA, 2157 bp, Homo Sapiens
  misc_feature (361)..(385): n is a, c, g, or t
ttgggaaaagcaggtatagaatatgtgcaaaagaattaggatatagttgaaaggatttggagttaggcagcccgtgcttgaacctggactggacccatcctcctagagctgtgtattaaggacaataaaccctgctcagcctgacagggtggctgtgaggagaggatgaaacgttttaggagagcgtactttatcaattccaaagcccagtatatgtcttcatcctcaagctgaactggaaaggtactcttaatagagcgctgtacatgaaaccacagtaaagctcttaaacaaaacagccttattgtgaccctgtttctttcttcttccttccagtcttcaggcagtgacagtggtgggnnnnnnnnnnnnnnnnnnnnnnnnntcaacagcccggacagggccagcgggccggaaggcagcttgagccagaccatggccggatccagccctaacacgcctcagcccgtgcccgagcagtccgcgctgtgccaaggcctctacttccacatcaaccagaccctgagggaggcccacttccacagcctacagcaccgagggcggcctctgacatgatgtgccggcagtttcttgccttctgtgaagggacagcgctgtgcagatttgatatttcaacttacaacttgttttaaaagaaaaattgcacacgaaaaatgcctgttggcttttcagtctatatttgaaataacaggttaacaggcagttgtttacttgtggttttgctgcactattgcaatttcaaaggggctttgaagcaattttttataggattcttttgagggagggtatcaaatctatgtcaaggtagtggtttgaggaaaactcattctgtgtgttgaatccatagtatgtcccattcagactgatttccaaatctgtcaactagaaactctactttatgtaaagggccttttaaaaatgcgggatcttcaattttttttattcaataaactagtaaagagtatctagtttccatgaaaaaacataagtttttttccaaaatataggaagcttgattcagtcttgcactgaaattaactgccatactacctctcagtatgtagatgttctattgaaagtactctctcctgtgtaacaggagaacaatcagatccaattcagactgtcagtgaagcacactccctaataatagtctctactctttgttatatatttgtatttccagggggaatgtcttttagattcttgtatacccagataacttctgtgtcactattccaccagagtctgcacctcagactttagtaggaaacatggcacagttctgcaagtaaagtaatatgtaatgactttttgtcctacaaacttggtcagtcagcagcttacatgatctcattgacaattccaccttgtagtgtcaacaattaaggtgttgttgaacgctgataaaatgtaagctacctgaactgatgtctaaagcaacaagtattgtgaaattttgggacaaggattaacttgatgcttaaagtaacccccaacagtaactagggggccacattccatcagtgaaactggaaagattggtgtggctgagaatcagatgagcagaggcacctttagaagaaataatgtggtagtatttatttagggagagacagatgtgttgccatgttacttagtcatactagagagccagccaagtttgaataatgaaggtgcagacgtgttgtcttcttcactgacaagctgtctgaacaaggagccaggaactgtcgggtcaccagctgtggagcgtgccggggggacaacctgccattggatgtagagaaaagtgccttagagttggcctgagccctcctgcccactcgccctccgcgcgacgccactcggagtccacacggcacacacaagcggagctgagaagcacgatggctctagtcagaggactttgctgtcggtccagatttgaagaggacacggaacagcatgagcctttgtgacaaaactagaatttggaaatgaggactgtcttgggaaaagggtagacacaggcacttctctccacagcctgctaacctaatgtgggcagaactgaaagatcactgcagtggaaactgttctggaagaggctgcaacatagctcatgcttaagggactggatggtttttgcagagc

SEQ ID NO: 241105 - DNA, 1219 bp, Homo Sapiens
ttggctgcaattgggttgttgtcaactgctccactcctggcaacttcttccacgtgctacgacgccagatcctgctgccattccggaagccgttaattatcttcacccccaaatccctgttgcgccaccccgaggccagatccagctttgatgagatgcttccaggaacccacttccagcgggtgatcccagaagatggccctgcagctcagaacccagaaaatgtcaaaaggcttctcttctgcaccggcaaagtgtattatgacctcacccgggagcgcaaagcacgcgacatggtggggcaggtggccatcacaaggattgagcagctgtcgccattcccctttgacctcctgctgaaggaggtgcagaagtaccccaatgctgagctggcctggtgccaggaggagcacaagaaccaaggctactatgactacgtgaagccaagacttcggaccaccatcagccgcgccaagcccgtctggtatgccggccgggacccagcggctgctccagccaccggcaacaagaagacccacctgacggagctgcagcgcctcctggacacggccttcgacctggacgtcttcaagaacttctcgtagatgctgcctagggttgcttgggccactgccctctccacacccatgactgccccttgcttctcaactaaagaatagtgcctcagcgctgcccacaccaccgccctcctcgctgtgccaccacccctccctctgctctcataggagttaggctgtcgtccccctccagtgcttggctgccccacaggccacacgctgcccaggctctgctgacttctgagcagttttccaggaggccggggggagcaggaggaggaaaggtagcccccgagggatgtccttggggaggggtcagctctggccacaatcctccccaccagtctcacccactaggataggaactgggccttgtgtgctggcttccgctgtcacccagcaaggcacaggctcctgtatttgagactaggatagcttcatcttgagcctgagccttagaatctgtagaggagcctggagtcggatctagccatggctggcagaggtttctagggtgggccccagccgtggcgtgaactgagggatgacccggggcagctggcaggagagagccttggcctgaactgggcacagaaagggcagctttcagtctctgcagtgtccataatctgctgttcctt

SEQ ID NO: 241106 - DNA, 1334 bp, Homo Sapiens
ttgggaaagtaatgacaggatttggatgaagtaatggatcactaatgaactacagtgctggtgagatgtgtaagaaattataaagagctctgatgggctatttgggtgatacccagtgcagtgaactgcaggatttttgtccctgagtcatggaagacagaagagctgaaaagtcatgtgaacaagcatgtgaatcacttaagaggcaggactatgaaatggccctcaagcactgcacagaggcccttctttctcttggccagtactccatggcagacttcacagggccttgtccattggaaatagaacgcatcaaaatcgagagtcttctctacagaattgcctcatttttgcaactgaaaaattatgtgcaagctgatgaagattgtagacatgtgctgggagaaggactggccaagggagaagatgcctttcgggcagtgctttgctgcatgcagctgaaagggaagctccaacctgtatccaccattcttgccaagtcactcacaggagagtccctgaatgggatggtaacaaaggatttgacaagactaaaaacacttctctcagaaacagagacagcaactagtaacgccctctctggatatcacgtggaagacttagatgaggggtcttgtaatggttggcatttccgcccaccacctaggggaatcacaagcagcgaggaatactttgtgtaaaagatttttagaacaaggaatctgtaggtatggtgcccagtgtacttcagcacattcccaggaagaactagcagaatggcagaaaagatatgcttcacggctgataaaattgaaacagcaaaatgagaataaacagctctcaggcagttacatggaaaccttgatagaaaagtggatgaattcattgtctcctgagaaagtgcttagtgaatgtatagaaggagtaaaggtagagcacaatcctgacctgtcagttactgtcagcaccaaaaaatcccaccagacatggacctttgctctcacttgtaagcctgcaagaatgctgtatcgtgtagcattgctttatgatgctcatcgtcctcattttagtatcattgcaatatctgccggagatagtactacccaggtatcacaagaagtcccagaaaactgtcaagaatggataggaggaaagatggcccaaaatggattagatcattacgtgtataaagtcgggatagcatttaacacagaaatatttggaacttttcgccaaaccatagttttcgactttggattggaaccagtactcatgcaaagagtaatgattgatgcagcttctacagaagatctcgaatacctgatgcatgcaaa

SEQ ID NO: 241107 - DNA, 1343 bp, Homo Sapiens
  misc_feature (936)..(950): n is a, c, g, or t
  misc_feature (1066)..(1084): n is a, c, g, or t
gcaaatatcaatgcagggaaagaagcaaacaacatccccagtttatcacaaaattagttgacctaatagaccccagaaagggtctcaggaaccaccccccccatcctcaggggtctgcagatcatattttgaaaactgatgttctaacagatggctggccagtcttttctttgttataaatgaagctaaaaattataaaaactaacatatttgttgtaacattaacttacaggcactggggaaactctttttctccttactcctggagattctgatttcactgtgcgacctgatggggagttgccaggagaaggactgcgtcggcctttggaagctggtgaagccgcacttgcctggacctctcctggagactcagctgctaagtgattcatttcagatccatctcctttaactgggattggttttaccacctgaatcaaagtattccaatattttgattacttaaaaatataaaaggtaagtaaatgtaaatatcatagactaggaaatacacttaatgagtttttgttatgaaatattataccagtataccagacaatatatcaacttttattattactttaagctattaatgtaaaagattatttttacctgcacaaatttcagtcatttaggatttaacactagttaaaacgcaacctcctcccttacaattttgtaatgcatacaaaactgtagaaatggtattatttgttattatataccctaactcatttaacactcaaaagcaacaatcaaaggtgattaaacaaatgtgaaaaataagcactcataacttctacagtcaacttattcaactactagatcaaagatctaggtacgtttttatttgtttttacaaaatgtaggaccttgaaacaacactgggcataatttcaaatagtttgatcactatgcaatcattttccctgcttnnnnnnnnnnnnnnnttctttacaatgttatattacaataataggttagatgtgtatctcagaaaaccaaaagagactagaagtttaaagatcaatttctcaagcagaaatgcagtttacaagacctgccnnnnnnnnnnnnnnnnnnnaattaaggctttcagacctaatctagccatgaccaaaggccaaactccacagctttgtacaactgaagctcagcagacctttctggactttctcccactgctcctgttctatagccagttgctgtgttcaccaaacttgcctgacccttcctcctcctgtgctttcactcactctcctcctattttaatactcatctccagcctgcagcaccccaggcagtacaccttcacatgaggaaaatttacccatctttcccaa

SEQ ID NO: 241108 - DNA, 1315 bp, Homo Sapiens
caactttgtacaaaaaagttggctgtgattgctcttgagctggcccaccagtggttcgggaacctggtgaccatagagtggtggaatgacctgtggctgaacgagggcttcgcctcctacgtggagtacctgggtgctgactatgcggagcccacctggaacttgaaagacctcatggtgctgaatgatgtgtaccgcgtgatggcagtggatgcactggcctcctcccacccgctgtccacacccgcctcggagatcaacacgccggcccagatcagtgagctgtttgacgccatctcctacagcaagggcgcctcagtcctcaggatgctctccagcttcctgtccgaggacgtattcaagcagggcctggcgtcctacctccacacctttgcctaccagaacaccatctacctgaacctgtgggaccacctgcaggaggctgtgaacaaccggtccatccaactccccaccaccgtgcgggacatcatgaaccgctggaccctgcagatgggcttcccggtcatcacggtggataccagcacggggaccctttcccaggagcacttcctccttgaccccgattccaatgttacccgcccctcagaattcaactacgtgtggattgtgcccatcacatccatcagagatggcagacagcagcaggactactggctgatggatgtaagagcccagaacgatctcttcagcacatcaggcaatgagtgggtcctgctgaacctcaatgtgacgggctattaccgggtgaactacgacgaagagaactggaggaagattcagactcagctgcagagagaccactcggccatccctgtcatcaatcgggcacagatcattaatgacgccttcaacctggccagtgcccataaggtccctgtcactctggcgctgaacaacaccctcttcctgattgaagagagacagtacatgccctgggaggccgccctgagcagcctgagctacttcaagctcatgtttgaccgctccgaggtctatggccccatgaagaactacctgaagaagcaggtcacacccctcttcattcacttcagaaataataccaacaactggagggagatcccagaaaacctgatggaccagtacagcgaggttaatgccatcagcaccgcctgctccaacggagttccagagtgtgagcgagatggtctctggccttttcaagcagtggatggagaaccccaataataaacccgatccaccccaacctgcggtccaccgtctactgcaacgctatcgcccagggcggggaggaggagtgggacttcgcctggga

SEQ ID NO: 241109 - DNA, 889 bp, Homo Sapiens
tagatgtaagaacctttaaaagactgaagcctattttaactgtgaaaatcaacaatttgtgggaatttcagataaatatgggttcaatcctagcttttcactccatgtccgtggtctgtgtgagtcatttaactctggaacttggtctcatttgtaaaaggaggaacaaaaccatcttccccagaggttcttgttaaggagtaaagataatgtatataaaatattcgtatataatagaactacagactgggggccaagccccacccacctcaaagctcaagaggtgaattttacattttaaaggttcaacagaaaacaaaccaagaagcagcaacagagaccttatgtggcctgcaaagcctaaaacgtttaggatctggttcttgacagaaaaaaagtctgccaacttgaattagtattgcctattttacagttttgctgtattttcagtatagagcttaattataaatgagattctgttgattatggctaactttctctggagcccttccttgtaagcctgaacaattaagtgacatgttggtgctgtggtgctgggaggcaggattagacggagcaggaagaaatctcaacagatctagcaaaacgctttttaaggaaggtgccgaggccacaaacaactcaggattcaggaagatgtttgctgctctgctcctgctctgtaaggactgcacttatcttggcctgagagcagctggaggcagaggcccctgagctccaggtcagaagtgagcgtgtggtatggcaaaaaaatccatacgggcctttggagataaacaggtctgactttaattcctggctctaccccttgctgtggacaaatactttaatctgtgtcttaatttcttaatctgagaaacgaggccaa

SEQ ID NO: 241110 - DNA, 852 bp, Homo Sapiens
agcttcagggaccagagggctcatatcacaggcccccttaagatggcctgggcagacagaggtggctagaagggcagcctctttcttgccccatggggctgaggcacagaggccgagggctgccgagggctggcctggtggtcgacggacacaagcacctgcagatcaaactgccagactttacacactccagcttttgtctctggactggaacggggctggggctctcccagcatctgccaactgggggctgctccctgcccatggggcacctgggtggcccctgggcctcttgacttgagattctaccttctcggcccttccctctccccccatcattgtgccgtctctgttgcattctgaccctcccgcctggggggtgggggcgttgcctcaacacctcccccatccctgttccctgtcctgggagggatagagtccaccccagagcccggaggctgggcctggccctggccctgcactgatttctcatgtgtccttcgggaaaagggggagtgagagtgggaaaaagggagagttcaggacacctggtccccagctccccattgcctggggcagcagccctcaatttctccttgtgcctcccctcttccaggtgccaaatagccataacctcgtcttggaactgttatgtggcctctctggggtccaggtttcctggtcaagcctggggatgccagggaggaaagggggtctggctacagcgaccctggtcttaagcaagggaacattcctcctggagagtcagtcctatcctgtgtgccctgtctgccagccagggcgatgcctggaagctactgacattgcagggagcagctcgccccaccccta

SEQ ID NO: 241111 - DNA, 886 bp, Homo Sapiens
ctttgtacaaaaaagttgggccatcatcacacagtggtgtgagggctccagcctctaccatcacctgcatgtggccgacacacgcttcgacatggtccagctcatcgacgtggcccggcagactgcccagggcatggactacctccatgccaagaacatcatccaccgagatctcaagtctaacaacatcttcctacatgaggggctcacggtgaagatcggtgactttggcttggccacagtgaagactcgatggagcggggcccagcccttggagcagccctcaggatctgtgctgtggatggcagctgaggtgatccgtatgcaggacccgaacccctacagcttccagtcagacgtctatgcctacggggttgtgctctacgagcttatgactggctcactgccttacagccacattggctgccgtgaccagattatctttatggtgggccgtggctatctgtccccggacctcagcaaaatctccagcaactgccccaaggccatgcggcgcctgctgtctgactgcctcaagttccagcgggaggagcggcccctcttcccccagatcctggccacaattgagctgctgcaacggtcactccccaagattgagcggagtgcctcggaaccctccttgcaccgcacccaggccgatgagttgcctgcctgcctactcagcgcagcccgccttgtgccttagccccgcccaagccaccagggagccaatctcagccctccacgccaaggagccttgcccaccagcccatcaatgttcgtctctgccctgatgctgcctcagatcccccattccccaccctgggagatgaggggtccccatgtgcttttccagttcttctggaattgggggacccccgccaaa

SEQ ID NO: 241112 - DNA, 1133 bp, Homo Sapiens
ttgggccttgcatgccaagctggacactgttcaaggcatcctggaccggatctatgcctcccagacagatcagatggtttttaacgcctaccaggctggggtaggagcactcaaactctccatgaaggatgtcacagtggagaaggcagagagcctcgtggatcagatccaagagctctgtgacacccaggatgaagtttctcagactctggctggtggggtaacaaatggcttagattttgacagtgaagaactggagaaggaattggacatcctccttcaggataccaccaaagaacctttggatctgcctgacaacccccgcaataggcattttaccaacagcgtgcctaaccctaggatctcagatgctgaacttgaagctgaacttgagaaactgtccttatcagagggaggtttggtcccaagcagtaaatctccaaaaaggcaattggaaccgactctaaagccattgtaggaccctcaagtgaaggaccctcatgtaaaagagagaccaggcttgctgggtgtgtacatagttatttaaacaagaaactctcagaatgtgtttggaagaggagaaaggagaaccactgattttatctggatgctactacttactacaggacagatagaatttctggaagcgatgctccaaaggcttgctcccagctgtatcatggacctgccttctcatctttatagtgccacgatttatacagtcctgtgtctgacctgtcatttcatagcctgcagttcttgccattggcacacttagatttgtcttcacccaccagcttcgttccagcccatgaaggggaaagatttgcagctttgccaaatctgaatcagttcccactccccctgcggttttttagaggggtttatcctgtcgctaatgtcagttaaatagcttattcctgtcccacttgatttcactggtaagaatgagaatgaaatacttaaaggttttatttgaggggacttagctgccattttatggaaaaacatgtagtataaaaggtttttctccagggtcatttgacagaattctccaggtgttcagagaaagaggtcgccccaagtggcccagagtcgtgacagtccggagggctggtgtggccggtgggcgc

SEQ ID NO: 241113 - DNA, 1672 bp, Homo Sapiens
  misc_feature (1472)..(1488): n is a, c, g, or t
  misc_feature (1544)..(1563): n is a, c, g, or t
tacaaaaaagttggcttgagctggctcagggagcgcacttccttctcagccagcgcgtcgccccctgcatccgtggcctccactggagctgggcaggaccctacccagtgaatctggagaaaacaaacttgggagacagacgaaagcttagggcacattggaggacagcgcagctgtggctcccatttttggagatgcagtcgaatttgagctcacagggaggtgtggttgcctcctggggatggaaaggcttcctttctccacctctgtaactggtgcttctgagaagtaaatggtatttggatcctgacctcagacgcgaatttgggtcttctgtgcttaggagcagaaagagcccaggaggggcctgttcctttacttcttgggggaaacgcaatgcgtggcctgacttctcatgacgggaaaggctactccaccttctctgtactcctggaggggagtcttgttcacatgtttaccagcggccaggacaaggaagagaaaagaaatgagccgtcagactgctacagcattacctaccggtacctcgaagtgtccaccatcccagagggtgcctgccctgactggcacaactgcatccaacaatgacttggcgagtctttttgagtgtccagtctgctttgactatgtgttaccgcccattcttcaatgtcagagtggccatcttgtttgtagcaactgtcgcccaaagctcacatgttgtccaacttgccggggccctttgggatccattcgcaacttggctatggagaaagtggctaattcagtacttttcccctgtaaatatgcgtcttctggatgtgaaataactctgccacacacagaaaaagcagaccatgaagagctctgtgagtttaggccttattcctgtccgtgccctggtgcttcctgtaaatggcaaggctctctggatgctgtaatgccccatctgatgcatcagcataagtccattacaaccctacagggagaggatatagtttttcttgctacagacattaatcttcctggtgctgttgactgggtgatgatgcagtcctgttttggctttcacttcatgttagtcgacttgagctaaatggtcataggcgacgattgacttgggaagcgactcctcgatctattcatgaaggaattgcaacagccattatgaatagcgactgtctagtctttgacaccagcattgcacagctttttgcagaaaatggcaatttaggcatcaatgtaactatttccatgtgttgaaatggcaatcaaacattttctggccagtgtttaaaacttcagtttcacagaaaataaggcacccatctgtctgccaacctaaaactctttcggtaggtggaagcatatttgcctgttgtctattcagacctttttgatatttccttcctctttcagcatttttgttttttaagtgcagttttcattgtggtatccaccaaatgtttgtnnnnnnnnnnnnnnnnntgagcattagtgttggaccataaatcatcaaattggataatgactaactgtagtcnnnnnnnnnnnnnnnnnnnnagctgctggatacaattttcatggcaataggaactgaagtacttcaaataatgtgagcttaaacatgttacttcattgaaacaaccaaaattagttgatgtttacccaa

SEQ ID NO: 241114 - DNA, 2163 bp, Homo Sapiens
  misc_feature (340)..(361): n is a, c, g, or t
  misc_feature (658)..(717): n is a, c, g, or t
tccctggagatgtcacacgccgcccatgcacgttcaagacgactggcagctccgcagaggctttcgctgctgggaacacagccgtgacagtgtcggaactcatctacctcaacgctgaatggcaggctccaagttgaaaagtttctgttttaatgttttgctggatttaaggttaacctctaatacttatcaaaatagttacgtgggtaacaacagacgctttcattcccctatactgaccactaaaacaaaaattccaatgttttttccttttgttatgagacggttttcaacaatttcagtgttgaaataggatttatttaaaatatttctttgcttnnnnnnnnnnnnnnnnnnnnnngtttggctttcagcacatatccaggccactgtaatggccttcagaaatattaaaatcgtaaacatcaatgaacactctaagtcttccttaaacgtaatatgagaaggtccagtctagtactctttaaggcaaagttgtgtcagttctcattattttgacattttgtagtgtttacaatttaagagatcaacgtaacattcccctaaatagctgttgtaataagcatcaccattacttcaacactgtaatactgtgtaccatgaggagaagaggtctgttaattctgcattgcatagnnnnnnnnnnnnnnnnnnnnnnnnnnnnnnnnnnnnnnnnnnnnnnnnnnnnnnnnnnnntgtaacaactttctgctttagtttctatgaagttaggaactgctcttcaaattgaacgctcacatcacaaggcctcattctagggtattcttctgatttacatcaatttttcatgaggctgattgtcccattttaagaatagtctgaatattataattttttttaaaataaatatccaactgcaaaatcccaactgcaagattttaccaatcagtattttaacattgaagactttagcattttcgataagagtattatttgagcagaaaattccctttaaccttgaagatttaagtccgtaaatttcagacaaaaggctttcatttccgtgggttgaaatttagagatctacagtgaggacttttattactacctaaccaaaaccagacttgcacagatctcgcagctctcgggtgtgtggcctcttccagagtcctaccacttcccactgttttccaagtaatttttaacggaattaactatcaatacacagcctaatacaaaagaagttgacaggagaaaattcccaatcttttgctgataaatgacaggactgtatcattgttgaaatgtctgtctcaggtgtgaatccgctagcgataagcctcggggttggaggttcttggggagcccgtgggagataaagcaacttgcaaactctgctgaggacgtgcagcatcctcacagccactcacagagccgcgctgtcgccgtcccccctcgagaggtcatttgtagtggaagatagggctcaaagccactgactggctgggaagaaagatactctcaaagctttgacgactatggattctctgggacttggacccttagaaattaagttgttgcgagtaaactatttctatttaataacgtagtttagatttatttgcagaaaaaaattaaaaacctgaaactgctacaagtgcttggaggagggaaggaaatactaaaacctctgttgcgtcctaagtcgagtagcctctgctggtgctgactctttcaatatggattattggagtctcttgcactgactgttctcagaggagtttggctcccagaaccgcagagatttacatcagggtacattcttctgtagtgcaatccttaaaaatcccagagattagtgctaatcactttaggaacagaacaaaacaaagtcgacattttccctagcccaggggtgtcaggagtccggcgggtggaactccacttggagaactccaagctcggttctcgattcagaccacgtgtagctgccctggaattgacgtgtgagcctaggagggccagtgatggcaatgctcttcgggagacatggcgtctctgcactgcaaccaaaagtggaggtggccgatctcaccagccacagagatgcccactaggcgagttctgacaccaagctccaatctagggttttggcaataaatcgagtttgatgcactccaa

SEQ ID NO: 241115 - DNA, 1028 bp, Homo Sapiens
  misc_feature (300)..(308): n is a, c, g, or t
  misc_feature (481)..(508): n is a, c, g, or t
aaaaatttaaaaattgttgaatgaaacgaccaaggtatggaaaacgtgtcaacattatttactaagaatattttagatgaagatttgcctaatctatttgccatcaaactctataaatgctgctctagtaggtcctattcaatctgtatttgtaaattaactaggtcagaccacagctagtgaacaatttcagcacccataagttattgaaaatggaattttataccattaagaaacaaaatggctggatattcaaatgtcaaggtgaagggtataatttgaagacacccaatttttggnnnnnnnnncctttttaataatattttcacattagctttacaatagtagttgtactccgcttaaaattgtatgcagtttgggcatatcaaatatatgatgattttttttaagaagtgaaattgaagccctagtcccaacttgggggggccctatgaagaaatgattcaaccctgcccctttnnnnnnnnnnnnnnnnnnnnnnnnnnnnccctattctttcaatagcaaatcaataaagcacatgtaggacaatttctactgaaaaatcaaatgtctttttttgtgtgcagcattgaaagtttactgcaactctaatttcctttttaacacaaatgtcctttttaatataaacattatatgtattcagtattcaagtaaaattccctaacagttaatgacatttaaaaaatgtgcaaaactgcaaaattcattgtaatagaatgtgtaaggtcaaaagggtggaacggctgacagctattgaataagtgcatcataaatcttcaaagaaaaaaaacgcttactgtagaatctcaaattgaaaatttctgtgcagcattacaaaatattttatatttaatgagaaaaaagaagcttgcaggcagcacatgaagcatccacagcaggtattatgattgaaaactagtaaaataagtgtaagttgttgactgatgtaggtactaacagcatctgaattttagcactggccttgattacacaggagatgccaa

SEQ ID NO: 241116 - DNA, 1114 bp, Homo Sapiens
  misc_feature (373)..(591): n is a, c, g, or t
ttggcacttgtacaagttgtctttatgctgcgagataagtcctctcttggtttgagctcccaccttttcagtgaactcttacattttgggggatctgctcttgtaaaggacatcctttctggtctttgattacttgagaaaagtgagtgaggtggggccaagatggttgactagaagcagctagtgtgtgccactctcacaaatagcagaaagagtggtgagacactagctcttcaaccggaacatccaggtggacacataaggattcatcagtgacatagtgtgaccttcggatcacggagaagagtgagacagatcagccattcacccaggagtggcacagacccaggggaatccccctacaagaaaatgnnnnnnnnnnnnnnnnnnnnnnnnnnnnnnnnnnnnnnnnnnnnnnnnnnnnnnnnnnnnnnnnnnnnnnnnnnnnnnnnnnnnnnnnnnnnnnnnnnnnnnnnnnnnnnnnnnnnnnnnnnnnnnnnnnnnnnnnnnnnnnnnnnnnnnnnnnnnnnnnnnnnnnnnnnnnnnnnnnnnnnnnnnnnnnnnnnnnnnnnnnnnnnnnnnnnnnnnnnngatgacaaaattggttccaagggtgtttgaggaactggacctttataggcattattttcataatactgcattaagctatgataactggactagattcaaaattggataatgccctaaatgcaataaagctataattttgagataaaattttaatagctttatgagatataattaacatctggtatactgcacatttttgaggtgtgaaatttttaaacattaacatacgtatatacttgtaaaaccatcacactagaaagagatctcaagcctcttcttttgactttcaacacattgtcaatccagtactaatctggttttattaccatatattagcttttattttctacaattatatatcagtagaattatagagtatgaattctttttgtcttttttccttaagcataatatttttgagattcaacaatttcttgcatgttgaagtagcacctttttttattgttacgtattatttcatttcatagacataccactataatttatttactaaactcttgac

SEQ ID NO: 241117 - DNA, 1680 bp, Homo Sapiens
ttggggagggcgagcgagagagcaagcaggcagcaggctgccggcgggcgggcggacggcacagagggagggagcgagcgagcagtgagtaagccagcaagggcggtcgggtcccgaggtcagccgagatttctcaggtccctccggccccctccctggagtccacagcgcctccggtgtccagaggatcggacacggcccggcccggccatggcctcgttgctgaaggtggatcaggaagtgaagctcaaggttgattctttcagggagcggatcacaagtgaggcagaagacttggtggcaaattttttcccaaagaagttattagaacttgatagttttctgaaggaaccaatcttaaacatccatgacctaactcagatccactctgacatgaatctcccagtccctgaccccattcttctcaccaatagccatgatggactggatggtcccacttataagaagcgaaggttggatgagtgtgaagaagccttccaaggaaccaaggtgtttgtgatgcccaatgggatgctgaaaagcaaccagcagctggtggacattattgagaaagtgaaacctgagatccggctgttgattgagaaatgtaacacggtcaaaatgtgggtacagctcctgattcccaggatagaagatggaaacaactttggggtgtccattcaggaggaaacagttgcagagctaagaactgttgagagtgaagctgcatcttatctggaccagatttctagatattatattacaagagccaaattggtttctaaaatagctaaatatccccatgtggaggactatcgccgcaccgtgacagagattgatgagaaagaatatatcagccttcggctcatcatatcagagctgaggaatcaatatgtcactctacatgacatgatcctgaaaaatatcgagaagatcaaacggccccggagcagcaatgcagagactctgtactgaggccagggccagggccaggggactctgtgagtctggctcaagaccgacattgccttggtttgttacatgactatcgtgatggggaaactggctggaaatagtaatcacacctctctgtttttagttagagtctaatgaaactctcatctagttctgtgatgtgtttacctcttttttcaggcctcaggaactcttctatttccttccctaataccccacacccaacctgtcgtaatttctggagaactccaggtttgtgtgtgcaggatgttggcacaaaaatacctgtgttttcattctccccctctctccctcctgtgtcttgcgctttatgttttcttccgtttgataattagttggttaaaagctgagggaaccggaaggaaagtgctaggtgttttttaggaactagggtggcggggggacgaacttctcttcctcacatgaggttactgtttctttcctctgtggggcattggatcctcccacagttgccctggtgatgacttagggcttcccatctgtgtacatcccactttgaatcttgatcgtgacaagaaataccttaaccttcagtcaattccgaagctccttcagttgtttttataatgggcgttttcacatgcacatatgtgtatgcatgtatacgcccatacagacatgcacacacagactcctactccattagctaacataccctccctc

SEQ ID NO: 241118 - DNA, 932 bp, Homo Sapiens
ttggcccacatccatgcctcgtcctgcatgaaccagaagcatctgctggcttcatcaagcgggcaatgaagcggcacctggaggagatcgtgcacgtggagcagggccgtgaacagacgctgcgggaggtctttgagagcatgaatctcacggcctacgacctgagtgtggacacgctggatgtgcacgcggacaggaacactttccatcgctttgacaagtttaatgccaaatacaaccctattggggagtccgtcctccgagagatcttcatcaagacggacaacagggtatctgggaagtactttgctcacatcatcaaggaggtgatgtcagacctggaggagagcaaataccagaatgcagagctgcggctctccatttacgggcgctcgagggatgagtgggacaagctggcgcgctgggccgtcatgcaccgcgtgcactcccccaacgtgcgctggctggtgcaggtgccccgcctctttgatgtgtaccgtaccaagggccagctggccaacttccaggagatgctggagaacatcttcctgccactgttcgaggccactgtgcaccctgccagccacccggaactgcatctcttcttagagcacgtggatggttttgacagcgtggatgatgagtccaagcctgaaaaccatgtcttcaacctggagagccccctgcctgaggcgtgggtggaggaggacaacccaccctatgcctactacctgtactacacctttgccaacatggccatgttgaaccacctgcgcaggcagaggggcttccacacgtttgtgctgagccacactgtggggaggctgggcccatccaccacctggtgtcagccttcatgctggctgagaacatttcccacgggctccttctgcgcaaggcccccgtcctgcagtacctgtactacctggccc

SEQ ID NO: 241119 - DNA, 1033 bp, Homo Sapiens
ttggatattttggatagtaaccccttaaaagatgtatggtttggcaaatgttattttagattttaccctcttctgtgaaggctcagaaggctgactgccttcagacccaggaacagagacttaaatgagcactgagatttgcttccccagaacagttttatagatagaaaagcacttctggtcagcaacttagaactgttcgtttgtcgggaacagttgtgtgagtggaaattgcaatatcagctgttatcagctctaactaggtcttgaaatttgcataatttcagctccagtgttacatgaaagttatgtggtgtttggaaggatgcctttttctttgttttttagcaaaggagtcttttaaatcatttgtatacaaaaggaattaggatccaaatgctgttattgatacaggtttgatgcttcaaatgtggcttttccctcccttaggggtatagaacaggctatgcttacaggcatcctctcattcgagagaagcctaggcacaagagtgatgtggaaatcccagcaactgtgactgctttttcctttgaagacgatacagtgccactctctcctctcaaatacatggcacagaggcaacagcgtgaaaaaacaagatggctgaactcaccaaatacttacatgaaagtgaatgtgcctgaggagtctcggaacggagaaaccagtccccgaaccaaaatcacgtggatgaaagcagaagactcatctaaagttagtggtggaacacctatcaaaattgaagatccaaatcagtttgttcctttaaacacaaacccgaatgaggtactagaaaagagaaataagattcgggaacaaaatcgatatgacttgaaaacagcaggaccacaatctcagttgcttgctggaattgttgtggataagccaccttctactatgcaatttgaagatgatgatcatggcccaccagctcctcctaacccatttagtcatctcacaggaaggagaacttgaagagtataagaggacatcggaacgtaaacaacaaggc

SEQ ID NO: 241120 - DNA, 951 bp, Homo Sapiens
actttgtacaaaaaagttgggtaaagaaaagctttcattatggctaccttatgagaaagaatgaaagggaaagtgaaaaattaaggggacaaaagatgggatgtgaaaagaagaattctagtttgatggtgactcatattcacgataggatacaaagtgtgatttgttggaaacatgtcccaaatttctaaaattctgcttctctgccaaaagcaatgtctttcttggttgatatttgagttttaaaagggtcaaatctttctaattttttgtatctttagagggcagcactagaagaaatcagcaggtctaatcccaccagtaagaaaactaccacttcttgatttttacagatttaaaaaaatcttttcagtgacctttctttttaatgtaaatacaaatttaaacctaggcttaatataggcgtttcccctttcacccaagtgatgtcacagttcgatgcaaaatcaatgatccagaatgatcgtgggtaaaaataactcaaagtgtttcttaagggtgagttggcatgcaaaaaattacattgattacagtgtgttttggagctggctctgtttgtgtgcatatgataatgcagagttgagccagagcctggaaatgtcattctagatctcactaactactggaatcagtgttttaatctcttggtggaaactttcagttgcttaactctctattggaagatttttttaatgttctacatcatttatgttgtattacaatgtatgtagaaatagtaacctgtgaactatgcttttccataactttttaaaaatatatatatctaaatgaatgcaatgtgcataaatattttttaaacataacagtgaactattgcaccttttgctaatgcctctatttacttgctttggcataagaatgagccaatgaacctctgtgtcctgtggaaaatgtataaatgttatctga

SEQ ID NO: 241121 - DNA, 935 bp, Homo Sapiens
ttggcgtggcgataatggcggatatggaggatctcttcgggagcgacgccgacagcgaagctgagcgtaaagattctgattctggatctgactcagattctgatcaagagaatgctgcctctggcagtaatgcctctggaagtgaaagtgatcaggatgaaagaggtgattcaggacaaccaagtaataaggaactgtttggagatgacagtgaggacgagggagcttcacatcatagtggtagtgataatcactctgaaagatcagacaatagatcagaagcttctgagcgttctgaccatgaggacaatgacccctcagatgtagatcagcacagtggatcagaagcccctaatgatgatgaagacgaaggtcatagatcggatggagggagccatcattcagaagcagaaggttctgaaaaagcacattcagatgatgaaaaatggggcagagaagataaaagtgaccagtcagatgatgaaaagatacaaaattctgatgatgaggagagggcacaaggatctgatgaagataagctgcagaattctgacgatgatgagaaaatgcagaacacagatgatgaggagaggcctcagctttccgatgatgagagacaacagctatctgaggaggaaaaggctaattctgatgatgaacggccggtagcttctgataatgatgatgagaaacagaattctgatgatgaagaacaaccacagctgtctgatgaagagaaaatgcaaattctgatgatgaaaggccacaggcctcagatgaagaacacaggcattcagatgatgaagaggaacaggatcataaatcagaatctgcagaggcagtgatagtgaagatgaagttttacgaatgaaacgcaagaatgcgattgcatctgattcaaaagcggatagtgacactgaggtgccaaagataat

SEQ ID NO: 241122 - DNA, 1837 bp, Homo Sapiens
  misc_feature (264)..(272): n is a, c, g, or t
ttgctttccagaagaaatgatttagaattgtctttaaaatacaactaaaacacttattttgctaacacagtgcaaatcatttttataatatgcactgaaatttattttttccatgaggaattgtcttagagttcaaaagaatcttaccatcatataggcatgcaccctccctccactaaaaatggtgtactattttaagtacagatctttaattgttgatcattttattttgctgtggcacagaaatctaagattttggatttnnnnnnnnnctttataagggggaaaaggaaaaagttgctctggaataataattagcttttagaagcatttaagatctttaggagacattataacaactaaataggagctctggttcaaattttataggattcttatataaaacttatattgagttttctgttgtaaaaacagccctgtgtttctctgccattatttgggcttacaaccataattaaaggccaaggctatgccccagattccatgttagccatcttttattttaaaaataccccaaatgggacaaattcatactgggactgagacaatgtacttagttcaaaaaggggaaggaggtaataagctgtctcaaaagcctcttttcccctaatagtcatatatccacctgaggaagcctcgtctgaagaagccagtgaggcacctgcctggctactcccatagtcaggtgggttaaagaacagattattttcaggtgggagagtatctcaatatttcttaaggtgatctgagaaattataaattaccattgaagctggaaatcttgaaattccaaagtaaatagacattattcaagcatacacatcagtggactatgaagactaattttaacataataagcaaagaattaaagaattcacattcacatgtgcttttctcacgtacacttgcacatttaagtttggcacaatgtgagcgcaaggtgtagatcagcatattgcataatcacgtcattataccaattgaaccagatatctcttttaaaaatatcacattttaatataaaaagctatactataaattactaaatagtaaattcaatactctgaaaaaataccaccctggaaaaccgcatcagaatttcaagtttgcattggataaagagagttaacagcaaactcgttgtaaaatggtattcacaacctgaaatgctgtgcatgctgcgtattagtaggtgctttagcacctgcagaagtcaatttttctaggctggttcactgaggttcataaatatatggtgttgtttttgtttatagttccaagtcaacttattttcctattgataagatagatcaatgctgagctaaaaagaaactttgcaaggaaagagatctattaaaggcactaatatttccatagcctaaactccaactacttacatttccagggaaaaaaataaacacaaactaagtggccattttagttacttaaaccttgtttccccttttggtctaaagctcatatggtgttctgtgagaatttctcctccttttcaatacatacaaatcattttttatcctgttatacagttcgcctgcacaaaaatatagggctattaattgaaagcatctagtaaaaaaacaaattcaagaataaatgacatcctcaacttgaaagttgtgaagttaggtaagtcaaatggacatttatgttgccatttgtgttttgccattctcctaaatattttctttgtattacatatctacataatgtaatattgaataaaagttaacatatggcatatgcaataaaacagacgagatatggcacaagttctctgaataatctctttaaccaa

SEQ ID NO: 241123 - DNA, 1483 bp, Homo Sapiens
  misc_feature (1331)..(1339): n is a, c, g, or t
caaaaatcttttatgatttatttaaaatatggaagttgtattactgaacaacagtgagtgaatccatgaaaaggttggatactctgaatttataggctctttggggatgaggtagaggagagcaagatatttcggcagcagggaaaagggtagaacagaatagggtgacacaatttacacttgatactgcattaacatctggtagagtgtctagggcaaaggttagccaaaatatagctggatggttgagggatttagaaggagttgggatgaatccatagtctcaatgaatggagaaaaagtaactcaggaaagtaaatgctggtgacttatcagcgggtggctggtgatgtttggtttggattgtgaaagctgcttagaccaagatgggctgagggaaggggaggagagtgagcatgtagaggttgaggcacttggaggaagaagcaggcagaaaagggtggactgaatgcagacaggacctcccacatgggaaatattttctctagattaggtgtacggtgctgaaggcagccacactctcagcactatgttcctcatattctttgaaaactcttccttcctcatagggctctgccttgacatatacctctacctctcttatccatttcaccccagctatttttgttctaggtctcacctgggcagattctaggtctgctaactaagccaaattagcattgaaataagctccacatacagtgggcatataagttctgttgactgagataaatacattcatgttacagtactgctttgaagaaagactatttaatttgattctcagtctccagagggatataatagggaaacacagtttacgttgacggccacctagaatagattctgattacataaattaggtaacttaaaactcaatctgagcagaggagccacgactttcagcctgctgttgaattgtgctactaagcaaatgtgatatactatttacataacaaacattattgttatgtactgtttagtccatgttaagaccatctctttgcataaaagcagttctattaaagagaagaatttaaggtcttgctttccagagaaatgatttagaattgtctttaaaatacaacctaaaacaccttattttgctaacacagtgcaaatcatttttataatatgcactgaaatttattttttccatgaggaattgtccttagagttcaaaagaatcttaccatcatataggcatgcaccctccctccactaaaaatggtgtactattttaagtacagatctttaattgttgatcattttattttgctgtggcacagaaatctaagattttggatttnnnnnnnnnctttataagggggaaaaggaaaaagttgctctggaataataattagcttttagaagcatttaagatctttaggagacattataacaactaaataggagctctggttcaaattttataggattcttatataaaacttatatccaa

SEQ ID NO: 241124 - DNA, 352 bp, Homo Sapiens
actttgtacaaaaaagttgggcggccagtgccttgtcaccccgcagacatcgacgagtgcatgttgttcgggtcggagatttgcaaggagggcaagtgcgtgaacacgcagcctggctacgagtgctactgcaagcagggcttctactacgacgggaacctgctggaatgcgtggacgtggacgagtgcctggacgagtccaactgccggaacggagtgtgtgagaacacgcgcggcggctaccgctgtgcctgcacgccccctgccgagtacagtcccgcgcagcgccagtgcctgagcccggaagagatggagtgtggcccgggccggggagtggggtacgcgggagggg

SEQ ID NO: 241125 - DNA, 1752 bp, Homo Sapiens
ttggccttccatgtggagactcctgaggagcgggaggagtggacaaccgccatccagactgtggctgacggcctcaagaagcaggaggaggaggagatggacttccggtcgggctcacccagtgacaactcaggggctgaagagatggaggtgtccctggccaagcccaagcaccgcgtgaccatgaacgagtttgagtacctgaagctgctgggcaagggcactttcggcaaggtgatcctggtgaaggagaaggccacaggccgctactacgccatgaagatcctcaagaaggaagtcatcgtggccaaggacgaggtggcccacacactcaccgagaaccgcgtcctgcagaactccaggcaccccttcctcacagccctgaagtactctttccagacccacgaccgcctctgctttgtcatggagtacgccaacgggggcgagctgttcttccacctgtcccgggagcgtgtgttctccgaggaccgggcccgcttctatggcgctgagattgtgtcagccctggactacctgcactcggagaagaacgtggtgtaccgggacctcaagctggagaacctcatgctggacaaggacgggcacattaagatcacagacttcgggctgtgcaaggaggggatcaaggacggtgccaccatgaagaccttttgcggcacacctgagtacctggcccccgaggtgctggaggacaatgactacggccgtgcagtggactggtgggggctgggcgtggtcatgtacgagatgatgtgcggtcgcctgcccttctacaaccaggaccatgagaagctttttgagctcatcctcatggaggagatccgcttcccgcgcacgcttggtcccgaggccaagtccttgctttcagggctgctcaagaaggaccccaagcagaggcttggcgggggctccgaggacgccaaggagatcatgcagcatcgcttctttgccggtatcgtgtggcagcacgtgtacgagaagaagctcagcccacccttcaagccccaggtcacgtcggagactgacaccaggtattttgatgaggagttcacggcccagatgatcaccatcacaccacctgaccaagatgacagcatggagtgtgtggacagcgagcgcaggccccacttcccccagttctcctactcggccagcggcacggcctgaggcggcggtggactgcgctggacgatagcttggagggatggagaggcggcctcgtgccatgatctgtatttaatggtttttatttctcgggtgcatttgagagaagccacgctgtcctctcgagcccagatggaaagacgtttttgtgctgtgggcagcaccctcccccgcagcggggtagggaagaaaactatcctgcgggttttaatttatttcatccagtttgttctccgggtgtggcctcagccctcagaacaatccgattcacgtagggaaatgttaaggacttctgcagctatgcgcaatgtggcattggggggccgggcaggtcctgcccatgtgtcccctcactctgtcagccagccgccctgggctgtctgtcaccagctatctgtcatctctctggggccctgggcctcagttcaacctggtggcaccagatgcaacctcactatggtatgctggccagcaccctctcctgggggtggcaggcacacagcagccccccagcactaaagccgtgtctctgaggacgtcatcggaggctgggcccctggggatggg

SEQ ID NO: 241126 - DNA, 1032 bp, Homo Sapiens
  misc_feature (422)..(462): n is a, c, g, or t
  misc_feature (475)..(490): n is a, c, g, or t
tttgaagtaaggtaacaggtattttgtttggataaggacggtttgagattccaagtacagggtgccagaacctcacccttgagagcgttaaatgacagtgtcaggtaaggatcctaagtgggactatcttcacctgcagaaggagtgaacttgggaagacctcagagttggaaagactccccacccccaatctgggaagcaggaagtcagtaaaaagcacagttccaggatttgcaaatacccagggtttatttagtaaagacggcctcaaggaagccagtagcaacagagaaataaaaagtttctgattcttatcttttatctttgataaaagacaatataatgcattggcaaacaggaaaaaattcatgtctatgtgtataggtgcataacagtttacctgaagtatcacgaactttaannnnnnnnnnnnnnnnnnnnnnnnnnnnnnnnnnnnnnnnnagactccctctcnnnnnnnnnnnnnnnntgaaaacttcatattatgatagaacaattatcagatataagataaaaatgccacattatatggcaaattacacggagtagatatacagtattcttctcaataataagatgtttgttccaggaatttaatgacaagaaatttatgaggtttaaaaaatacagaggtaaatcaaagtggttgtactcttacaaagttcaacttacattttttatgtgaaatatatacatgtatttttacatgctataatcatatcggagcacattttcaaaagcctttctcgtcgttcttgtgatgagtatgtatttacctttctttcagtatgtatttacctttctttcacaaaacttgggcaaccttcatttttccacgagttccagttttcttcagtgtttaatatatgctgggaaaaacaaagcgattacattttggttagtggaatcctctgaagttctatttcgtgctaagaagaggatgtaagcataaaaaacacatacctctaccatctttgaaaatctttctccatcgggggggttttcagccaa

SEQ ID NO: 241127 - DNA, 1714 bp, Homo Sapiens
  misc_feature (723)..(733): n is a, c, g, or t
  misc_feature (1155)..(1380): n is a, c, g, or t
agttcttaaattggggccgaaaccactgccacaaaaaagtactataaattaggaacaaaacaagttcaacatgacatgaaaaagacaaactttactacgtttctgactttaagcttatgcccagaacaaaaacagtttaaagtgaataatgagttctaacaaatcagattgttagttaaaaatgcagatacctaatctatctttaaaatgttatcactggtatttaattcaaccatgtgtttttctgggcatatttacacttaaaaagcaatcattttatcactcaattacttaccattgcacatacgtagtaagtaatttttcccagcagaatagaatgtattctgaaattaagacggaaattatcactcttcttcagaacttgttacacattcttcaataataagttgccagagtgaaatattaaagaacactaacatgcactgagaatctactatgccactttcactttttttaagcaaataacattttcaatgaaataaaaatattttcagatataagaaaacatgatactaagtaactgttttaaacatgtgaaagtgtgaattttcaagttaatttttattacacaaattaaatcaaattttgtatttcaagtttttctccacacatggtttttatttggctctcccgagagagcagtatataattttttcataggcagaaacttgttggcattcagcaatactacaaataaatttnnnnnnnnnnntctaccctcagaattctggatctatagaaagataaagttagcaggaaaagaaactaaggcacttactgatttccaagtagcaacatttttttccacaaaagtgaatattgtgtcacactgatccaaaggaagacaatccaaaacatctcccaacaatacaaaaggtgtagatgcggtacaaataccctcaagtggagcacaagccaatttaaaagtttaaaaaactgtagagtagaatagccctatgaaaaataattctgaagaatatcttaaaaggtacactttgttactcataacaaggttttaaaaggacaagaagtggaagcaacctaaaagtccccaaataggacatacttaagtaatttttgatatgtgcactcagtaacgatgacaataattcttgacaagatctagagcatttnnnnnnnnnnnnnnnnnnnnnnnnnnnnnnnnnnnnnnnnnnnnnnnnnnnnnnnnnnnnnnnnnnnnnnnnnnnnnnnnnnnnnnnnnnnnnnnnnnnnnnnnnnnnnnnnnnnnnnnnnnnnnnnnnnnnnnnnnnnnnnnnnnnnnnnnnnnnnnnnnnnnnnnnnnnnnnnnnnnnnnnnnnnnnnnnnnnnnnnnnnnnnnnnnnnnnnnnnnnnnnnnnnaaaagaatataatgcagccaattaaaaatgatggttataacgactataataacttggaaaaatgcttatgatataatgctaagtgaaaaaaggcaggattcaaaattgtatgtacatatggttatgacaataaaaaaaattcttaaaagactatagaaactaaaaccattataccagatgaatggtagcttttaaaagtagaggaattaagagtactgttttcccttcttatttctaaatgttttgtaatgttgctaaattgtctttgtgatttgaaaagattatcttcaaaaaataacaaggtttgatattaactatgattcaacatttccaa

SEQ ID NO: 241128 - DNA, 1194 bp, Homo Sapiens
gaaaaagacaccatatcataaacatcagatatcagttcactgacatgaaattattaacaatacaactctcaaatggaatctcaagtacttccagtaaacattcagttaagattttgacaaatattttcatcctgcagtctgtctcatactgtcaaaaaaatgtctgactataacgtaatagaactgaggttctaagtaccacacaagcccaggaacacacagctgagtgtcgctccctttcacgcagccaccactgaaaagcacagtgcttttacccccagacatcttgtaaactcctatttagggacactcgctcgagaggaaccagctgcacggcccacttgtagtcaaaggcagcgcaggttggtcctgttgtcactgaattctcagggctcagcccccagagcttttataaagggatctctaaagcccaaactcccttccatattattaaggcttgcccccattgtgggtccaaagaagacgcccctagatttgagtagagttccaacagaattcaaccaagtggtctccgtgtgctgccgcttccctgcaggaacgatccggacctcccagcaagagcgcactggagaaacctacctgcggcgtgggagtggagtcggcctgctcacagatccggcacctcgctgtgcagtcacaccgcctaccaccacctggtgtgggggttgaacacacacactctgggctagtggacgatcaggttctagaaaaaatgccaacttggaagcttgtggcaccaattcaagctgggatggaacagcaggagatatgaaatacctcaggctcagtatggcagagagggagccaagcccgtcccggccccaacactaccgattaaatacagttctttatcaagtgctctgggtctgccgacctgaagaactaacccctgcccccaaaacacatcccaatctgcaaaaggaataacaaaaactcaaatatcatttggttcctaaaaaagggaatgttttcaagaaaaataaaatagaggggccttttcaattataaaaggcagagcttcctttgctggttttctccttcccagtcacctcctgggtgcagttcagagcaagttcaccccgtgcttcagcagcttctgctttgctttgccggagaggctgaaggcgccatcctgagggtttgtgaagttgtaggtgctgctcgtggagccaa

SEQ ID NO: 241129 - DNA, 1107 bp, Homo Sapiens
  misc_feature (760)..(781): n is a, c, g, or t
  misc_feature (900)..(908): n is a, c, g, or t
actttgtacaaaaaagttggggagcaaagtcctataggtggccaaggacttccctgagtacacctttgccattgcggacgaagaggactatgctggggaggtgaaggacctggggctcagcgagagtggggaggatgtcaatgccgccatcctggacgagagtgggaagaagttcgccatggagccagaggagtttgactctgacaccctccgcgagtttgtcactgctttcaaaaaaggaaaactgaagccagtcatcaaatcccagccaatgcccaagaacaacaagggacccgtcaaggtcgtggtgggaaagacctttgactccattgtgatggaccccaagaaggacgtcctcatcgagttctacgcgccatggtgcgggcactgcaagcagctagagcccgtgtacaacagcctggccaagaagtacaagggccaaaagggcctggtcatcgccaagatggacgccactgccaacgacgtccccagcgaccgctataaggtggagggcttccccaccatctacttcgcccccagtggggacaaaaagaacccagttaaatttgagggtggagacagagatctggagcatttgagcaagtttatagaagaacatgccacaaaactgagcaggaccaaggaagagctttgaaggcctgaggtctgcggaaggtgggaggaggcagacgccctgcgtggcccatggtcggggcgtccacgccgaggccggcaacaaacgacagtatctcggattccnnnnnnnnnnnnnnnnnnnnnnatactttggtgtttcacttcatgctctgaatactgaataaccatgaatgactgaatagtttagtccagatttttacagaggatacatctatttttatcattatttggggtttgaaaaannnnnnnnnacaccttctaatttctttatttctcaaagcagataattcttctgtgtgaaaatgttttctttttttaatttaaggtttaaaaattccttttccaaatcatgttgattttgctctttgctttttcgttgtctgagaattgttggcgtagatttggcttctggtatgtgtttctgattgcttcctgttgagcacaaagtga

SEQ ID NO: 241130 - DNA, 1196 bp, Homo Sapiens
  misc_feature (379)..(472): n is a, c, g, or t
  misc_feature (526)..(561): n is a, c, g, or t
  misc_feature (585)..(689): n is a, c, g, or t
tacaaaaaagttggcgctgctgtggagctggtcgcaggcggtgtgtgccggtcgcctagtcaggagaactagtcctcgactcacggtgagggaatggaccgacacgggtattgtaccactgagggaaaggagcgggactccggacctccaggaggtagggagtgaggccagtaggaccggcgcgcctccggggggattcctcccgggcgttgagttgccaacctgggacccgaggaagatcggcgtggtggtgtgctttttgttgttgttaaccctcctcggatttctcgaatttcacaccactgtccatatgcgatgatgtttgtttgcccttgacgcacttactcatggatggtacttcttcagcctcgttagacannnnnnnnnnnnnnnnnnnnnnnnnnnnnnnnnnnnnnnnnnnnnnnnnnnnnnnnnnnnnnnnnnnnnnnnnnnnnnnnnnnnnnnnnnnnnnaatctcccaaagtgctgagattacaagcatgatccactgcacccggccagttgnnnnnnnnnnnnnnnnnnnnnnnnnnnnnnnnnnnnacgaaaatgtttgggaacagaaannnnnnnnnnnnnnnnnnnnnnnnnnnnnnnnnnnnnnnnnnnnnnnnnnnnnnnnnnnnnnnnnnnnnnnnnnnnnnnnnnnnnnnnnnnnnnnnnnnnnnnnnccttaataaagtttggacagtatttcttttataaacaatattattgatattgctaactattaacattagaaatgaaagtcgagaaagataattacctggaacgttagtacccagaaatacccaattgtgttggtatttgttttaagttttcatttttatgcatctccacctcagaaccataatctaaatttacagttgaattcatttcaatacctcagtggtgtaccattgagtcctaaaattctagaatgttaatcccagtcatgtgtgtacactaacatgccttttttgaagtcttttgaaacctatcagatacagtgtggagtccattttgctgaagagtatctagaatatctgctaccctaagaagcagtcatagtcccttccatagtagtttaagttttaaaattgtccactgttctgagtaaacgtgatgaaattttgcaccaccctgtcctggatatggatcaacataaccacgctgtacgtgctccattggtcagtcat

SEQ ID NO: 241131 - DNA, 1102 bp, Homo Sapiens
gtttaagaaagtgctttgtgggaccgctccccacaagctttgcaactggtatgaaacagggttatttcagacatgaaataggggtgtggggtagttttgctcttgttttccacgattcctcctctgagtccagtgagttaggtctcagtccaacatgacgcctgtggagcctgaagtgcccctgatttaagcagggcatctgagaagaccagtcttagtcatggaccctgaatattgggtgccaggcaatgcaacaagtgcccgcagatcaaacagtgtaacactgctaaacaggctggtattttgggcatgaagcattctttgaaaaatcatatccaacgcattaagtggggtagggggaagatttcatatcccccagtcttttcagagatgacaggaactgcctgaacctctgggatgatcttaatatgccctgcagactaagtatcatgaagaaagagcagatcagagagctgaagggataaagagcatttgcaacatctctaagctcacttcatctctgcacctattctgctggcctcaataagtggggctccaggggcatatgggaaacactggctacaccttcattctggcatctggctttaccttcgagtaattcaaaagatattcagctgccacctgatgccaatatacagagcgtcaaaatcaatatggaatatgtgaagagccaaaaactaggcacagaaaaggcaggagaaggcattaggggaaaacgacaagagacagtcctgtggtgaaaaccacactgacggggacttaggagactcggtctcggctttgccactacacagctgacgggccttggcggtaacctttgtgccttttatctttctcctttgtaggaaaagagggttagataagttattactctgtttcaactctaaaagtagaattttagatttgaactggacctgagaaatacaggagagggggtgaggggacagcatctgggttcttgttccccatctctactcaaattcctgaattagtgggattagcaggtttgttcaggggaaaggaaaggagtaaggtataacttctgtcagctttggtgctgacaggctctatagtttgtaca

SEQ ID NO: 241132 - DNA, 1581 bp, Homo Sapiens
  misc_feature (97)..(115): n is a, c, g, or t
gaagacacaaggtcaagcttcccccaacccccaccctcccgaaaaacaggacccaataagaacagaggaatgagaagcattcttagggcaacatttnnnnnnnnnnnnnnnnnnnatttctttccagagtctcaagcttcacaacacagacacagagcaggcttgggtgagaacagacactcagggaatctctgaccagcaaaagagttctgggtgtttgcttctcctgctctttgtatgatgccagctgacattacaaagacacactcaggcagaggaggggggatgcagggcaacctccatcccacttccccaatttggccaagcttggaatgagccaagagggaagccgtggtggaggcaacaggttttgcctctcaggagaggtccttttatgggaagtagaattcctccctaactctgctcaggggtgtgatgggaggtggcttccccaaggagtgaagagttcatgggttggctcagtcaggtcagctgagaataggagctgttatccatcactggtggggaggctgcgagaagccttgtttcgggggttgagggacatattctgataggaaattgtgttgtctgcttgccctgacacacttttccttctggaatgatagtttgctttgagatgagaacactatttgcagtgtgaaccttctgcactacttgtatccactgactccaggaataagtcccaagaagggaactttaccaacctgcttttccgctccacacatcaccgacctatccacctcccacatacaatcctatgctgtttcctactgccatgtgcttcaggggtggtgtgcaagggacatatttcctccctccttccccaaatatttttctcttggagattctcaaggtttaagaaagtgctttgtgggaccgctccccacaagctttgcaactggtatgaaacagggttatttcagacatgaaataggggtgtggggtagttttgctcttgttttccacgattcctcctctgagtccagtgagttaggtctcagtccaacatgacgcctgtggagcctgaagtgcccctgatttaagcagggcatctgagaagaccagtcttagtcatggaccctgaatattgggtgccaggcaatgcaacaagtgcccgcagatcaaacagtgtaacactgctaaacaggctggtattttgggcatgaagcattctttgaaaaatcatatccaacgcattaagtggggtagggggaagatttcatatcccccagtcttttcagagatgacaggaactgcctgaacctctgggatgatcttaatatgccctgcagactaagtatcatgaagaaagagcagatcagagagctgaagggataaagagcatttgcaacatctctaagctcacttcatctctgcacctattctgctggcctcaataagtggggctccaggggcatatgggaaacactggctacaccttcattctggcatctggctttaccttcgagtaattcaaaagatattcagctgccccctgatgccaatatacagagcgccaacttttttgtacaaagttggcattataaaaaagcattgctc

SEQ ID NO: 241133 - DNA, 1004 bp, Homo Sapiens
ttggggcatgctttagctatctgaacgaaacttccctttggggagttaagttttccaggctccccgaatgagaaagaatactcggaatcagcggtgaattgcagtgatctttcagagaaagcgcctgttcaactttgtcctctctcagagactcagagccttggggcactgagggatgccagttctgcctgttcatctggaacctggatctaaggagggaagaggcgttgcccctgctggcatagtcaggtaccagcccagccaggtattgaacgggctgagcttttcatgatggttcctgctgacctggaaacatcttaaatggaaggttagcttctatgagtcactgatactctttttattgctatttctaaatttccttggcttgaaaattacttctgctttgcagaaattatctgcttgcagctgtggataatttataacaatctctggtgaaacctcagaaaagagatatgcttttgtcttagatggatgtcagcagctgctgcagaacccggtgaaaacaccccccgggtagcacgaggctctgcgagccgtaactccgacaaacgcagaacttcttgaggctttcttcttctaaggagtatgacacagttaaaaaggaaaaaagaaccacaagcaaaacagttgccagtgaaataagaaagggagctctttaaacaaggctggctgcagctggcctccgccgctcatctgcagggcgtgagcgcttggtccatgcagtgaagctcttccaacctgggtcaacgaaaacggagaagaaatggcccaagaaataaatctgagtgctctcaaggagttagaacgcgaggccattctccgagtcctgtaccgagaccatgcggttcaaaacacagaggaggataggacacggaaactgaaaacacacctgcagcatctccggtggaaaggaacgaataattccgactgggagcacaaagagaagtgctgtgcgcgctgccagcgtgtgctggggttcctgc

SEQ ID NO: 241134 - DNA, 2186 bp, Homo Sapiens
gtagatttttcattttattttaaacattttacattaaatgaaatttaaccataataattacagaacattaccacaatgatacacacaaataacctttaaaataaaaaagaatacaattcttaactagttaaatgacactttagtgtgtaaacataaataaaataaaaccctgatgctaaaaaggtacatgttcagaggtaaaatacatatacaaaaacatttaaactaacataatccacaactagatcacattctttgcaagagagtacaaatattagtactctacagctacaaaatttcagaatcctgttaaaatcaaaaccgttgctggtttataatacacagcacaattcataaggcaaaaatataggcattatcatccagttctttaacttcacttgtattttaaggcaaacttggaactttttgcttagtatttaaaaataaatgggacttacacataacttgacaaaattaacaataagttatctctagtaaagatgtataatataaaagacatatggataacaatttttctctctgcagagatgtaaactggatttttatttgactccatattcacaccagtaggaaaatttgtaaacctattgtattaaaaatgtattgtattcctcactcttttcaaatgtgtatcaacaccaaatcaatgtactgtaagtgaaaatccagtacatatccagccatggaataattgttatctaattaaatcatgtctaattaaagtgctgttacaaagggaaaaaaggttaagaagtagaactggatgttaacttgacatgtgacatcttataattccttaacttttagactacagaggttatgaggttatcacaagtttactgaactttaagcagtaagtgtttattgtagaatctgattttcctgaaaatgagcacttaggtgacaataccaggaatccaacaccaaaactgaaaataaacacaacatgtacatatatttctctcaatgtcagccagagtcttgatactacaggaaatatatatatttaaaatttctatagttttcttactagaaaatacattatccaattctaggagatttggagttctataaatattaggttttttaatatttctttttcatgccaataaaacctaattggacactaaggaattgcttatgcataaactaggtctctaatcacttcttacgatgtcagagataaggaattagattcatccttcaccaaaatagttattagggtctctcccactatattttactctctttgagtgaaaaagagtatatctctctagctcccacagcatctaacagaatatctcatacatatagcaaaccctccatatgtgttaaattatcaaaataaaatttcaaaacctaatgccattttcctatcacttgataccacttcctataatttaatattcactcacatttaaaacaataacagcaataacacaatttataaatatccttggagctacattaaaagccacttacattctattacaacatccaatgattattgaatagccaaaggtgcctaacagattaagttgttataattatagaaggcaagtatcttgcaactgattacattaatttctatttcccagtgctgctcttttccaaaatatttctgggaaatcttaaatagcttttctcttcttgcctgaatatgtaaaattatttctaatacttttaatcctgaggatttataaccaaacattttgatcctttttaacatagaaacatgtggctttaaattcacaatttgtcagcagagtgttcataatgaaacttctcacaaatttgtaaaagaaggcgctaatgtaaacatattagttgtcaggtcagattagtagctctggttgttacgaataatacagtaggttaagcaatcccaaaataaatatacttctaaattttgaacatttttcctcttcctttcacagattttcataatttgttcactggtgtatggctcctactactactgcccaagatatttcacatttagtcttcatcaagatgaaatttagatttttcaaaaacaatgaccagtatatgtttttgatctaatttaccaaatgattatacactaatttgatagtggagatgatacatgagtaaaatattgttaaaatacaatgtatagaatagatgtgtttataattaaaatc

SEQ ID NO: 241135 - DNA, 1149 bp, Homo Sapiens
  misc_feature (975)..(984): n is a, c, g, or t
gaaagtcaagtacaacacatttagagataccaaacttcacatttctgtactatttttaactcttcaaatatcgccaatcttccaaaacaaaggaatgtaaaatttcactaagaaacatattcacataaaaaacaaactgccttttaaaaattgtaagcaatatatccctgtaaacttatcttgtaacttattttatttccaatttgtgttgtacattttaaatgtactctatatatagcttatttagtttatcctgagtctttgagaataaccaattctatttcacactggcttctgaagagttaaaactaaaatctcaaagttgtacttaatagttaatcagtacttgatttaaaagactcacacacacacaaaaagattaaaaagctaccattttccttcaggattccatgcatctgaatttaactccagactaaaaccgttaggtaactgtgcaaaatccaaggaattagtgtataaatgaaattcaattccatttttctttctgaacacattttccaagttcaaagcaaatgtactgtttaaaaacattactgattggtagttgaataatctttttaaaaaatgatctgccaggcctactgtaaagagatgatgcatggtaaaaggaaaatggcagctctatgttattaccagtagtgaaggtgaatgatggattgttacatacagagtaagacttaaatgttgtgaagtttcctacagtttgacaaccaaaacatctaaaaaattcaaataaattttaaggtaatcttgatcttggttgtgagttgcaccagagaggacagtttatttttagttaacttgtacttaacctgcacaataagagtggtgactgactcaaatgtaggtagtactttattgtattccaatttaaaaaaacaaaattaagtctatattttaaaaactctgacaatagcaagatatttaatgaactctacttcatatctagttcannnnnnnnnnctggtttgaaaaaaagatcagctttccctgaataaacaaaaatgaatgtaaataaacatgaaaatacaaaaccataatttccaaaaacgaaatgaatgggccaacagtaaaatgcacaatgagccacaactgccctggtatttaagaaaataaaggtcaacccaa

SEQ ID NO: 241136 - DNA, 1547 bp, Homo Sapiens
  misc_feature (271)..(280): n is a, c, g, or t
  misc_feature (311)..(373): n is a, c, g, or t
ttgtgaagtttcctacagtttgacaaccaaaacatctaaaaaattcaaataaattttaagggtaatcttgatcttggtgtgagttgcaccagagaggacagtttatttttagttaacttgtacttaacctgcacaataagagtggtgactgactcaaatgtaggtagtactttattgtattcccaatttaaaaaaacaaaattaagtctatattttaaaaactctgacaatagcaagatatttaatgaactctacttcatatctagttcannnnnnnnnnctggtttgaaaaaaagatcagctttccctgnnnnnnnnnnnnnnnnnnnnnnnnnnnnnnnnnnnnnnnnnnnnnnnnnnnnnnnnnnnnnnngaatgggccaacagtaaaatgcacaatgagccacaactgccctggtatttaagaaaataaaggtcaactgtgggtcataaagaagtatcaacttttaaaaatatatgtatgtattgctactcatagcatactctgacctaaaagaggcagatactgattttatagccagtgacaaaaaatttgaacggaattgcagaaccccctgcttgtgatcactatatgaaatggaagaataattgaaatattaaaatagatcctgagcccctcagccgctaatattgctgaaaaagtgctccaaaaaaataaaattatgcttctgcaatttagtcatgcaaacttcattgttttcctgttcacctagggccagttctttgaaaggcacagtttacagtttctgcactagtttgggcttttgcatactgagcttaggtacagatcatgatttgtcaatcacatacttaggtaagggttccccactggcctcgttcatagctgttcagtggcatcatggccagtagaatatcaatgtggttccccacaagttttttttctcttgttgagcatcctgtttctactgtagttgatctgcataattggctaccatgtagtacgaaagactggatgcttcagtagctctcttgatggaggtctgtcctgaggttgaagttctaaacaacgaagagccacatctcgtaaaccaggagacaaatgtgaagggatcgatggagcagtagttgcactagcaatctgtggagaaaaagccagtgttgaagctttgcacaactgtaacttctgatacagaaacacatgtgcatagacctcataacccttacatttacatcctgaacagagaggaactgaagcagaagtgggaggattttctgctatcaaaaagtctatgaaaaaattcatccactggatgggaggttttctctaacaatctttcaaattttaggattttaggatttgatcaaatatatcctattccttattatttacatcaacaaggctaagtacatcaaaatgttcaggtagataaagtattcactcaaatgaattctgctgtcctcatattcaatctccgagatggtttgttcttactgcacgttttctatttcttcagcatatagagctatttagattaagaaagactaaaactgaagagtcaatccaa

SEQ ID NO: 241137 - DNA, 1225 bp, Homo Sapiens
  misc_feature (61)..(69): n is a, c, g, or t
  misc_feature (161)..(200): n is a, c, g, or t
  misc_feature (307)..(361): n is a, c, g, or t
  misc_feature (948)..(1001): n is a, c, g, or t
cattgaaccaagtgcaatgcatcagagagttttcctatctttgtatgttaagagattaagnnnnnnnnnttctatttttgttgtaatgtcctcgcggctctggggacgctaaaagaaccgggcctgccccgccctgcgcggggataacgaaagctgagtgnnnnnnnnnnnnnnnnnnnnnnnnnnnnnnnnnnnnnnnnaagtcgttttcctgcgttgacgaggatgatctggggtttttatttgtttcgtcgttcgttctgtttcggtgggagggctgaaggaaacgttcacattttagagtttnnnnnnnnnnnnnnnnnnnnnnnnnnnnnnnnnnnnnnnnnnnnnnnnnnnnnnnggacgagagaaaaattatttttaagataattaaacataaaaccctggtgcttcttacattataaagtacgttttaaagaacccacaaactattatacataagtttatgaatcaattaaatatcctgcacttgttaggaatacgcatatcccttctttgttgagtttaacggaacgggacagcggcgtgcccccggcggctggactgctccggccgcgggtctccccgggcgcccctccctggggcccagcacccctcctcgccccatccccgtccgggtacgggggcgcggcaggggtccccggcccctcccccgcagaggtcaatgccaacgaacaaacgtcccctccctccctccctctccgccccgagcgcccttctttgagccagacgccaacttgaccctcaccagcattatcaggagcgcgctcagcaagttggtagtttcctcccccctttcccggcgcccctcccgcccccattcaacatctctcatcctatccccgaccccctccggggaacaccgggaaggctcgacgctccaggacaggaccagccacgctgacaggtcgatttgcccaggcccgnnnnnnnnnnnnnnnnnnnnnnnnnnnnnnnnnnnnnnnnnnnnnnnnnnnnnnaccagccctgtcgactgccttatacacgcgcccccgcgctggccggccgacctagtgccttgttctcacccccgtgctggcggagcggacgccgcgctctgggtcccagaggggccgggtggctcagacgacccaccactccctccaccctgaccgtgctgagcagaccccccccacacgagagaaaataaaggagcaataaagtcacgaaaactttcttcccc

SEQ ID NO: 241138 - DNA, 1457 bp, Homo Sapiens
  misc_feature (220)..(269): n is a, c, g, or t
  misc_feature (294)..(307): n is a, c, g, or t
  misc_feature (644)..(652): n is a, c, g, or t
gtctcaccagtggccaggcggtgttgttcacacctgtaatcccaacactttggaggctttgggaggctgaggtgggaggattgcttgagccaaggaattcgagaaaagcctgggcaacatggtgaaaccctgtctctaccaaaaacacacaaagaaattagctgggcatggtggcatgcacttgtagttcagctaaggtgggaggatcacttgagcccannnnnnnnnnnnnnnnnnnnnnnnnnnnnnnnnnnnnnnnnnnnnnnnnncgtgacaaagtgagaccctctctcnnnnnnnnnnnnnngaacctcccataaagatttattgacaataaacatttctattatataccacacactgtgtctacatattaggaatataagaacaaattttctcttatatttaccctgaagaaaactattcctagtctcaatattaagaatgaaaggagggagaataaaagaacgataagtatatttttgcaggatagatctcaccattgattagggataacataatagatatattttacaaaaatatttatacagtaatatatttatatcaaatgtgacttatgtttaatttgtgaaaaatcctcactttctggaatggtgttaattatactataaaagaatgccaannnnnnnnnctttcactacaacttgaagcctatgggatttaagttaaagttggacaaaaatgacaagaaatagtacaatacaaaaatactgactcttgcttccatagtggtatgagatattaagtcatatacacatctaaatgtagtaacagaggaataatatgagagcccttctagtgtcttgagtacctggttcttctcctcgtattctttgattttgaacaatctccagaagctgctgggctgcttggtttacactcatataccgtggaggttcatagatcttccttcccctataggcagaaaactagatgccactgttcttagccatgaaactacataatatgttattaatgcaattagctctcccaggtatactcaagtaccacagtctacattctgtttgatgtttttttacatgtactcactttaagcatacacaaaagcatgatgattgttcatttcttaagctttttcattgttctaatttaactttcctctgatctcactgaaatgatggcaggaacacataaagatagatgtctaaatgaaagttatctttattcaaagtgatacctttggtaaaaacaattcaaagtggcaatttggtctatactctagcttaatcaggttatttagtgtcctttttatgaccatttttaaaccacatattcttttcactgtttcctctaagaaaagtaaactaaagcatcttggatgcttaaaaatctcaggtgatggcatacgtttatttctgtatgcctcaaaagcctatcaggcttgccgaactatcatattaacccaacttttttgt

SEQ ID NO: 241139 - DNA, 1204 bp, Homo Sapiens
  misc_feature (957)..(970): n is a, c, g, or t
  misc_feature (1106)..(1122): n is a, c, g, or t
tagaacgtatgaaaatatttttatctgagttctccctcattgttgagaggcagcttagtttgccttgagttcataactgttgagtgggtaggagtatgccctgcctaatactattctgtcccggagaagtttaaataaaacatagtagttgcagaagaggatgagagccatggaaagtgtgtggttccacttctccgaccgcagcaaggaatagagctgatagaagacgacactgccctcaataaggatgagcagatttaacagccttaatggtcgatgaaataagaaataaaagcgggcatgagatacatctgaaggcactgccacgttgtaaggccccatggctctatataaacatctgctgtgccgcaccagcaccccttgaggccatattgtattttctgaccaactaagggagaaagaaatgcaatgttagcatattggcaattacagataagatagcatctggcaaggccagctgtatttttatggaaggaattaaataatcaaggcttcatctgcctgaattctgaaaatacagtaattccatggtcaaactggagtagttttagaaaggatttgttactttaacttcattgctatatagtaaacagaggttgcaaagaaatatagttaactcagtgtcaaaggacttaagaggcttagaagaatgagcagacataaatgtgtaagccagaaaacagtgtgtaagcagggtgactgtcatctccatcccaagtgagcagagtctactggtggaaatgctagagggaacaaacaagaagagaaagctgatggtaataagaatagtggagaaattagcccattgtcaatttagcatgacatttactgcagaattacatcccaaaaaaatataggaaatcagtttgcttatcacacaattcaaatacctcacaactgtaagaagatatacagtagaacacagcgatacatttnnnnnnnnnnnnnngacttttcactgctttcatggtttatttttatagaggtttttttgggggaaaagaagttacagaagcagcagcttcattttttccagcataatggagtttgggtggggacagggattttcaggttaagcttttttnnnnnnnnnnnnnnnnntttaagttaattcattttttcctgattttggaaaggttagtttcctaggataagaactgggaggcagtttagatatgttatt

SEQ ID NO: 241140 - DNA, 1849 bp, Homo Sapiens
  misc_feature (77)..(133): n is a, c, g, or t
ttgggctgtttgtctgttcgacacaggcttggggccgacgggggagacggagccccaggagtgttgaagcctggaannnnnnnnnnnnnnnnnnnnnnnnnnnnnnnnnnnnnnnnnnnnnnnnnnnnnnnnnattctgataatctggccatgactagcagaagcacagctaggcccaatgggcaaccccaggccagcaaaatttgccagttcaaattggtcctgctgggagaatctgcagtgggaaagtcaagcctggtattacgttttgtcaaagggcagttccatgagtaccaggagagcaccattggagcggccttcctcacccagtccgtttgtctagatgacacaacagtgaagtttgagatctgggacacagctgggcaggagcgatatcacagcttagcccccatgtactacaggggtgcccaagctgcaatcgtggtttacgacattactaatcaggaaacctttgcccgagcaaagacatgggtgaaggaactacagcgacaggccagtcctagcatcgttattgccctggcagggaacaaagctgacctggccaacaaacgtatggtggagtatgaagaggcccaggcatatgcagatgacaacagcttattgttcatggagacttcagccaagacagctatgaacgtgaatgatctcttcctggcaatagctaagaagttgccaaagagtgaaccccagaatctgggaggtgcagcaggccgaagccggggtgtggatctccatgaacagtcccagcagaacaagagccagtgttgtagcaactgagggggtggctagcagcaaacaagtatggagctagcacaagagctaagaaataacctccatccctacccctcagcacacaacccctacggtaacagcacactgagccctggctcccaagggctgcctcctgacagctccgtcatggcactttttaacgcttcagcaacaaacaccaggcagctgttgccactggcctcctaccccctactctggggcttgggggtcaactccccccaggacttaccttccaaaacaaactttcttcactttgtattataggtacaagacagcgacttacgtatcttttctcctcctccctagtgttcctccccattttttcagaaaacacttctgactcctgtcccttccccttctgcttttggtcagtccctgttcttgagcctcttttctcctctccccaggatgcagaaagtggtgaacccaggaactgaggaaggaggtttccagttcatttacattaagggccctgggggagaataaagctcagagcaggagggagtaaggaaacatttcctttttgtttttatttggttggagtttctcatatttgaaaacattgcggtatccatgatttggccttgtggagggtgttcctaggtagaggtgagaatggggaggcaagatctcaggcaccaggcaggaggtgccttgtaagctaactgggcggaggtggaggtgcagtgtcaactgtggctctgtaactcttcaaaggcccagtttcccctcacgcagcctcttaggtagcgtttcccctaatcgtgggggttggaccccagagtcttccaaagaattttcactggttgcctgcatctttggctctgctgtgatctgattggaggagggacagtttctggtacccatcctctgatttatacatatgcattttttcccctctggcctttagatggcctcagccccagccaccatatacccctgcagtttgcactttaattgatggtagttcagttggggtacttgttttatggaagttttgattgatttacttgccctcccaccttctttttaattc

SEQ ID NO: 241141 - DNA, 1098 bp, Homo Sapiens
actttgtacaaaaaagttgggaaacatttcctttttagtttttatttggttggagtttctcatatttgaaaacattgcggtatccatgatttggccttgtggagggtgttcctaggtagaggtgagaatggggaggcaagatctcaggcaccaggcaggaggtgccttgtaagctaactgggcggaggtggaggtgcagtgtcaactgtggctctgtaactcttcaaaggcccagtttcccctcacgcagcctcttaggtagcgtttcccctaatcgtgggggttggaccccagagtcttccaaagaattttcactggttgcctgcatctttggctctgctgtgatctgattggaggagggacagtttctggtacccatcctctgatttatacatatgcattttttcccctctggcctttagatggcctcagccccagccaccatatacccctgcagtttgcactttaattgatggtagttcagttggggtacttgttttatggaagttttgattgatttacttgccctcccaccttctttttaattcaatgaaatctgaggttaatgcgaggttcgaggagaggttatagataaaactaccagtggcagctactcaagtcctatctccactgttagcttcctccaactctaattattaacctatattcttgccaagctaactattgactataggtttgcctttcctggagaattaattgagcaattgaggagtgtctcaggatagcacaggccaaggtaggggagtaaaaaggaggtcaggcaaaaggaggagttttctgtcctttcccaggtttcacactcaatttgatatccattaccatgtcttttctacttccttgtaaataggtatgatctttattcccactgtacagtctgttctatcctctgcctcccatcaggccctgtttctttgttcctttgttaatatcttgaatttagtccctccatccttaatccccccatccctccccatcatgcaaccagtggtttaatccatgtaccaataggggctagtaacacagaaggcctcctgtggtgccctcgtatcatacacctggttcctggtggaaagggaa

SEQ ID NO: 241142 - DNA, 1878 bp, Homo Sapiens
gccccgtccgcaccagaggcgacacagatgaccgttatttccactgaggtgagcaaggtagagattccaggctgagagtaacagaggtacatctgctggtcgaggctgcgcagcgcgtggaaggtagggtgtgtgtgctgctgcacgaacaggtgcccggcattgacctggttgaccacaatgacctccacggtgatgccatcaggcagcatgagccaggatgtcatcggcagagaaggcagtgccagtgaaggcaatgggggagcgtagatattggtgaggttcagctctttgaacttcttcccaatcaagttcagcgctttgtctacatgatgttgagagccttctatgtggcagatctggacgctctgggtgtaaggcagggttgaaatgtagatcttggcaccagatgtttgcttcagaaaactcacatagcgcccctgcttgccaattagccgaccgactaagtgctttggcacctcgatctcccagatgatgaggtcgaccttcttagggttggagcctgcctgggcattttggaagctctcagtcttcttgagactgcaacagctatccacggaatccatgctgttcctgtcagaacctgcaggggaagaagcagcaggcacgcacacacacagaccccactcagagcagccagtaaccaagaacttcccaaactcacattcccaggaggccctgccccacacccgctcctcaagcttggcaggtgactgtcaacttacagtctagaaggctcagaacaaccccaatgaaaggagaactgggggtgtcgatacacctaattttagcctgtcacttacagtcccacttgcttaattggcacccgcacccagccacagctgctggagcagagacacaagtggtgaacttggaagagacagactgcgcccagggaaggggagcccagagggcgggggaggagacacgcttgaggtccacatggtcctgagagccagaccgatggaccacaaacaccttgacacccttccaactatcctaccccctcagaccaagggtcagtctcctgtccccagggcccagtcccagggtcataggtactggccttcagcccagcagagctagacaaagtcctcactggcctgcctgagggccccattcttatacctagcggggacccgctcgttcctctgccatatgtggactaaaaaaggagagtctcctttccctttgcttaggcctgattcatgcaactctgaacactcttctggctcaaatactcccttggtcaaaagactgagccaaagctcatgcccaagaaaacccaatgggaacagactctgctcccgacctgggctgttccactctcactcaagagcgtgccaaagggaccgtcacaaaaaagcgggtccagatcagctcaagagaagtggccctggcttaaatatggatgactcaatcaccagaaatagatcactcctgagagtctaccaattaggttaccttccacatggtttctccaaaccctgagtataatcctttgccaagtaacccatacactggatgcagagaactaaggcccaagagatcctgctcccagctaaggaagaatcaccttcaaaatgacttccccccttaacactaggcgcttcgaacaggattcatgcagggaaaagtaccccttctgggggaagactgcttggctagcctgcgggaagcataacaggctgacaggggctgggcgagggggcggggagctctgctcactcacagtatccagcctctgccccacagaatgggactggctaacacctgccatcccgatggctcccagcagtggctcagaaccacacccggactctagcaggctgcactcaaaggccagcttccagccaa

SEQ ID NO: 241143 - DNA, 1209 bp, Homo Sapiens
cacagagggggctgagacctggcacttggttcacagcaccgcttttgtgcccggcttcctcctgcccagtgccaggtggacccagaagtttctgcaggaatgggaggggggaggagagccctgagctggcgaagcaaggagcaggctggcagcggagccacagcacggaacgaggagctctcaacaggtgtcaggcagaggtctggtggctggttcggggtctactgaaggctgtcttgatcaggaaactgaagactctctgcttttgccaaagcaattactgcagcttccttgatatgaggaaactgaggctcagagaggtcacatggcttgctcgaggccccccagccagtgtgaacccacatccctgcccccagggccacctgcaggacgccgacacctacccctcagcagacgccggagagaaatgagtagcaacaaactccaacagtgccaatgaggtcttccattacggctccctgcggggccgtagccgccgacctgtcaacctcaagaagtggagcatcactgacggctatgtccccattctcggcaacaagacactgccctctcggtgccaccagtgtgtgattgtcagcagctccagccacctgctgggcaccaagctgggccctgagatcgagcgggctgagtgtacaatccgcatgaatgatgcacccaccactggctactcagctgatgtgggcaacaagaccacctaccgcgtcgtggcccattccagtgtgttccgcgtgctgaggaggccccaggagtttgtcaaccggacccctgaaaccgtgttcatcttctgggggcccccgagcaagatgcagaagccccagggcagcctcgtgcgtgtgatccagcgagcgggcctggtgttccccaacatggaagcatatgccgtctctcccggccgcatgcggcaatttgacgacctcttccgggggagaagtctcattcgtggttgagcacaggctggtttaccatggtgatcgcggtggagttgtgtgaccacgtgcatgtctatggcatggtcccccccaactactgcagccagcggccccgcctccagcgcatgccctaccactactacgagcccaaggggccggacgaatgtgtcacctacatccagaatgagcacagtcgcaaggcaaccaccaccgcttcatcaccgagaaaagggtcttctcatcgtgggcccagctg

SEQ ID NO: 241144 - DNA, 2049 bp, Homo Sapiens
  misc_feature (216)..(252): n is a, c, g, or t
  misc_feature (1160)..(1243): n is a, c, g, or t
ggaaccagtgcgcaagcaaagcaaaactttgaggacccaattattacaagctgctgcagtaacttactcagggcattctgcaggagctaggtctaattgcaaactttcttcttacaggacatcatcaaaaccattactctttctaatgtaacataaacctatcaatgagctgaaattaactctaaacacatggtcattcaaaagtatagctttgannnnnnnnnnnnnnnnnnnnnnnnnnnnnnnnnnnnntacatgaaattaagaccttttttttggatcgtttcaaacgtgcttatttgataaaaaggaacagtgtacctacagttgtactggggaagagtgagaagtgcatttgcaaaacattcctgaaaataaacatcagcagtttaatagtacagaagagagcaaacaaagcaggctatcaaaaatccagagaccctcccatgggcccgccccactcccgactccctcccaaaaatgaaaacatgttacctcaggtagcatatgtctaacaccacctgcagagggaaggcggccagcccccaagaaccaccgagtgccacctccagctgaggtcctgcaacgccggagcacacactcacacaaggcacattcagcaacagtattaaataccaggaagtgggaaggaatgtacttttattgaaaatgaaaaaatataaaagtaccatcttcaaagagcatctcacaaacactgtacagcaggtgaagcattgcagtaacatacattgaaacatacagagtcgagttatacaggactagccatctaacaggtcatctggtctccgacggttgtttaacgacacacagtagaaatagagaatagaacccatatctgtttccagagtccaaagtagtatatcaggctgacagcactcaatcagtgagggctcctgaggttgcaatgattctgcaacggagtagattctctaggaaaaaagaccttgctgctaaggaaagagaattaaaaacaaaacaaaacgaaaagctccccaaagaggtactctgctcaaaatggctggtgctactggtgcactaagttgtgaggaattacctctgctcgggacagaataaaaaatcctaggcctcaaggaaaaactggtggcatccttctgggtcttttcaagtccttgcatctnnnnnnnnnnnnnnnnnnnnnnnnnnnnnnnnnnnnnnnnnnnnnnnnnnnnnnnnnnnnnnnnnnnnnnnnnnnnnnnnnnnnttgatgtgaagcccatccacccttctacccaggtgccttatagcaaaggtgactgcagctgtaagtcagagctgaatgacagacaaaaatggaggccagacaccacggtctggaggtagctacgctgaattccaaaacccagactctctctgggttaatttcttgtttttcctgagattaaattaataccagatgtccactaggtcctaggagatccccaccaatcagatttttgccaagtcccaggaaataacctgatcaaataggagacttcagattccaagaactactgtattccacctctcccctccctcagatttttaggtttatatccattgcttgggtcaccactgtatacagccgggttgctggtttactagcaagaagattggcttcttttccagtatgcaatccaaaatgtggaactgagtcacagggccaaagcccccttttcctcacgtgaagcaactcagtaagatggcggtgcagtgaagcctgttcccacacacctcggcactgatggagcagtctccaaaggaaggctgaaaggacagcaggtggttgccttgggctccttccttcccatacctttagagtgccatttttcagcactgggtaatagcatcagcgcctcccagatgggaggagcagggaaggtaaaagacatagtgaatgtttacactatgcgaaactttcaaagggggggaaaaagaggaaacagcagattaaagaagttccaacacatcgggtttttaaataacaatgacatttcaaaccatttttcaagagaggataaagaaaaccaa

SEQ ID NO: 241145 - DNA, 1632 bp, Homo Sapiens
  misc_feature (229)..(298): n is a, c, g, or t
  misc_feature (1329)..(1370): n is a, c, g, or t
ccagaaacaatttatagtgtttattgaaacatgcatatttcccaattaaaatccactgatgaaatttttaaaatttaacttttgaatgtctttattctgttttattagatagttctttatcttcaaatataatactgataaatctgaggacttgccaagtaatatgctgtgataagtaagaatattggaatttgtccctgtactattccaggtaaacattgatgagaannnnnnnnnnnnnnnnnnnnnnnnnnnnnnnnnnnnnnnnnnnnnnnnnnnnnnnnnnnnnnnnnnnnnncccagaagtataaacatagaaacatgccaaagttctgtaagaaagattccaagtaacacatttgagaatacattaaggagcaatattatgagtacataaataattctaaacaaaagatcattaatgcaagtgaaaataaatattaggaagtttaagttcctacctttagaccaaagaagctaacataaattaagaaaaaatatacaaatgcagatatagggtgtagagttcattaggtagcccctaccatcagacttgtgtttattattcagtactgagggcattagaatccacaatggatgagagaaaaacataaacaaaggatcagagcagtgtagtcctaaagaaaacctactatagatttgcaaagttgcattaagttagtaggtaggggaaaggacagaatacctgtctaacagaactcctaccatcccgtttttcttttcctttctgtttgaaatcattagtttatttccacaatgcctcacaaggatattgccccaaatgaacatacctggatgaatttcattaaattatatagacgtgtaaagcatattcatatacattctccctacatatataattataatttgcccaattctctgtgcctgaatatttgaaaaggatatttgatcatctaattggactatgagggagctggtgataggtcctaccgttcaccaacactgggctccctaaattataaggggatgcagtgcggcatagcagttaagagttccgttactctagagtcagacagaccagattgcaatctcaactgcaccacttactaaatgtgtgaccttggccaatatttacattatccaatttacagctactctaactgttgtcaaaacaaaaccagttatgataatgctccctatctgctaaaaccactgtgaaggttaaatcaaataatccctgaccgatgacagactgataataatccctgaccgctctcagacaaagagagaaggagcgaaagagagagagaaagaatgctatgtgaaacaaaatctgcaatactagcnnnnnnnnnnnnnnnnnnnnnnnnnnnnnnnnnnnnnnnnnntaagaatttcagaaaaatactgcttatttttcttaataagagtctcatagtttggattttctagaagtagaatttaagacagtgattcatatgcatacatttgattgggcatacttctgtcagacaaggccaattctttggagtgagctgacatcacttggcagctggagattgctcactgacccagtaaagaatatctaggtagggcactgtccaacccttgcaagcctcagatgaatatggctctcacattaagttccaa

SEQ ID NO: 241146 - DNA, 1245 bp, Homo Sapiens
aagcccactttgtacaaaaaagttggcccatttctggtgccgtcacgggacagagcagtcggtgacaggacagagcagtcggtgacgggacacagtggttggtgacgggacagagcggtcggtgacagcctcaagggcttcagcaccgcgcccatggcagagccagaccgactcagattcagactctgagggaggagccgctggtggagaagcagacatggacttcctgcggaacttattctcccagacgctcagcctgggcagccagaaggagcgtctgctggacgagctgaccttggaaggggtggcccggtacatgcagagcgaacgctgtcgcagagtcatctgtttggtgggagctggaatctccacatccgcaggcatccccgactttcgctctccatccaccggcctctatgacaacctagagaagtaccatcttccctacccagaggccatctttgagatcagctatttcaagaaacatccggaacccttcttcgccctcgccaaggaactctatcctgggcagttcaagccaaccatctgtcactacttcatgcgcctgctgaaggacaaggggctactcctgcgctgctacacgcagaacatagataccctggagcgaatagccgggctggaacaggaggacttggtggaggcgcacggcaccttctacacatcacactgcgtcagcgccagctgccggcacgaatacccgctaagctggatgaaaaaagatcttctctgaggtgacgcccaagtgtgaagactgtcagagcctggtgaagcctgatatcgtcttttttggtgagagcctcccagcgcgtttcttctcctgtatgcagtcagacttcctgaaggtggacctcctcctggtcatgggtacctccttgcaggtgcagccctttgcctccctcatcagcaaggcacccctctccacccctcgcctgctcatcaacaaggagaaagctggccagtcggaccctttcctggggatgattatgggcctcggaggaggcatggactttgactccaagaaggcctacagggacgtggcctggctgggtgaatgcgaccagggctgcctggcccttgctgagctccttggatggaagaaggagctggaggaccttgtccggagggagcacgccagcatagatgcccagtcgggggcgggggtccccaaccccagcacttcagcttcccccaagaagtccccgccacctgccaaaggacgaggcc

SEQ ID NO: 241147 - DNA, 1016 bp, Homo Sapiens
ttggcacagttggaccagctccgtgggctgactggggcgaggcctcagcagcgcgagcttgagcgcggcgggggctggaggcgcgaccgcggcgcccccgagcgggaatcagaacggcgccgagggcgaccagatcaacgccagcaagaacgaggaggacgcgggaaaaatgttcgttggtggcctgagctgggatactagcaaaaaagatttaaaagactattttactaaatttggagaggtcgttgactgtacaataaaaatggatcccaacactggacggtcaagagggtttgggtttatcctgttcaaagatgcagccagtgtggagaaggtcctagaccagaaggagcacaggctggatggccgtgtcattgaccctaaaaaggccatggctatgaagaaggacccggtgaagaaaatcttcgttgggggtctgaatcctgaagccactgaggaaaagatcagggagtactttggcgagtttggggagattgaggccattgaattgccaatggatccaaagttgaacaaaagacgaggttttgtgtttatcacctttaaagaagaagaacccgtgaagaaggttctggagaaaaagttccatactgtcagtggaagcaagtgtgagatcaaggtggcccagcccaaagaagtctatcagcagcagcagtatggctctgggggccgtggaaaccgcaaccgagggaaccgaggcagcggaggtggtggtggaggtggaggtcagagtcagagttggaatcagggctacggcaactactggaaccagggctacggctaccagcagggctacgggcctggctatggcggctacgactactcgccctatggctattacggctacggccccggctacgactacagtcagggtagtacaaactacggcaagagccagcgacgtggtggcccatcagaataactacaagccatactgaggcggcagcaggagcgaccaactgatcgcacacatgctttgttttggatatgggagtgaa

SEQ ID NO: 241148 - DNA, 1390 bp, Homo Sapiens
tttttaggagttctgttcacagaacattaaacagtacaatatccattgttcataggttcaagttacataaattaaagtcaaataatgggaaactgattcaatagggaaaactatacatgaaaggaaggtcaaaaggagctatacagcaatatttcattgtttatagattatgagttactttcaggacccttaacaaagattctgaatatttagacttcctttgttgtattttatacttaaatatctccctacctatactgagtcaaactacttgaccaaaacatctgatttaggaaagcatctagctttatagcacaagtttttccatctacagttactatcttcaaaggaatatacatcacaatgttgacaaaaaaacctcctggttccttttgaacaatgtgcaataaattcatgatgttaactccatggtaagtcaaataggtaccaaaaaaataaaaggaacaattacacacagttcagtaagtatcattttggttttctccatgtaaaaattaaccaatgaaataaaacatatcaactatagatgacctgatttcaggaaaaccacatttcaaaattacaattacattattttcctcatgtcatcctcagtcattgacaggaattttgtaggccaccatgctatttactttgtggattgtagtagtaaatgaacgaaggcggacttcctcagaattggtaataaactgtggtcccgactcttcccatttttcaggtacaaccaaatctttgtctgtataaatcagcagatcaaatgaacaagaaacttccaacagtggcagaaatgtcaccgtagctgtgatctgtctgatcactgaacggatttcatcctggatagctttctgagacttttctctgggtgcactgtcatcttttgcagtcttatcacactcaatatcaaactgtcatctttccaggacctcaccactttcaatatttgagataactacaaccagtttctgaactgaacacttgtataaccaatcttttagttgttccaccacattatttaggtattttatgagctcaagatcagtagttacaagcaaggtgagtccgtatttctgcactcgagtaaagatttcagatggataaatgccacgctgatataaaatgctgttgatgccgaatgagaagaactcgtccacgatttcggcactcccacgcagggtgattccctgctcccgggagagctgcagcgccatggccagggacacatggccagggacacaaacaaaggcacgcgctttcactacacggacagcaaccacagcggctccaacagcacttccccgccaagagtttcaaaagtaaagaccatccacttgcttcttagagtaagttcactctagcaggaaacagcttc

SEQ ID NO: 241149 - DNA, 1256 bp, Homo Sapiens
ttttgttctccccgtcagcatgagaagactctccagtgaggaatatttccccaacatgtttttctgttgcacaagacattgtgtatatgctgaaaaacctgcagttcaatttgcataaatgcctctattctgcatgtaaaggaataatgagtaagaggtgttggtcttggtttcttcactgattccagattaatatacttttccactgtttttccttaaaatgtttcttcagaatttcactcgaatgtactgtttagcccatgaaagttcactctggatggtcttgctgctgggcagggatgtgctgaataacttcatacactgtactgtgcaaatcttgccccgatacacaatcagaggctggaacagacctgcttgggatctagaaaatgtgatacattaaaaataaattatctcaagactagtaaatagtttttccactatgttgcatagttgaaaacaactggcagtagtgatgattagagaattagaactatttatcttccctagaaagttgacttcctccttgctacacttttctgcacttaccctatggcagtttgtgcagcagcatagctataaggtcagaagaaggatagcttgacaaagctatggattttttcttcatttaagaagaaagctggcagtactgtaaaggaaatattatagaaagaaaaaatagcaaaagagaagatatcaggatatcttagaatcagatagcatatatcattatcttttctatacctcagttacccttttgacactatttgccaattatgtgcgcaagggtggcttaaaagaaaagaacaatatacagcccaaatccctcatcatattgcaaataagtaaagacagtaccaaggaatgtggaacactcaaaggaaaatgttttggtttaaatgtagtaatggactgtaaaaactaaatgcttaggtgaatgtggaaaggatagtgtatttatggctggtaaaaaccaacaggtatttttattgaaagtggtatttgtgttttattaattcccattccttatatttcataacttccttcttcctataaacactccctcccaattatttagccgaagtctagttttcctccccatcccaaatgcttcctattttaatcctacttctgtccactttcagtccttcatatttatacaccttcacctcgagggctctttgctcttgataactctgaagagccaacttttttgtacaaagttggcttttattgaaaagcattgctcatcaatt

SEQ ID NO: 241150 - DNA, 1608 bp, Homo Sapiens
ttgtaggtgagacaggatagtctcagtgtgatgatagtgaaagtgtagagtagaactaattgaggttgtagagatatttcatacaaaacttatgagggaacccctgtcactttcgttctccccgtcagcatgagaacgactctccactgaggaatatttccccaacatgtttttctgttgcacaagacattgtgtatatgctgaaaaacctgcagttcaatttgcataaatgcctctattctgcatgtaaaggaataatgagtaagaggtgttggtcttggtttcttcactgattccagattaatatacttttccactgtttttccttaaaatgtttcttcagaatttcactcgaatgtactgtttagcccatgaaagttcacctagtgaagagatatacaaaatatgtaaacagttctatagatttttcaggtctgcaggtaaaagaactttaaattcttttattgctttccagggctacagattagaagaatgtttggagctagctcaagaaaattacatttatcaacaaataaatataagagtcagcaattattaaattttgtagataatttactttcgaaactaaaggtttacttaacttgaaagtcctgttttcaatatactaacgtcagttttgggttcaatataaaccctaccaagagcatttaatgaggtcaatagacaacattgaaatacatccagccataagttcactaaataaataattgggctgagtactagaatatgaacacaaaccaatttaccagtttgttaaacagcagtccaattaggtaatagacacatgaagtaaagaaaataacactgttattttacaacagtctaagagccaaagaataaaattgtttggctgtctttcctactcagaagtgactgccaaataaaagaaagcagagaagttaggattctttccccagagctggcacattcaagttgggaatagatgggagagagtcaccaaccacctataataatgcattactcatgaagttgatctttgaatttaattggacctagaggagaataaaaccacagataatcaggaaagaaaaatgctctctgcatctataggtggcatttattctactgagaaatatttattttactaagaatcactaatctttagttaaaataagtaaacagcagcccactatactaggaaatctttaaaagatcgagtcttatttaacgtcttgctctagcgcatagtaaatgtcctggaaatgtttgtgaagtgattataagtaaaataagtgcaaaatagtttctgataaagaaaaaggaagcatttcacttatttattaaaaaaatttagaattagtaacataaatctgaattcaaataaaataacactttagaaaatattggctccccgtttagataatgctggaagacagacagaggaggaaaattttaagaaggatattacggataagggagacagttatggagaaggagaggaaaagagaagggtagactcagaaaatgagggattcaaaggatgaaggtaaaagaagagagagccactggaagacaaagatctacatagatgaactgacaaacacaaaaaagattgagaagacccaa

SEQ ID NO: 241151 - DNA, 1000 bp, Homo Sapiens
  misc_feature (57)..(93): n is a, c, g, or t
ttggcactagtcgtggcgagaggggcggggtggccggggctggcgctccacttggcnnnnnnnnnnnnnnnnnnnnnnnnnnnnnnnnnnnnngatgagggtatatattcggagcgagcgcgggacgccgatgagtggccgcgcggaaggagctggagacggtcgtagctgcggtcgcgccgagaaaggtttacaggtacatacattacacccctatttctacaaagcttggctattagagcattatgaacattaatgacctcaaactcacgttgtccaaagctgggcaagagcacctactacgtttctggaatgagcttgaagaagcccaacaggtagaactttatgcagagctccaggccatgaactttgaggagctgaacttctttttccaaaaggccattgaaggttttaaccagtcttctcaccaaaagaatgtggatgcacgaatggaacctgtgcctcgagaggtattaggcagtgctacaagggatcaagatcagctccaggcctgggaaagtgaaggacttttccagatttctcagaataaagtagcagttcttcttctagctggtgggcaggggacaagactcggcgttgcatatcctaaggggatgtatgatgttggtttgccatcccgtaagacactttttcagattcaagcagagcgtatcctgaagctacagcaggttgctgaaaaatattatggcaacaaatgcattattccatggtatataatgaccagtggcagaacaatggaatctacaaaggagttcttcaccaagcacaagtactttggtttaaaaaaagagaatgtaatcttttttcagcaaggaatgctccccgccatgagttttgatgggaaaattattttggaagagaagaacaaagtttctatggctccagatgggaatggtggtctttatcgggcacttgcagcccagaatattgtggaggatatggagcaagaggcatttggagcattcatgtctattgtgtt

SEQ ID NO: 241152 - DNA, 1517 bp, Homo Sapiens
ttgggtcacaaaacacctaacagatgtgcttagaacagaggacagagtgttttctcaccgaacaggcatgtccgatggaccccaagcgctgtcaccgtgggcccgatcactgtcgtcttcccgccatcgccggcagactggcttttgtcttttgccgtctgcttgtttgcggtcacaagatggcacaggcctccctcatgagcaaatttcaaggcagggtggggctcggcagtagtggccagaaaggccttgccctagcgtggctctctccctccgtcagcacacagaagcttctccaagagccacccccacccctcctgctccacagacttttccagacccctaagggcctcctgcctcccctaggtgtaagggaggctgggacaaggcctattgggaaagggggatggggtaactgtggctggcttcctccctggactgggcacggggccacctgagcaatgtggggagaggagaactccgcggtggggtgggcagctcaaaatgccacacctcccgggctgctcctccagctcggccacctggtaaagcatgcacctcccgcttcagtgtcctcatctgtaaagtacacggccagtcctgtcctcgcagatgtgctgtgagaagcagatgagggagctgtgtcaggcaccaggggaggacctgggctcctgaggacaccgagttcgtggtgtgtctgccctgctgctgtcttggttctctgctcagctctggaacttggtgcagctcactctccctctgctcctctccctgcaggctgtgctgcaggcgctggggtccgtggtggcagtggaggagcgctcgctcacagggacctgggatttgagcatgctgcaccgctggagctggaggacggggcctggccgccacagaggtgacaccacctctccctcgaggccaccaggaggccccatcatcaccgtccacccaaaggaaatccggacgttctttattcactttcaacagcagtgagccctgggcagatgccccgtccccagggcttcccccaggaactccatgtaacagaacagacccaggacagggaaaagcagtgcggagggatgggactggggagtcagctgctcatctgcaggctaatggcaggaaatggtcatatttggggtttttccctaatttttttaaacaaaaattacattacaagatccaggttcttcccccccacactcaatcaagccagccctctcctcttctgtcacgtaaaggatatttggcacactcatgcgtcattcattcacaaaacacaaacccaggactttctgcctaaggcagaacacaagactcacagcagcaccgaagcgcatctgccgtccgggccctgccaggcttgccaggctgccagtggtaactgtggacctactgcgtgccacgtgttttcatagactcatcccatgctggcaacagccctgcaaggggcttggctctgccacagggcaggagaggaagttgtagcgcctagcgagagttccagccccaga

SEQ ID NO: 241153 - DNA, 706 bp, Homo Sapiens
  misc_feature (457)..(470): n is a, c, g, or t
ttggcttcggtcctctactcaagagctccgtctccgtctcgccctcctcgaagtcctcgtcgcgcgcccgcgacccaggtcgccctgaaatctagcccgtccgagcgcgagtccaacggccgcggccgcaccaaggccccctcagaccgtgccatgggtgacagtgatgacgagtacgatcgaaggcgcagggacaagttcagaagagagcgcagcgactacgaccgttcccgcgagagagatgaaagacgtcgaggggacgattggaatgacagagagtgggaccgtggccgtgagcgccgtagtcggggtgaatatcgggactatgaccggaatcggcgagagcgcttctcgccacctcgccacgaactcagcccgccacagaagcgcatgaggagagactgggatgagcacagctctgacccataccacagtggctatgagatgccctatgctnnnnnnnnnnnnnncccaacttatggcccccctcagccctggggccaccctgacgtccacatcatgcagcaccatgtcctgcctatccaggccaggctgggcagcattgcagagattgacctgggtgtgccgccgcccgtgatgaagaccttcaaggagtttctcctctccctggatgactcggtggatgagacggagggccgtcaagcgctataatgactacaagctggatttccggaggcaacagatg

SEQ ID NO: 241154 - DNA, 1303 bp, Homo Sapiens
ttggctaattcttccaccatacccaaagcatctaggagacactctgtcatttacatttacaaataatggatgcagagaaatataatcaattcttgattgtcctggatacaaattatagtcactttttataatttgaataaactatgatgagggaaggaaggccatgtttattacattataggcaactatcccttctcaaaacataacttgatttatgttttgttttattttttagtagggaaccaaaagcttttggtctgaaaaactcaggtgctgatttgtcaggtcagcctgagagagtgcagagatactgaggtcagcttagggagaagaattgtatggaagggtggaaatgagggttcagtcttaactatgtgtccaagaccttatcctgagagtcttcatggaataatctagaaagggctgtagaagcaatcaaactctaaactgcgctctagactttgtcaatactttgcttcgtaagaattagggattttcatatcagagtgataccatgttgcaatctctttagagaagagagagcctagcagggaataggctagtggaagaaaaacatacttgagatggttacccattggtccctgcaggcatctgggccacccttttcctgtaggtatatattctgccgttgtgaaacaactatattattagatgtcagcaaactataatcagaaataatttttaattatagtggcaacttgattaatgaagctctcatatacaacctcacaaacaaaaagaaactttattacgtgaaatagtagcatatgtcattgggtttaaaagcaacatgcctgcaaaacatatgataaaaaatacctctgtaagggtttttatttgtccaccttcgatggaaggtaaacatggctgatcccagccaagatgaaacaatagccctttgtctcctcagaacaacctatctccaactctttgtccactgttcttaccccaattaaaacaagaaagcatgtgctaatccttttttaatttttatcaacctgccttggcctcctttcactgtactccattattccttctgtgatgttctaccttcttcaccttttgagaccagggtgagttgggagcagtttgcctaccttcttttagaatctggggcttatcttttagtacaagccattgaataagcctcttccttttttttgctcaaacattccacatccttgtggattcccctgcattgtttgttttatataacatttgatatttgttgtagcttgtatatgaacataattttctttagaggtagtcactgttctctcca

SEQ ID NO: 241155 - DNA, 935 bp, Homo Sapiens
tcagtccattgatattaaatacaaaatgaaatgattgtaaaaaataataatatacacattcaaagagcttattacagtataaaattattgaggtctgatcagctgccaacttcatcttctgtcacaggggaaggtttaggagttcctgggattttttgggaatgtggagtgctgaggactcttgatttatccctagcacataaggatgagtgggctgggagcaggcagggacaggttgggtgggtaggggacaaacagtgattgcaggggaccacctcactcagccagggggtgaagctttttattgacacagaacccacccagtttgagggtctagcaggctagcaggcaggaagagatgggcatctcggtagacagggccaagctgcataaaggaaccatccagcaaaagaaaaagggccccagctcatcctcccagggaggtattttcttagtggttttttctttctcatacctgggctccccctccttccttctaagattcgtaccgattgcatttggctctggctgctcagtgagttcatctctaccctccgcctcccatccctgggatagtgaaagcaaagagagagtatggaatcacagtggaggtctgttccccaaattggccaagtaaatgtagaaaaatcatcggataagggaaatccatgctgagctaacccagtgtcaccacaaactaatacattcttggctccaacaggtggcaactggaaggagataagtcattacttaaggaaggggccctgtggcaggaacatggaggagatgtgtgtgtgtcctcttccaccactctgtagcctgacaagaggagacatgatcaccaacccaagctagtccaggataaatagtagggtccaagaagcaaggagtcctgaactgcaacacggagccccaggaacttctggaaaggccaa

SEQ ID NO: 241156 - DNA, 840 bp, Homo Sapiens
atgagccaccgcctgtaattttaatttttaaccaaactgagaacttgaggattgaatgcaggtaacgggtggtgttcatgtggatgtggattccatgaaagagggctttgtcctcactgtcggttctccacatgtaggtcctttgactcagcaggccttaggcctagtccacaggtgctgagtgaacagccccagcgtctgacagctccttagcttggggtgcacaggcagctgaagcagtaggatggcagctcagacttcccagggccccacgtgtgcagggctggcctcccagcaccaccaggcagggccggcctcccagcgccaccaggcagggccctgtgagtgtcccctccctgacacacaccttgtagagaggctgggcctgggcaggctgctctgctgcaccacatcccattctcaagagggtcccaggtcccaaaggaagcctgtagcccagtggctttctggaggtttgcatggctggcaagcctgggccggctgctggagaggcatcaggacaggagcaactctgctgactgctcccctcagcgagctctaagagtctttgggtgggaggcacatcacatccctgtcactcctggctggccctggaatgcctcagcccacacaccccactccagccagggctgtgggaactgtgtctgctcaggtacaaaaggctttgtttgttcttggacctcttggttctggtctgggcttcccacctcccatgctgtgagccccacgggctgggaccgcaacttgccatgtgtctctcaattggcaccaagtggacgctcgaggcttatgttgaaggagtgagagccaggataggcc

SEQ ID NO: 241157 - DNA, 916 bp, Homo Sapiens
aacacacatgtaggagacagttaagatctattcagtctgtgataatgtctagagctcatttgggttcatcaaacccctgccatcagctccaaaagcccttagccaaaaacagtgaatcactcatcaaaccatcagtgtcttcctcggcagaatcaagggttggacagaaagagtaaatattctgcacttccacaaaataaaactaaaatgcaattgtcctgcatctgagaatacaagggtggacagtatgagctgcatgactgtgaaccaatgaggcttctcttggcctcatttgtaaaaaggagattaactctgtagtcccgcctatattgcatggcctccagaaaagcaaatgaggtggtaagtgtaaattaaaagctcctctcctttaagaggggaacaccatgaggggagagtaagaaaaggagaaggaaaaggctctttccagtgaccaacacgctgaatttgatgaaaatccataagaggttatgctaaactgagaagcataagggtggatctaccattgccacctcctctttgtagcaaaaaaaatcttaacacggccccctcccagctgttgcactgaggtgactaaggatacattttgaggaagtagctccaagaacatttccattttcactgtgccttcacatacatctaatggaaatgaacagcacccttcatccatccacggaagcgattaagaaaagggtgggatggaaaaattaacccaacaatattagatcaatacgtagtatttaagtgtccataatgtgccaggctgaagatgcacgggaaaaccacactagccggtctgtcaagggcttgagaataccataaacaagaaaacagacccaaccaatttcagacagctgctagaaggaagataaaatccaacttttttgtacaaagtggg

SEQ ID NO: 241158 - DNA, 1659 bp, Homo Sapiens
gtagcaaaaaaaatcttaacacggcccctcccagctgttgcactgaggtgactaaaggatacatttgaggaagtagctccaagaacatttccattttcactgtgccttcacatacatttaatggaaatgaacagcacccttcatccatccacggaagcgattaagaaaagggtgggatggaaaaattaacccaacaatattagatcaatacgtagtatttaagtgtccataatgtgccaggctgaagatgcacgggaaaaccacactagccggtctgtcaagggcttgagaataccataaacaagaaaacagacgaaccaatttcagacagctgctagaaggaagataaaatgagacaggcaagtatgagaggcgcgaattcctgagtggatgacgtaggtctctgagaggtgacttttgagcccgtatctacatggtaagtgcctcgcagtgacctggggccgtagcgttaccatttaaagcacagaccattaaatgcagaaattatcaacaaaatgagaaataggaatttcaaagtctcaaagtgaacgacggaaactgaaatctacaaattagaaaaaggcgcagaattttgaatattcttgtcgcccaatcaggacaaggctgggacccggctgcgcggccttcgtccaaaatacacagaacggctggtatccacaggaggccccatcgcacggcagaactggtgaccggacacaaaagctgctgccaagcgtcagtcatacagagctgtcacgcagtgtttgcggaacccgggctgaattgtgtcctggagttctcttaaatgacagccgaactcagccacttcgttttagaatgaaacagacccaaggagccaccagggcgcgtgtggggcgggagtgggggcgggtaaagaggcggattcccaacagcctaattgagaaccgactcctgggaaggctaagcagcacaatgagtaaagacacgctctagattcaaaagcaaatccaatgacgcactggggacctcgagttccaaatagttaaaaagctacgtatgccatttcccatgaccttcacactaaaataacttactttatgaaaagaaactaagggaataagtgaacaagctcttttctagtgattaggtgggtggctctgaaaagagcctttggagtcaagcagccggcgactcgagcgagcgagcgccaggtcccggcagggactcacttggagctggtgtacttggtgaccgccttggtgccctcggacacggcgtgcttggccagctcgccgggcagcagcaggcgcacggccgtctggatctcgcgggatgtgatggtggagcgcttgttgtagtgcgccaggcgggaagcctctcccgcgatgcgctcgaagatgtcgttgacgaaggagttcatgatgcccatggccttggacgagatgccggtgtcggggtggacctgcttcagcaccttgtacacgtagatggagtagctctctttgcggctgcgcttgcgcttcttgccgtctttcttctgggctttggtgacggctttcttggagccctttttaggggccggagcggattttgccggttcaggcatggtaagacacagtacaaacgcgccttttttgtacaaagttcctttttaaggtaaagcattgctcatcaatt

SEQ ID NO: 241159 - DNA, 532 bp, Homo Sapiens
ttggtcattctcactgctgttattgttttctgacagcatgcctgaaccagctaagtcagctcctgctccgaagaagggttccaagaaggctgtgaccaaggcgcagaagaaggatggcaagaagcgcaagcgcagtcgtaaggagagctactccgtgtatgtgtacaaggtgctaaaacaggttcaccccgatactggcatctcatccaaggccatgggcatcatgaattccttcgttaacgacatcttcgaacgcatcgcaggcgaggcttcccgtctggcccactacaacaagcgctcgaccattacctccagggagatccagaccgccgtgcgtctgctgcttcccggagagctggccaagcacgcagtgtccgaaggtaccaaggctgtcaccaagtatacaagctccaagtaaatgtgtgcttaggtgctttaaaactcaaaggctcttttcagagccactcaagtctcacataaagagctttaatattgaatttcaccgttttctagggaataatttttccgattt

SEQ ID NO: 241160 - DNA, 798 bp, Homo Sapiens
aacaaaaaagggaaaacgacttaaagatacaggttaaaagccgaaggggtgtagaaccaccccccgcctccttccctccatccctcccaaatatcccagaacgagtcaaacctttcgaatctcgtagcacagataacaagcaactcagtaagactggacggggatgactgagggccaactcattacaggactacaggaaactccttagtcctaaacccgaatgcatccgtgaccatggtaacactccctacctgaccaaaagctatcaaacgctctgacaagtgtttacagctgctttctcgattactgaagtggctctgaaaagagcctttggggttaggtggttgatctattgcgtcccttgcacactcttacttcgagctggtgtacttggtgaccgccttggtgccctcggacacggcgtgcttggccagctcgccgggcagcagcaggcgcacggccgtctggatctcgcgggatgtgatggtggagcgcttgttgtagtgcgccaggcgggacgcctctcccgcgatgcgctcgaagatgtcgttgacgaaggagttcatgatgcccatggccttggacgagatgccggtgtcggggtggacctgcttcagcaccttgtacacgtaaacggagtagctctccttgcggctgcgcttgcgcttcttgccgtccttcttctgcactttcgtaacagcctttttggagcccttcttgggagcaggagcggatttcgctggatccggcatttttgcgcgaaaaaagagaaaagagacttaaagaagccaatcccaa

SEQ ID NO: 241161 - DNA, 929 bp, Homo Sapiens
tgcctggtgggtgaatatacagtggtgaacaggacagaggttccccagtcttggggaaggcaaagtgttgagcttactgggccacaattatcaaatttttttaaaaccagactgtttacataagttaaggggaaagttctttctacaacaattagcttataataattcagcatatcattttacagagataaagcagttggaaaataaatactaagtaatttgtcaagtcttagactgtattaagttgtagtttctacaagggaagggatcttatctgtttaacttgatcagtagagcattcactgcagcataatgtgcagataaacgcttgttacagcaagcattttctgatgatgacaaatgatagcacaaccatttaaaaaaatcttgaaaaagaaaagaccagaagatgctggactctgagggaactgtgtgttccctgtgagggttaggcaaccttttctagacagtcctcaaaaaatgatggtgttcaaatggcaaggtaaatcccaatgagaatgaaaggttgtagagataccacgtttcgaaatgtcaacggtgtgatgctcgaggccctccttggggtgacaaggcacagatggactccaaagagaacctggcacttggcagggcaccccaactgcatgggaagtaggaaagcaaatgtctggggggctgcaaaccactgacaagctggcagcctgtcaaagcagccttggtcactaacgagcacagtggttgacaggcttgactcagcaccatcactacaggtagcctctgcacatcgtttaacctctcggagcctcggtttcttctccgtaaaatggaggacaactgtgagatctttgtgaggattaaaggagagaatcaccagaaagtgttcagtaagatgctaggcacacaaggagggcttaaaatgctatctccaa

SEQ ID NO: 241162 - DNA, 2593 bp, Homo Sapiens
gggatggggctgaaaattccaatgctttaaccacatgctttggtctttctggcttgcccaactccttccttgaaaactaagggcccaccatgggtaaccttgttagcataaactcaggcatgggtgaaaagggcttttttatgaatacaaaagacactcctatcaggaaactctagaatttttgaagctgtgtgctaggaactaggcacaaaatccagatacattctttattgtatcacaactggtatatgcaacagtgataaaagtttaagtgagggtatgtgaggttaaagcacctagaccttcaagtatctttaaggctaaagcccaaggaaaaagtcttttgatttggcaagaggatactcctgggtgggggggagaaaggcaggctcagaaggaaaagacaacagcctcatataaatatgacaacagttataatctgagcctttggagagcttgaagttctaatgaaagggttggctggctgctggcatagaggatgtctgtgtcagcaggggcagaaagggttttgtatacagaggaaacagacaggacgtggatgagttggaagcaccgagagcaagatcacagagttatgagaaccaaggggaaagtaaagagctttgctttgaagacacagaggattccttttttagactggaaggaaaaaggaggagctaattggaaaaatacaagaaaaaaaatacaagttgacagaaataagatgcacataaagtggatgacagcaactatttttaaaggcaggctgcctgcagagagggagttcagcaaggcaagactttatgaaagggtttgcagtcttgattgatttcaagaagtccaagaagcaagggaaggaggaatagggaccatcaagggaagaatggatgtgagtgactctttctcacggtgagccgagtctttaaaagcgattgccagatgatctccagaagtttcttttagaattattattcaggattctatggcttctggatgagaacatctcattgacaataggatggatcctagctccacaacttcctggtgtctgcattgtctaaaaagaaaaacatacgtgggagagcaatgtctcctaatagttacaatcattgcttaaaagagttaggggaaaaaaggggggacctgtatctgggaaggtaactattgccagagacaattttttggtatttatttataatgcatatcttaataattagagctaaccccacggttggcttggccacctcttccctacattccccccagggttggggtgtagggttcctctagtgcaagggttctcacctagggcagaagacacatgataaagtctcaagacacttttaattgtcacaactgggtggcatctactgggtacaggccagagatgctgctcaacatcctacaatgcacaagagagccccaaacaaagaactgtctagccccaaatgtgagtaagtatcaaagttgagaaatcctgctttaaagaaagaacctggtggagagaaccaagtatatctggagggaggatatcctggtggaatatatcaggtatatcttggtaggtagggagggctttggagaggtgtggcagacatccttgggtggccagtgcaacccacgtccacagtcatctttgtagccaccttcaagttacaggtaaccacatgacatttctgagcaatgaaatggaagaaaatttgcggatgaaacttctaataaaatcactgtgttcttgacctttgggtatcttttccttcttcctgcttggattgcaaacctgccatctggaggcaccgtggccgctttcagggccataagtactcaaattaacagctaaagagggtggagccaaaagccaaaggcagaaagatctgtgaacccaggggaacgtttgacaatgtctgaagacttttggttgtcactgggagaggagggctagtggcatctactgggtagagactagggatgctgcgcagcaccctacagtgcatgaatctggggttacctgcctgaggatcacttgtagtgggggcttagggggctgaccagctgtttaagctcctgtgagctgggtttcctttatttgtgtctgagttaatttcaggttgctacagtaggagaagttctttgattcaagcctgttacagggctatttccagacaacgcctcctttagatgacttttaccggcactttccaaggtggtattgggtttccagtcccatccttgaagcagggagaggataaccattcctttgcttcttttgccagaagatgccaacaccaacggtcccctccacccacgtcacctgtgggttcggctgggtccaagatcacaggcctggttttctgcaactggctcagtagaaacttcctcacggtctcatcttcaaagttgtaattgaccttccagaagatgcagagctgctgatattgtgtgaccagctccaggactgtccggaaaccttctgcagtgtcaaaatccggcactccactcccctgctcccaggcatagatggtgagcagctccaaggcatactttgggggcaaagacccctttggcttcagtttcctttcacactctttgccaa

SEQ ID NO: 241163 - DNA, 804 bp, Homo Sapiens
  misc_feature (139)..(147): n is a, c, g, or t
ttgggatttgcatatcattatactaaatgcaaatgagtcgcttaacccttgacaaggtcaaagaaagctttaaatctgtaaatagtatacactttttacttttacacactttcctgttcatagcaatattaaatcaggnnnnnnnnntgcagggaggtatttaacagctgagcaaaaacattgagtcgctctcaaaggacacgaggcccttggcagggaatatttaaagcaacttcaagtttaaaatgcagctgttgattctaccaaacaacagtccaagattaccatttcccatgagccaactgggaaacatggtatatcatgaagtaatcttgtcaaggcatctggagagtccaggagagaagactcacctctgtcgcttgggttaaacaagagacaggttttgtagaatattgattggtaatagtaaatcgttctccttacaatcaagttcttgaccctattcggccttatacatctggtcttacaaagaccaaagggatcctgcgcttgatcaactgaaccagtatgccaaaaccaggcatccaatttgtaaaccaattatgataaaggacaaaataagctgtttgccacctcaaaactttatgaacttcaccaccactagtgtctgtccatggagttagaggggacatcacttagaagttcttatagaaaggacacaagtttgtttcctggctttaccttgggaaaatgctagcaacattatagaaattttgccttgttgccttatcttcttccaaatgtactgttaaataaaaataaagggttaccccatgcaatcac

SEQ ID NO: 241164 - DNA, 543 bp, Homo Sapiens
actttgtacaaaaaagttggcgcaggttcttggtgaccctccggattcggcgcgcgtgcggcccgccgcgagtgagggttttcgtggttcacatcccgcggctcacgggggagtgggcagcgccaggggcgcccgccgctgtggccctcgtgctgatgctactgaggagccagcgtctagggcagcagccgcttcctagaagaccaggtcatgatgatgggcagcgcccgagtggcggagctgctgctgctccacggcgcggagcccaactgcgccgaccccgccactctcacccgacccgtgcacgacgctgcccgggagggcttcctggatatgctggtggtgctgcaccgggccggggcgcggctggacgtgcgcgatgcctggggccgtctgcccgtggacctggctgaggagctgggccatcgcgatgtcgcacggtacctgcgcgcggctgcggggggcaccagaggcagtaaccatgcccgcatagatgccgcggaaggtccctcagacatccccgattgaaagaaccagagaggc

SEQ ID NO: 241165 - DNA, 914 bp, Homo Sapiens
atttctccaatcagttatgagaaaaggaaaggtaggaaaaagaaacagggaaaatcttagaaattattagctgctcttacaaaagtttaggtcaaagatttaagaaagataaaaccgacggctaaatgtagacttcattaaaaattaccaaaagacagttgtatgctgatcatagagttttcaactatacatagaaccataacattttgttgaaataatactgtggtatacatctatattcttatatgcaaaggccagaaactgtctctggttggacctatttacatctgtaaaagatgaagcagtagacctttctaggaagctggaaagggtatgtaagattatatatttacatacctatccatttattttacgaagactaactcttagaagactactcaagcagttacttaagtcaagctggtaattgattaggaagtaggcataagcatttaggccagaaaaaattggtcctatcaatttgagtattttactatgaatacattattttctatgaaaatatcttatgtatcttaggtaagtcacttatttacaaaacattttacatttgtcacttaggcacagcctaagtcatctttacctttcataactgtacagtctgcagcttgctgtggcccacatggagaagtaagcaaagactttatacctctattttatgatataatcacctatgtattactcttctaggcagtaggaacatattagattacctctatagacatagaaaatttctgagtcaaaaggaaaacaaaatcttactacattataacaaggtaaaggtgaagggattcattctatagcagcgtttcacatctgcagttcatgaaactctcatgtttcatgaattaatatacaaataaacacataaaccctgaattatgctagtttcttct

SEQ ID NO: 241166 - DNA, 878 bp, Homo Sapiens
ttgggtagaggcggcggcggcggcggcagcgggctcggaggcagcggttgggctcgcggcgagcggacggggtcgagtcagtgcgttcgcgcgagttggaatcgaagcctcttaaaatggcagatgacttggacttcgagacaggagatgcaggggcctcagccaccttcccaatgcagtgctcagcattacgtaagaatggctttgtggtgctcaaaggccggccatgtaagatcgtcgagatgtctacttcgaagactggcaagcacggccacgccaaggtccatctggttggtattgacatctttactgggaagaaatatgaagatatctgcccgtcaactcataatatggatgtccccaacatcaaaaggaatgacttccagctgattggcatccaggatgggtacctatcactgctccaggacagcggggaggtacgagaggaccttcgtctccctgagggagaccttggcaaggagattgagcagaagtacgactgtggagaagagatcctgatcacggtgctgtctgccatgacagaggaggcagctgttgcaatcaaggccatggcaaaataactggctcccagggtggcggtggtggcagcagtgatcctctgaacctgcagaggccccctccccgagcctggcctggctctggcccggtcctaagctggactcctcctacacaatttatttgacgttttattttggttttccccaccccctcaatctgtcggggagcccctgcccttcacctagctcccttggccaggagcgagcgaagctgtggcccttggtgaagctgccctcctcttctcccctcacactacagccctggtgggggagaagggggtggtgctgcttgtggtttaa

SEQ ID NO: 241167 - DNA, 1006 bp, Homo Sapiens
gggtgagcctgtgggtgctcctacagtgggaaggaaggggggctggcactggttgggggaaaaggtaagggctggggccatactgtgcagaatttttctgtttgccgttttccagggtgggacaatccgtttaaaccttcatcatgttatcaaggctctctatgaccctaaagttaagaatcactggcatgaacatgggaaaaagttattttggggttggatttttacaaaacagcctttctgcaaaagtgcaggaattctacaatggcaagtaagacattttatttctgtaattgaacataagcaattccaaatgcttttctaggcaagacatgccagcgattagaaaatgagacagcttaaagacagaggtacatttaacagagaaaacacgcctggaagctcggccggccccgcccatgctggctcagttcctgcccctggagggaaggggccgaggggcttcccgtcccagggaactcccaccacaggagtctgcagacgggctggcctggcagtcagtcccaggaacactgaccatccccttagggaggcaccacgccctggggagcacagttccaggccagggccatgggtcttgccctgaagaccctccctcagggaccacgcgccctgaccctcattgcctcaccatattataaaacactaaaaccgcttaagttcttccccacagagttggggaactaattgtaaacagaatacacgtctacatatcagccctgagacagctggccccgctgcacacgcagcctgctggccccagcaagacacggtcagagctggtaagtgctctacagcattcagaaatctgaccacagcgtacacacagctcacaagtcagtgcaaacagaagctaatgacatcctccaagaaaattccatacagttatgacaatggaaaacctgttatacattgtaaccatacatcattagcaatgtttaatacatcttactataaacactgaatttctaagtacatgatccaa

SEQ ID NO: 241168 - DNA, 1058 bp, Homo Sapiens
gagaaaccctgcaagctcagggccgctaccccaaagccttggctccactgattatcaacgggtattgtagagacattcaaagttagtgttacttgatcattagtttaacagtttttggaaagggggagaaacatatttaaaatgtttgcattatttccttcagaaaaatcataaaatttggaagtattatcaaagcgattaaaaatcacaagatttcattactgtccaacacaaaaataagttaatatctgctccccaaagtgcactgcaaagccgattttgctgttttgacgtaagcattggtagtcccttacctgccggaagggatcttttgggcaagtgacagcggggccctggggccttcgactctaaggtgtgtgtggggacactgcccggcctgtccctagaacaaccttccaagttagggcatcataaggagcataaatctatgagccgatccagtattttcttaggacactttgggagaagttagagtctgaactggaaagcactactcccaccctgtcttaaccggcgagtgcccctcagaggccacggccgcgcgagcaagtcagtggctacacagctcgtttcccctgggtcctctgtgtagttaactttgctggggaccctgatgggagaagggacagccaccagccagtgaaacttccagtcagtgctcagggaggcgtgggaccctgcagggccacacacccctgaaccccacgcttacaggtcacaaaaccacggagtagccactctcaggtccaaagacactgcagtttttaccaaggcataaaagatgccacagaaaatttaacaggagcctcagcagcagttttcaaggggagttctgtaaacttctctgcaagatggatgtgtcccccttaggttattttaagaaaaggccataaaaaagcacctgctgctgaatgttctctccctccctcccagacaagcagcccctcaggacacgtgggcaaaggcacacatggtgcccccttctcagggtgctccagacttcccagggtcaaggatccctcaaaaaaagaacccaa

SEQ ID NO: 241169 - DNA, 1916 bp, Homo Sapiens
ttggctcgggagccggagctttggaacgaggagtggcgcccattaagcgtcaatacctcaccaccaaggagcagtttcaccaattcctggaagccaaagggcaggagaagacttgccgggaaaccgaggtaggagaccctgctggcaatgagctggctgagcctgaggctaagcggatccgactggaggatggacagacggcggacgggcagacggaggaggcagcagagcccggggagcagctacagactcagaagagggcccggggacaaaacaagggccggccccatgtgaagcccacgaactacgacaagaacaggctgtgtccctccctaatccaggagtcggctgctaagtgtttcttcggtgatcgctgccgctttctgcacgacgtggggcgctacctggagaccaagccggccgacctgggcccccgctgcgtgctcttcgagaccttcggccggtgcccctacggcgtgacctgccgcttcgctggggcccacctgaggcccgagggacagaacctggtgcaggaggagttggcggcccgcgggacccagcccccgtccatccgcaacggcctggacaaagccctgcagcagcagctgcggaagcgcgaggtccgcttcgagcgagctgagcaggccctgcgccggttcagccagggccccacacccgctgccgctgtccccgagggcacggcagccgagggcgctcccaggcaggaaaactgtggtgcccagcaggtccccgcagggccgggcactagcacccctcccagcagccccgtgcggacctgcgggcccctgacggatgaggacgtggtcaggctgcggccctgtgagaagaagcggctggacatccgtggcaaactttacctggcccccctcaccacgtgtgggaacctgcccttccgacggatctgcaagcgcttcggggcggatgtgacatgtggagagatggccgtctgcaccaacctgctgcagggccagatgtccgagtgggccctactcaaacgccaccagtgtgaggacatctttggcgtccagctggagggcgccttccccgacaccatgaccaagtgtgccgagctgctgagccgcaccgtggaggtggactttgtggacatcaacgtcggctgccccatcgacctcgtgtacaagaagggtgggggctgtgccctcatgaatcgctccaccaagttccagcagatcgtccgtggcatgaaccaggtgctggatgtgccgctgactgtgaagatccgcacaggcgtccaggagcgtgtgaacctggcgcaccgcctgctgcccgagctgcgggactggggcgtggcactcgtcacgctccacggccgctctcgggagcagcgctacaccaagctagccgactggcagtacatcgaggagtgcgtgcaggccgccagccccatgcccctgttcggaaatggggacatcttgtcatttgaggatgccaaccgcgccatgcagactggtgtcaccgggatcatgattgcccgtggcgccctgctcaagccgtggctcttcacggagatcaaggagcagcggcactgggacatctcgtcgtccgagcgcctggacatcctgcgggacttcaccaactacggcctggagcactggggctcggacacgcagggcgtggagaagacccggcgctttctgctcgagtggctgtccttcctgtgccggtacgtgcccgtggggctgctggagcggctcccacagaggatcaacgagcggccgccctactacctgggccgcgactacctggagacgctgatggccagccagaaggcagccgactggatccgcatcaggctctttgaacctgtatcattccccagaccagagaaagaggtgtttccagctccagcagcagtttccagatggcccatgcgg

SEQ ID NO: 241170 - DNA, 709 bp, Homo Sapiens
  misc_feature (81)..(135): n is a, c, g, or t
  misc_feature (146)..(194): n is a, c, g, or t
  misc_feature (341)..(435): n is a, c, g, or t
  misc_feature (437)..(456): n is a, c, g, or t
  misc_feature (554)..(568): n is a, c, g, or t
tacgaatagcatatgctgaatacttgtacatttcaaattaaactaatctctatttaaagattttatagttattcagtattnnnnnnnnnnnnnnnnnnnnnnnnnnnnnnnnnnnnnnnnnnnnnnnnnnnnnnngactctgtctnnnnnnnnnnnnnnnnnnnnnnnnnnnnnnnnnnnnnnnnnnnnnnnnncatggataaaaatagacaaatattaaggcatattatcatgcattttcaaaatattgaagccaaaggaaaaatcctgcatgctgtcagaggttgagaaaaacaggtgttacacaaagactcaagagttaaatggggccatggctcatnnnnnnnnnnnnnnnnnnnnnnnnnnnnnnnnnnnnnnnnnnnnnnnnnnnnnnnnnnnnnnnnnnnnnnnnnnnnnnnnnnnnnnnnnnnnnnntnnnnnnnnnnnnnnnnnnnnttagctgggcatagtggtgcacaccgggttggagacaccagtgagccatgatttagccacgctccaaactgggcaacagggtgggaccctgtctcggnnnnnnnnnnnnnnngttaaatggcatgaaatttcttaacaccacactaggagttagaagaaaatgaagtgaggcccttaaaagcttcttaaaaaaattatttcctatctagaattctagatacagtgacagaggagagtattattttttccccaa

SEQ ID NO: 241171 - DNA, 951 bp, Homo Sapiens
  misc_feature (129)..(192): n is a, c, g, or t
  misc_feature (232)..(258): n is a, c, g, or t
aaaacccaatctgggggaaaaaattgcaacatgtgcaaagggttgatagccaaatttataagaattatttacaaagaaacatttttaattttttaataaaagggcaaaggccaggtgcagtggctcatnnnnnnnnnnnnnnnnnnnnnnnnnnnnnnnnnnnnnnnnnnnnnnnnnnnnnnnnnnnnnnnnatcaacctaggcaacatagcgagactatcatctctaaccnnnnnnnnnnnnnnnnnnnnnnnnnnntagccaggcaaagtggtgacaaatgctcttcacttggaggctccccatgatgagatgactgtacttcattttctttggagatattcaaagatgctaaaaagttctcaattccagagttaggctaaaagaataaatattttgggcatgaagatgaacgtataatacaagaacacacaaaaagctgagttttatgtacaaaaatggtcattcgattttcactcaatcatcttcccaggtgttaaagtttgggaagagaattggaataaatagttttttaccttatcaatagcatttggataaccagtcacaaccttttgggtttctgagacttctggactttcatttctcttcaatagcttaatattatatttggcaggcccttctaaagtctattaaaaaagtaagaataaactttttgtgcaaatatatttatagttaatatgtaatagtgttctaaataaattgttgcaaaaaaattttatgtgctattttcccttttgtatcataagaaaaggggcctataaacttggatggggaaaattacaccttaatcttcattaacctctcaatgagatttagcatttcctgcaattatgaatataggcaacaaaacacttatatggtctgcatgtttgtattcccccaaaattcttctgttaaaatcctaactcctaatgggatcatattagccaa

SEQ ID NO: 241172 - DNA, 2171 bp, Homo Sapiens
ttgggttgaaattaaacctttatagtgcttaacctggaaacaaatgtactacagccccactgaagccgctctatgggttttttgcttacgatgttttagcaacaggcatttattttgtagaatggtatactttctgctttgtctcctcatctttctccactggtttcctgggtacattttttttaaagggagagaagtttgtgagtttaatgttttaaaaaaactcccaagaacatggataagccggatttctctcatgcttatgattagggagttaggatttaaagatgcaaagcagaaggactgaaaggaatagccagtgaatatgtttcagtgggtgaggtgtgaaaccttgtctaatatagatgtgtcctatggcctgtgactgcttattctttatcaatgagaactcagcaaactagtttctttcttgatctgaggaaccacacagctcacatcagaatataatagtggaactagggtgacttcactccctttcacctgatgtctatcttggccttttagcaccttgactatccctgaaaagactgggtctttgttttcccagggaaaaaacgaagtgatgtagatctaagaaatagtgcctctttaatatttaattcttacatgacaactaacacacagggaaaaggctatgttaagttgattatagctcctcttaaaatgtcctatgctgtcagttggtcttagagacatgggaataaccaagcaatattcagacatctgcactatctggggacagcgctacatagtacaatgatgtcagcagttcagttacttggaacaattaaagattacccttaacagccatgttaatacatctaaatgctaaaatatactacgagtttttcatagtcttgaaagtatacagttaattacttttcaaagttactgtggtctcatgtttactcttcttgtatctgtgatatgcaaaaagatgaagactcttggcctccaggagtttacattctcatggtgctgttggttcaagcagattgctttagtttattaatgaacattgcttggctattaattatatcctatttggaaggatcccttggtgaacagttttaaaaagcagagggctgtgctaaatttcagggtattgatagcttgagtttacattgtattagccctgctcgttatcatttttttccccagggagctatgcaggtaatgctcattagcatgaatcagaaaagaaaccattctgcctaagagcatcttaaccatctccctaaaccacctatgctctcctgttatagttgtcagtaaatcacgaagaaaattaacagctccttaagactctacatccctcaattctctttcttttcccagagtttgtacatcattctctactcagatggaccaggatttgcatataagccttttaaaactgactagtggtcctaattttaacatttttgtgtatgactcctatcccttttctgaagcagcattgtgatagatgtggagcttctacctgcatttctaagcaattattaacccaacttttgagttgaaacttgcatggatccttgttatgtcccgtaattcctctgaatcaaggaatttattttgcatgcttattaaactcaaactgggtctgattgaaagtgcaagcaatagtgacaggaccttaactctggttttagagtacgaacattctaatgcatgactcaaaatgtccagtgttgtggttactagttattttatatatgcatttgttaataatgaagcaatacagactaagaccaatagcttgaatatattcagattattttcatgttttaataaaggatttttcttacttccattgaaaatgggaagtagaagataaacaggggcaactacaagacattcaaactgtcaggactagggcgtagcagtgcccaccctctaaccacttgcctggttccattagtccccaagcatgtttgaaaacaaaagacacaaactaagcatgctgaataaaactagctgctatggctgtaataatcagaaacgtgcagagtttcagaaagagtataaagtagggaatgccagtatggagtatgtaaaataactagatatggatatggggtttgtttatgatatgctttatgtagacaatgtttgaggtcttttaaaactgggatttgagttgaaaa

SEQ ID NO: 241173 - DNA, 720 bp, Homo Sapiens
aactctcaggctgaggcagtgtgaattacaagggggtgcctggacctacaccctcccacctttttttcagagttcttccttcatccaactccaaagcttaagagaatgagaggtcagatcatggaaaataatgaagctcatggaggcactcagcctcttcatgtccttgatctcattagaaccagaaaatcatcgatgatcaaaactggaaaacaggtacaaaattcttagtgaaaattgctccactgaaacgtcataatggtgatggagggattgtcccaaaaccaaaataccggaaaagacatgtactctaaagtatctgtccatgtactcaattgctacaactggtttttcctgtccttcatcaagtcaaagctagctgttcctaggcttttcttcttaaaaaccagttttacctgttatgatactttgcctgctatagctagatttttaaagacatattttccccatacttgcaaactggaaaacctgccttgttaaagtcaggtaactgggaatgtaattagcatataaatagatgttcaacgtcactatttatcagataattgctagttaaataaaatatttcatagctatcatattgagaaaagatttaaaggtctgataatgcaactgttggaaaaggaaacttatacactgcagaagagattgaaaattggtttgaccattctggagtggaattggtttatatgtttccaa

SEQ ID NO: 241174 - DNA, 2333 bp, Homo Sapiens
  misc_feature (1413)..(1421): n is a, c, g, or t
  misc_feature (2163)..(2172): n is a, c, g, or t
ttttaactcttcaaagtcatgcatacattcagctattatgcatctttaaaaacacaacacattctgggatacaaaccacaatgaacaattgtgtaatttaaaatgtataccttaaaaattaatatgtataataactaggcataaagaattatctacgtaagtaatgctaatgggtgaaagatctatgtaagattgaaaaaattagtcacaattcacttggaaagcctaaaggtgaataaaactaacttttatgtaaaatttaattttagagaggcattagaagtatctccatatttaatacagtataaaatgcactaagttggtatacaacgctatattgcatggtattattaccagataatattgttaacaacacagctcattactgatctcacttttcacttaaattatcccaagcccttaactatctgaagaccagttttcttaaatgttccaaggcctatacttcattaacaacactagtagcaagttagtttcccctccttgtattatttgcaaaaataattcagtaagcaaagctgtgtatgttttgaagtattatcaaaggaaggacttaaattgcagttatgcatgatacactcttcccctgggaagaatgcttttgcaccattatctgttaatacattcaatatgaataatatagatttaccatatgaagcaaaaaaccactttttcctcatggcaaaggacttaaatttagactaagatgcaattaatttatttctggcatttctgctaggcagaataattttatataggggagaaaaatttccactttcctattttgagagtttgaagaaaatgacgaccatatgtagctcattttcaggtaaacctgtaggcaaaaggcttgtcaggagggctttataccaccccagcctgctagaatattaggaaaaaaatcagactaaatggaaagattctcaatgaaatacacttaaaaaacaaagaatgtaactaggatgaccctttataagcatgtcaccaaagcaaaaacaatacaagagtattcacctgagataaaacttgtatctgaatattttataactgagtagacaaagcatttcaagaggaaaatccattgaaattagtttaaaatatacatctgatcctattttacaatatatgcaatttaagcaattcagatcaatgaaaaagtcttaaccaaaaaaatcacagtgtttatcaatgttaattacaaaatgtatgctacttgttttgtttttaagatgtaatggcttggttaagtgttttaaaatctattcttctgaaatctaacttgcataacaaaatcaagtagcaataatgtaaagcatcagaactggctcttaaaagattatttacatgttgattatttgggaaataaccaaccaaaaaatattaaaaagtgannnnnnnnnacacagtatgaagtcattgaagagattagacaatacaaaaagcaaaattctttcctgaataaatgaatacctgtggcactaagttcactcgctaatggactgtaacatggaactgccaaacatgcatttaagttatattaattacactttctgtttccaacttaggttgatcagcagctttgttctgttagaatccttcaaagagagaagctcaaacaggaaaaagaaggcatatataaaacagtaaacactgacctcctgaggttcctacaacataaaaatattcaagtagaaaatctacatcacttagcagcggctatttctgtagttgagcacactaacagcattttagtgtgtaaggagcagatgaagtaagccgtgctttaagcatgccaagaggcagaaacactggaatgtaacaaagacaaactcacaattttatagacattcagtcaacattcaaaactattaagactacaccacaagaattaagttgctttatatatatcccatgatgtattagattttatcagaataaatgctaaatcagagcttacctcaaaagataacttaaatggcttctgcaaattcctgttctacactatgtatctgaaatataaattaggaagaaacaataacctcaagggggaaaaatacacaaagaatcccaactcaaattcaggttgccagtcatatttacctaattttattttctattttcaaattaaatttcatttaaatnnnnnnnnnngtcaagtgactacaaaactgggtgcatttttaatagtgttattcatctgcctaactggaaactaatttttaatgagacaggtgacaatattgcctttagtcaatacagaattgtcaaccacaggttcaaataactttactgaagattgtcgtcggggacaa

SEQ ID NO: 241175 - DNA, 1828 bp, Homo Sapiens
taccataacattccatttacaaagtgtgtgcccagaacagcattatcaactgaaaaaggatagtggaagaccctacagattttttttaacttacgaattgtgcagaattatcttctggaagttatggcttccaataacagccatcttgcttgctctcgttcttacaatttagtcagctgagttcaagtgacccaagtataaatacccttcaagttgctagcaattgatcttcgatgaaacacaatgacaaagatattacatatgaaatggtataaatatgtgcctcctacctaatacgcaagtaagatcacctatagcctattatacatttattcatttttaaaatgaatcttttgaagatccatttattcacatttttccaagtaaatagaatattaactataactactaactataatcttttaaagattcattttaaaagtgaataaatgtgcttagaaattttaggggggagaacacacataacatacatataaccagaggtgccaagtattttaacatctcctaactaagggcagttaaaagacaaagaatcgattcctgttcacttctcctcccgcggacttaatgtccagcagagtgctagacaatattgcttcaatattctattactttaatattaaaagcagtaacaaaatcaaaaagcatatttatgacattgttttaattaagttaaaatcaaaattttaaaaagagttttatgtagcatttattttaaatatcattgggttctctgtttcagactttttcaacatgaaaggtaatttttaaactgtctcactgtcttgcaggttgtcccaagaattaggaacatgattacaaccacattcatttctagaatgaaaagaaagaattaggaccatcagactgttaacaactatcaaattttcacaggttcaaaaggtaattgacactctttaaaaaagaaagaaaagaaaccctaaccaactaaggacttggatgtaagatgaaggcttacaattcatactgatttattaaccattcatgcactttaaaagcactttaaaaatcccgttcatttgtcttccacttaaaaagaggaaaaaattggccaatatttgccttctacattatatctctgtctggagttttaagtagtaagtacattaaatataagtttgttttctaaacaagagaaaagtctggcggttcaaagtctagaggaagtcgggtttctaaggcagtccgtcagtgtggggcctgcaccactctctaaggccgtctttcctagattgtcagctgcaacacaagcctgagctggatgactaacaccgaacatgcaagaagcgactttaaaggaacagttttcacaatcagctagctacaccatcacaaattgccacattaaggtgatctttaggtacctgtgtcgtttaaagactttaataatagttaataccaaaattcaccagttactagcaaggctgttttggacaacatgtaaaatttcctcttttgaaatatacatctcaatgattaggagagatctgtaaggaaacaaattcacctcaaaactatgcaaatatttaaaaagtttttttaagctcacaatacttcagtatgtgttttcaaagcttaaacagttatcatgtgtgaagagtttatggggaatgaaagcaatatgttctaaaaattgactatggttttccaaagacccagagaaaaatactaaggtaatactcagcctcacgtccactcacacatcttcgggtgccaagctggcataggcagagcaccattatctcttataaggaacttagcacccaacttttttgtacaaagttgg

SEQ ID NO: 241176 - DNA, 1639 bp, Homo Sapiens
  misc_feature (484)..(494): n is a, c, g, or t
  misc_feature (1139)..(1174): n is a, c, g, or t
gtttatttttggcaggaaggaaatcattgcaaaccttttgattgacaatactcgcccctggaaacgtgcacattccgcatgtagcatttcctaagtaatgctggattgtttatcacattcaaatgtccagcagaaatccatgactacccagacaccagcatctccactacccggggtgggggagggtgtgtcagtctgcagagaagctcctgggagaatggaacaggaacagacatgatcaaagttacagtacagtaggaacagaggcagccagccaattttgcaaaattaactgcaagtacgtcaagccattcactcttctcgaaccctggcatgccaactgtccagcacagcacctttaaaagcagaggcacaaacgtaggattgtttgaccatagggctgtgtggttctggattttttattagaaagccatctttaaaaatacagggttgtaaaatgttgccaggttacagacttacaggnnnnnnnnnnnaacaccaaaagttcaaatgctgcaaccatgacaagtcagcatcattagggcatcctcgtgtccccagagacatctcatcaaaattgcaccacgtcaaaggagcttcctcaccatcaactgtggcaggtggcattcctttttcagtatgcaaatgcattatttacaaacagctaatgcatggaaccacagaccaacacgtaggattccagaacaaatggaagacagagcattaacaacattgggagtgcctgtgcacttccactggaggcctggccagagaagtaataacatcatagtgggctgcagtccacaaacccaaggtgtcctgtcccagagctcaatgtcaaaaatacttctccagaagactacatttaaacctggtacagaaaggagcatggaaactcaggaggtcagggttctcttttggctaaagagttgggggtattttggtaacatgggaagtatatggcacagagaagtggctaacaggtttcattaggtttcaaagcccacaatttaatacatggtaataattaaaaacaatacccgtatttaccttaaaaaacataaaccccaaacattcgtctcatttcttggccttatgttagaattctattgcttcatttacatgtagatgattaaaannnnnnnnnnnnnnnnnnnnnnnnnnnnnnnnnnnntttgattatgtacataaagcagattcaagggttaaaataaaaacagaattttggagtgtggtcaaataaggtgcacagattccagaaccctcagagggcctgctggccctctccagacattctgtgtccgtggtgcaggagctgggcccgtccctaacagctccgcactggcttagtgcagtggtgctcacagtttcaggaactactaggtgaagtgtctggctcaagtctgccaagtgtcttcactccatcgtcagaagtggagcactatccctaggttcgattcccatgaaatattttatgatttccatcctctttgcccgctcttccaaataaggccctgtgatgccaacgaagggggcatggttgagggtctaaggctctcattagggcctaattctgtgtggatatcaacacatgacagacacttgactgcaacattcaagacatttaaggcagtgccaa

SEQ ID NO: 241177 - DNA, 1999 bp, Homo Sapiens
tcatgcagtgcaatactagatatacaaacacaacaatgcaaattcttcttcaagactgaagacattgattagatataaaattcagtttaaaaagaacatgctattttttaaatgccatcacataaacaaagtgatttcacagggagaagaaagctgtataaagctgcagctttcaacaggttttaaacctggcattaaaatgtaatggcaaaaccaatattttttatattgtgaagggcaaaggttacagaaacggtcccaagaaaatctaacacccaaattttcctttgatagatagatgcctttaaaagggctggtaatgcagttacattataacagagaagtccaaactacaggtaaaaactacggcttgtactgtgaaaaatgtgcagcttttcagttataaaactagttgaacactggtttacaagataatccgtagaacagagagactgtagaaaaatattccagcacttgagttgtgtgtggcagcagcatttgagtccatgaatgctatggtcattaaaataattgattatactttcctaaagaaaagccattttttaatgcaaagtctactacttccaaatgttattccaaacattaaattttaacagtctatcaatcaataaatgttgaacattttttttctattttgcatgtataaatatcaagacaccaaaattatttatagctgggcattaaaaatatctgacatttttctccccgcaaagatacttttcttaagctcacactttaattatttgtagactgctgttaagctaaatagccccaaaggaaacttttaattcatttagagactgtcaagtttccaattgcattttaactagaaagccactttcaatagcgtgattgtcacgacaggctatgacggggaaaggtcgcacaatcttgtgggatgaggccagtgaaatagaagctttctctacatcaaaaacagggaagctgaaggctaaatgacccactgtctcacaaaaggcactgagtactatggtctcataaagtgtttttaaaacattttgataacttattttaaaaagaaaaagaggaaactgtggattatgtgagtttttgcagcaatctagtgattccttccagcaggcccctgcttcccaggtctatgagcaactactgctgggccaggccctggctctcaagggccgagtctcagtttaaggccagattaagggggaaaattcgtccgagtagacctggacgaggaaaatttggtatctgtagcttttaagggcacacatatccatattaaaatgcaattcttatctgaaaatttaaaatcataacttatagaaaggagttaaagtcatttacatgcttacagttagagaagtaacttgagatctgtagcttatatgccgcagaagttagccatcaacatccatgcttagttttaaagaataatacttggtaggttgtttatttttaactggcgatagaaagatgggaattactatttattcagtcataggacagtgccccacatcttgctgactgagcacagcgcaagcctgggaaattgctaccatctttgggagtcaggcctcactgacacagaccgttctgaatctctgaccgtgacgcctgtctctgggctactcaacagagctgaatagctgggaaggaagatggctcaacccaactgccaagttccttccaggtagggccatgaataggtgcatgaaaaggttaaaaattcccacttagttttggatattaagataaactgtcttccagcttcctggctcttgtccgaacctagagaatatacggaaatgtcaccctgtcagaacctcttctgcctggaattcttccttttgcagagtggagattctgacttcatggcccttcccaggcaggctcacccaaaggaaaatggagtgaagaaaatcaccagcaaatcttccctgccgagggaccttggaacaccgcatatcagtttacccaacttttttgtacaaag

SEQ ID NO: 241178 - DNA, 1248 bp, Homo Sapiens
  misc_feature (218)..(281): n is a, c, g, or t
ttggctgtcatgcatcagactttggacctcagaattttcacctggaacatgagagagtggagattctgacttcatggcccttcccaggcaggctcacccaaaggaaaatggagtgaagaaaatcaccagcaaatcttccctgccgagggaccttggaacacccatatcagtttacattagcaactttatgaaaaactctctttaaaggaaagtttggnnnnnnnnnnnnnnnnnnnnnnnnnnnnnnnnnnnnnnnnnnnnnnnnnnnnnnnnnnnnnnnntggagaggatataaacacatgtacattcattcagtcttacagcctagaaacctgtacacgcacaatgctgctgaagggacccagggctggacatacgaagtgcacgctggtgggaggcacacaatgagaaggtccagaccctgtgtacaaaagacccaaaccaaccctgtcttgatgaggggttggctttaaaaatttacatcaaagttaagacattttcaaagagcctcataactgagagaatggaagctggataaaggaagcacgtggggcatctgctctgctggctcaggcattcccagggcccagtgggcaccgccttccctgggagaaaagtggctgtcagatgatgagacttcctatgacctggactaagaaaagagttaaaatgttacctatgaccccattgcacataaagtcatttacactggaaagtgggcaacaagcttctggactccaatgagatcaggtcccagaacatggatgtacacatgtggcatgaactgctgattgcggccaggggctggaagccctgcagagggcgggctgtgagcaagagtgctctgcaggaaatgtcctcaaaggactatgaaagtaaaagcactagaaacagctagagtccttagaattttttgctccttgccgtaactatcccccaaacaagtaagacagctaataagtatgtgtgtagcgtggatattgccttgagattaaggagcctaacgcatccactgttaacaccatggctggtgtcctaactgcctcagaagagtccacattcaatactgacaatgacaagctaaaaatcagtccctcttgagggcaattacacatcttagaagtgactacacctgaaattaaatataaagcccagaacagcaaaagaacctcaaaccacagccttatggcaagggttagacaataaatgtaactcctcaggacacagaaatgtcaaattaggagccaa

SEQ ID NO: 241179 - DNA, 1354 bp, Homo Sapiens
gagaagacagagaaagcagtccctttcaagggcctcatttatttacatcaagtttaacactgttagcagttcacagtcagacaacagacggagagaattaaattagaaaaacaactgaaaatatattacaattggcctaatcatggtgatttctcaagatctcaagaaattcctctcaaaacataatggaggccaaatggccacagtgagaaattgctgtcaaaatggaggagagctggtttctctggccctcatctaccagaagcatctctgtctcctggcgttcttgccactcacaatacctggtatggtacttctgaactgtgcagaacagtatctgaggtttactgttgatgacactaaagcgttcccagtcctgcaaaaccttctgaaacaacaataaatttgcatattctttttattgtgtcataattgctgaaaattaagtatacatatatgtgaaaatttaagtcccattctccaactaaagtttatggtgcctaattccgaagcaaatttaagcaagttctgactacacaaactccttatgtttcctttcataaagcctgctagcattcgacagtttgcctccagcttttctaaaaggttacttagcatgctcggagacctcagcttctgagggttcagctcagtagcctggagtgacaggtaggaccctgaaaatttgctgatgcgagtacagtgatgaacaaagaaccttccagaatagacacagatgacatgtatcacaattctgctccaaatatggtgtggtctgaggacagtgctgtgcctggcctttccccttcaacacgccagctgctccctcagagtgaacagggctttgctactctgctcaggtcaaaaggtaagatttttgtaggagaggtaaacaatttcaaagttagagatgtacatggggatgaagaagtaagtgcacttggagggaagggtccggcgagacctcgccaggtgggcttgagaaacgcagcaactgccaagtgaacactctcaggaaaccacttcaagtggcggattctcacagatggaggatctggccactgccatctgagaagctcgtgtctaccagctctagttcaataatcatgcaaaatcaacccagctgacaagtcttttcctctctgagactcatgaaacccatctttgaaggcacaaatctccaagggtggcctctcagcagtttctgccattccaagtcagctttgaatcatgacctgccacaggcctccttacctgggaagaagtatgggatcttcttatcttgatcccacagggtgaagccttccctaatttcctgtcctttggatctaggatattgagtcagaaatgccaa

SEQ ID NO: 241180 - DNA, 1006 bp, Homo Sapiens
tttatttacatcaagtttaacaacagttagcaggtcacagtcagacaacagacggagagaattaaattagaaaaacaactgaaaatatattacaataacaattaagaacaaatacctgacaacactggtaatgtgacacacaattgatgtgtttttagttaaatcccacattgtctcactatgtccccttagcaatgcacacagtgcccgatgctccaaacctcaccctctgtgcaccacatacacacctgcggggcgggacctttggtataaacgttcaacgagttttaaagaattgaatccgcatgtttggggacaaagttctgtcaaccaccatgaaatgtttaaacttatttttactaagcgagcataaaactggggtttgtccagtgacagtcattagagaatcagactgcagagaaggaaaagtgcagggtctgggaggagatggaggttctgagtatacatcaacagctaagtcagcctgttcacagtcaacacaccaaccacgccactgctgttcatccaaggaaagatctgagcgattcctcttttacttactccccctttcttaatgggcacgacagcaatgcacgtgtatttatggacacaaacacacaccagctatacagatctgagatgagagggttttcaaacatatgccctaaagaaccataaacaagtatctcattgttcctttctagtttctgaatactgattgacaattggcctaatcatggtgatttctcaagatctcaagaaattcctctcaaaacataatggaggccaaatggccacagtgagaaattgctgtcaaaatggaggagagctggtttctctggccctcatctaccagaagcatctctgtcccctggcgttcttgccactcacaatacctggtatggtacttctgaactgtgcagaacagtatctgaggtttactgttgatgacactaaagcgttcccagtcctgcaaaaccttctgaaacaacaataaatttgccaa

SEQ ID NO: 241181 - DNA, 1035 bp, Homo Sapiens
acaaaaaagttggtagcagtgtgggtggtgggggtggtaggaaatgcaggttgaagggaattctctggggctttggggaatttagtgcgtgggtgagccaagaaaatactaattaataatagtaagttgttagtgttggttaagttgttgcttggaagtgagaagttgcttagaaactttccaaagtgcttagaactttaagtgcaaacagacaaactaacaaacaaaaattgttttgctttgctacaaggtggggaagactgaagaagtgttaactgaaaacaggtgacacagagtcaccagttttccgagaaccaaagggaggggtgtgtgatgccatctcacaggcaggggaaatgtctttaccagcttcctcctggtggccaagacagcctgtttcagagggttgttttgtttggggtgtgggtgttatcaagtgaattagtcacttgaaagatgggcgtcagacttgcatacgcagcagatcagcatccttcgctgccccttagcaacttaggtggttgatttgaaactgtgaaggtgtgattttttcaggagctggaagtcttagaaaagccttgtaaatgcctatattgtgggcttttaacgtatttaagggaccacttaagacgagattagatgggctcttctggatttgttcctcatttgtcacaggtgtcttgtgattgaaaatcatgagcgaagtgaaattgcattgaatttcaagggaatttagtatgtaaatcgtgccttagaatgaataatttattgtatttttaatttgaatgtttgtgctttttaaatgagccaagactagaggggaaactatcacctaaaatcagtttggaaaacaagacctaaaaagggaaggggatggggattgtggggagagagtgggcgaggtgcctttactacatgtgtgatctgaaaaccctgcttggtttctgagctgcgtctattgaattggtaaagtaataccaatggcctttttatcatttccttcttccctttaagtttcacttgaaattttaaaaa

SEQ ID NO: 241182 - DNA, 1369 bp, Homo Sapiens
  misc_feature (1072)..(1100): n is a, c, g, or t
taaaaacacaattccagtccttatatatattacaaaacagctttaaaggaagaagtgacatcttttctacagtacttaagatactcaatacagaactgaaaagcagtctaacagaaacaaaggcaagtcttcacagctgtatgatttcagcagccaaagctggatgatggactgaaacattactatacaactgggacaaaacatatacaatatcacaatactaagcaaaaacgctttacacccaaagaaataaaacaggttacaaaatgtggagaatttagcaggcaaaactgtattacaagcaacattttaaatcatcatttttaatccattgcaactatttaaaacatctaaaacaaatataaaaatgagccttttagtattttactgacgtgatttttttgtctttaaatatttgttaaagcttgatgttatactcaaagtacatattatatagctaaaatgtcaagtgagaagagtgtatacaaagtggtccaagttttatttcaaactctgatttccaattaacccttctaagtattattctttaagttatagtttcatccatggtgaaaaagatttagaaggttgcctaaaattttcacatctatgtctttgagtaaataattagaccatgttgaaaattcccaggtctagtaaatcaggtttaaaatattctgaacttgtagaaataccaactggtaacagttggccagagtgtactgccttcaaatatttctcataaatcttgtctttttcattttttctaaagtaaatacacacctgccccacccaattaaataaatctgattacatggctagcataatatctaaatatacaggatttattagtgatatttcatcatgggaaagtgggggagaggggcgtggatccaccaaacctcacaaattctgtatcacaatcctagtgctcttggatgttttaccactagttcttccaagataaaaatggcaatcttttaatcatccaaacaactcaaagcagttttagctaatgttaaactcattttaatccagtgatacctaaagcaaagcccaaacccagttttcnnnnnnnnnnnnnnnnnnnnnnnnnnnnnggaattcttaagctgtttcactacctgttgtatcatcatctcaaaaatggttctgccatgttgagttgactcccatagtcaaaaacaatgttttctttaacaattcaagtaaccaaaattgtacatgaataaatttataggtcatttttgcagaactggattaagaaaaaataaaatgtaatacattttctagtaaaacttctagtaaaggggtattggatgaattccaacttttttgtacaaagttggcattataaaaaagcattgct

SEQ ID NO: 241183 - DNA, 930 bp, Homo Sapiens
agcacaacacaactctccgcatacagattcactgctggccccacaacagcactgtcccccatctcctctccaggtcagcataaggttcaggcaataaaagccaaactggcacagaaaggtaaatgcccacagtaagtttctacattcatttccaaaccgcatacagtgtaaaaagacagcaaaggctgcttctaggaactgtatttactggcctctgccagagcagcaggcagctatgcctgcaccgtggcctccagagctggatgcatgctgtgccgatgtgctcactctcatgaggatgcttggctatggcagtgacagtgaggagattcacctctcatacagctcattagaaaggtcatcttgtgttttcaatatgaaacatttcatatggtaaaatccaatcccaagacttcttggattcagtcttcacacacttttaagcgtgactatttggtactgaatacagttcagtctatataagacatcacttcaaaattatgtggatgccatcactactttcagctgcagaaaaaggaaagacagtatttcttcagtcaggcttaggaaattaagcctattaaatggaaaactccctgccaactacaacctcccttcccaattcagaggttacctttaaatgattctagagaaacaagcagattaacttgctctagctcctcttcccccaaaaaacttcatgtacacattccctttttagacattctgcgaagcctggcccactatcaacgcccacattccaacactgtctgccagttctgggggtagggggacatctatcaagacacacaataatagtgctgtccataaggggagcaagagctagaaggagaacaggtgaaatatactgtgtcagggcagaggacctgagggagtaaatgcaaatgtgtacatctaccttttccccaa

SEQ ID NO: 241184 - DNA, 1237 bp, Homo Sapiens
ttggggaacatggaggagctgctgaggcgcgagctgggctgcagctctgtcagggccacgggccactcggggggcgggtgcatcagccagggccggagctacgacacggatcaaggacgagtgttcgtgaaagtgaaccccaaggcggaggccagaagaatgtttgaaggtgagatggcaagtttaactgccatcctgaaaacaaacacggtgaaagtgcccaagcccatcaaggttctggatgccccaggcggcgggagcgtgctggtgatggagcacatggacatgaggcatctgagcagtcatgctgcaaagcttggagcccagctggccgatttacaccttgataacaagaagcttggagagatgcgcctgaaggaggcgggcacagtggggagaggaggtgggcaggaggaacggccctttgtggcccggtttggatttgacgtggtgacgtgctgtggatacctcccccaggtgaatgactggcaggaggactgggtcgtgttctatgcccggcagcgcattcagccccagatggacatggtggagaaggagtctggggacagggaggccctccagctttggtctgctctgcagttaaagatccctgacctgttccgtgacctggagatcatcccagccttactccacggggacctctggggtggaaacgtagcagaggattcctctgggccggtgatttttgacccagcttctttctacggccactcggaatatgagctggcaatagctggcatgtttgggggctttagcagctccttttactccgcctaccacggcaaaatccccaaggccccaggattcgagaagcgccttcagttgtatcagctctttcactacttgaaccactggaatcattttggatcggggtacagaggatcctccctgaacatcatgaggaatctggtcaagtgagcgggccttactctggaaggaggcctcagaggtttctccacagtcctcttctgggcaaattcttgtttcttcacatgccggactagcttaagaccaatgcagtagcttatttccaagccttgcaaagtatataatatctaagaggaaaggttttgtcatcccagcgttgtccactttgtggggctttgtagtagacgggagccacactacaggcagggtatggcagagggatgtatggagtgtgggtgactctgagcctcactgctgctgcaaggtgggggaactgtaagtgaacccc

SEQ ID NO: 241185 - DNA, 931 bp, Homo Sapiens
gagtgccaggtgctcggggagggctggtctgtcttcacccagggagtccctgccctgcgatgctgccctccccccactgctgatgctcaggtaggggtgggtggggtgagcccaagggagttcggcctcagtccaggttgcccctccacaccagccctcctccccctgggccattctctgggaacagccagtctctgggtctcagcggtaatgaatgcagccccagcgttctcctcaatagcactgggaactgagatgagtcccaacttcttcacttgtgtggcacccccacccctgcaaagggccccgggtgcactgggaggtccctgggtgcaccgttatgctggccgggccccagggaggagcccacacagagtccacgtaacacagcaaacacacaggccacgaggaggttgcctgctcctttaccttcctaggtttacatggtaccggagccagcagcctggtgagcccgcaggagcctgcagacctgaatcagggtttctggggattgggcaggagatgacaggcagcttccagctgatcccagggctgcagcgggcatgtgcagtggcccataaatacctttacataaatacgggctgggcgacttccagtcccagggcctagcaccaaaaagcctgcctggaggacagtggccctgtgcctgcacctgcgcctgcacccacactggcgcccacacctgtcctcagtccaactcagagccgcggggagagcgggacttcctcagcccaggcccagagcgtgcccctgggttctgcagagccaggccaggaggcgcctctcttccagcggccatgcgaggcttccctcctcaaggccacaccagcctccaagagcgacaggttgctgggctgtccacagccctccacggccctcaaaggaagggcagtaccaggagctctgccaa

SEQ ID NO: 241186 - DNA, 872 bp, Homo Sapiens
ttggctctaatttactgttatatcttagaattatatatacaagaatttaaaaatgaactctagtagctattttgactatacacattgccatgcttggggattttaatgggcaagttatatagataagcattaatttttattccaaaagtaacatagtagtgcttcatcagtatatatacatatacatgagctccttcatgggttatctaattttgaattgatggtgaatctagtgaatgaaggtatgggaaaaatttaaggtacaatgaagtgtaatacatgctttttctcataattattatctaaattaggtattaatgaaattcaattttagtatttctaataatattatttctgttttgggaacatctttatgtaaagtataaatctaaatatagataagaaatttgtacatttataacattacctcccgtctacgggtcttgccgccgtttatatcaatattgtgtaaaggttggagttttgaaagtaaaaaactttgatgtgaaaaggaatcctgaggttatgtcctgctgtgatactattttgtttgtgagatctcaaataatctaattggaaggtagctcagcttagtggaaaaatcaaacttaaaatttctttcctttatttaaattcgaaatgttttgctatttatcatctcagtgaactaagacacattatgatcagtaatttaaaatctagtcagtactatgaaaagaagtgggagatgaagtagctactgggaaaaatccatgtataatttaaatatctcttatgaaataatatgaaatacatatattatcaaatcttactgctaaaacatatgtaataggttatctgggttcattaatacaagatgcatggttactttt

SEQ ID NO: 241187 - DNA, 1397 bp, Homo Sapiens
  misc_feature (465)..(510): n is a, c, g, or t
ttggggagcaccagtgggggcaagatgaaggtcaatggggcgccccgggaggatgcccggcctgtgccccagggctcctgccagagcgagctgcaccgggcgctggagcggctggccgcttcacagagccgcacccacgaggacctctacatcatccccatccccaactgcgaccgcaacggcaacttccaccccaagcagtgtcacccagctctggatgggcagcgtggcaagtgctggtgtgtggaccggaagacgggggtgaagcttccggggggcctggagccaaagggggagctggactgccaccagctggctgacagctttcgagagtgaggcctgccagcaggccagggactcagcgtcccctgctactcctgtgctctggaggctgcagagctgacccagagtggagtctgagtctgagtcctgtctctgcctgcggcccagaagtttccctcaaannnnnnnnnnnnnnnnnnnnnnnnnnnnnnnnnnnnnnnnnnnnnnagcatgggtgtgcccttggggtaagccagagcctggggtgttctctttggtgttacacagcccaagaggactgagactggcacttagcccaagaggtctgagccctggtgtgtttccagatcgatcctggattcactcactcactcattccttcactcatccagccacctaaaaacatttactgaccatgtactacgtgccagctctagttttcagccttgggaggttttattctgacttcctctgattttggcatgtggagacactcctataaggagagttcaagcctgtgggagtagaaaaatctcattcccagagtcagaggagaagagacatgtaccttgaccatcgtccttcctctcaagctagccagagggtgggagcctaaggaagcgtggggtagcagatggagtaatggtcacgaggtccagacccactcccaaagctcagacttgccaggctccctttctcttcttccccaggtccttcctttaggtctggttgttgcaccatctgcttggttggctggcagctgagagccctgctgtgggagagcgaagggggtcaaaggaagacttgaagcacagagggctagggaggtggggtacatttctctgagcagtcagggtgggaagaaagaatgcaagagtggactgaatgtgcctaatggagaagacccacgtgctaggggatgaggggcttcctgggtcctgttccctaccccatttgtggtcacagccatgaagtcaccgggatgaacctatccttccagtggctcgctccctgtagctctgcctccctctccatatctgcttccgctacacctccctcccccacacctccctactccccctgggcatctttctggcttgactgggatggaaaga

SEQ ID NO: 241188 - DNA, 967 bp, Homo Sapiens
ttgggtgactgggaagatggccgtctttccttggcactccaggaataggaactacaaagctgaatttgcatcatgccgactggaggctgtaccattggagtttggggactatcaccctctgaaacccataactgtcacagagtcaaagacaaagaaagtgaaccggaaaggaagcacttcttccacgtcctcctcctcctccagctccgtggtggacccgctgagcagcgtcctcgatgggactgaccccctctccatgtttgcagccactgctgaccccgcagccttggcagctgccatggacagctccagaaggaaacgtgatagagatgataactccgttgtaggatcggattttgagccttggaccaacaaacggggagaaatccttgcccggtacaccactaccgaaaagctgtctattaatctgtttatgggatctgaaaaaggcaaagctgggactgccacattggcaatgtcagagaaggtgcggacccggctggaggagctggatgactttgaggagggttcccaaaaggagctgttgaacttgactcagcaggattacgtgaaccgcatagaggagctcaaccaatcgctgaaggatgcctgggcctcagaccagaaagtgaaggctctaaaaatagtcatccagtgttcaaagcttctttcagacaccagtgttattcagttctacccaagcaaatttgtccttatcaccgacatacttgatacatttggaaagctcgtgtacgagcgcatcttttccatgtgtgtggatagccgcagcgtcttaccagatcacttttctccagagaatgcaaatgacacggccaaggaaacatgcctaaattggtttttcagattgcctccatcagggaactcattccaagattttacgtggaggcatccatcctgaaatgtaacaaattcctctccaaaacgggaatttcagagtgcctgcccc

SEQ ID NO: 241189 - DNA, 2200 bp, Homo Sapiens
  misc_feature (283)..(295): n is a, c, g, or t
  misc_feature (1023)..(1041): n is a, c, g, or t
  misc_feature (1456)..(1506): n is a, c, g, or t
tctaacttggaatcataagggttcatatttgactagtcataccctatcaatttacttacttagacttgaacatacccttttttcagctgcatgtgacagctttaaaaccccactgagcatgctgcttggcatgctttattcctctgaaatcatcatctactttctaaaaaccagaaaatgagtttgtgatttaaatttcaaaaaatagtttgtagaaaacacaaaaagaatcaactgtttaaagtcttatccttttcttcactctatgacagctacttctacnnnnnnnnnnnnngagtatgtgggtactttctaagaactcagaaacaagaaaaccaaaatcagagggtgcatgaatatatgtgcacgcacatgtacagacttaatctctacatcccccaagacagatttaaacaggtaatcccaacattttaaattcagaaaccagagacaaacagttttgtttctaaatcagtggtattcctagctgaaatgtttagaatactgcactcacagttcagcagtactttgattatatatctcattcaaaaaatcaaaataatggccacattcttctaacagcaaggaattctcccactttttatttattttcaaatactgctgtttccataaacctgcaagtggaagataagctgttcaataaaagccttctttcatatatgtatctatatataaaatatacagacgttattttagaagtctgttcatataacagattattttggtactaacaaaagttgtacacaattcatcaattgtatggctagaaatgaaaccataactaaaccaagacacacagggctttcctgcacttggttgaaggaaaaaattccacctaattcttactgcgttagaagaataaagcacgtttgtcatagtacacattatcgtagtcccttaaagcagggactatttaacaatgtccaggcttacttctgtctgtacattcaggaataatcatatcactggttacatacaactctcatgcaaagaaaaccctcnnnnnnnnnnnnnnnnnnnccctcagttagttgttttcttaagtctaattaatccaaactaataatagccatttaattagcaatctgtaaatcagagaggtatagaaattcagcagctaaactgtatttcccacctatagcactgctgctactcaaactattttcttcacgtattagaagaattcataggcattgatggtcaaaataagaatttcaacatagcagcaaatgacagaagagtgagagaaagagctcctaatgtggtgacagtcttaatgatcctttaaaaggtagaagattgtgtgcgtatgtgtggaaaggagtaggaaagaaaagcaggaggttaagacaggtatttaaagggaatggcgagatagctacattagaatatttatttttttaaaaaactgctctgaagtctgcccagtgtaccnnnnnnnnnnnnnnnnnnnnnnnnnnnnnnnnnnnnnnnnnnnnnnnnnnngagcagacattggtgaaagtttaacctgataatttatttgtggggaaaaaagctagttttgatgagaaaaagttcagtcctttccttgtaaacacaaagaaactcaacaggaattttaaaaatagtaggtcagaaaatgcaacagtaactcttataattcttttcaattaaacagacaaatcaagttgaagacaagtgttaaaatactattcagcctaaatatttatcagtctatatatcctgttgttcaattggcttttgatttttaaaaaaatcaaatcaataaactttgtaagagctaccacatttcaagtgatgaaaataaattagttcccccccaaagatattgtttaacttctaaagcataaaaagctctataatatcttatacaaattaaccagtgtttttacaaaagtaatgcagttttggactgatgatattacactgtatttgtggtaaagtactaggcacaagaatatatatatcgattaggcattttcagtctaatcagtctctaagtttatcatttaattcttggcaatatataataactggtatgcattttggtacttaagtcatgaattgtgaagaacaagaagcaacgtactatagtcacagggtttacatctaacaaacaattgcagtgttgaacaaatttcgtggtatgaacttcgccaacttttttgtacaaagt

SEQ ID NO: 241190 - DNA, 1950 bp, Homo Sapiens
aagttcagatcaaggtcaggcccagagacttttggcatagagaggttcactgaaggcaagtctactcctggcccctttagagaaacatcgggccttcgagcttaacatctggtcctctcaagtctccttcaagagagggtagctgggcatggacctcggctcccccaccctccattttcacacctgggatgccgatcttgggcatggaaaacttggggaacttaatttttgcttctggaccttgcagatctacatctggtccttccagtcccacgctggggacatcaccctttatctttggtcctttcaagtttacattcacatcagggatggagacttgaggggcagaaatgccgaaggacggtgttttgactttagcatctaggccttcgatgttgatgtcaggtgcacccaagtttgcctgcactttggggcctttcaggtcaccctctatttttggcactgagatgtccacatctggcatcttgaccttgggagccttcgccttgatgtcaagaccttcgacgtgaatcgctggcaaagaaagttccagatcaggtgcctggagttcaccctccagtttggggctagggagaggggcctcagctttaaatttaggtgatttaatgtcaaactctacatctgggaagtacatttttccaaacatcgttttcttggttttgggcgatttcacgtcgactttgagtgcagcatccggccctgcgatgttgacatctacatccggagccttgaggctggcatcaatttcacccccaggaacattcaggtcaaatccctgttttttggccttaatcttaggaccactcatatgaattttaggcattttaaacttacttttcttgcccttgccaccaacactaatttcaggagtctcaaggttcagctctgcctcaggaacagtgacatccagtgaaggtgacttgatgtcagctttggggctttttgccccaaatccaaacttgggtttcttaaatttggggattttaacatctggcccttcgatgttaatatctgggctgtccatgtgtacatctaagcttggagcttcaactttgggtcccttgaggtccacttcaccaccttctaacttcggacctgaaaatccaatttttggtgccttgagatgcaaatcaacatcaggagcagttactttaggagcagatatctccagcgatggcatcttcaaagatgggccactgagtttggcatcagggccttcgaaatccagacgtggacctttaagatctacttctgggcctttcaaagtcccttcaaccttagggacagacacatcaaaatctccttttactttgggtcctttcaaatccaggtcaacatcaggtatggagatcttgggagctttgatatttatttcaggcatcttgaacttggggcccttcagttttgcgtctggaccttcgatattcacatctggaatatcaacgtccaccttgggtcccgagacatcgatgtcggccttgggcaggctcacatccacatctggaccttctcctttgaagccaggcatgctgaatttgggcattttcaccttgggcatcttcaggtgccagtctgggccatgaacatccacatcaggggtgttgatgtccacttttgggcccttgatgtcagcttctgggcccttgaggtcaccttccactttaggaagggtaacatccacatcgcccttcactttgggtcctttcaggtttaagtcaatatcaggcatggagatcttgggggctttgatgctcatctcaggcatcttgaacttggggccctttagtttcgcatctggaccttcgatattcacatcaggaacatcaacgtccactttgggtcctgagacatcaatgtcagccttgggcaggttcacatccacatctgggccctctcctttgaagccaggcatgctgaacttgggcccaa

SEQ ID NO: 241191 - DNA, 924 bp, Homo Sapiens
cagatgtgaacaccaggaataaaagagcagttatgtaatccatttcgacgcacttctggaactgtaaactgtaaacaaatgctgcaaaggttaactattttctaaaacttacttttttccagtgggaaaacaaatatttggtatggtaacccaaacttatcactgcttttttgctcagtttcacacgttgtaactcaaattactctaaacgtgtttaactgccaaacagctacctgcatgttagaaaccagacaatacaaaccacctaataagaaaggttccctaatagaaatactaatacaaaaaaatgccttagctggagcaacttaaaaatcaaataatcatgacaaaagaaaaacaaatataaataccgactcgctctttattcaaacagtgtgctgtttcgcttatgattccacgtcctaaattacgtcaacgccgtttctgagtgccatctcgtcaccaactgctgctatcgactcctgtattttttaaaaagtctttttttacatcatataacaaagtacaattcaatttatttagggataaagccactataactaaaccagggttcactcaaattgctaccaggcgacaccaagaaaatcccaactatagaaaaaatcaccaagaaaaacacatggacacaagaacatcactaaaagctcaagcataaggtaagaccaacaattgtggaaaaaaaccctatgtccacaatctgggcaatgtttacaagttttcccactttgttctcatcaaccttccctagtacaaatttaattacatcatcttactgaacactactgactttactgaatctattccctgatttgatgttacctttcatacaaatcacagtagaaaaacgtatgaattttttcaatacagccaagatgctggcttctcacctgtgaatatagccaa

SEQ ID NO: 241192 - DNA, 1172 bp, Homo Sapiens
ttaaaccctaccttaggatgcttgctggggcttagcaacagggtccagttcacacttagcactaattaaatactttattgaataaatacaataccaaacaaaatgcattcaaatgctttttaaaaaaattttaaaggcctttctactcaggctaatgacaaacacaataaaggcagatatgctagtttaacataattggctgattttatacagcacttatatcttttagtccacaagtatattattaaatgatagagaacatctaatacaaccatttctacagaactaggaaataaatttctaagaaagaaagattttacagaccccatcttttatacccaccccaacagtctaactctaaagaggataaagccaatgactttcctcacaagagctcacgactaacgtcgctttgctatcaaaatctgtatttctgatccgttatgagcattgagacaagattcaaatattcccaaagaaagaagcacaatgcacgttgtgatcgcctattcagcaacagcgagcactgcatccaaaactctcatcccaggaattaaataaggtcagccacattcatgggcatctcctccactgtagtattgtagaaagtctcaatgtcacgaagaatcctcttgtcttcttcagtaacaaagtttatagccacacctttcctcccaaatcgaccccctctgccaattctgtgtaagaaaaagaatcagaacgttacttctcacataatgtataaactactgaacatgacgatccacttgttaaccaccagctgctgtttacttatcaaggttatagttcgtgcttctaactggagcactagctgctaatgcatatctagagaaaaaaaatcttcctttgcagttagtgccaaaaggattcaaggcttgtctggctgcaaaatgagatttttatcaggcatcttgagcattattataaagcagatgacagtatcgtgtttggggtagtgaaattaaagcccataccaaagtgggccagccaagagcaggtgtcagcctgggacagatgtgaacaccaggaataaaagagcagttatgtaatccatttcgacgcacttctggaactgtaaactgtaaacaaatgctgcaaaggttaactattttctaaaacttacttttttccagccaacttttttgtacaaa

SEQ ID NO: 241193 - DNA, 1451 bp, Homo Sapiens
  misc_feature (1263)..(1275): n is a, c, g, or t
ttgggccctcatggagttggggatccaggaatgcactcgctgtgagcagtcactgcttaaggagccacagaaggtgcagctcgtgagcgtcatgaaggaggccataggggctgttatccactacctgctgcaggtggggtcagagaagcagaaggagccctttgtgtttgcctcggtgcggatcctgggtgcctggctggccgaggagacctcatccttgcgtaaggaggtgtgccagctgctgcccttcctcgtccgctatgccaagaccctctacgaggaggccgaggaggccaatgacctttcccagcaggtggccaacctggccatctcccccaccaccccagggcccacctggccaggagacgctctccggctcctcctgcctggctggtgccacctgaccgttgaagatgggccccgggagatcctgatcaaggaaggggccccctcgcttctgtgcaagtatttcctgcagcagtgggaactcacatcccctggccacgacacctcggtgctgcctgacagcgtggagattggcctgcagacctgctgccacatcttcctcaacctcgtggtcaccgcaccggggctgatcaagcgtgacgcctgcttcacatctctaatgaacaccctcatgacgtcgctaccagcactagtgcagcaacagggaaggctgcttctggctgctaatgtggccaccctggggctcctcatggcccggctccttagcacctctccagctcttcagggaacaccagcatcccgagggttcttcgcagctgccatcctcttcctatcacagtcccacgtggcgcgggccaccccgggctcagaccaggcagtgctagccctgtcccctgagtatgagggcatctgggccgacctgcaggagctctggttcctgggcatgcaggccttcaccggctgtgtgcctctgctgccctggctggcccccgctgccctgcgctcccgctggccgcaggagctgctccagctgctaggcagtgtcagccccaactctgtcaagcccgagatggtggccgcctatcagggtgtcctggtggagctggcgcgggccaaccggctgtgccgggaggccatgaggctgcaggcgggcgaggagacggccagccactaccgcatggctgccttggagcagtgcctgtcagagccctgaggggtgtccaccggggacagacccaggggcgggcagagagggaaggagggaggaggcatcttccctgaagcccccaatctggnnnnnnnnnnnnnagacttcctccccaaaacaccccagctttctggcttttctgagggcaagggcatggtgccctcccctcaagtgtaaggaactgcgttccgcccctcaggcccccatgggggcagggatcggcttggaaatcaacgtggttgtccccggcaggccggggccaacttttttgtacaaa

SEQ ID NO: 241194 - DNA, 1132 bp, Homo Sapiens
  misc_feature (946)..(972): n is a, c, g, or t
cagtccacagtttcctcaatcgctgcggagacggagctgtcactgaatatgacagagccctgcactccccggtccgccgaccctttctgtaatccagtcttcactgtagccgaggaactgtttcaacctgtttggacagaaaaatacagcattaacaaagaatttttttcccttttaattattaacagagggaaaagatactttcatcaatttaagcaatgatgagtgattaatgtatctgaaatctgaactcagtcccatcttttgggtaaagttctctgtctcaagatcagggagggtttaaatcctagctgcctgtgctgaatatcaagtgacaacacacagccacatgctctctagcaaagacttttcccaccattcccttggtatatgaagagaacaagaatactttcctcagtgtctggaaggcaggagaggggttgtttctgcaaccggccccaatgttgctaaaaacccctcccgccccaaagacgttaggataaatttttacttactatgatactcaggttaatgtaactcacgccactttaagacccttccgcgcctgcactcacagctaagttgctgggaatcaggaccctctctgtagagagtgctacagggctccatacagctggaagctcaatacttttgctgctagtacaaacttaagaaaataagtttgtgatattgcaaaagcactttcttgagtgtcttatgaacagtgtcttgatcctacattaggagagcgagatcagaagttattctgccaatgtatatgtaaaacacgtggtaatttgaggattgaaccattggaattagagaaaggaggctgtttggaggagttcctgtttaagctataaattgaatttcatgtttctttaagatgtggtgaaatatgaatgttgaaacacattttgtaaatatttaaggattgttctaagcnnnnnnnnnnnnnnnnnnnnnnnnnnncaacaggtaaaaaaacatacaacagaaacgcttttataagatacaattagtaatacaaatataaaatcttctaaacaatcactggtattgttctactactaactataacacagtggcattaacaatttgtcccagggttttatactcccaacttttttgt

SEQ ID NO: 241195 - DNA, 879 bp, Homo Sapiens
ttgggtagggccaacggcctggacgccccaagggcgggcgcagatcgcggagccatggattgcactttcgaagacatgcttcagcttatcaacaaccaagacagtgacttccctggcctatttgacccaccctatgctgggagtggggcagggggcacagaccctgccagccccgataccagctccccaggcagcttgtctccacctcctgccacattgagctcctctcttgaagccttcctgagcgggccgcaggcagcgccctcacccctgtcccctccccagcctgcacccactccattgaagatgtacccgtccatgcccgctttctcccctgggcctggtatcaaggaagagtcagtgccactgagcatcctgcagacccccaccccacagcccctgccaggggccctcctgccacagagcttcccagccccagccccaccgcagttcagctccacccctgtgttaggctaccccagccctccgggaggcttctctacaggaagccctcccgggaacacccagcagccgctgcctggcctgccactggcttccccgccaggggtcccgcccgtctccttgcacacccaggtccagagtgtggtcccccagcagctactgacagtcacagctgcccccacggcagcccctgtaacgaccactgtgacctcgcagatccagcaggtcccggtcctgctgcagccccacttcatcaaggcagactcgctgcttctgacagccatgaagacagacggagccactgtgaaggcggcagggtctcagtcccctggtctctggcaccactgtgcagacagggcctttgccgaccctggtgagtggcggaaccatcttggcaacagtcccactggtcgtaga

SEQ ID NO: 241196 - DNA, 1019 bp, Homo Sapiens
ttggcaacaaaatacactgttttgtcttccctcaaagagagatcttactagaacctgtaaatagaatgtattatttattataagtcactgcagctgatgaaaacagatggaggccatgctgcaggctgatactgatgggtggagttttgtcatcaggccagcctcatcccgaggtctcctccaccattggccgtagccagcaggcttcagtgctcaccgaaagtaaaatcccctccttcagcaagaataaagcaatatacaccttaggttccactaagtaacataggcataagcagggaacgtttcccccactgtgttccagtgcagaggagacgaagcctgtcctcaccgcggctcgctgggcccaggctggctctggaaagcctgtgcggtcctgggcaggaagcccggcccgtggagcaggttttcgttctgcttcagcaataaataagggtgaccacagggactttgcttttggtttcctttcctgtgaaaaggttggttttaaagtgagatacacttttccgtagaacaagtgttctatctttaaaaacccaaattgcagcaccgtggattactggtctcagaacaactcattgcgcatcagatttgactctctgattttctgtctattggccaaattgccctttaactgcacctgaatcctttgtgtactgatgcctttgagctgggcaccttgggagagtgttgtgttgctgtttacggttcttccttgcccttgctaattacagtctctggtgcccagcaagcccctttggcttccttccgtgactggtcacgttgtctgcctgggctcagcgtggacctgccccatgctgcagaacctggcctcacctggacttttcactagaattgccagcttcctcaacttagcagatcattcactcatgcgggcacaagcaaagatcaacactttcttttttggtaagcttgagttttacaagttattttttggtgatgcgtaagacattgcagtgggaaaccattcaacttgagtt

SEQ ID NO: 241197 - DNA, 1261 bp, Homo Sapiens
ttggcactcgcgctccggcgcacacggagcagggaccggcgcccggagcgagccagggagcggctaaccggggacccaccgcgcggagccagcctagctgccagcgagcccaacccgcgacgacccacgcccctgagccccgcagccgacccctgccggccggtgtccccaccgccatccctgacccatggcgctgaagaggattcagaaagaattgagtgatctacagcgcgatccacctgctcactgttcagctggacctgtgggagatgactcctgatagcgcatatcaaggtggagtcttctttctcactgtacattttccgacagattatccttttaaaccaccaaagattgctttcacaacaaaaatttaccatccaaacataaacagtaatggaagtatttgtctcgatattctgaggtcacaatggtcaccagctctgactgtatcaaaagttttattgtccatatgttctctactttgtgatcctaatccagatgaccccttagtaccagatattgcacaaatctataaatcagacaaagaaaaatacaacagacatgcaagagaatggactcagaaatatgcaatgtaaaaatcaaaaacattttcatatataccagagtactgtaaaatctaggtttttttcaacattagcagtaaattgagcactgtttactgtttcattgtaccatgaaaccatttgatttttacccattttaaatgtgtttctgaagcaagacaaaacaaacttccaaaaatacccttaagactgtgatgagagcatttatcattttgtatgcattgagaaagacatttattatggtttttaagatacttggacatctgcatcttcagcttacagatctacaatgcagctgaaaagcaaccaaattattttttgctgaaactagatgtttttacatgagaaatactgtatgtgttgtctaacatgtcagttttataaatctgtattcagatttcattctttgttagctcactttataatttgtatttttttactgtatagaccaaatatattctatttacatgtatgtcaactcattacttttttcctgtgaacagtattgaaaaaccccaacggctgataattaagtgaattaactgtgtctcccttgtcttaggatattctgtagattgattgcagatttcttaaatctgaaatgatctttacactgtaattctcatcatattgattatggagaaacccttgttttgattttgttatacttgact

SEQ ID NO: 241198 - DNA, 692 bp, Homo Sapiens
  misc_feature (337)..(377): n is a, c, g, or t
  misc_feature (501)..(528): n is a, c, g, or t
tctcccacatagaagtaatgtagattcacaacagatattgaaattaggagaatttttataactggtcacctagccaagattgaacgaccatttacaacaaacctacacaacaaatatacaagtcataaaataaacagagatgatatttgtagaggcaaacaaacacagaggtaattatattggcagtagacatatggctgatttatatttgatttggctagacacagtcttaaattgtacagagttaaacactgtcatacacaatggcaatataaaataaaacaccaaaacacaagcaactggtgttaggtgtcataccttaaaatacataacacannnnnnnnnnnnnnnnnnnnnnnnnnnnnnnnnnnnnnnnncacaaaattaaaatatggaatgtaaaacgtattggatgccatcaagtagatcaatatattcatcaaatgaatcttagaagaatatagggaaaaagtaatacagaggtaacttgaagacaaaaannnnnnnnnnnnnnnnnnnnnnnnnnnnaacaaaaaaatttctaaccaatatttaattcaaaattattttacttcaaaaacaagataaaaataaggactttccaaaataaaaattcagggcatttattacaactaccccaacttttttgtacaaagttgttcttttatagaaaagcattgctcatcaatttg

SEQ ID NO: 241199 - DNA, 1176 bp, Homo Sapiens
ttgggccaggatttaccagggaggtggctggctacagcaacagcagctgggcaagccagataggccgcccatgctctcagcctttctccctcccccgtctcattccaaggctgagggagggccttctcgcctggggacgcagccactttctccagtggagacagggcaggggttcagagtttccgtcagatgcagtgaaatcacagttccctttcatcttcagaacctctgtcgtgaatgtgttcaagaggctttggttaagtcaggaagaagtgcccagggtgtgtgtccccagtctccctgaggcctggactcgcccatgaacccaagtcggcttctagacagcatgtccctaacagcagccctgggcccccacctcttctaccatccaccccagacttaccacacacccttcctgctgctcctcttcctgcccttatcaacctgggtccctcacacttcgccagttgcgtccccgtggacagtcatgagtctagaggaaaggggcatctggtctcaggcccgtgctctcgggtggcctccacctgctccctttctcctcactggcctttctttccgtctagcttcctcttcaggaaatgtcctgactctcctcagctcccccttcacccctccttgcccgcctaccctccctccagaatagcccctcacccttcttccccttctagttgatccttttcacctccctgatccccttcatttcttcaccgcggttcctcgtcataggggttctcactctgaactttccctctctactacccatggcaggaacctagtacaggtctcccacccagggccttccaccctcggctcctgtgctgggagaaacttccaggcgtggacagcccagcctgaggcattccagtgctggggcaccgtcgcctaacctggtttctagctttgccctcactccccggaaaaactgacactgacacaggggccctttccttgcccctttagctggtacctcagtggggaggcttccttaccaagaatgagttcctgaaacccagggccagagacaaggacaacttaggggaagacggggttttcggtggagccaggggcaaatcttaatgggaccagtgggggataccccaagagccccatggcctgactgcacaccctgcctggagggagggtgcgcagctctgc

SEQ ID NO: 241200 - DNA, 1018 bp, Homo Sapiens
ctttgtacaaaaaagttggcagaactcttgtctcttgtgacagggcttcatccggatagctccactgggcattagcgggtgcccccaaggccggtgggagtcacagaaggctcctacgtccaggccacagctctggccggaccccctcacagcatgtgtgtggatcccacgggccagctggaagctgggcacctttcctgaccaggcgtggaacatcacttggtgtcccttccaccgcactgtgttcatgagaagccagacactgaggccagctcaaactcagggaaaggcagtgagactcacacctttgaagggaagggcaccaaggagccacattctacctgctttggccacgttgtctggcttctccagcctcagtctctttggccatgacaccataacgatgggaggggtgagttaatagacaccaaacagaactgctgtagcaactgccaaatgccttgcacagaggaggagtgtggggtgcccatgatattactctgcaagtgacattgccttctagggctttaatctcccagaaagccagagatggaatatctcagtgcttctgagcctttattttcagccctacccgcaacagcattctgcagcttgatctataatggggtgcaccacaccctctcagcctggtcagggatgggggccaaggactccctgtacctgtctcatctggagacgaaactcacctgggactaaccaaaaagaattagaagaaaaagcgaagtctcattacaaaaacacagaggattttagcccagtataactctagaagaaatggaatcctattaaggaaggaagtttggggcaaagcaccaggaaatccctcaaccggaagtgttgctagattgaggaagtgtcctaaaggaagtgggagacagctgtgggcactgtgtgcccagccccggccttcccagcagagtctgtgtgcatcgtgtcccaagtaaaaacaattcagttaccagaatggggtagttccttcacttgctaaaataaatgg

SEQ ID NO: 241201 - DNA, 3589 bp, Homo Sapiens
aaaaccacaggtccttatgaaatattttgaatatagagaaagcacttacttatataaatcccatagaatgaagtcttttctatacaagtaagtgtgttggcacttttaccaaagtctgcctttaataaaatttctcatattatgaataatacaggagctaaatctaagcttaattttagttaacactgcctccatgaaataaaaaccctctcaaattaaaaatctgaactttcttttcaaagtatgtatttctctcacttttcatgcagaggaaggctatttgttgtgtttacctctttctcatctttgaggatttagatttactaagatctgttagatgatgctgaaaaacaatgaacatatttgaaaggaagtgtgttctgattattgcaagaaaagcctgcatttgactgatctcaccaagaaaattcagtttaaagcctttctttggtgatattttagcaattaatcaaggttattgcctaactatataaaattaaattgcaatctaaaaatttccaacctccaaactgttaaaaccgtctctccaacatggttattaatttactgtaaaatgtctttggtgatatctatattcttatgaaaatcttccaaaaaaattaacttacaagagcctatttagatatgaaaccattcataagagacaggtacagataactcaaactttatgcagtaaatttaaaacagaaatgcactttagtaatgaggcactttctcttaaatatttcagtaaagctaaacagttcacaatattatataacacactttttttctttaaataatcagtttaaatttagattacatttgagtgtgtaatgtagttgagcaaagtcattacgtttataaaatgtggcacattactatgggatagatgtttaatgtataaagaaataatatactcctctaagagtagttaaaaggcattacccaagttacctgtactccagactgagtattacctcatcaatgagcattttagtttattttttcatactttgtaaagctgttttgctaatctagagaaaaggccatacatattttgatttctctattaactgatgtgattacttcaattaaagtaatgtttataaaccacagtcattctttatatctaagttcccttgacccttttatacttataatttctaaggcagataaaagagataacaaaatcttttatggaagtaaaggtctttcagtttattgcttaagaaacaacagattaaagaaaacttttagttttagtctctgatgttacagattcagatgattcctataggttatttaaagaattcattttatcattttataagcaccctaaatttataaagctaaccacaaaagttgcctgtacattttttctatacctagtttcttgcaaattctacaatctgacttaagggataattaacggggaatacagtgtattactagacatgaaagtagtcctatccttagaaagctgtagttgaatataccaaaataagtcagttgaagaaatctgtgattctagtagtaataccatatcacttaggaccatcaaaaaaatgtgtacctttctccaaacgacaactgatgcctttctttatgtaagcttttcacgtgttttggcacatattccattgcatttcaataaaaatgttaatgcattatcagtaaataaaagaattctatataaaactattctcagtttcataattgcttcctatatatttccttggaaaatagtgaaattacatatgacaaggcaaccagccaaatttaaagagattttgtagataaaattcatttatgaccattaagttttggctggggggccaaaacatcaaagtctcacttgtgatttttaaaatgcactcttaattcattttgagttaattaaaattccatttgcaaaacactattttaatcgctgacctaggtgtgacaaatttataataatttgtaaaagttcttagggatgtctgggaacagtttcacaccatagaaaaataatttctgtagctagatagtaaattcagttttttcagccatttatagttaatgaaaatctgccttttaaattctgcttgtgagccattccaagaacaaaaacaatgtaacaaaacaaagttaaagtattgccataacctttttcaccaaagttggaacaacaacagaaaaatttaatagactttttgactcaaaaaaagatagaaggaacagataattatgaagtttcagccttttacatagtgaaatatattaagatttagctgtactttgtatgtttgctagagttgtacaatatcttatttctaagaatcattttgaaattcagaaggcattgatttctgatacattttactggaaaatgtgacacatttaccacatatgcagtataaaaactaaatgtgtgtaacacacagattgtgctcgtcatatttctcaaatatttttcctaactttcaagattttttcctaagtttcaaaggttagcttgtttgtttcaaagcaatttccaagtaaggtttttgaaaactgtaaatattaaaagatttaaaatgacagttttcatataatttaaggtaacaagactttctttgacttgcagactaatcctaaaacgaatggaagacttaacaaaactgcaaaatacaggacattttgtatttctgatcttaatgaactcatgtataaaataataatcttctcatttccccaattactacaggatttaaaataaaatacccttaacctattaattttggttagcatagttctatactgcatttattctattttatgcacatagtttggaaatgtgaaaggtaactaacagttttaatctacaactgttttgagacttttgaaatccataaaatagctaatgttatgtgctctaaaaatcctaatatttaaaatcgtcataaccctctgcatgccacaatgacatatacctaaggccaacttaaaaagagaaataatgcactcattaaataacagcaacaatgtaatgatacatgaaatgggctatacaatgacgtttcatgaagcagcacctgcttgtcataaggcattatgaaagaagattaaccttacttacacattacttttatcagaagtaaatgtgatcagctgccaacattttgaatggttgggaatctaacttcagttcaagaggtcacatacattttcaatctggagggctaacatgccttccttgtgcaattggtagactacacggacagatgcttagaatgtctacaattatattgtgctctaatgttacagaataattggaattcttggcaaaaggacttgcacactcaagaatgaactttttttcacacaaaaagcttatcaagaacaagacagtggctcaaaaaccacttttctaaatatacttccatacaaaataatttcaagatataattattagtttcttgtagagtacgctatttaaacaagaataaaagagtaagtatgtgaaaactgcaacaccacaaaaattgagccattttactagtgtaattaaacattagaacaatcttggaacaggcaagcaaaatattcagaagggtgccaa

SEQ ID NO: 241202 - DNA, 1187 bp, Homo Sapiens
ttggctctgtgtttgaagtggatggcaagaaaaacaagatctactgccaaaacctgtgcctgttggccaaactttttctggaccacaagacattatattatgatgtggagcccttcctgttctatgttatgacagaggcggacaacactggctgtcacctgattggatatttttctaaggaaaagaattcattcctcaactacaacgtctcctgtatccttactatgcctcagtacatgagacagggctatggcaagatgcttattgatttcagttatttgctttccaaagtcgaagaaaaagttggctccccagaacgtccactctcagatctggggcttataagctatcgcagttactggaaagaagtacttctccgctacctgcataattttcaaggcaaagagatttctatcaaagaaatcagtcaggagacggctgtgaatcctgtggacattgtcagcactctgcaagcccttcagatgctcaaatactggaagggaaaacacctagttttaaagagacaggacctgattgatgagtggatagccaaagaggccaaaaggtccaactccaataaaaccatggatcccagctgcttaaaatggacccctcccaagggcacttaaagtgacctgtcattccgagccagcgaaccccagcagtaggaatccgtaccctagggatctgtctgtcatttctctgttgctcttgtgattggcaagtacagtatcctttgggaaggccatccccctcaggactgtcctggctccgacctttgtgtacactgcagacgctggttctgaggaactgttgtttcggcctcagtgaggttgcctggatgggatctgtattagacttgagtgcaggtctctcagcactgacccaaggagttctgttatggtactgtacctgtccagtcactggttctctcctcatgtcctctcgccccatgaggttgtgttgtgtcttctaagcgtggtactagtgcttgccacctggtcaccagacctccaaatatggctgccaccaccaggacctttccagttactccttatatgtgtgttctatggaggggcagggaaaaggtggcacttgtgagtgtgtgtggattggcagggggtccattcactttgggttccatcttgctttaaatttcttcattttgattagagacctctttttga

SEQ ID NO: 241203 - DNA, 2019 bp, Homo Sapiens
gaagacgaagttttaaagctggttttaagttacagataatcttctctacttgctctttcacgctgtcaccagtaaacatatacttcatgtgatagaggaagtcacagatgggatccatgtaatttaaatgggtgctacactggtcaacattcagcagcatgtcataaaacgccacaccaatctctatcatacaacgagttctctcttgctgaaatctttgtaaaaatggtccaacaagatggtatacataaagcaactggaattcggtcttcactataggaagaagtacttcagtaagaaactttggaatgagagaaagttgtccgatgctagaatggtgccacacagcatgtgcaagagctaacgtatagctacaactcatctcagagtaggactgatgacaggcagtgaaatcaaagaggcggaatggatagccaacccactctgtttcagacgtcaagctggggctgctgatgacactcacaattcgatcatgaagaacaatccaatatggctcctttaaaatcggaggaaagctagtgaaaaatatcacttatccagcattccaccccaaagtctaaagtaatagtgttttctcattctttaaagttttctatttttccagcttctgcacaatacagctgggtggctttgtaactggtcaaattaagtcagtaacaacctgggagaagtaactgtgagttaaggggctccatacatgtatctgtccagctcatttaggtacctgatatacactatgcagtaaatcaattaatttatcaaacaataaatctatagctttattacttatttaaaaataataaactttaaaaaaatatgtgtggaggtcagagaaaggagtcttcatgtgagctggaaaagtcagggaaggcttcattcactgagaaaggaggctctaagctagcaaagaatgaataggctttagagaaggtgatggaaagaagaagcttctggaataagaaaaatgtcttattccctcacattcagaagtacctaaaacatgtcttaagcactatctgaaggaacaaaggctgtagatatacaacacgttaagtggccaagagtagatcaagctattatgtaaaaactaaagttggataggtaaggtggtaccagaaaatgcagagacccgtaagtcacatagatatatttagatctaatacagaaaagcaaaaactagtcactgtagatttttaaagcagtaataatatgaaaaaactttaaaaacataaaatacttcattaatttgcatgacgtcccgtacaagggcatcctatatgcatctttttctttttgctgacatggaacagctggctgtatttcatcactaagtacaaatcacaattattaactcactggtagggcagtgatgatcaaaccaattgcattcatccatgctgtaatgttctctcttggcactaaaggctgactgcaaccggcaaaaaagaatgtaagtatgaatttataaaaacattttagatggctgacaacggatcttatttttaaagaatatgtctaattcagaggatcgacaactaatccatttcaataaaacaatggggaattttttattgaataaaaatgtaatatgcataaaaactcaagaaggctttttaaaaatacttcctccccaatcattatcccatacttcatgctaatttttaaaagaatcttgaaatcttgaaaacaagatgaagagaatcttgttttaagtgacaagttaacattattcctatattaaatgtcaaactgctattaatgagtagaagtaggaacaaacccggatcttaggatcctgtccagggctcattccataactcctatatcacaaagacaagatctggaaccagaaaacagtcatcatccaatgtgcatcagccttgcggcaacaggtttgtcttaaaagtttgaaatagaataccattctatttacaaataaacaacaaatcttactgcatgaaccagaatacatacctttttaggacaacatttagccaa

SEQ ID NO: 241204 - DNA, 1578 bp, Homo Sapiens
  misc_feature (1497)..(1515): n is a, c, g, or t
aacactagtaattttatttcaaaatataaatatttcacattaataaagaagttacatcagtaggttgtcaaagcaagttaagaaacagcatttgtgtgagaacagagggtatttattgtattcgaatattcttttttacttttgaattgcctccttcacctgagaacccagggatgatacattttcaaagagttatgtaagcaattacaactctatatcaaatcttagttcaaaatcaaattgtactggaaatacacttcagttacctaaataagtggcactgcaaagggcaaagaagggttttctttgggatggctacaatgagagttacatctgctgggtctctgcaataaaaaataaatgatatttgataataagccaaaattatcaggatttgcttccatacttttcactgtaaaataaaaagctagcaaaaagctagtaagaaaccagatgtctagtaaagaactctggacttggagtcagaagttctgcaactaaattctggctccatcattttgtggtataaacttaggggaatatcaccaaaaacttttcagagcctccagagcccccccatctgtacaataaggataatattgtctgtctcacagggctgttacaaaaggtgtctgaaaactataaagtgccatacaaaagcattattaaaatgtaatatcaatatatcaccactgtatttgcacattagttgatccttgaaaaacctgcaaaattaaacacaatactgattttacacaccacaggtggaaaagaatctctataccttaagtatagctctaaacagcaaatatacttgctttctggacttcaagatttattacacactacatggtaccacagtaatagatctgccattcagtatttccattagggatgtcttctcaaagagttgtaaacttgatcaagggccatgtttctcaaaggaccctgtagtcctttgagatgctctgaggaataaagaaggggagtgcagtctaaggtcaaacagtgtttgtccccttttataaattcacaatgtgtaatagcatgttcaaaactcttagaagtcctacagtaaggaaacaaactcagcattccttcattttaattgaccatgcaatcccccacccccaacacacacacactttttttcttacatctattaacatctcttggaactactgctatatggaacacattttgccaaaagctgctcaaccatgaagaaaaggaaagagaagtagaacaacggactgacagaaaaaaaagaactctattctattttgaattctgttactaactggctgtatgtgtatgtcagacaagccacttaaacctatgaatttgggtctttctctagaaagtgacaggaccacctaattttagaagtcccattctagcacagaatttctgactctagtagacagaacaacttgatttataattctcttaaactatcaaaaataaccaaacagtggctgcagacagcatgtgtgnnnnnnnnnnnnnnnnnnngcaggttcccaataatcggtaagttaataaaatgaatatattttgatggcagaatgttgccaa

SEQ ID NO: 241205 - DNA, 1079 bp, Homo Sapiens
gcaaaatcttcttggctttttatttaacttagcagtgaatgcagcaggattggcttaaagtataggtacaccccatggaaacatgcaataagatcacatcgatccagaggctggctcaagtttgactgaggggaaacggagggaaggctgttcctagcacacaatctcagcagaggttgaggtggtggggatttctttcttctcatatgacgctaccgtcggtgacttcttactaggagaccactgagcactgaatcaaggtttctaatatgtttcaaatcaagattttagagtgtattttcttatggcaatagagtataaaatggtaacctatgattttcctcatataatgagatcttcataaagtccttgagctttttagactttaacaaattcagctacagatataaaaaataatctgtaaacacctttaaaatgcgaatttattaaagtttaagacaattctgtattatataatagtgtacaatatgttcttattttagatgtagaaataaaggaaaactggctctcagatgaaaacagaaattgtgtctgacagttaatagaacgaatgtcccataaacaggagtaaaaattaaattttcctttaagacgattttacaattatttctcttgtccataatttcacttagttaaaaccacataaggactttatgaataccctcccctatactattcaagatatacatatgggctaactttcgtggaccgatctagaacctaaataccacttccaacattgtttgacttgtaaaaaaattaacttacaaataacacttttggagcataacctatttgaaagcttggaaccacctgtatttaaaaattaaatcttcattaacaacaccctcaagagtgccctcagtgctgcgaactgaacatgctgaaggcaatgtttttctgtgattatatggtttcaccagccattatgatgataatattatctactagagtctgtggcgctagctagcactaagttatatattgatttttccactgaaaattctttcttgccaacttttttgtacaaagttggcttttataggaaaagcattgct

SEQ ID NO: 241206 - DNA, 1522 bp, Homo Sapiens
  misc_feature (124)..(163): n is a, c, g, or t
  misc_feature (1353)..(1365): n is a, c, g, or t
acaacagcttgtgtgcgacgaaaggaaatcatccaccctcatatcataatcatgctagaaaaggaaagaaatgtgtttaggtatgtcaaaaaggcaaatagtgttaagtggatccctgatttgnnnnnnnnnnnnnnnnnnnnnnnnnnnnnnnnnnnnnnnngaaaagtctctgtattataatcggcggagagaacaatccaaagaaatgcaataataaattaattcacagaaggtaatatgctgacatggtttagaaaaaggatgatgcctcattagacatctacaacagattattcaaatctctttatgcagttttccacttaactttaatgacttttccatctgatcccttcagtaagatttaggccaaagatattaactagtgatgaccttcaactattatccatatatactgccaattatgctaaatgtcatcaatgtttttctggcacaggctagctctacatttttcctccaattctaccaacttcaattttacaaactgagtattatgttccagattttctttcaaactaaattgttacaactaagttgatgtgcaagaaaagttgtggctgctcctaaacttggcccctgctctagtttaaactttctactcttagttctcagcttaccttactgattttggtcttctctcaaaacttagctgaaataagatttgaaaacacagtcccacattaccttttatatatgtgattatgtaagtagagaatatgtatactaaccaaaaaatcactacataaagatccataaaatagaacttgttaaaaaggatatagttgaggaaaacaaaaaaatctcagacttcctattttaaaagccatgtgatcagttatgggaatttttaagacaccacaacccatctagtcaactaagatttcattatagatagactgtatatttctttcttgtgtgcttaactgaaaataaactactaatttaaagtttgtgaattagttaactagtactctcaaattattttacagaatgttagaagtcatgataagatttgatttagagaaaattactatctttataaggaaattactgacaacacaaaaaaatgtctcaaagataggctagaaagctgctctgattctcacaaataggcccactcttcatcttaagtgggaaaataaaaagatgtttatttggccccatacagactcatcaacctaagtagggagtggaaaaaaattctaacttgcatatcctacttagtttaacaacaaaactacctttctaaggctatcaaacttatatgcatatgaattatgcttccaacacttgccagaagacaattctgctttataaataaaagtactattnnnnnnnnnnnnnaagcatttaataaactcagccccactagttaaaaacccagaaaactcaaactaaaactagagtctttttttcactggtcctgttttgaagccatcaaaaaaagctttcacatcaatcttatcaaataattaacagaatcaatgaataaaggacccaa

SEQ ID NO: 241207 - DNA, 1364 bp, Homo Sapiens
  misc_feature (406)..(414): n is a, c, g, or t
  misc_feature (1054)..(1076): n is a, c, g, or t
ttggcatggatttggatgtggagaagtcactcctggtcctcggagggggtgggctgtgtgcctagttcagtgtgactcggggattggtgagggcggacaggtttctgaggcctccctagccttctttgtaaattcacacgagatagtccagggctttccagcgcccagcttggatgataatcctcgtctcccccactctaaggcctccttgagatttctttggggtctaccacgtcctctgcctgtctccaggtggtacaggagatgtggttcctctccctctcctggctccctagaaccccccacttcccctccctgtagctttagctgaccccgtggtggtgggtgtggggtctgtgcgcgtgctcaggtaagcttgggggctccaggtaagcggtcccgtgtnnnnnnnnngggaagcccgcctcctcgccaggcccccaggagttgccgagccccccccatcccgctcggtttggacacccgcaaggccggcatcggtaaatggcacctttttctcttcctctggttgttatttgggggggagcgggctggggcggggcagggtattacggttggttgaggacagccccctaggccagggctgggtgggggaacggggactttttggccttcatgacagccccacgttgatcacaggccagggcctcaggcttgccttctgctacgcgctgcccgagagcagcagtgagcctctcccccgtctcccctctacgactcccctttcctggcaggctcaggctggggtgcgctcccagcacgtgttgagccgggggtgtggagggcgagatggggcagggctggggggaggcagagtcagtcgtctcaggtaaggcagggattttcagtagcaccgcacggctccccatgcttcctccactgcccctctcccctgctgcaggggccccgccaggccccctgggagtgtataacccgcctctctgctccctgccatttcctgaagatttctcccacccccttctggttcattttctgttctgatgtctgttccccccacactcacccccctccnnnnnnnnnnnnnnnnnnnnnnnccggtgtggtctggggtgcggagcgtcccagctgggcctcctgccccggcttggtgtctcagggtgcatgcttggggttgtggaggagccccctcccccacagcagagtccagcgtggagttaaccttcagtttctttgcagcgattttggccgccctggcgggagggggctgttccatcatgtgggagaggaagggccggggagcctagggggtggcgggtgagggtggacgtctcccccgaccaggagtggttgggggcgctgagaggagcagacgctgagatgga

SEQ ID NO: 241208 - DNA, 1594 bp, Homo Sapiens
  misc_feature (1380)..(1410): n is a, c, g, or t
ttgggtcgctatcggaggccgcgcgggtggctgagcagcggcctggtgcgctcgcttagcgggcgacggaatcagacggacgtggacgcccccggagtggaagccgaagcaggagttgttgttgctgaggggctgccgcagccgccgcgagcctccggacagacgccagagcgaggagggcgctacgcgacttggcaagatgacccagttcctgccgcccaaccttctggccctctttgccccccgtgaccctattccatacctgccacccctggagaaactgccacatgaaaaacaccacaatcaaccttattgtggcattgcgccgtacattcgagagtttgaggaccctcgagatgcccctcctccaactcgtgctgaaacccgagaggagcgcatggagaggaaaagacgggaaaagattgagcggcgacagcaagaagtggagacagagcttaaaatgtgggaccctcacaatgatcccaatgctcagggggatgccttcaagactctcttcgtggcgagagtgaattatgacacaacagaatccaagctccggagagagtttgaggtgtacggacctatcaaaagaatacacatggtctacagtaagcggtcaggaaagccccgtggctatgccttcatcgagtacgaacacgagcgagacatgcactccaccacgcagctggcttgcagctgatgcttacgctccccttacaacacctcagtgtatggttggtataagggtttgtatcatgggtaagatcactcagcaccgcacaccagcccagcttagccaggcagctcaggagcagcgaggcgcccctcctcccgccccagtcgcccccgtagcctccccgcacccatggccctttccttgtttgggtgccctttgtccctcctgccccgatccgtatgctctctgagaatcttgctgatcccaggaggggaaggatgaacctggtgggaaaggcggcggcctctccgcttgggttccacccagcctctgatgacccggcttcgtgatgtcagcggcgaggtggcaggaacaccgagggcagggctccaggccagggctccactggagcccttcagccttccctccctgcccccgtgctttctatggggctgctactgtgctggccctggagagtctttttggctgctagttttggggtgctctgccccctttctgtcttccttactgtggttgaggcctcccgagggggctggctgtggtgtccagcagctctccagaggtggtcaggagctccctaaagtgcatggaattggggcttggggtgtgggagggaccaaggggtaggctgctagcagctgaaggtgtcgtaggtttttactaaaagaaccttccactgtctnnnnnnnnnnnnnnnnnnnnnnnnnnnnnnngcctagacgaacacaatcacatgttttctttgctgttcctcccgggatgggcctgttttggggtttgggactctgaacccgagcggggttccttcgcttgactttgatcctggtccttaaatgcctttccccactcccctcccgtgggttcagggggccaagcggcccttcctcaaagcacggg

SEQ ID NO: 241209 - DNA, 1049 bp, Homo Sapiens
  misc_feature (44)..(66): n is a, c, g, or t
ttggctgttctgatgtctgttccccccacactcacccccctccnnnnnnnnnnnnnnnnnnnnnnnccggtgtggtctggggtgcggagcgtcccagctgggcctcctgccccggcttggtgtctcagggtgcatgcttggggttgtggaggagccccctcccccacagcagagtccagcgtggagttaaccttcagtttcttcgcagcgattttggccgccctggcgggagggggctgttccatcatgtgggagaggaagggccggggagcctagggggtggcgggtgagggtggacgtctcccccgaccaggagtggttggggcgctgagaggaagcagacgctgagatggagcaggcccttcaccggtttgggagagggttggtctggctgtcagttgcctggctgtctgttgggcgtgtgcgtgtgcgtgatgatggggacacggggcggggattctgtagagctgggcctgtcctgactagaggaccctctggggactcctctcccctccccctccccacatctgttacagccgcttacaaacacgcagatggcaagaagattgatggcaggagggtccttgtggacgtggagaggggccgaaccgtgaagggctggaggccccggcggctaggaggaggcctcggtggtaccagaagaggaggggctgatgtgaacatccggcattcaggccgcgatgacacctcccgctacgatgagaggcccggcccctccccgcttccgcacagggaccgggaccgggaccgtgagcgggagcgcagagagcggagccgggagcgagacaaggagcgagaacggcgacgctcccgctcccgggaccggcggaggcgctcacggagtcgcgacaaggaggagcggaggcgctccatggagcggagcaaggacaaggaccgggaccggaagcggcgaagcaacccggagtcaggagcgggtccggcgggagcgggagcgcaaggaggaacctgcgtggtggcggtggcgacatggcggaagccctccgaggcggttgacagcgcccccctga

SEQ ID NO: 241210 - DNA, 818 bp, Homo Sapiens
gggacacagacagagacggcccagctgccttccctgtacccggggttaaggcggccgggacagaaggtcatgatgtcgcccctggctctcagtcgcgaggacctgaaaatgagggtgggaggaggggaaacatgtctgtcaacatgcccaactggagaaaagtcacagaaactggtcctatgcacccaggacggctcctgagccgcggaggcgtggggtgaccgcagccgtctcttaggtgtctgccactaaagagttcctcatgcaaacacacatggcccgcggtgcccaggccgcagctggcagtgagctcttccgagcaggcacagggccggggtggccgggaggtcgactcggaaagaggcttctcacagacgggagagttcctgcagacagaccacgggatggggggcgggggctgtaaaaggctttggaagccacacgatccgccacacggctgaacgtgaaacctgccacttctctgagagcggcccgggagcaccccaggattctagaaaacactcaagtgaccgagctttctgggggctggaagggaggtcgctgctggtctgtgctcagcttgctggctctcgtttcaagaagggtctgggggctgtaagggagttacaaaaagggagtggaggagggcagagataaaaggggaaaatccatcttgacatgcaggtccgaggtctctctcttcccctctctcaggcagtccaacaggaggaagtggcagacaaccagaaggcttccttcgggtcggccagggaaggacgcggtcacaccgggagcagctggaaggggacagacaccaa

SEQ ID NO: 241211 - DNA, 877 bp, Homo Sapiens
ccccaggtgggagcccaggcatgtggcacacaatgccccaccccacacttcacaatgccctccccgacacctcacagtgccccaccctgcctgccacccctccccaacagctcagaatgcccctgcgttggctgccccaccctgtgacttatgatgctgctgctctcctggcccctcgtgcagtgccaatgggactaaggttttcattcatcaccagcttcctgagattttagtcctaagaaaagcacagggtagttcattcctcgaagccagcttcctctatgagttctacataaagcctcagtagagtgggtcccattagcaaccaagttgaacaacttttatttgctgtctgaatatagatacacctgaattgttgactgcttttgtaactaaacactcctctcctgtcttccaacgagtggtcatttttgtccgcaacttgatcacagcaatccctggggccctagctctactctcaataaagagttatggctgtgtgttttgaatgacaccttaggacccatcctgcctccacctccttctccataaaatagaaacctaacttgcccctccaagctctgaaatgctgaaacttaccaactcccttttctccccgctatttcttccttccatggcagggactttcaggttttctttcttttactaacaaggcactaagcatgattttctcatacaaaatcgagagccataaagtggcttaccacagtcctatttcaataaagatgaatactcgacatctggcaagtagtgtgtgcctgacagtgtccccactgtgctatgctcatttaaccctcagaaacaatctcatgttacagattttacagaagttgttgggacagagaaggtaagccaa

SEQ ID NO: 241212 - DNA, 446 bp, Homo Sapiens
gttggcttctctgcatcccggttggcaatcttgttgttgatgaggttgtgcagggcgaccacggaacggatcagcgaggccaagtacactaccaccatctggtcattggtcttcaggtaaaaggccttgacgaactcctgcaggctgacatctggcagcaggttgaagacgtcctgcagctggtagatgatctggtggttgatgggcagcttgcctgtggcgactttttccaggtagctcctgatatccagaagcttggagttcagtcccttcaaaccatggacctggtttgtgatccgctgggacagagtgcccaccgtcgtgtctttgatatctctgtaataacccacagttaaaaagggcaggaaaaggcaagttcttacattctaagaaaattcctagctttgttgggtgaggcaagtttttaaaagaaaaatgtcacccaa

SEQ ID NO: 241213 - DNA, 1561 bp, Homo Sapiens
cccataaccagctgattggtccttcattttcctggtgctgttcatctgattcatttagcttgtccctgtagctgtctctccagatcttcctccgtgtcaatgatgtttatatcttcttcatcttgatgctgggtctcatcttcatcctcactgctgctgctgaggtcattgaatatctcccgaagctcatcatgttctaatgagtcatggccctgcctgtgaccagacattcctggagaagagatatccaggccttgattttctgcctcctttgtttcatcttcggcaattatttcccaccgagtactaacagcttcagcatctgtactcagcaatcgtttcacttctttttcaacatctggagattcaatatatttcttctttgctgtcttccggaaccttctcttcctgacattctttagaggcagagtaattccgtggttccagataaactttttctctttgtccttatcctttttcttgcttgctttaggatcagtgctagcaactggctcctccacaggaggatagagatcaccatcaactgtggatacaagcatctgacagatatcagctgtcttgtaaaaagtttttttatcaatggttttcaagctttccataacacagggcaggtctactaattttgaggccaatggaacacggtccactctgacgattccatgacgcccatcaggatgtaactcaattgtcagtctgtccttgaggttgacatgaccagactgtactgcccttctcacagtagaggcatattctggaggcagacgtaagataaactggctctccagttcgtgaggagcatcatctttgcttttactcatctttatttccttgtgattcacttctccaataaatgctggttacactaaaaagttccagctactgcaatagtttaaaacaccagtttgctatgaattgaaatcttttaattacaagaagttctctgtagatcagcagctaagcgtctattttgccttagtttttatttaagctccaagtcttttctctaaatatgctgtgaccgaataccagtcgttaacacaaaggcttattcacagacttaagttcattaaatcagatgcaatgccaagtcccaacctctaggtgccgctgccggacaacgcggagagagctagctagctagctagggaacaggaaagcaaatggcggctcccccggaacggttttcggcccagaaagcccagcagagatactttcaactcacaaactctcccggaacaaagacactcaaaaaatcagggctcagcgagctctcttcgcctcgggtacttacaatccagtgacgattataagttcagtttcaccgggccggagcgaagggaagaggaggccgcaaggagccaagcgggagagagccgagcgtctccttgtcgtttccttaattcttcctgccgcttggcagagtgatccactaccgattactgatgaaagggcccgggatgggcagcgcgaaatcttgccgagaggcgcagctcgcatcaccagaccccgcacctcgccggccctccgtccgggtcgccaa

SEQ ID NO: 241214 - DNA, 1519 bp, Homo Sapiens
gaatgcctttgatcagtgatttcattaagttgactttcgaccactgaaatttacttaatgtctatttttgcctcttctgaggcatatgtgcttctctccttatctctttggctatgataagctaattatttatgtttgcataatatttatgtttgcatgttagtgacatatattttaaaatgtgatacactcctgtaatttatgagagtatgttcattgctgtgagctttgaaggtgctctaatccttcctcatatttggccttagaatgcacctcggatcccccaaggtttaggctttcttcatttgtctttgaaactatatcttctgtctcttgtcatatctgcttattgcgtgtttttcataccttccacctctctaaaagccgttacctgagccctcgttatcacttttggttgaatgtgctgcacttagctgcatttctaagtttctgattcttgcaagtttgtggaaacagaggagtctttaacccacatcagccttgatctaagtgtaccactttacttaaaagttcgtgggatctggagctcctggtctagcaagccatgaaaatgccaataaatgtttgtaataaagcttttatttaaacatccattttgttcgaccttgaagctttactaatatgctgaagaacaaacagccgacgccagtgaatattcgggcttcgatgcagcaacaacagcagctagccagtgccagaaacagaagactggcccagcagatggagaatagaccctctgtccaggcagcattaaaacttaagcagaagagcttaaagcagcgcctgggtaagagtaacatccaggcacggttaggccgacccataggggccctggccaggggagcaatcggaggacgaggcctacccataatccagagaggcttgcccagaggaggactacgtgggggacgtgccaccagaaccctacttaggggcgggatgtcactccgaggtcaaaacctgctccgaggtggacgagccgtagctccccgaatgggcttaagaagaggtggtgttcgaggtcgtggaggtcctgggagagggggcctagggcgtggagctatgggtcgtggcggaatcggtggtagaggtcggggtatgataggtcggggaagaaggggctttggaggccgaggccgaggccgtggacgagggagaggtgcccttgctcgccctgtattgaccaaggagcagctggacaaccaattggatgcatatatgtcgaaaacaaaaggacacctggatgctgagttggatgcctacatggcgcagacagatcccgaaaccaatgattgaagcctgcccatcctcccatgagagactgttgttagtcaacacatctgtaaataaccttgagataacagatgagaagaaatctgattgatgctggatggacctatcacaaataggctgtggacttacttgccaccagcttgtgcatttagtgtgttccttttactttttgatactgtgttgtatgaaacccttttgtcctttg

SEQ ID NO: 241215 - DNA, 723 bp, Homo Sapiens
ttggggatccttttgacacccacaacaggtttatctcccttcacaccagcatctcacttgcttctttttctctgcactttgagttgccaaatcctgttggattgcttttttgatctcaatcccctaacaccttttcttccagaagagcttaaagcagcgcctgggtaagagtaacatccaggcacggttaggccgacccataggggccctggccaggggagcaatcggaggacgaggcctacccataatccagagaggcttgcccagaggaggactacgtgggggacgtgccaccagaaccctacttaggggcgggatgtcactccgaggtcggggtatgataggtcggggaagagggggctttggaggccgaggccgaggccgtggacgagggagaggtgcccttgctcgccctgtattgaccaaggagcagctggacaaccaattggatgcatatatgtcgaaaacaaaaggacacctggatgctgagttggatgcctacatggcgcagacagatcccgaaaccaatgattgaagcctgcccatcctcccatgagagactcttgttagtcaacacatctgtaaataaccttgagataacagatgagaagaaatctgattgatgctggatggacctatcacaataggctgtggacttacttgccaccagcttgtgcatttagtgtgttccttttactttttgatactgtgttgtatgaaacc

SEQ ID NO: 241216 - DNA, 806 bp, Homo Sapiens
ttggcaccgagcaggagctggcggccgctgcagacgaaaggggggaaagggcaggccgggtgagcagacggatcggccgactagacagccaaccagcaacaacgaactgagctcgcatactaccgcttacgcatctaaccaaccgcccatctagctaacccgagcccctccaccgtcaactcaggttcggccggtccccggcccgcctgccggagccgtggtggcagccccgggaggagcactggcgtctgtttccttcgattctcgggattcgaagatggctgcacagtcagcgccgaaagttgtgctaaaaagcaccaccaagatgtctctaaatgagcgctttactaatatgctgaagaacaaacagccgacgccagtgaatattcgggcttcgatgcagcaacaacagcagctagccagtgccagaaacagaagactggcccagcagatggagaatagaccctctgtccaggcagcattaaaacttaagcagagcttaaagcagcgcctgggtaagagtaacatccaggcacggttaggccgacccataggggccctggccaggggagcaatcggaggacgaggcctacccataatccagagaggcttgcccagaggaggactacgtgggggacgtgccaccagaaccctacttaggggcgggatgtcactccgaggtcaaaacctgctccgaggtggacgagccgtagctccccgaatgggcttaaaagaggtggtgttcgaggtcgtggaggtcctgggagagggggctaaggcgtggagctaggggtcgtggcggaatc

SEQ ID NO: 241217 - DNA, 872 bp, Homo Sapiens
ccgccttccggggactctttggtcgccggcctggttgttgtcgtaaccgctgccgccaccgccgcctcctcctgaggactttctccgcctcttttcggcgctgcccactgtcactgctgctgctgcagcctccgataccgtttaacagcctttgcagcaggtcagagaagcgctgcatttcagcagccgcggcctcatcgtcatcgtcccctctccacaggccgccgctatccgagcctccgccagacgaggagagaggccccggcgagctaagcccggggtccaggtgccagtccggttgcctggggtccaggagatccgccagttccagcccagacagaaagtccatatcctccgtctcttcccccgggaggctggcgatcgcctcctcctccatctcctcgggggagggcgcgcgcacggccacgccgccgcggctccccctcccggcttccaactctccttcgtcgccaaactgctgcttgcggccgggagatccggccgccgccgtctcctcctcccccgctgcagcccgggtcaggtcagagggcagcgaacaagttgcagccggctccgggctctcactgcgggttggggagttgctgcccgaggctgccagcagcttggtcaggctatgcctcatgagggccagcggcgggccgcggtaggccccggccgctaagagtgggcctcacgggccccaaggatcccaggccccagggcgggtagcccccggcactggccgaaacgaaatgcagggaaaggtccgagtcgcctcccgcctcacttggctagtcgaccccccgcgccaaggcgcggggagggacgggagaacgaagcggtgaggccctgcgatgactcgaccgcgccaa

SEQ ID NO: 241218 - DNA, 1261 bp, Homo Sapiens
actttgtacaaaaaagttggcttgcactgggcaccctcgtggggttcagcaccttggtggcctgcctggtctgcagaaaagagaagaaaaccaaaggcccctcccggcacccatctctgatatcaagtgactccaacaacctaaaactcaacaacgtgcgcctgccacgggagaacatgtccctcccgtccaaccttcagctcaatgacctcactccagattccagagcagtgaaaccagcagaccggcagatggctcagaacaacagccggccagagcttctggacccggagcccggcggcctcctcaccagccaaggtttcatccgcctcccagtgctgggctatatctatcgagtgtccagcgtgagcagtgatgagatctggctctgagccgagggcgagacaggagtattctcttggcctctggacaccctcccgttcctccaaggcatcctctacctagctaggtcaccaacgtgaagaagttatgccactgccacttttgcttgccctcctggctggggtgccctccatgtcatgcacgtgatgcatttcactgggctgtaacccgcaggggcacaggtatctttggcaaggctaccagttggacgtaagcccctcatgctgactcagggtgggccctgcatgtgatgactgggcccttccagagggagctctttggccaggggtgttcagatgtcatccagcatccaagtgtggcatggcctgctgtataccccaccccagtactccacagcaccttgtacagtaggcatgggggcgtgcctgtgtgggggacagggagggccctgcatggattttcctccttcctatgctatgtagccttgttccctcaggtaaaatttaggaccctgctagctgtgcagaacccaattgccctttgcacagaaaccaacccctgacccagcggtaccggccaagcacaaacgtcctttttgctgcacacgtctctgcccttcacttcttctcttctgtccccacctcctcttgggaattctaggttacacgttggaccttctctactacttcactgggcactagacttttctattggcctgtgccatcgcccagtattagcacaagttagggaggaagaggcaagcgatgagtctagtagcacccagggacggcttgtagctatgcatcattttcctacagcgttagcactttaagcacatcccctaggggagggggtgagtgaggggcccagagccctctttgtggcttcccacgtttgg

SEQ ID NO: 241219 - DNA, 1701 bp, Homo Sapiens
ttggcatttgggaagagttaaaggaaaccactggtgctaagcaatgtgcttcaaaatatgattctttgggaaaacaacttaaaaattaaaagttttatctgattactttataacttgtgaaaattgtgcattgctttggaataatttcaggagtcaccatgccatctctatgaatagatttagaaaactagaaaccacaatttcacaaaatcttttaccttttgtgagtttagtagtcacaacatttaggtaggcttatactgataaaatcttggctatgaatacctctgaagtaaaatcaactagtatagaatatgcagatgttaaagcaatacaaacttactatcttacgcttctgtggattagaagtccaacacagatctcactgggctaaaatccagatgtcagtagggctatgttctgttttagggcctctaggggaaaatctatttccttgccttttccagcattttttgactcatgtccctcttccttagtgcaagatgcaagactaatttactttaatttttaaggtaaaaatggatggacatagtacctaaagtttaattagccttgttagatttattttgttaagtttaatatatatggaacttgatttacctcattgttactataaatatttgttcagacctgatggccaaaagaaaggaagaaaatttttcctctcctaaaaatgccaaaaggccaagacaagaagaattggaggattttgataaagatggtgacgaagacgaatgtaaaggtactactttgactgcagcagaagttggaataattgagagtattcacctaaaaaacttcatgtgtcattcaatgcttggaccttttaagtttggttctaatgtcaactttgttgttggcaacaatggaagtgggaagagtgcagtactcacagctctcatagtcggtcttggtggaagagcagttgctactaatagaggatcctctttaaaaggttttgtgaaagatggacagaactctgcagatatctcaataacattgaggaacagaggagatgatgcctttaaagccagtgtgtatggtaactctatacttatacagcaacacatcagcatagatggaagtcgatcttataaacttaaaagtgcaacaggctccgtggtttccacgaggaaagaagagctgattgcaattcttgatcattttaacatccagtttgaggtggataatccagtttctgttttaacacaagaaatgagcaagcagttcttacagtctaaaaatgaaggagacaaatacaaattcttcatgaaagcaacgcaacttgaacagatgaaggaagattattcatacattatggaaacgaaagaaagaacaaaggagcagatacatcaaggagaagagcggcttactgaactaaagcgccagtgtgtagagaaagaggaacgttttcaaagtattgctggtttaagtacaatgaagactaatttagagtccttgaaacatgaaatggcttgggcagtggtcaatgaaattgaaaaacaattgaatgccatcagagataatatcaaaattggagaagatcgtgctgctagacttgacaggaaaatggaagacagcacgtcagacttaatgaggcagaacaaaagtacaaggatattcaagacaaactagaaaagattagtgaagagacaaatgcacgagcaccagaatgtatgg

SEQ ID NO: 241220 - DNA, 1091 bp, Homo Sapiens
ttggtgcctgtggagacttggggagggcggcggggacttacggagcgtaccttacggggacgacttctgcatgtcctttggaaactgtccgcgcgatctgtgtggagcaggaattttcgggaagggtaagggctttttggtctttcgtttgaccccgcaggttttggttatgaacaggattcggattcacgtcttgccaaccaatcgggggaggatcactccagtgcccaggtctcaggaacctctgtcttgtgcattcactcatcgtccatgctctcaccctcgtctggaggggcaggagttttgcattaagcatatccttgaagacaagaatgcacccttcaagcagtgtagttatatatcgacgaagaatggaaaaagatgtcccaatgctgccccaaagccagagaagaaagatggggtgtccttctgtgctgaacatgtccgtaggaatgccctggcacttcatgctcaaatgaagaagaccaacccagggcctgtgggtgaaacactcctgtgccagctgagctcatatgctaagacagagctggggtctcagactccagaaagtagtcgcagtgaagccagccgaatactagatgaagacagctggagtgatggggagcaggaacccattactgtggatcagacatggagaggtgaccctgacagtgaagctgatagcatagacagtgatcaagaagatcccctaaaacatgctggtgtctacacagcagaagaagtggccctgattatgcgtgaaaagctaattcgtttgcagtcgttgtatattgatcagtttaaacgacttcagcatctgctcaaggagaagaagcgccgatacttacataatcgcaaagtggaacatgaagctctaggcagtagtctcctgactggcccagagggacttttggccaaagaacgagagaacttaaagcgattaaaatgtctgcgacgataccgccagcgctatggagtggaagccttactgcatagcagttgaaggaacggagaatgctggccacagatggtgctgcccaacaggcccataccactcgttccagtcagaggtgcttggcctttgtggatga

SEQ ID NO: 241221 - DNA, 897 bp, Homo Sapiens
acaggaaccgcatgggccgagacaagaagagaaccttccccctttgctttgatgaccatgacccagctgtgatccatgagaacgcatctcagcccgaggtgctggtccccatccggctggacatggagatcgatgggcagaagctgcgagacgccttcacctggaacatgaatgcttattcctgcaaggcgtcttgtcagtacggtctgggtggagcagggagagaatgttgactgagaggaccttgctgaggtctggctggccacagatggtccctgtgagctcccatctgagaagttgatgacgcctgagatgttttcagaaatcctctgtgacgatctggatttgaacccgctgacgtttgtgccagccatcgcctctgccatcagacagcagatcgagtcctaccccacggacagcatcctggaggaccagtcagaccagcgcgtcatcatcaagctgaacatccatgtgggaaacatttccctggtggaccagtttgagtgggacatgtcagagaaggagaactcaccagagaagtttgccctgaagctgtgctcggagctggggttgggcggggagtttgtcaccaccatcgcatacagcatccggggacagctgagctggcatcagaagacctacgccttcagcgagaaccctctgcccacagtggagattgccatccggaacacgggcgatgcggaccagtggtgcccactgctggagactctgacagacgctgagatggagaagaagatccgcgaccaggacaggaacacgaggcggatgaggcgtcttgccaacacggccccggcctggtaaccagcccatcagcacacggctcccacggagcatctcagaagattgggccgcctctcctccatcttctggcaagga

SEQ ID NO: 241222 - DNA, 1592 bp, Homo Sapiens
  misc_feature (491)..(586): n is a, c, g, or t
  misc_feature (588)..(609): n is a, c, g, or t
  misc_feature (724)..(751): n is a, c, g, or t
  misc_feature (1418)..(1438): n is a, c, g, or t
aagttattgctagacatatcaaaacacagtataaaactggtcatcacaacacccttctgcagtaatgatgagagtgggctaggaatgtgatgaaaggcacagaattcataagacttgagtaagtagatccaaatttgttatcactaatggctcaaacaatgtggagccactgattttctgaagtgaatataagaaacagtagttaatagtatttatccaggcttctagtataagacattgtactaggagtttctcaagtagaaaacttgtctcacaagggtaagttacataaaaactccaaagaagaaagggcaactgatagaagattagttctcctgtggctagacggtgcgttgtacagcctttccgtttagtgaggttctactaaagggaatgccaactttgtggttgacatgggtgatccttgggttttgtcacgcatgaaattaacaaataaaaaatgttcaaggccaggtgtggtggctgatgcnnnnnnnnnnnnnnnnnnnnnnnnnnnnnnnnnnnnnnnnnnnnnnnnnnnnnnnnnnnnnnnnnnnnnnnnnnnnnnnnnnnnnnnnnnnnnnnncnnnnnnnnnnnnnnnnnnnnnncttagctgagtgtggtggtaccagcctgttgggaggctgcagtgagaggaccattcgagcccaggaatttgaggaagctatgctcataccacttgcactccaagaccccatctcnnnnnnnnnnnnnnnnnnnnnnnnnnnngttttcagtttatggaattaagcaattaagcatattaaaaagccagggcctaataagtactatgctgatcaagtgcaaaggagagttcttaatatgaataaatgggtcttacaagtcaattaattcaagaggttataaaatacattttttaaaagagttaagcttatttttcatacaaagaaaaaattccaatcacccattgacaataccccaatcagccaacagcccatcaatgcagagtctgctgcagttgtctggaagttttcactttcttcttccagaaaaaatgctcaattttcattgccaacgttcttggtagattcactcttcactagaaaaaaataagtaaacatacagtcaagtgtttatatttttctgtttaggttgctctgtccctcttctctccctccttctgatgtacagcaaaagcactgctcacagggacacacaaaccgcgtcatgtcccaggcagctaggatatacaattctggccacaataaatagagaaatgatgtctgaaagtggcaattatattttgtgaggtaacatccttcctgactctgtggaagacttgggaatggtcacttcacaatgtggttatgatccatattcatgccactgaatagatcactattatcctggccagccacttgtggttagaataacnnnnnnnnnnnnnnnnnnnnnaaacttaattgagggtcagtatatgttgagtgaatgtggagtgacagaagactagctaatcgccatctccttcctttcacaggaaagaagaatagaaatggagctcctctgacacccctgtcttgcttagagcaagcaagactaactatgccaa

SEQ ID NO: 241223 - DNA, 706 bp, Homo Sapiens
aaattgatgagcaatgcttttcttataaagggaactttgtacaaaaaagttggatctttcccctctttatgaaatctcccaggaagatcaagaaagtgggaaccactgagaaggaacatgaagagcatgtctgttcgatcctggcttccctcctgcggaacctgagagggcagcagcggacccggcttctgaataaattcactgaaaatgacagtgagaaggttgacagactaatggagttgcattttaaatatctgggtgcaatgcaggtggcggacaagaagattgaaggggaaaaacacgacatggtccggcgaggagagatcatcgacaatgacaccgaggaggagttctacctccggcgcctggatgcggggctctttgttctccagcacatctgctacatcatggccgagatctgcaatgccaatgtcccccagattcgccagagggttcaccagatcctaaacatgcgaggaagctccatcaaaattgtcaggcatatcatcaaggagtatgcagagaacatcggggacggccggagcccggagttccgggagaacgagcaaaagcgcatcctgggcttgctggagaacttctagaggcaccttggccctgcgcatcatggactctctcagcttccctcccaggatcagtttctacacaactctgtgtggcttttggacaaattaaagctagttttggt

SEQ ID NO: 241224 - DNA, 804 bp, Homo Sapiens
ttggcataaccaagctgctccgcaactacaggtctcatcccaccatcctggacattcctaaccagctctattatgaaggggagctgcaggcctgtgctgatgtcgtggatcgagaacgcttctgccgctgggcgggcctacctcgacagggctttcccatcatctttcacggcgtaatgggcaaagatgagcgtgaaggcaacagcccatccttcttcaaccctgaagaggctgccacagtgacttcctacctgaagctgctcctggccccctcctccaagaagggcaaagctcgcctgagccctcgaagtgtgggcgtcatctccccgtaccggaaacaggtggagaaaatccgttactgcatcaccaaacttgacagggagcttcgaggactggatgacatcaaggacttgaaggtgggttcagtagaagaattccaaggccaagaacgaagcgtcatcctcatctccaccgtgcgaagcagccagagctttgtgcagctggatctggactttaatctgggtttccttaagaaccccaagaggttcaatgtagctgtgacccgggccaaggccctgctcatcatcgtggggaacccccttctcctgggccatgaccctgactggaaagtattcctggagttctgtaaagaaaacggagggtataccgggtgtcccttccctgccaaactggacctgcaacagggacagaatttactgcaaggtctgagcaagctcaccccctcttcttcatggccccacagccatgactacctcccccaggagcgggagggtgaagggggcc

SEQ ID NO: 241225 - DNA, 1698 bp, Homo Sapiens
  misc_feature (765)..(777): n is a, c, g, or t
taatgaaatttacagtgcatattaaaagcatgatacaaatggaaatttaaaattttgtattaggaagcccagtttgctaaaagtagcattaatatcattcacatcagattttaatttgttacacatttttgtagttcagcaaaggcccctatgatgaaaaacaattaaaaagtgttatgacaaaaataattatctgtgtaaaaagggggagacccaaaagatttttcatatggttatttaattcagttaaatagaactgttatgaatttgagaggaatgaagatattcaaacactaacagaaaatcattagccttatattagagcattcaaatgcttatgtaactcttcaatccatctggcttcataaaaaccaaaattttgaacacaaaaaagtggcagagtttacattaccttttgtatgttcctaagtatgaaattgcatcaatttattatgaattaaatttgaaaagcatcacagatttaaaaacaaagtacaaaagagcctgattctttttaattccacaaatacctagcatctcaaagtaacatgtaaacaaacttctatgctgctcaatgaatccttccaatttcaataataaactaaatagtattggatctagtatatgactttcatgtgtaagttatggttctatccattactttaacaatattactgatgtaacagagaaaaattttcaactattgtatttatttaaaacaaactgacaagttcaagcacctgtcttcagaaaagccagcagcannnnnnnnnnnnnaacatactcaaagtaagatttggcctaagcccttaatacctttctgaacagccatgcaactaaacaccctcaggagatgttacataagggagagaagaacatggagcaatttgcactttttcccctagataatattaacaaggtaaagcaaatccagatctttatgaatgaatggctgtcatgtttaatacacttggagctctataaaactagagccactatcatatatgtttatatagatatatatgtatttttaataaagtctctcacttgcttcaaaatttaaggatgatctttttcctggtcagtcatttcaagggaacaataaataaagtagaaaaggatgaactgttttgcatatttctgtggaagaacggaaaacatactttgagaggttcggaaaattcactgtacagaatgaacagcttatatacactatctgtgcaatttttcttggctggggtatttaaatgcaagagctcctccaaaataagaagccacattcattcttgtccaaatccctctgtctcttctattgcaaaaagaagtttttcctttagttgttcataactcttatatggtggtagatccaagcgattaaaacatgtatggcttcttggtaaccaagtgtctttgccaactttttcaatgcaaaacttttgaggcccattacttcatttacccatgagctcagcaaatcctcctagaggtaaacggcaggttccagtgacgaactgcaatagtcgcattcttacttcattgtctgtctctttcacaaactgtaatgaaattaaatgtactttaatatgaaatgctaaactatcttcaatcatgaaagtagtagacacttgaagaaattaaataacactgaattggttcaaaagatgtgctaaaggttgggcgtggtggctcacgccccaa

SEQ ID NO: 241226 - DNA, 1198 bp, Homo Sapiens
gagggaattccatgctttaatagacactgaaaatcacaaaggaggaaggccaagtgctttagcaatctcaataaaaatatgaagttctttttacatggtaaatttcataatataaaaagtttaatgtctggaaatggtgtaatttacaaaaaaagtccacgtaggccaaagatggctaacactgcatataaggaacgtgaatgccagtggaaaggtgtctgaggaggggcagggccacaggtgtcctgacagggaacatctttgaaggatctggcacaaacaagggcccagttcacaaaccacaggtacactcattttagatagaacagcagaataggtgatgaaaattatacagttttcacttgttgcctacttactgaaagcaaaccagattattgcatggcatttttccagcctgaactgaattatcaaggctacagttcttcttgtgggtctgcaaatgtgtgtggctgggaggtggcagaatcggcacgggccagggaccggctgcagtgatcatatgctggagcgtcactgggacagagagagcaggatgaggacagcgtgggtgacacctttgtctcctgctaaaacccagcaagtttcagtgtggaccgtgaatttttaaaaaatggaatggaggtgaaaactttcattttgtgttgcacatcagtgtggatcaaaatgtaagttttagtagcaatttttctcttgatattttgacttaattaaaaaaatcaaattagttgagtcatttactggagagaattaagaaagctttgactcccttgctctgtggtcctgctgaggtttctaagagaggggagttgtacggcttatagtcattgtatttacatctgatggagtagcagagggtggggcatgccagtttcctgagctaaaaggaaatatatgcaatgctttctgcaaatggtaaggaaaaaattgttttgtaaatattacatccatggactcctcccaagtgggacaaagagccaagggctatgcaggaggcatttgcttccatccacgtggccctcacataccctgggctccccggacgccagtcagtctatccactacctgacttgcttttcctagactggagaaacaaaacgttattccattttctgtcatccataccaggagtcagcaaacttcttaaaaggccaggtattggctgggcgcagtggctcac

SEQ ID NO: 241227 - DNA, 1409 bp, Homo Sapiens
  misc_feature (1245)..(1279): n is a, c, g, or t
cccaaatagctttgatctggtggacagttatgaaggcagcagtggaggagtaaggagataaataagaggacatgaatcaactaaattaataataaccacagttcaaaagttagtgtgaaagttttatcaatatcgaaattgtggaatggtgagcagaatacaactgggaccttgatactgagatctaactctagatgtaccatagttagttgtatgagattggacaagtcaaagtacttgacaatcagtttcttcaacttagaaataaaacagtttaggccaggtttattaaagtattaaaacccctttcagaggcatagttctataactctaaggaacataagactgtggatacctatctactgtcaggtactgctttggcagcagtgaaaatatcagtttcaatataactttaaacaataaatggactaacacttttgaagtatgaagcaaatacaaaccactggaatatttttatcccataaatcgttactttctttcattaagaaaactttaacctcttgatctaaaatgccatattgcatcttttaagttaaatagcattaccactttcttcattattatgaaatttaaattctgtatactactttattatttagtattaatatttaaatttatccacaaatgtgctttctaaggaaacttgttttaagtaatgttttaaaatattcataaaatttgttttctttactttgagatctctgcattctttaagtgatcaacgcaatttataaaaccggaacttttatatgaaagtctatatacttttaatgtccttaatttgaattaaacattcccttataatacaaattaatgtaaacctaatgagtaaatatctatattgacatgacatacttcctaaggaaatatgggaaaatcataccttttaaataggtaaatgtatattcaagagaatattaccaagcttgattctctcccttggatcttaggaagtaaacaacagtactgtattttcacccacctccccgaactcagctttatttgtgctagaagaggtgattttattcaactagttaatttcagtgcaggttgctgtaaacaggaaataatatgttatttatcatagtaagacaaaaaaaatttgaagtgaatgacttgttgggtctatgcaaacacctcatcctacctcagaagcaatcctaagaaattaatacttacttagctttctttttaggaaggccctaatacaaggcatctttctgnnnnnnnnnnnnnnnnnnnnnnnnnnnnnnnnnnnagtgttacagcctggactggccagcaagacagaaatttcttcttcctaaaaatgtgtaatgtcaaataaccattatcaaccctatctatgttaatgttcgcacactcatgaatggggaaatgtaggccaa

SEQ ID NO: 241228 - DNA, 1066 bp, Homo Sapiens
ctttgtacaaaaaagttggatctttttttacctcactcaaagtcataaccctttggaaacaaaacccaccagtaccccagattttgaccacagatgaatcagtactacaaggactggttagagggttgaatgaatctgtatactcagcacttaacacagcactctgggtaaaagaaaaaagatcctcaaagatattagttggttacatcaagaaaggacaaacttaggttaatctataacttcatctcagaggaacaggaactttggagataaacagggctctgccacttgcaagttgcaccatccctggtttctccatctgtaaattgattaaaacactgcctatctaataagattaaataagttagaagcattcagttaaatgtcaactgaaactattgttcatgtaaattgtgcttgatgctttttctttctagattcaatgattattgtcattttacctccataggccctcaatagaaatcagttgcagagggcagaagcctagatattttcaccttaaaattggagggtgaaagacattgaggtgaagtagagatagagggtacacagaaaaatcgtataagtaaaactaacatcgttaacattatttactgtaagttatctttgtaagagtggtaaaatacattgtgttgttaaataatttcatttaaaaaatgcatcactttgtgtgtttttatattgctaaaaccataaggccagtctacaaggtttgtagataaaatagaaacataccttccttgaaaagcagaataaattttttaaaggcaggaaggaagtgtttgaaccatgtgtcaacaagctttactgtcaaagcaggcttttggtatgggaagaaaaatacttataaatacttggttttaatatttgctttataaaatacatttaaaatacagcatttttaaatctctaagctcaacttgaagatataaaaaccagtaaatttgataaaaatgagaaattacattcccatttctttaacaatttgtaaattccaattatcctgaacatttaataccatttacatattttattaatcacattt

SEQ ID NO: 241229 - DNA, 933 bp, Homo Sapiens
  misc_feature (705)..(756): n is a, c, g, or t
aaaaaaactttattaggttagtcttccacccttttaaatgtactctaggtacaaaataaacattatacacatataagatcagtctttccaactttagaatgtataaataagaatgacattttaaaataaaatagtttagtcacagtcacacaaaactaccttctaaggaaaactgtccagtgaagccgttaaatttgtgctttcagctatgaagaattaaacttaaaatgcattcattcttcttttaatgaaaaataacctacccttggaaacagcataagcattgttatggtagtctagctcctaaatgaaaatgtggactgagttacagtttactgtagtaacctacctaagaagcctttgaaaattagcaatcgatcaaagtatttacataaattcaagcctttttcttaggacaaaaggtaacacagttccttaacctcttttaaaaggaactttgaaattaaaccttatggtcacaactttcattcaaaaatgttgcttaaatatcaaatttctcttcacagacgctatgtccattttcttcgtaatcttctcttgttaccaccatatcttcaaaatcatcattctctgatatcaattttccaccttcccaggcataagtaatagggctgaaaataaaggtataaatgaacccagatgattttacaggaaaactgaaatgcctgaaacataaattactannnnnnnnnnnnnnnnnnnnnnnnnnnnnnnnnnnnnnnnnnnnnnnnnnnngctctacccaacccaacagaaaattgtttaaggtacagaaataagcatacatttcatatgagtagagcaacccaaaaaggaaaggaaccttgtttaccgctacaaaatagtaaatgttcctttttccctatgtcctgaatttatggaccctctaattttaaagaaaaaacaagccaa

SEQ ID NO: 241230 - DNA, 922 bp, Homo Sapiens
ttggcttggcaggattgtaaagtccaaggaccaaatctttgggcatgtctggagaatagatgttcatatgttggctgtggtgaatcacaagtagatcacagcaccatacattctcaggagacaaagcattatctaactgtgaaccttaccactcttcgagtatggtgttatgcttgcagcaaagaagtatttttggataggaaattaggaactcagccttcattgcctcatgtaagacaacctcaccaaatacaagaaaacagtgtccaggattttaaaatacccagtaatacaacattaaaaactcctctggttgccgtatttgatgatctggatatagaagcggatgaagaagatgaacttagggccagaggtcttacaggtttgaaaaatattggaaatacttgttacatgaatgcagctttgcaggctctttctaattgcccacctttgacacagttttttcttgattgtggaggactagctcgaacagataagaaacctgccatttgtaaaagttatctcaaactaatgacagagctgtggcataaaagcaggccaggatctgttgtgcctactactctgtttcaaggaattaaaactgtaaatccaacatttcgggggtattctcagcaggatgctcaagaattccttcgatgtttaatggatttgcttcatgaagaattgaaagagcaagtcatggaagtagaagaagatccgcaaaccataaccactgaggagacaatggaagaagacaagagccagtcggatgtagattttcagtcttgtgaatcttgtagcaacagtgatagagcagaaaatgaaaatggctctagatgcttttctgaagataataatgaaacaacaatgttaattcagatgatgaaaacaattcagaaatgtcaaaggattggcaaaaaga

SEQ ID NO: 241231 - DNA, 1284 bp, Homo Sapiens
  misc_feature (104)..(137): n is a, c, g, or t
aaagtcagacataaaaaatatccactgctaatggaagccctgctctgtgcaaacatagtgtggtatatattaaacaatcacacatttgaggtaattagctgggnnnnnnnnnnnnnnnnnnnnnnnnnnnnnnnnnncacctatacatagacacatccacagaatattcacaaatctattggccccaacaccagcagatagtcatattaaatgaaaaatatcacataccaacaggaaaaagttacacatagggaatatacaaaaaatatggtgctataatccttaatataaggagtatgttttgaattaatgttttgaggaaaagtgtttccatttatatgaaagtatctatttaatagtaataaaaccaaaaaggaagctgaattctaggactgttttacctgccaaataattgaagggatgagcaagaattccttgaaaagcctcattctatcctttttctttgtaactaaaaattagaatttaaaatgttggaaattattgccagacaagtttcttttcattggtttatagggaattttatggattttaactaggcaatggtccaatgtggtcaacagacatggtttttcagctgttgaatgaaaattaaaataaagatttattgttgattttcattagtttttctgttcagataagaaaaaagattatgaattccctttcagtttgcttcactcattatgaagatggatagtaataggatagtactgaacccaagcttcacatggggaagctcaagaaatgtacaaattctcttcttaaccatttggtcctctgatataaaacttgcttaactggcaagatggctcacttggtcctcaagccaacatcaagaaatatttagctgtcttaacacaggtgggagacttttttttaatgaaatacataggaatccattaagtaacattagcatgtcatgtgttaaatagcttcatttaaaaatgttacagatcaacagaagggaaatcaaaaacttatttttctcagtaactactttacatactagtgtaattaaaggtttaactggaagaaaaattcagcataaaagtataattaaagtaaaaagctggtattccacattcctgttcctatgaacacctgagctggcacaaaagctgagtagtttaatgcattggcatatatatgccttaaggactgtacttttctctaccaaatctttgtaaatcataaacaagcatgtaatgattatgaaacaaatacttatttaggtgttcaaatgtaatctgtttacaaaatatccaa

SEQ ID NO: 241232 - DNA, 1039 bp, Homo Sapiens
ttggcagcgctttcttctctgtccaagttctgtgctgaccacagctgtccacaggcatgtttacactccctgttcttgcaggttgacttgagagaaccacgtagctaaattggtgagagactcagcctgaccgcttgtctttagaaggcctgattggaagagtgcactctattgactttcctctaacaatgaaattgtgaaagaggtcctgtaataaagagggatccgaacaagctcagaaagaaaatgaatttcaaggggctgaggccatggttctggagagcgttatgtttgccattctcgcagagaggtcacttgggccaaaactctatggcatctttccccaaggccgactggagcagttcatcccgagccggcgattagatactgaagaattaagtttgccagatatttctgcagaaatcgccgagaaaatggctacatttcatggtatgaaaatgccattcaataaggaaccaaaatggctttttggcacaatggaaaagtatctaaaggaagtgctgagaattaaatttactgaggaatccagaattaaaaagctccacaaattgctcagttacaatctgcccttggaactggaaaacctgagatcattgcttgaatctactccatctccagttgtattttgtcataatgactgtcaagaaggtaatatcttgttgctggaaggccgagagaattctgaaaaacagaaactgatgctcattgatttcgaatacagcagttacaattacaggggattcgacattggaaatcacttctgtgagtggatgtatgattatagctatgaaaaatacccttttttcagagcaaacatccggaagtatcccaccaagaaacaacagctccattttatttccagttacttgcctgcattccaaaatgactttgaaaacctcagtactgaagaaaaatccattataaaagaagaaatgttgcttgaagttaataatttgcccttgcatctcatttcctctggggactgtggtccattgtacaagccagatttcatctattg

SEQ ID NO: 241233 - DNA, 1024 bp, Homo Sapiens
  misc_feature (619)..(629): n is a, c, g, or t
ttggccttattgcacttattggggttgaagctcttcagaggagctggaactgtctaccccagggacacacccatttcgttgctacccaagtggattctgagacaggcaccatctccttgttccccctctctcttttgcctcccactgactgcccttttccatgtgtcttcattctgcctgaagaaggctttcccaggatgcacgtcctcagagggagcagcctatctcccccaagctggaggcggcagaggactgggccaagccccaacctgcctcccagccaggctcctccaggcctctggtttagcggagccccctgagcccaggcctgtgtctagccccagtggctcactgaactttcagggcagtcagggggtcctgcttagaagccagtcaccagccctctgcctgcagccatggaagggggtgtgcacgtgcctctgtgtgtgtggctgagtgtattctgcgcgtgtgtgtggagggagggagggaggggagcatggtgtctcccgctccaccgccctttgttgagccccatcagctgcccccttttactttgcattgaacggcctgtccaaagatcctctctctagggcagcagagagctttttgcactttnnnnnnnnnnngaaagaaagaaaggtcggaatttcttttgggtcaatatttttaagtgtgtgaggagatgctcagtagcagcagcctatggcaagagcttataaatgattgatgcaaatttgcactctgctccccctctgtaaggatactgatagcacaacctcttccccccaccccgccccgccttttggtcgtccatccctgtccctttctggccctcttcctgtagcccagtctcaggctttcctcttcctgaagccctacagagttagggaatggagcccaggcaccacggggtctaaagtgtgagccactgagaagagagacgccaactgcaccctttgccacttccaaagcaatagaggcagagtggtcccctctttgccacctaggccagttttgaccc

SEQ ID NO: 241234 - DNA, 825 bp, Homo Sapiens
  misc_feature (630)..(638): n is a, c, g, or t
ctgagtagactttctaatgagcgtaatatgggagaaagggcaggggtggttgtggaactctctctccagcgtttgagactcacatgaggtaaaagccacttcatcttatctggaggtcttgaggcaaagttggctataggctaaactatgaagctatctctccattacagcacctcactgaagcttaaagtgctaaatagtagggcaatatttcagaatttcaggtgtttgggagatagggaaggaatttttctggaattctgtcagcatggaggtgagtggggcctctatgggtaaacaagtctgtgggtttttgccttgccctccattgtcttctccactccacagtttatcccagaaatgtttccccaacactagcttcccagtctcactttgttctttgttcagggggaggataacaggagactatgaagatgactctaccccactggtgatcctggcctcaggatttatttcccatgtgacgcagagtgaggaggcacattcccatttttgagacctcatttcttgcaacatcaatttttctgattagcaccataaaaagttttaacaccatgaccgtttaggttagattactttgaggaaaaaggtagacacaatccaatcacnnnnnnnnncatttatagaagagcctacaattattttagtttttcattcatatgtgcatccttcacatgtcactatactttcagattaagctcagtggcacagagcttatttaaacaattctgaactgcaccatgaattaataggcttcccaagctttttcttccacgcccaagaaacttcaggcctttacctgag

SEQ ID NO: 241235 - DNA, 746 bp, Homo Sapiens
  misc_feature (507)..(516): n is a, c, g, or t
taaatggacaacatacggggaggaccaaccaccgccactatactctgcccatccaatcttcagataggcagtaagagaatgggatgcggagtaaaggtaaacggagtcagggagtgctgagaaagctgtcaaacactaaacgctgacttgcaccaggccgtgtctccagcggagacagaagtcctaacattcagcattgacaggctgcctgagtgtgacagtctacttcaaaaagcagaagacacaattctctcagttctgagactgtctcttacttttgcccttagcatggtgtccttgggcttcgcttcacctttttccccagtcccccatccttatgcaaagtaaaagcctttacatttctccttccccccacaccttctgcttcaggatgagtcctttggggggaaagggaggggaactcatttttaaagggaatctggttacaattctttctcaagagggactattctgaatgccaccaactctaaaacaactaaatgagannnnnnnnnncctgtcaactgcaaccatgtcatgtcctaggtgacagatgtgtttttcactaaaatggatggtactctcttcaaggtgagtaaccaggaggccaatgaagtttcttcaggggggtaggaaaagctcataaatgcacacaccacctcatccttcaagtcaaccatgtgactacaaggacttagctttaaaaagtcaaaattctgagctgaatcaatctagccaagagccaa

SEQ ID NO: 241236 - DNA, 1633 bp, Homo Sapiens
actttgtacaaaaaagttgggaagtatggagttaaagactgcagcgtgaactgaggagtcccggacaggccgcttgctgcagaggatccagtccagatcccaggagagcccctctgccccttcggacctcgtctcccatctacaaaacgtgaagattggcccagttggcgtgtctctacaaaaaggtgcatataccactgccccgctgcaggctgatctgagaaagcctctggcccagggcagataccgccatggccttcctgatgcacctgctggtctgcgtcttcggaatgggctcctgggtgaccatcaatgggctctgggtagagctgcccctgctggtgatggagctgcccgagggctggtacctgccctcctacctcacggtggtcatccagctggccaacatcgggcccctcctggtcaccctgctccatcacttccggcccagctgcctttccgaagtgcccatcatcttcaccctgctgggcgtgggaaccgtcacctgcatcatctttgccttcctctggaatatgacctcctgggtgctggacggccaccacagcatcgctttcttggtcctcaccttcttcctggccctggtggactgcacctcttcagtgaccttcctgccgttcatgagccggctgcccacctactacctcaccaccttcttttgtgggtgaaggactcagcggcctcttgcccgccctggtggctcttgcccagggctccggtctcactacctgcgtcaatgtcactgagatatcagacagcgtaccaagccctgtacccacgagggagactgacatcgcacagggagttcccagagctttggtgtccgccctccccggaatggaagcacccttgtcccacctggagagccgctaccttcccgcccacttctcacccctggtcttcttcctcctcctatccatcatgatggcctgctgcctcgtggcgttctttgtcctccagcgtcaacccaggtgctgggaggcttccgtggaagaccttctcaatgaccaggtcaccctccactccatccggccgcgggaagagaatgacttgggccctgcaggcacggtggacagcagccagggccaggggtatctagaggagaaagcagccccctgctgcccggcgcacctggccttcatctataccctggtggccttcgtcaacgcgctcaccaacggcatgctgccctctgtgcagacctactcctgcctgtcctatgggccagttgcctaccacctggctgccaccctcagcattgtggccaaccctcttgcctcgttggtctccatgttcctgcctaacaggtctctgctgttcctgggggtcctctccgtgcttgggacctgctttgggggctacaacatggccatggcggtgatgagcccctgccccctcttgcagggccactggggtggggaagtcctcattgtgagtatccggccggtggggctgctcccgctgcgtacccctcacccctagccaaagcctgggagagcttgggcgcggccctttccagcgagcggggtctgtggggctctcccgggaagccccaggtcggggaagcgccccttcctcatttgggagtggaggcttagggaatcgaggtgactgg

SEQ ID NO: 241237 - DNA, 1378 bp, Homo Sapiens
  misc_feature (414)..(458): n is a, c, g, or t
tggatacaaagctggtgaactggggactggcacagttaagagttgtactaattctaggaaaggggtagaagacataaaaacacccatctatgtaatttaattcacattttctcccctgcatcaccttcccttgagagtttcacaaaatgccagtgcccagaaagaatcacaatgctataactggcagggtaaaaaagtccccccgccccgacttccttgctgccgggctataggcaaatattaaagcatgcatcagctacccaaagccatcagtcacccatctggaagaccatggtgtacagtttccgcctaggctggctgcactaggaagtactccagtttttaaatggagccagctttatgttagccctgtaaaatattgagctactgtagcagcaaatatgacattacagnnnnnnnnnnnnnnnnnnnnnnnnnnnnnnnnnnnnnnnnnnnnnccttcaaatctgtgtcctttaaccaaacaacagtttcttctatcacttaattctggtcttattacctcagtctgactttctcattatgcttctctggaaagacacttctaaatcctggagattaaatttactcttaaaaatggaaatacaggaattttaaagtaaaaagaaaaggtctgttctaaaagttctttcacaaatatatatatttaaatattaaaataggctacctaggatttttataaaatggcttttgaaaagatagtagaggcacaaagaagccatatactatcctccaagttggacataaggtgccacaaggctgccctacaaagaggcaggcaatctctacctgatgcaacgggaggcaccagtaaacaacagaaacattaaatacattattgggaacttggaccaaaaccaaattttactctattagggaccgttgcttttttaaaaaataccttgagatataagcattagaagtcatcactttgtacaaggaagaaaatgaatacagtttatgatcttactccttccaaatacctgatgtcactcatttcaggtacctgaaagatgaaaagcagtgcaactttcaacaatttaatggactactctcattatgagagactttacacagcatctgtcaacttgaaaattaaattggtaactgaaataaaaaatcgcctagagaaaacacacataagctaatcctagaaaaggctctccttagaaagcaggtgtttctaagaactgcaggaaaggcttcccatcttgaacacagcttccactaataccaagggaaacgtgcattaagaggagagatgacagggctcccttaaagcaggaagatttatccttcctcagcaggtgatgtactttggtaacctcaacattcatttatgggatgatttttccaa

SEQ ID NO: 241238 - DNA, 1936 bp, Homo Sapiens
  misc_feature (1737)..(1766): n is a, c, g, or t
ttggctagagggtaggcggcgtggagcagcgcgcgcaagcgaggccaggggaaggtgggcgcaggtgaggggccgaggtgtgcgcaggactttagccggttgagaaggatcaagcaggcatttggagcacaggtgtctagaaacttttaaggggccggttcaagaaggaaaagttcccttctgctgtgaaactatttggcaagaggctggagggcccaatggctgcaaaatcgcaacccaacattcccaaagccaagagtctagatggcgtcaccaatgacagaaccgcatctcaagggcagtggggccgtgcctgggaggtggactggttttcactggcgagcgtcatcttcctactgctgttcgcccccttcatcgtctactacttcatcatggcttgtgaccaatacagctgcgccctgaccggccctgtggtggacatcgtcaccggacatgctcggctctcggacatctgggccaagactccacctataacgaggaaagccgcccagctctataccttgtgggtcaccttccaggtgcttctgtacacgtctctccctgacttctgccataagtttctacccggctacgtaggaggcatccaggagggggccgtgactcctgcaggggttgtgaacaagtatcagatcaacggcctgcaagcctggctcctcacgcacctgctctggtttgcaaacgctcatctcctgtcctggttctcgcccaccatcatcttcgacaactggatcccactgctgtggtgcgccaacatccttggctatgccgtctccaccttcgccatggtcaagggctacttcttccccaccagcgccagagactgcaaattcacaggcaatttcttttacaactacatgatgggcatcgagtttaaccctcggatcgggaagtggtttgacttcaagctgttcttcaatgggcgccccgggatcgtcgcctggaccctcatcaacctgtccttcgcagcgaagcagcgggagctccacagccatgtgaccaatgccatggtcctggtcaacgtcctgcaggccatctacgtgattgacttcttctggaacgaaacctggtacctgaagaccattgacatctgccatgaccacttcgggtggtacctgggctggggcgactgtgtctggctgccttatctttacacgctgcagggtctgtacttggtgtaccaccccgtgcagctgtccaccccgcacgccgtgggcgtcctgctgctgggcctggtgggctactacatcttccgggtggccaaccaccagaaggacctgttccgccgcacggatgggcgctgcctcatctggggcaggaagcccaaggtcatcgagtgctcctacacatccgccgacgggcagaggcaccacagcaagctgctggtgtcgggcttctggggcgtggcccgccacttcaactacgtcggcgacctgatgggcagcctggcctactgcctggcctgtggcggtggccacctgctgccctacttctacatcatctacatggccatcctgctgacccaccgctgcctccgggacgagcaccgctgcgccagcaagtacggccgggactgggagcgctacaccgccgcagtgccttaccgcctgctgcctggaatcttctaagggcacgccctagggagaagccctgtggggctgtcaagagcgtgttctgccaggtccatgggggctggcatcccagctccaactcgaggannnnnnnnnnnnnnnnnnnnnnnnnnnnnngagcccagcacttggcagtgtccagtaccctaatcacgctctgttccttgcttttgccttcaagggaattccgagtgtccagcactgccgtattgccagcacagacggattttctctaatcagtgtccctggggcaggaaggatgacccagtcacctttactagtccttt

SEQ ID NO: 241239 - DNA, 1457 bp, Homo Sapiens
  misc_feature (199)..(219): n is a, c, g, or t
aactagtaaaagtgaagagctgacttcttgtttatctttaaagggtgggctgcacctgcagtgccaactgtggaagggctgtgtgcaggccccacagttgcagaggctgttccgggcccagcgcttcccagtcatccaatctcctttgtccctcggttgttctgtgactttgagcagctttcattttaggacatcccannnnnnnnnnnnnnnnnnnnncagttgaaaactatgcagatgtttttagacagagcaaaacacaacacagtacccaaaaacggaggcagcctgcatgctccaggtctacacgagcacctcacagcctgacaaggggcagacagcaactcacacgggacgagcttcagcacacagacagcaaagcaaatacgagacttagactgaactgcaaagagggaaagggccatttcaccaatggagtaactgagagaataatgacttagagcccaatctgcctgccatctccctgagccgtcacccgtcactgaagatagcgcgagggtgatgcttcaactcaccatcctaagggtttgtgtacaaacacactcgagggcatctctttcacagaaagaacaaatgtcatttgtaccaaatggcaatggattttcagcacaaacttaatactttcctaacactacagcaatagtaatcatctactttcagcaagagggactcctttaaacaaggaaaaagactcacattaattagcctatgtacccactggatcaatctgcagcaacaaagtctagtgctagcagacacagggacagagggaccagctaccctcaacacagggccaggagagccgggtcctagactgaaccctctaagaaggcccatgtgtccaaagagaagagctgtcaagaaaaagaaactagtcaaaaactctttaaaggacaacctaaaaaggattaaagatgtatattaagatttttcagtaccatacatatgcaaagaagtcctactataagctcagttaaacacacaaagctctcattcttcctctaaatagaaggtagtcaagaggacacacagatggcatctatgaaataaggtggctgcatggctgctgtactagaattcacaaactgggaagaacttcatataaacagaacccaggatccctaacctactgtagataaataaactcattaaacaattagtccttatcaactatttaagctgggggaagctttgcatgggagaaggctcatgtggtcccttctctgggaacatgagccttcctaggttttgccactgagaactgtgtttaggggatttcaacattgtctctgcatccgacaagcactaggaaaatggctgaaatcagtcagggactttcaactctccaatctggaaaaataaccacccctatttctctatctctagatcagcattattttaggtgaagcaaactaaaacatgtagaggttccccaa

SEQ ID NO: 241240 - DNA, 993 bp, Homo Sapiens
ttggcctcgcttcccggcgcggtcgcagccctcagcccacttaggataatgggacagctgaggtactgaacattggtaaaaaattatatgagggtaaaacaaaagaagtctacgaattgttagacagtccaggaaaagtcctcctgcagtccaaggaccagattacagcaggaaatgcagctagaaaaaaccacctggaaggaaaagctgcaatctcaaataaaatcaccagttgtatttttcagttattacaggaagcaggtattaaaactgccttcaccagaaaatgtggggagacagctttcattgcaccgcagtgtgaaatgattccaattgaatgggtttgcagaagaatagcaactggttcttttctcaaaagaaatcctggtgtcaaggaaggatataagttttacccacctaaagtggagttgtttttcaaggatgatgccaataatgacccacagtggtctgaggaacagctgattgctgcaaaattttgctttgctggacttcttataggccagactgaagtggatatcatgagtcatgctacacaggctatatttgaaatactggagaaatcctggttgccccagaattgtacactggttgatatgaagattgaatttggtgttgatgtaaccaccaaagaaattgttcttgctgatgttattgacaatgattcctggagactctggccatcaggagatcgaagccaacagaaagacaaacagtcttatcgggacctcaaagaagtaactcctgaagggctccaaatggtaaagaaaaactttgagtgggttgcagagagagtagagttgcttttgaaatcagaaagtcagtgcagggttgtagtgttgatgggctctacttctgatcttggtcactgtgaaaaaatcaagaaggcctgtggaaattttggcattccatgtgaacttcgagtaacatctgcgcataaaggaccagatgaaactctgagattaaagctgagta

SEQ ID NO: 241241 - DNA, 1393 bp, Homo Sapiens
  misc_feature (272)..(315): n is a, c, g, or t
  misc_feature (329)..(343): n is a, c, g, or t
  misc_feature (1291)..(1312): n is a, c, g, or t
aaaaaaggtccacataatttatagccaaaaccaggaaattcctccagaacctttgttagtttccaatgtataattaaacaaaatgtatgagggaaaaaaaataattaagtgtagcttcaagtgtttcttctgtcttgaagatgaacaatactccaatacgctgaggctgacaaagtattcccctatcttctcaaaacagcaactactctttacaggatagtaataatatgtacaatgcttttgcaaaatatgtcctcccccaacccctcttnnnnnnnnnnnnnnnnnnnnnnnnnnnnnnnnnnnnnnnnnnnntatattttcaagannnnnnnnnnnnnnncctttgtaagctgggccagagaaatagacgcggaagagtcatcaatctgttcacaaaaaattaaacacacattcaagttccaaactgaaaacatcttaaagtgatcatttagcccctattgacaccttaatgttgaaatattgggcattttcttagttttctaaagaatgttaagcttgaaaatgtagctcagcctacttcattcttctctagatatttcacacagttataaaaagctatcagttggaggggaggaagaggggactcaattaaaatgaaaaaatgtatcacacagaaaatctgttcagagtgtcgactgaatactaggagtcccatatctccctatggtctctaaatgtgacaatactcaagacaatgtacactggaagagagaataagaaatctaattttcctgcaaggccattatacaacattgtaaaaacaaacagccctttaagggctcagataattgctttaataaataacagctcccatataattgctacttctttaatttttgaaaacatactcttcagtctgagtaagtttgtttattctctcatacaaagagtaatagcttcttgtcaaagaaaccacagctttctcagggcaaagatgttaagtcaaaaaaagggaaaacaatggcaccctgaggagaaggccaacagagctgtcacttattatgatggactctaatatttgaagaaagttaatttaatcacacagagcaagtgtacataaaggatataagagggctttaaaaaaggtattttaatgagccttaagcattctgccccactcactaactgccaattctctaacactgaagagggggagataactgggcatatttgaagaggcatctttgtgtaaaagatgtatggagtcaggagagagccaccttcataaactgttctgtgcaaagaggaataaaacatttctctttcnnnnnnnnnnnnnnnnnnnnnngtattttaaattgaacactaatttttttcatttgatcctctgaaatgattttaatatcagtttttaaaaaaatctttccaa

SEQ ID NO: 241242 - DNA, 1901 bp, Homo Sapiens
  misc_feature (140)..(160): n is a, c, g, or t
  misc_feature (316)..(429): n is a, c, g, or t
  misc_feature (1025)..(1262): n is a, c, g, or t
acaaatatcaagtaatttattttttccattttcaaatgcaaaagttagcctaggaagcctcccagtcatcctgaaggaccttttgactttgcttttataattctgttaaaaattgaggaggggattaatgagtacaatgnnnnnnnnnnnnnnnnnnnnnttaagaagaggaaagctcaaaagaggataagagactgaaaaggcacctcagaatggctgctgtgggcagagtctgtgacatgactttccccgccctgcccctctgttcagagcagctggaaagatgggatcagtaagattaaaaaacttttgttcnnnnnnnnnnnnnnnnnnnnnnnnnnnnnnnnnnnnnnnnnnnnnnnnnnnnnnnnnnnnnnnnnnnnnnnnnnnnnnnnnnnnnnnnnnnnnnnnnnnnnnnnnnnnnnnnnnatgagccactgtgcccagcctaaaactacatgttgaagcttccggtcatttccattattatccttcttttgaaattcaagttagtgctttttaaccaaataaaagaagaaccagctcttgggatatgtgactctgcctctgtataaagtgactggaattttgttaaaaccgtgtttccacttctgaaccctgttaccattccccctcacaaatccccacccaacacctggattttaaagatcctccagtgtcaagggaagccacagagtctattaaagaggcagttctgaaccaattaatttttgtccttataatttagagcattaaatagctaatatatttaatggcactaattgttgttcacggctttcatcatacttttaaacagaatccaaagtattcaaaggaaagtaagcgaagttatccaaagccaactttgtttcaggtgtgtcccctgccccaaatagattttagggcagaaatagaaaactgagtttacacagaactatttttggaaaagctgcactggagtagatggattcttcttcagcatacttttttgtttgtttgtttgagatggagtcttgctttgtcannnnnnnnnnnnnnnnnnnnnnnnnnnnnnnnnnnnnnnnnnnnnnnnnnnnnnnnnnnnnnnnnnnnnnnnnnnnnnnnnnnnnnnnnnnnnnnnnnnnnnnnnnnnnnnnnnnnnnnnnnnnnnnnnnnnnnnnnnnnnnnnnnnnnnnnnnnnnnnnnnnnnnnnnnnnnnnnnnnnnnnnnnnnnnnnnnnnnnnnnnnnnnnnnnnnnnnnnnnnnnnnnnnnnnnnnnnnnntgaaccactgcgcccggccagcatgcattttaaaagtggcttagatttagttttaaatattttggggtgaaaggcaggaacagttctgtttttgacatacaggttttctttgggattgttttcattttcaagtatagattcatgtcagaatggccaacttaacgtgggtttctgtattccctggtgttgctcttaacctgaactcataatcagttgccatactgaggcaagagcactcagggtgaacatagtcaagttactttaaaagtgataaaagtgtttttccatggtgaaaccttcagtatttggctgaatgtaaagtatgttgaagtggtatattgatggtaagttgttaatcactaaccttgtttgcacttttgtacaccactgcttgcactaggatcttggtgtgaattttcaattgttttacagtgtatacagattattaaggataatttatataaagatgtttctgtttaactttgtgtgttttacaacaaagagctataatagatggttaaacgtttttgaattgtgtttatatgttagtttgattatgttctattatcttttcacctggccatgaatttgagtgttagggaaggaaaaataaaatactaatctgggtcttggaaagaa

SEQ ID NO: 241243 - DNA, 1481 bp, Homo Sapiens
  misc_feature (298)..(415): n is a, c, g, or t
  misc_feature (552)..(570): n is a, c, g, or t
  misc_feature (1254)..(1262): n is a, c, g, or t
tttaataagaaaattattttaaaagaaaacatatagaacccaatgttttcactccatttcaatggaaagcatctatatttttaacattgtttttctcatctttttggtcaggaagcaccagattctatactggaagaagtagatgtagttttggaataagatagctgataagtatatccaaactgttaaaattgctgataccaaaggcatgtatactgcttcagataaatgcaaaaagcttatagtatcagaggaaattttaaaagaatacatatttgcgccaggcgcggtgggtcannnnnnnnnnnnnnnnnnnnnnnnnnnnnnnnnnnnnnnnnnnnnnnnnnnnnnnnnnnnnnnnnnnnnnnnnnnnnnnnnnnnnnnnnnnnnnnnnnnnnnnnnnnnnnnnnnnnnnctgggcttggtggcgcatgcccagctacttgggaggctgaggcgggaggaccgcgtgagcccccaaggttgaggatgcagtgagctgtgaagcgccactgccctccagcctgggtgacagagcgagaccctgtctcnnnnnnnnnnnnnnnnnnngaatacaaaatttgtagtgtctgttacatttcagcaatagggggaatacagattttgtgggaagggaagggggaggagacagcaccttagttttcctacaacataaatgtaacaaagttatcttctactgtattgcaccttagtccaaaagtaaaacaactaaatgaaaatttaaataaatcagactgaaaaagcccaaagagtaagaggaataccttataaatgtgactacccacctaaaaattcttgaactactttgttttgcataggattttatgggactaaccaaatgttccatgaaccatgaggtgaagactgcgatttcatgatagcacatgttttacaattctgattagaaatccttcagaaatatttctgtatcaagcttgtaatgagcctaacatttcagccccctccaaatgatatattaaaacaacttaatgtaccagcaagagaggcattcataaggtcaccttatatcacatgctacagaccttttccatcacaaattatcagcttatataagatgtgctgagtagtgattggtaagttaaaaacaaagttcttagtttaatgtatcaattttctcatggcacagaggtccataacctacagcctgtgataggtttcaatatgtccaaaatcccttgaaactgcatgcaacattgtatgtgtatgtgtggnnnnnnnnnctaggaagagtccacagcttccttcagattctcaaaagaaccactaaccccaaaagacgcacgataacacagtagtgggttttcaggctgagctctgaaaggaccacctgtagaaaggtgggaagtgtgggctaataagtgttctttgccctaactctccaattcaactgcaacagctctgcctttaattttactacatatacggtttcaattagccaa

SEQ ID NO: 241244 - DNA, 2146 bp, Homo Sapiens
ttggggaagaagaggacgccgggcgcgcagctcggtgctgattatcacaactgtttggtgacctacttcactgacctgtgaggattccttcccttcaagtactggattcttgatctttctgcatcatcaagaatggaaacagactgtaatcccatggagctaagcagtatgtcaggatttgaagaaggttcagagctgaacggttttgaaggaactgacatgaaagacatgaggctcgaagctgaagcagttgtaaatgatgttctctttgctgttaacaacatgtttgtctcgaaaagcctgcggtgtgcggatgatgtggcctatatcaatgtggaaacaaaggaaagaaacagatattgcctagaactcactgaagcagggctcaaggtggtaggctatgcttttgaccaggtagatgatcatttacagactccctaccatgaaacagtctactccttgttggatacactcagccccgcctaccgagaagcatttggaaacgcactgcttcaaagactggaagctttgaaaagagatggacagtcatgactacactttttcctttcagaggggctggtgctggtacagaatgttgatataaagcttaaaattcttgcatatggtcatagaaaatgcatctttggttttgtgtttttatcacttgcttccaacttaggcttttggctcagaagattattgaataatgatttgtcttagtttctgtttcagtaagggaattctgaggccgttgctatgataccatcattaagacattcacatgtcttcatataatatctcttcatttcaaatcctaatcactatttcatactattacagggctttgatgctgccagcactgtcttttacataggaaattctagatttgcacagtaatagaggaattagaagtacctaactatacactttgattcagcctgctaaatcaggggttcaatactagcttggacaaactttgtagtaattaattgctaccagccttattggaaacaaattatcaactagtttcccctgcacaaattttgaaattcactgcttcacttaatctatttatattactaataatggattaataaagatgaattaattatatattacttaactagtattaaatgaaaaacagggactgaaatagttctgtattccgtgtttgcaacagccagccaactaagcagaggataaaccgttagcaaatgaatgtaataattactcatttccaagatatctaagcacataagcaaatacaggaacagacttcattctttttcttaacaaaaaagcatcttcagtgtgtgatttaaaagaaagaagattctggtttcctagaaaacaatattttggcctgtgttgattcttattctgaatgtgtgtttacataatgtacagtatatattcagaaagtatttttgcttcaacgtttactttctatgatgtagtgctttggtattcctacagcaccccaccttccccaacagatgtacagtgttctgtctccattcgaaatctacaatgtaatatgagtgcattgtatgggtttgaaaccaaaggatgaatgaagcattcagagacttaatatttgaaaaaggaatagtcagtattttatattttattacaggtactgatatttataaatttaataaactgtaccatgctgctgcatgttttcaagtacatgttgaacagtaaggattggggagttgttttttaatggtcacctaaagcagctgctatagaaatgttgaactaaaattttgcatctggtcataccttcatgcatttatcatttgcagatatttttccatcattattaaaaaacaggaacttttaggctctgaagatcatgtggaccagagcaaattaaagttcagtttgtgtcacaattcattgccagacttcattggaatgctttgtttgatgatgtatgttcattctcagctttattttcagatgcttaactgggcaatgaagtctaacttcaggttgaactttctcatgtttaatctcaggctaaatgtaaatgatatttgtaaagtttgaataaaattctgtttactcattttgagttagtatgaaaaaaagtgattgtatgtttaagaattgaaattgttcattttgtgataaatga

SEQ ID NO: 241245 - DNA, 1231 bp, Homo Sapiens
actttgtacaaaaaagttgggaggtgacgaccggcttcggagagtctatcatggcagctcggactggtcatacggccttgagaagggtagtctcgggatgccgtccgaagtcggcgacagcggccggggcgcaggcgcccgtgcggaatggcagatatttagcttcctgtggtatactgatgagcagaactcttccactacatacctcaattttgcctaaggagatatgtgcacgaactttcttcaaaatcactgcaccattaataaacaaaaggaaagaatattcagagagaagaattttaggatattcaatgcaggaaatgtatgatgtagtatcgggagtggaggattacaagcattttgttccttggtgcaaaaaatcagatgttatatcaaagagatctggatattgtaaaacaagattagaaattggatttccacctgtgttggagcgatatacatcagtagtaaccttggtgaaacctcatttagtaaaggcatcttgtactgatgggagacttttcaatcatttggagactatttggcgttttagcccaggtcttcctggctacccaagaacttgtaccttggatttttcaatttcttttgaatttcgatcacttctacattcccagcttgccacactcttttttgatgaagttgtgaagcagatggtagctgcctttgaaagaagagcatgtaagctgtatggtccagaaacaaatatacctcgggagttaatgcttcatgaagtccatcacacataaaggcaaaaaagaactggtgccacctgcttctgactttagtttgttcacttttaggaagtattttcatgacatgttttcagaagccagaaagcatttgttaaacgcagctttggttataaacctgcaccattgaaaatttgcacatagaatatagactcacttgtacatagaattatttcttcaagtataattcaaaataatatggacattatcatgttctgcattacaataatgggatgtcatcaccattgctagaatactggcatgattcttctgagcagaagttgaaactgtaaatttaaaccttttaattatcaccttacctgaaagaggttagttaagatattcacacagtatgtattatattaaccatatcacacttaagttattaaattcagactatttgtaacttattgttatagggcctgccgtatggcttaggatatttgagtaatcatatattt

SEQ ID NO: 241246 - DNA, 896 bp, Homo Sapiens
  misc_feature (692)..(714): n is a, c, g, or t
ttggcacaatttatgtggtatttttaaagactgatcttagaccaagtcaaattcccatttatcatttagttattttttgaggttagagaataatttgtacatatttatttagacctttgatatttattaaagcaattactcacaatggaagtgaaagaatcaggagaaaagccttttaaaaagtattctccaggtttgtcagggtcactctaaagataaaaatgtaactaagtcttctgtgaaatatcatccatctaatcttgatgctgttgcagatggtggtgacacaagttaattgacaaactactgccaaatggtgcacaatattttgtaaaaagtacccagtagccccatttcatacaatgtacctaaattatgcagtaacttggcatcatcgttccctccttgttgctgtgtaattagtcagtgttgccacagtgtgtggcgctgatggagatgtcagaaccgagaacacttaaccttctttgattgtttttcaagttttaagacttcgatccacccctatgagagcaagtaattgtggaaatatttttggtgtaaaatcattccagagtatgtaatatttaactgatagctgcatgaaagtgagattcgtgttactttggcttttctgtctctgttgacacggttgcacatttccaagttactacagcgtgaaaactgtgtgtttnnnnnnnnnnnnnnnnnnnnnnngagattgtggcctggttttgtaaaagttttaggtaaaattacaattgattgttttaggaatcattattaaaaattttctgcaaatcataaagctatatcgaggtgttgagcttagccactatgcacattgtaattattcattgtggctgtccagttctatgatgcattctggcattttgtaa

SEQ ID NO: 241247 - DNA, 2769 bp, Homo Sapiens
aaaatgtgaactttaatgtaaaatcattttctgtaaatatagttatatcaacctctctgcacacaacttggttcagatatatacagatatgatattcatagatgttatttgtaccacagaacaaaatcaattcaagaaacatttacttttagcttcaggattaaccccagctttctttaggccttaaaattaccaccactggaaacagagagagagcacggcatacctgggcacaccagtattcagggcaaaatctatgcagtgtcttactaatttcatactatgaggtaaagacccgaaacaaaaatagattcagtctctcgtattgctataactcttaggctggggtattaatcaaaataggatttttacatttaaggcgacagggaggctatgctgattctaactcagaaagaaatgggaaaacagtttttctaaggctacaactatttgtttaggcttattttcccggacctatacaaaaattcagtcaacaagttttgggtaaataaaggaaattcattttgctttcctctgctctgtccctgaagtcactcatccaggttggctgctcaaacaccaagaatctccaccattcttcacttgacagtctttgtggacacgttagacccaaacttttttttgtataacaccatcttaaaattttttagtatactttatctttctttagtttacccaaaggaaggagttttcactctaatgtcaatatatttgcaaccatccaactcaaagacctctgtgtcgactgttcactttgtggatcatctctggctcatttaaaacatcctgcctcatccccacattcgctgactggccttagaaagcaaagtaaatttattgttagtctaaataagcattctatagcaaacataagtaattcacacctggcctactatgaaaattaaattttctgaatttagatcatattagctctaaaagccccacagtatgctaaaaatcgaaaataaattctaaaaagaggaaagcaaggcttttgtctccatcatcatttctttatatagcactagaaaattcttattccccttctaaatttgcaatttcatccaactgcccctaaattctagttccaaaaacaaattaaagtgccagttataacactacctcccactcccacctctctcaagaaagaggcctaaaaataagaatgatgacatttacccttttttgtactagagctttactgaaggttggtatttttatgtcaaccttcctaggactgtcaagtctgcctcctaaagagcgctgtcaggatttcatagcacaatctccttattcactctccaaattatttacatagtaaaacttctatggggtctcagccaccaccaaattacaaaactgcccatttcttctagaataatagttttaaaatttccttccatttcagtatatgcatactcagttcatcacatagtaatatcaataaaaaaataaacttccatttcttataagaaaaacattaacttaattcacagttagccttttcccacaacactcaatactccagtagcttctaggaagagaggtatattagtgataaaaatggaatattaaaaatccatgacttgggagtaaacggagcccttaactcctcctctccccctacctgaatcacaaaagggttttcctgaaatgagaggggatgggactggggtcagcaggattctcacctcggtctaactacaaggtacggggagaagacaggagggctggccatttggcagaatccaagcctactagcttgggatctactagggagataaaagcccatgcctggcatattggtccccattctaattgtcttgcccatgttagacctgtcatcacactaaggcaagtccactgccaagctgagcattatcctattttattcatccacctgcccctcctcctttacctctgcaaggttgacctatacagggtctggagaaagcatctcaatccattccctgggctatacagtttcgaagggaaataaatggtccctcgggtttctgccttttctcggagggttgatgtcctaaaactgaaagcctaattcattactgtcctttacaaaagcttccctgaaggcctcagtttaaagatgagtgatttcatcttttactgtgtttgaagggctttcagtgcatcaagactgagagcaaattcatcctcatagccaccagaaggaaaaacaatgatttagctaagatttaatttatcttctagctaaagtgtcatcggtagtcacatgatcaacaaatgttcacatgtggcatctggaagcatgtgcacctgtgtgctatcttaactttcttgtcttgactttaaagtggaacaaaacaaggtaagttatagatgcaagttcctaagctaaattacttctattgatacatcaatgatttcagcttccctccccctaaccaggtggaagcacagatgctataatggatgatggatatggaaggcaaaagccttctaattcattgcaatcataatttactgaggactgtacaggtcccaggtgggacactgacactggaatggtctctaccaggcatagggaatggttcgtgtttaaaggccaagcaaattctaaacacataatttgggccatacttttagtctggtaggggataagccctaccatttcaaactccttgtggagagtcctaagccaggggccaactggacattttcccaaaggctgggcagtatcatctgctgagcctacagaattgccaa

SEQ ID NO: 241248 - DNA, 1477 bp, Homo Sapiens
  misc_feature (1094)..(1152): n is a, c, g, or t
cagtatatttagatgggagtaaatgaaagtaatgttattaggggataagattaagatcgatcccatttgtaaaaaaggaagtagattattgtgaactgtaatactttgtttagtgaagaatcaacttaaaacttgaacctggatacaagataattccttcattctgcaaatgtttagtagcaaactatatgccaggactgtgctaggtactagggatacatggttgaatatatagtataagatgccttggagtgtcagatagtttcacgtaaatggctcatgcagtatatagacagtgtggtaaaaagagactactgagatgcacagaggacagaaaataaagggtctttgaatggtggataaatgtgtttggacttttcactcagggctgttgaagttttggaaggtcagtggtctcagagttttggtgttttcaagcactgctaaatactttgtttctagctgatgattggccaccattactgatcgtctattggctctgtctgattcagcaatcccaccactgggtatctatgcaaaggaaaagaaatcagtgtatcagaaagataactgtacttatatatttgttgcaacactattcacagtagcacagatataaaatcaacctaaatgtccatcaacaaatgactggagaaagaaaatgtagaaaatatacaaaatgaaatactattcaggcacaaaaaatagaatcataacttttgcagacacatggatggaactggaggccattgttgtaagtgaagcaagccagacacagagtaaacatcgtattttatcactcataagcgggtgctaaaagatgtgtaggtattgatgtagagagtggaataataatggagacacagcagggtgaggggatggaaggggtgaacagtgagaaattatttaatgggtacaatgtgcattattctggtgatggataccctaaaagccctgacttcaccactatgccatccatgcttacagcaaaattgcacttgtaacccataaatttatacacaaaaaacttagacctctctctcttctcttataagcctcagagctcagtgatccccttggatctcctcagcctnnnnnnnnnnnnnnnnnnnnnnnnnnnnnnnnnnnnnnnnnnnnnnnnnnnnnnnnnnngaagatgttctcaggcacatgcttctgaagaagcattggaggctcttctagtggcctttatctagtcactgctttaagcaaggaataaaacatctgtggcttagatttaaaaaactctgtttcccacccacccttcagacctgacagaagagattttaggattttaagggaagagatttttcctgacccaaaagggcacagtagtgcaaaggccaatgtcacataagtacgttttccccatctgtaaaataactttcagatactattcccacagctggaatcagtacaatgttttgactgaggtattggaaaagcctatgagctc

SEQ ID NO: 241249 - DNA, 943 bp, Homo Sapiens
atgagagaaaaatagctaaccataattaatattgcaaattcctgctatgattcagattcattatcctctcattcagtaatttctttattatttactgctgggttattttttactagattaatactctgttaataaggaaaaaatatataataaatatagggactttaatttccctaataagaaatatacctcatttgaaatgaccgaaaattaatgttaccatatatcctactctgctttgatggaagttattggtaacttcctaaagtatatacttaattttaactttattatatttggaaatcagaactttttaaagtacatatattttgaaattcaacctaatctgtgactttgctaaaactttctcagtactcagtaaaaggaggtgggaaacgttgctttgaggacaaatgttggctctgaagaatatgatataaaggaacgcttaagagtttttatacagacagggcactgcataaatccaatgagtgaatctcgtgcgcttttgaaaacgattgattgaaattagcgggagtaaaaaatagttgattttcactctattttttcagctaatgtctttatgtgtctgtttccatgttctattacagagggtttaagctgacagctagtattactataactggaaaataaaaagaaatctctaattttaacaaaagaaaacaatgcaaacttgaggaagaaaccaacagagaaaactatattaagctaatacttcatgttcttaaaagttataaatacactgaaaatttgaaaattcaatagctcttgaaacaaatttaatctgtattaactttatttaaataaatgaccaatctgtcacccaacatgtcatgtggcttctctgcactgatcttgctttgttttcaaacttgtcacttgcaaatattataagaaaaaaaggtcatctaaaatgagccaa

SEQ ID NO: 241250 - DNA, 1387 bp, Homo Sapiens
ggagtttgtattttatttaagacatggaattttcccttttcattataaacttatctaaattaaaatattcatctcggtagttacccacaaaaaaagtaacatagaaaattgtatttacattttggggaccaaaatacaaatgaaagagcaggatgacacctttgctcctttccctcccgcttcccagaaagaaaaagccccaaagaaactgctcagtacaccaaggatcacaaaagggtaatttgtaatttggtgatttgtatgtagtgtagcacagaaaaaaaattgcacaagtttttccataaatgagaccaaaggttcaaattcatcctgtgtcaggttcaaattcatcctgtgtctgctctgcagccattttagtaagctgggcaaggaggtcatttagaaattgggtttttcctctttcccctgattcttcgcaccaagtcacatccctgatgtagatactcttgggggaggggaaaacatctggctctatgcaaacagggctcatcaaaaatctttatgtgccaaaatggatactgacattgctatgaacaaatctgttttttcttccctccctgcctaaagactcctaataagggacattaaatcatacacaactgaatctaagatatgaaaaactagtttcaatgacaaagacttgaacacacagttaagagataaattcaaggtggtagacacctagaaaaagctattctaggcagcagacatctggcacctgacccaaatgttcatttggtttcagttaagaggcttcctaatattagatttgtggggcaggctagggataggggtggaatggtggtacaagtaaccaagagaagtaaagtaatgctttacccattcaaaaatatagcaaattaaaacatagtaacatttgtgtcctgtcacaataggcaccctgcacagcaatacacactgaacaatgtcgagtttctgctgaatagacttcctacgttgctctggaattcgaagttggcctaactgaggtctccagttacagaaaacactggctctgtatcctgggctttgagaaaacttatcaggctgtcacacttaccatcccttcagtctgcttgtcaggttccttaaggacgcatatctcaaatgtatggcatctacctctacctgggtcacaaccaagtgggtttctactagatcggtgttccttgacagccaacaagggagctgacactgccctcctaagttctgatcttgctcctgttcaactggaacttgatggatcccatgtggtttcccccatcctgacgctgtggctcagacactctccctaagctggtccttccctccaaatcctgccttaaacacactcagaaggtagaaaacacttcagcagcaaagccaa

SEQ ID NO: 241251 - DNA, 1489 bp, Homo Sapiens
  misc_feature (1290)..(1351): n is a, c, g, or t
tctggctgtaatttagattctgctaagaaagggaggtgggatccgtcttcccgcagctctggcagctggccatccgtgatggatgtttgtggttgcaggaatctaacctaggtctcgactccagttttgtccatgtggggcagtgatggcaggggtagtggtggcattagcagtagcagtggctgctctctggctctgattcggctacagtggtctaatattgaaaccaatagtccagtggtggcctctgcttctgctcctccagcctttccagtgatttagataaaatccctttctgcctaagattcctagagtgctttctgttttctgggctgaaccttgactagtgtggacactgttgttggacttgaggtcaggagagcctcctggatggacctggtgggccttgctctagagggcagagagaaacaggctgagcacggttgtttggccactggctcagtttaggctgtggggatgcagaatctcagcatgttaggagagaaaacagggacccaataaaaattcaggaaggcaaactgagccacagcatcaagatgtgtaaactaggggaggagtgcagcataaaaggtgaagaaaaggaggcctctcatgaagaggcatccaattaggtgtccaacaagagggtccccatagcatgcatgtcccaactccctctgtctgtgtctgtggcagacaaagtaagccaatatgggcatgctctcctgctagcaaccgagctcagagggctcttcaatagcccacatatacactgtaaacctgcaagcaccttcttttttccgtatccagtgcagacattgctaatcaatcatggcacttgtaccaccactttcctctactgcatccatggcagacatcactaattgattagataattcttctcagctaattggccattctttaaaacccttcagaagataaggctccaggtagccagtaccaaatgactgtggctgacagatgagatgggaactctctgccatccctatataaagtatttagatttggcaaggagaggccaatgggaggaagggatggattgcagcaggaggaaagatgtgagctaatttgcatgggcagagaggagtcagggaggagggggcattctcagctgggtgggaagcagcagtggtggtatgaggatagagtcatggaagtgacagagaagctgcaaacgcaggctggtgtcaaaccatggagtctggatcctagtgtgtaagccatgggaggcaggggagtgtgtgagctgggagagcagattcactaaannnnnnnnnnnnnnnnnnnnnnnnnnnnnnnnnnnnnnnnnnnnnnnnnnnnnnnnnnnnnntctctctcatctggtaggggaccctgaatttcctcatgctgagggctggtgtccatcttctcttcatccagtaggaccgctgattttctcaacttcacacagcagccttcactggccatggctgccaacttttttgta

SEQ ID NO: 241252 - DNA, 993 bp, Homo Sapiens
caacaaattgatgagcaatgcttacttataatggccaactttgtacaaaaaagttggctctcgcctgcctgcccgctcccttgcttgctcgcgctttcgctcgccctctcctcgaggatcgaggggactctgaccacagcctgtggctgggaagggagacagaggcggcggcggctcaggggaaacgaggctgcagtggtggtagtaggaagatgtcgggcgaggacgagcaacaggagcaaactatcgctgaggacctggtcgtgaccaagtataagatggggggcgacatcgccaacagggtacttcggtccttggtggaagcatctagctcaggtgtgtcggtactgagcctgtgtgagaaaggtgatgccatgattatggaagaaacagggaaaatcttcaagaaagaaaaggaaatgaagaaaggtattgcttttcccaccagcatttcggtaaataactgtgtatgtcacttctcccctttgaagagcgaccaggattatattctcaaggaaggtgacttggtaaaaattgaccttggggtccatgtggatggcttcatcgctaatgtagctcacacttttgtggttgatgtagctcaggggacccaagtaacagggaggaaagcagatgttattaaggcagctcacctttgtgctgaagctgccctacgcctggtcaaacctggaaatcagaacacacaagtgacagaagcctggaacaaagttgcccactcatttaactgcacgccaatagaaggtatgctgtcacaccagttgaagcagcatgtcatcgatggagaaaaaaccattatccagaatcccacagaccagcagaaagaaggaccatgaaaaagctgaatttgaggtacatgaaagtatatgctgtggatgttctcgtcagctcagagagggcaaggcccaggatgctggacagagaaccactatttacaaacgagacccctctaaacagtatggactgaaaatgaaa

SEQ ID NO: 241253 - DNA, 1095 bp, Homo Sapiens
ttttctcagcagcatcggctttgtaatgtaagagcaattgtgtacatctgagtaacggtgtacaccacagtaaacatttccacaccggcattcaaaccctggaaatggagtaatacacgtacatgagttgaaggatgaaatattaaggtctttggcataattaatactgaacagcacaatatatttagggcagcaatgtaaactaaagaatcattctaaatacactgtctcacaaactacattcttattcactacctgagagcttcatttcttattcctatctacaaacgcaggtttgccctagagaaagtcctctgagcttgtttcttcacctgtgatatggcaacaattacttcttaacaaaaacacagttgctaggttgaaaatgtaaaacatttttcaaatccaaacactacgatgtgagaataagcctactgtcagaaggcagtcttggcatttatttaagaaagatcaaataatacctctgaaagaactgttaacaaagaacacagcttcgatatttgcttttctctgctaacctcccatggagatgtgaactgtactgcagttgagaggtgaagagcacgggatctagagcctgcctgcctcagtgtcaatctacttactaatgaaggcaaattagcctctctgagcttgagtttctgcatctgtaattttggaataataataagtaaggattaaatgaggaatgaatttaattctgaacatatggtaaaacacacaataaatgctacttaattttaagaaaatgcctggagttaaaaccaaaatcgagatgtaatgggtgcagccagtctttaaataaaactggtcctgctcccccaaattagaattttatggtatgatacaattgttagaaatggagcacaggaatcaatattttaaacattaatatttgatgttaacctccattgccacatttttaacttcaaagacatatttgtaacttcataataatgaatgaaaaatgaagcaaacagcactgtattagacagactggacaagatgaaaattattaaatctcacccttctaatcttgaagtctgagggtttgtgagatttagaaaggctatc

SEQ ID NO: 241254 - DNA, 1858 bp, Homo Sapiens
gccaactttgtacaaaaaagttggctgaagaggcgtctaaactggatccagtgggcttccctcctgactttatttttgtctattgtggccttgactgccgggactaaaactttacagcacaacttggcaggacgtggatttcatcacgatgcctttttcagcccttccaattcctgccttcttttcagaagtgagtgtcccagaaaagacaattgtacagcaaaggaatggacttttcctgaagctaaatggaacaccacagccagagttttcagtcacatccgtcttggcatgggccatgttcttattatagtccagtgttttatttcttcaatggctaatatctataatgaaaagatactgaaggaagggaaccagctcactgaaagcatcttcatacagaacagcaaactctatttctttggcattctgtttaatgggctgactctgggccttcagaggagtaaccgtgatcagattaagaactgtggatttttttatggccacagtgcattttcagtagcccttatttttgtaactgcattccagggcctttcagtggctttcattctgaagttcctggataacatgttccatgtcttgatggcccaggttaccactgtcattatcacaacagtgtctgtcctggtctttgacttcaggccctccctggaatttttcttggaagccccatcagtccttctctctatatttatttataatgccagcaagcctcaagttccggaatacgcacctaggcaagaaaggatccgagatctaagtggcaatctttgggagcgttccagtggggatggagaagaactagaaagacttaccaaacccaagagtgatgagtcagatgaagatactttctaactggtacccacatagtttgcagctctcttgaaccttattttcacattttcagtgtttgtaatatttatcttttcactttgataaaccagaaatgtttctaaatcctaatattctttgcatatatctagctactccctaaatggttccatccaaggcttagagtacccaaaggctaagaaattctaaagaactgatacaggagtaacaatatgaagaattcattaatatctcagtacttgataaatcagaaagttatatgtgcagattattttccttggccttcaagcttccaaaaaacttgtaataatcatgttagctatagcttgtatatacacatagagatcaatttgccaaatattcacaatcatgtagttctagtttacatgccaaagtcttccctttttaacattataaaagctaggttgtctcttgaattttgaggccctagagatagtcattttgcaagtaaagagcaacgggaccctttctaaaaacgttggttgaaggacctaaatacctggccataccatagatttgggatgatgtagtctgtgctaaatattttgctgaagaagcagtttctcagacacaacatctcagaattttaatttttagaaattcatgggaaattggatttttgtaataatcttttgatgttttaaacattggttccctagtcaccatagttaccacttgtattttaagtcatttaaacaagccacggtggggcttttttctcctcagtttgaggagaaaaatcttgatgtcattactcctgaattattacattttggagaataagagggcattttattttattagttactaattcaagctgtgactattgtatatctttccaagagttgaatgctggcttcagaatcataccagatttgtcagtgaagctgatgcctaggaacttttaaaagggatcctttcaaaaggatcacttagcaacacatgttgacttttaactgatgta

SEQ ID NO: 241255 - DNA, 1288 bp, Homo Sapiens
ttggggtttcgcttgaccaaccatgaatttacctaccacaaaagcaaaggggaccagcctctctacagcattcccatcgagaacatcctggcagtggagaagctggaggaggagtctttcaaaatgaaaaacatgttccaggtcatccagccagagcgtgcgctgtacatccaggccaacaactgcgtggaggccaaggactggatcgacattctcaccaaagtgagccagtgcaaccagaagcgcctcaccgtctaccacccgtccgcctacctgagcggccactggctgtgctgtagggcgccatccgactcggctccgggctgctcgccctgcactggcggcctcccagccaacatccagctggacattgatggggaccgtgagacggagcgtatctactccctcttcaacttgtacatgagcaagctggagaagatgcaggaggcctgtgggagcaaatctgtgtatgacggcccggagcaggaggagtattcgacgttcgtcattgacgacccccaggagacctacaagacgctaaagcaagtcatcgctggggttggggctttggagcaggagcacgcccagtataagagggacaagttcaagaagacgaaatatggaagccaggagcaccccatcggagacaagagcttccagaactacatccggcagcagtccgagacctccactcattccatttaaagtctgcgggacgcgcccagtggcgccagcaagctgcccatgcaaagccgcagcctttgggagggagaagagaaggaagagcgcagagccggcaaagtgagatgcacgccgtcccggcccatagacaagtggcgctggggtttccctctcccagaaccgctgccaccaccgccacgccctccgcagaaagcccacctggccctgtggaacgtgtcgtcatttgattctgtgctttttgctccttgtttgtggggatctggggatcagctgaaggatcaggaagtgtgggctgtgccctagccacaccacagccagcctcagggagccacggcccgtctagtcgactgtgacatgcacctccggccgtgtgtgcgtcagtctcgtgcacgtctgtcttgcgtgcacggtgcgtgtgacgctgggctctgtggctctgtgcccgggaggcctgctggccccgcctcggctttcggcttcatcacattgggaggttcagagcattactctcccactgtgcctgccatccaggcagccatgggaggcggcctccctgttccactttcgaggttcgtttgattcctgg

SEQ ID NO: 241256 - DNA, 976 bp, Homo Sapiens
  misc_feature (163)..(174): n is a, c, g, or t
tgtacaaaaaagttggccaaatcctatctttagagaatcatcttcaggtaaagagtaattcctatcctgtgtgcctcagaagctagaatcgaaggcttaccctattcattgtttattgtcagaaatgcatgatggctcttggaaagaatgacgttttgctggnnnnnnnnnnnngaacagtttgtgtttcacaaacatggcttatcaattttttcaaagaattcttttttcccaaaaagaggagtaacaaaatgtcatttctgaaagaggcttactttataccaactagtgtcagcatttgggatgccagggaacagagagtgagacacctacaatcaccagtctcaaatgcgctattgtttcttttcagagtgttgcagatttgccatttctccataatatggggatagaaaatggaataaagatagaagggatgtagaatatgctttcctgccaacatggtttggagtcgactttggtatattgactagatttgaaaatacaagattgattagatgaatctacaaaaaagttgtcctcctctcaggtcccttttacactttttgactaactagcatctatattccacacttagcttttttgttacacttatcctttgtctccgtaaatttcatttgcagtggttagtcatcagatattttagccacctacacaaaagcaaactgcatttttaaaaatctttctgagatgggagaaaatgtattctcctttcctataccgctctcccaacaaaaaaacaactagttagttctactaattagaaacttgctgtactttttcttttcttttaggggtcaaggaccctctttatagctaccatttgcctacaataaattattgcagcagtttgcaatactaaaatattttttatagactttatatttttccttttgataaagggatgctgcatagtagagttggtgtaattaaactatctcagccgtttccctgcttt

SEQ ID NO: 241257 - DNA, 1607 bp, Homo Sapiens
ttggcccgtcagtctggcaggcaggcaggcaatcggtccgcgggcaggtgttcgacgtggggccgcgctacaccaacctctcgtacatcggcgagggcgcctacggcatggtgtgctctgcttatgataatgtcaacaaagttcgagtagctatcaagaaaatcagcccctttgagcaccagacctactgccagagaaccctgagggagataaaaatcttactgcgcttcagacatgagaacatcattggaatcaatgacattattcgagcaccaaccatcgagcaaatgaaagatgtatatatagtacaggacctcatggaaacagatctttacaagctcttgaagacacaacacctcagcaatgaccatatctgctattttctctaccagatcctcagagggttaaaatatatccattcagctaacgttctgcaccgtgacctcaagccttccaacctgctgctcaacaccacctgtgatctcaagatctgtgactttggcctggcccgtgttgcagatccagaccatgatcacacagggttcctgacagaatatgtggccacacgttggtacagggctccagaaattatgttgaattccaagggctacaccaagtccattgatatttggtctgtaggctgcattctggcagaaatgctttctaacaggcccatctttccagggaagcattatcttgaccagctgaaccacattttgggtattcttggatccccatcacaagaagacctgaattgtataataaatttaaaagctaggaactatttgctttctcttccacacaaaaataaggtgccatggaacaggctgttcccaaatgctgactccaaagctctggacttattggacaaaatgttgacattcaacccacacaagaggattgaagtagaacaggctctggcccacccatatctggagcagtattacgacccgagtgacgagcccatcgccgaagcaccattcaagttcgacatggaattggatgacttgcctaaggaaaagctcaaagaactaatttttgaagagactgctagattccagccaggatacagatcttaaatttgtcaggacaagggctcagaggactggacgtgctcagacatcggtgttcttcttcccagttcttgacccctggtcctgtctccagcccgtcttggcttatccactttgactcctttgagccgtttggaggggcggtttctggtagttgtggcttttatgctttcaaagaatttcttcagtccagagaattcctcctggcagccctgtgtgtgtcacccattggtgacctgcggcagtatgtacttcagtgcacctactgcttactgttgctttagtcactaattgctttctggtttgaaagatgcagtggttcctccctctcctgaatccttttctacatgatgccctgctgaccatgcagccgcaccagagagagattcttccccaattggctctagtcactggcatctcactttatgatagggaaggctactacctagggcactttaagtcagtgacagccccttatttgcacttcaccttttgaccataactgtttccccagagcaggagcttgtggaaata

SEQ ID NO: 241258 - DNA, 1396 bp, Homo Sapiens
  misc_feature (917)..(993): n is a, c, g, or t
ttggctatcgccaaaatctgcagaccaagcagttggggaaagtaattttgtttgccgaagtgacccccacaacgatgcgtctcctggatgggctgatgtttcagacaccgcaggaaatgggcttaatagtgatcgcggcccggcagaccgagggcaaaggacggggagggaatgtgtggctgagccctgtgggatgtgctctttctactctgctcatctccattccactgagatcccagctgggacagaggatcccgtttgtccagcatctgatgtccgtggctgtcgtggaagcagtgaggtccattcccgagtatcaggatatcaacttacgagtgaagtggcccaacgatatttattacagtgacctcatgaagatcggcggagttctggttaactcaacactcatgggagaaacattttatatacttattggctgtggatttaatgtgactaacagtaaccctaccatctgcatcaacgacctcatcacagaatacaataaacaacacaaggcagaactgaagcccttaagagccgattatctcatcgccagagtcgtgactgtgctggagaaactgatcaaagagtttcaggacaaagggcccaacagcgtccttcccctttattaccgatactgggtccacagtggtcagcaagtccatctgggcagcgcagagggaccaaaggtgtccatcgttggcctggacgattctggcttcctccaggttcaccaggagggcggcgaggttgtgactgtgcacccggacggcaactccttcgacatgctgagaaacctcatcctccccaaacggcggtaatgccgggcgtccccgagacgcggctgcctgtccgtgcccatgcatctggaaatctaatttagagttgtaggtgaattttcttttcctccaattcannnnnnnnnnnnnnnnnnnnnnnnnnnnnnnnnnnnnnnnnnnnnnnnnnnnnnnnnnnnnnnnnnnnnnnnnnnnnaagaggctctgggatagatggttaagaagtagaaaatttagtttagggaaagccctcccacaggtgggaaattgctctcccctctgtggcttggacttacgtttattgtcaaggggagtttttacatggaaatgacaatgggaaaattcagatattttcttagtagtgcagacctttacccctagtctatgaaaaaacaaaccaaaatatgctcttgcgcccaggccagtcggtgagttagaggtatgctatcactgtttgtaagcatctggggaggtactgaactgtaagaacatgcttggacacttagtcattgttctgtgtttttattaatgaagaaaagggaagacagacttctagagttactgtccacccggtggtgtggccccatagcgaagtctaa

SEQ ID NO: 241259 - DNA, 1061 bp, Homo Sapiens
  misc_feature (281)..(312): n is a, c, g, or t
  misc_feature (522)..(559): n is a, c, g, or t
ttacaggcgtgagccaccatgcccggcccatccaactaagttctgattaaagaaatataagcagaagtgtcctgtgacagtttctaggagcactttgtcaggggacaagaggtgaggagagtaatgtgtagaaagaaaatacatgataattatcacaaatagaatacttgtattcattgttagtccagaccttaaggtttcaaatttgaaggtttaccacctaagggaggaatagaaaactgggagaggatttatgatgcaggaaagaaaagagatgtatnnnnnnnnnnnnnnnnnnnnnnnnnnnnnnnnaagggctgggattacaggcatgagctactgcgcccagcctgattgtttgacttatgaagtatatacctatctatgaacaagaactgaaggaactttaccccagaatgaagagtttcactggatggaacggcagagtcggaggagaattattcctttaatttttatttctgttgatgttgcaattgtttttatgcagtgcaagcaaacatnnnnnnnnnnnnnnnnnnnnnnnnnnnnnnnnnnnnnngcatgcaagctgtgaatgtttatgcatactcaggaggaagccttctcagggtcactgtttccggaaactgaccttgaaaacagacctgcatttaaatatcacagatgtactttgacgaatgaggaagtaagagacatagaatggtaactaaattcatcagggtattatatattgagcaactgattcttctgggaaagctgcacccagtttctttttgaggaaacacctctcttcccccactgtcaggccatgttctctatagagttctggtctcctgagtcatgttaatcaataaattctcatttttgtttaagccagtttggattcgatttcccatcactctccactagaaatttttactgattcagggatagttagccagctaggaagagccagctctgcagcccactgtgggtgacagcgcctagtcaggagatcttagcaagcctgcagataggggcagcagagggaagctggggcaagtggcttcattcataaaggg

SEQ ID NO: 241260 - DNA, 1967 bp, Homo Sapiens
  misc_feature (274)..(337): n is a, c, g, or t
  misc_feature (366)..(396): n is a, c, g, or t
  misc_feature (983)..(1000): n is a, c, g, or t
  misc_feature (1254)..(1298): n is a, c, g, or t
  misc_feature (1535)..(1543): n is a, c, g, or t
  misc_feature (1627)..(1648): n is a, c, g, or t
tattttgagtctggcagttttgtctcattaacagatcaagacaaaggaaaggctaagaaaaatgctttacgcatcgtcacgctgtctctttttggttttaaaaatagcagtacacattaggttttctaagggataggtggggaaaaacacatgtacttttgtcaattttttgcccaaaaatatctcgtgggaacagaagagaaactgcatgacaatatgctaaacatgtaagcactgctgactgatggcacggagacattgaaaagaacagagnnnnnnnnnnnnnnnnnnnnnnnnnnnnnnnnnnnnnnnnnnnnnnnnnnnnnnnnnnnnnnnncttgagcccaggagttggcgagacccctnnnnnnnnnnnnnnnnnnnnnnnnnnnnnnntgagcagaggcattcataggagccacttctcatcaactaaaacagaacccatgattatcatactaggtggagccaaagaaggcctcactgtcataagggaacaggcaggcagaaatgatatctccaaaaactgagctcagcaacttttaacagtaaatcagaaacattacttcaaataattgatttcaatatttagtcttaaagaatttatggcattctgtaagagctgctgggtaattctgatactctccagtaagtatcaattaagatactgggtcatttttctatttgtatgttacacaaaacacattttactgctatgcaaattattcaaatctcaaagtaaatcattttggtgtaattcgctactgttaaatgtgtactgctattttttaaagtcctgaatatatatactttgtgtagaagtcaagacaccttgaaaagtgatgacaatactccttaaaaataaaataaacttaaaaataggatactacggtagatcaacagagaaaaaccattgctagaagatactgaataaatgcccaaaacagagatacacagatctagtttttccaccatcctgatannnnnnnnnnnnnnnnnnacaaaaactatgccaacacaaatactgtagacctctataattcaaacagcaaatagcttaatatggacaacatccatgtgctacagctaattttagacacaaactgatggtttcaaacatgctattttaaaacaagaacatcccacatctccaaatcttaatttggttaattttgtcaataaattaaaatgtatgtaatgtgcatatgtatatacaactttagaagagtgtatttatgtatatacacttatctnnnnnnnnnnnnnnnnnnnnnnnnnnnnnnnnnnnnnnnnnnnnnaatccctgaaaaggattcaaatgttctctctcagacttaaaaggccattccctacttcaaagttacattcaacaccactatgatccccttccgttattagcaactttgctacacttatgctgaatgttatgagaatcatgaattaataaattacacagtaattcctaacttaaagtaaatgaaataatccaatttaacatggcactgaaaattataatagtgcctgtgtggaagggnnnnnnnnngcaagttttgggagattttgcaaagaaatttttttcctccttcatataccccttgtgtctaggtcaaaacttatttcataagtnnnnnnnnnnnnnnnnnnnnnnctcccacaactacatacatgagtatatctatctattcagccaaactgatccatttgaaaagtcttaacttagtatccctcctttctattctaccaactaagtgttgctcagtggtgagtgaattctgctttttaaacaatctgtatcatctcttgcagtctctattttttggtaaaatttcttctgtaaaaacctccctatgttcaaattaatcactggaatacagcaaagagattgagattttcttaatttttacttttaagagaaggggtcacactatgttccagggctggagtgaagtggctattcacaaatccaa

SEQ ID NO: 241261 - DNA, 1558 bp, Homo Sapiens
  misc_feature (47)..(60): n is a, c, g, or t
gttttatataaaaccacttttataagttcatttgttcccaaaaaccnnnnnnnnnnnnnnggcttgtttaaaaaaaatgttgttacaaatatttacagcatttttcttctgttagacgaacatttcttaaaaactgaaaaaggggaaatttgatgaacagaccacgtaaaacaccagacaatgtcagaggctcctagctgtgctatttttattttcttagatacagtactgaaaatgcccatcaaactcgtcatcctaatccattctgttcacactgaaactcacattttctctaagtagtctattcagcagtagaaattgaaagtaaaggccgctctgcactggttcttctttcagaaaggagcttggggaaaatgcaaaatgctttacagagaggagttaaaaccacaacagtcagtctttggtcagagcaatgaggtgacactttgatgcaaaactttgcttggtcagcaatctttataactggtactttctggatatgggatgaatttttaaaagatctgggaaacaacagtaagggggaaaaaaggccagagtatgatttttttaatggcatcaaaaaaatagctatttaaatatttgttattacaactactacatagatccaagaagtgaaaataatacaacaacaaatcagttgacaatgctgatttaagcatgccataggcatctttcaattatgactatgatcaccaaggtcactggaccagacaaatatccctgttctctggaacatatgcctcaggttacaaaaactaaggaaactaccacaaagattttgagcagctctattcttggacctgcacaatgctctacaatgaatattatgtgataaaggcaaaagtgtaactgagactttatttatagttacaattctttgcttggatgaatagttggtgggacaacattcttttaaaactatatagtacatatttcctgaaaaccagaatactgatactactttagtctcaaataggaagaaaaggtcaattaagactactgaagaaggcacataaactttggtcctgttttttctcccactataaaacccctcaaactaagattttaataattttctatattttaaaccactcacaactagctgttaaaatttgctctgaaaaaagactgctaatagtcttgtagataacaacacaactcttttaaaagacagctgagttatattttcaaattttgtgcaatctaaattgtatttctttcagcacaatagtagagtattttgagtctggcagttttgttctcattaacagatcaagacaaaggaaaggctaagaaaaatgctttacgcatcgtcacgctgtctctttttggttttaaaaatagcagtacacattaggttttctaagggataggtggggaaaaacacatgtacttttgtcaattttttgcccaaaaatatctcgtgggaacagaagagaaactgcatgacaatatgctaaacatgtaagcactgctgactgatggcacggagacattgaaaagaacagggagccaggcgtggtggctcatgccccaa

SEQ ID NO: 241262 - DNA, 1060 bp, Homo Sapiens
  misc_feature (234)..(297): n is a, c, g, or t
  misc_feature (326)..(356): n is a, c, g, or t
  misc_feature (943)..(960): n is a, c, g, or t
caaaggaaaggctaagaaaaaatgctttacgcatcgtcacgctgtctctttttggttttaaaaatagcagtacacattaggttttctaagggataggtggggaaaaacacatgtacttttgtcaattttttgcccaaaaatatctcgtgggaacagaagagaaactgcatgacaatatgctaaacatgtaagcactgctgactgatggcacggagacattgaaaagaacagagnnnnnnnnnnnnnnnnnnnnnnnnnnnnnnnnnnnnnnnnnnnnnnnnnnnnnnnnnnnnnnnncttgagcccaggagttggcgagacccctnnnnnnnnnnnnnnnnnnnnnnnnnnnnnnntgagcagaggcattcataggagccacttctcatcaactaaaacagaacccatgattatcatactaggtggagccaaagaaggcctcactgtcataagggaacaggcaggcagaaatgatatctccaaaaactgagctcagcaacttttaacagtaaatcagaaacattacttcaaataattgatttcaatatttagtcttaaagaatttatggcattctgtaagagctgctgggtaattctgatactctccagtaagtatcaattaagatactgggtcatttttctatttgtatgttacacaaaacacattttactgctatgcaaattattcaaatctcaaagtaaatcattttggtgtaattcgctactgttaaatgtgtactgctattttttaaagtcctgaatatatatactttgtgtagaagtcaagacaccttgaaaagtgatgacaatactccttaaaaataaaataaacttaaaaataggatactacggtagatcaacagagaaaaaccattgctagaagatactgaataaatgcccaaaacagagatacacagatctagtttttccaccatcctgatannnnnnnnnnnnnnnnnnacaaaaactatgccaacacaaatactgtagacctctataattcaaacagcaaatagcttaatatggacaacatccatgtgctacagctaattttagccaa

SEQ ID NO: 241263 - DNA, 1808 bp, Homo Sapiens
  misc_feature (1529)..(1542): n is a, c, g, or t
ttgggtacattttccctgcattttagagattaggacagtggtcactttctagttgccgtcttcacagacaaacttgaaaggtattaaggaaaaaattccacatagctctgggccttttttgtattctgattgccacgttaatctgtaatcgttaagtacccatgaaagaatgtgtttcagtatcagtgcttttttggtactttaacaagtattgtaggcacggtggatttttttgaaatacccatgtgtccaatagcaagttaaggaacctagcgcatcaaattttgttttcttcattcatttggaaccttattttcgcaaaaaacctagctggaataataatgccatattgtattttgcacactgctttattttctagaggctctgggagcaaattacattcatcacattacctctgctctctcaagattaaagtctttcagcaacattctttattgtcatcataaggaaaaacttttatcgcaatgatagtcagttcacattagtttagcactatagatagtattcagaaattgctttctctttggtaaagaagataaataggtgaattttattgcctgtgttttcaggcttcagaggtacctggcaccttactcaagcaaaaacaaaaaacagctttacttcaaaagcatgtgcctctggtaaattatccatcacttttgttttaaagtggtccctccaagaataatgtggcatacacagtgggtttggttgtaaggcagatgtaatagatgacttcaaaagcctgctccttactgcactctggacaaggccctggtctgtatagtttggcttcctctgttaagtcattctacaaggtgacttgccatttgaactttcgtaagagacctcagcagttagactgagaaaagttagagtgctgtagttatgaagtcatacatttttgataaaatacctgtggaaaaccagggatcctctcctgtttctctctcttgcctccccctttccctccattcctctgtcgcctccccctctcctccactttctttaagaatcagggggtacagaataacctacaaacaacctcttcaaagtacccttggaaattgaagttcaatcttaagttttttgctgtctttaatttactagaattgcctaatttttagttgatttctctacagagcttagcttgtgtagttatttctcttttactgttgctttggtgtgtcttgaagtttgattgattatttttggtcattgagttcttagtgtagtttgctagatgattattaagattcttttgtgtctgacacttgtggtgagttgcttttgaaatctgttgagatttccatgtgagaactgataatcaggctcttgatctgcttccctaaattacttttttagagcccaaaccccaggtttagggtgagggtttgtaatacaaagaaacacttccatcacttctgcccttaacccttgcctctattacctaagcttagtaagtagttttcttaatattgtccaatgtttggtgttatctgcattgnnnnnnnnnnnnnnaattgtggttgttctgacgtgtgaaatttaaggaaagagccattttttaaaaatgccgagcagggcaatgcaagtacagccaaatattagacttgatgtgcaatcttcggtcctttttaatctggggtattatagggcagtactttaaattgcaaagtcttccgggcctattttcctctacatttttgtaattaactctgggggcttacttgttttggcagtactgaaatcaaaggagctggttcttctttctcccaattattttc

SEQ ID NO: 241264 - DNA, 983 bp, Homo Sapiens
ttggtaaaccattttattcttattctctaggttctgagagtgaatgcattgggcactttaagttgatattttctcttctccgagttcatggagctggtcaagtgcagcagttggctttagaggttgtgaatatagtgacatctaaccaagactgtgtcaacaatattgctgaatcaatggttttgtccagtttattggctcttctacattcattgccatcaagtcgtcagcttgttctggaaactctttatgctttgacatcgagtacaaaaataatcaaagaagcaatggcaaagggtgctttgatctatttactggatatgttctgcaattcaacacatccacaggttcgagcccaaacagcagaactttttgccaaaatgacagcagataaactgataggtccaaaggttcgaattacgttaatgaaatttctaccaagcgttttcatggatgctatgagagacaatcctgaagctgctgtacatatttttgaaggaactcatgaaaatcctgagttaatttggaatgataattccagagataaagtgtccacaacagttagggaaatgatgctagagcactttaaaaatcagcaggacaaccctgaggcaaactggaagttgcctgaagattttgctgtggtgtttggagaagcagagggtgaacttgctgttggaggagtcttcttgaggatctttattgcacaaccagcctgggttctaagaaagcctagagaatttcttattgccctgttagaaaaattaactgagctcctagagaagaacaatcctcatggagaaactctggaaaccttgacaatggcaacagtgtgtctcttcagcgcacaacctcagctggcagatcagtcccgccattgggccatcttcccaaagttatccaggcaatgaatcataggaacaatgccattcctaagagtgccattcgggttatccatgccttgtctgaaaatgagctgtgtg

SEQ ID NO: 241265 - DNA, 1566 bp, Homo Sapiens
  misc_feature (222)..(244): n is a, c, g, or t
  misc_feature (1356)..(1364): n is a, c, g, or t
ttggcaaagatatgaaccaaccttcaagctctttcttcagtatatctcccacatcgaatagttcagctacaattgccagggaactccttatgaatggaacatcttctacagctgaagccataggtttaaaaggaagttctcctactcccccttgttctccagtacaaccttcaaaacaactggaatatttagcaaggattcaaggctttcaggtatgaattnnnnnnnnnnnnnnnnnnnnnnncaattcattagcctcagattcttcatctgtatacatcacaaggctcattcttgcctgctagtatggcctacatgccacttacgttttaagttatttaggaacacaaaggacagacaaaaaagccatatgcacatgcctcattttctcttatttttgatctatctagtaattcttttgctgcctgtctcttctccattttccttcttcttttttaagcatttttcatattcttcactgtcttctatttggtcttgattaggtgcatctatctcttcgctctgtcttccacaaacaaaaattctgccttcagacatttggtgttagtatttcacactcagttctccctttttttacataaggattgagtttctttttatgatgattttacctttatagcaattttgaattttgcattctgttgctagtattgattcaggtacaccattaagatacaacattctagaagtctattaccttaggagttaaacatgatatttgaagaataatgaaatgctttatagttgtttgaggcataacaatgtgtatttgttttactggatcatgttttgaactgactagggagggtagcacctgcctcagatagtaccaacaattctgtttcactgggtagtctaaaactagcttatagtttaacttaacttgttgtgtatgtgaatttagggatggaaactttttttcccctatttattctttgtttccttctgggaaaaaaccccacaaaaatcagcactcctttatggatacattggagcttttgaaagaattgtaaactctaggaaggggaaatatctgtgtcttgatttcttagttgccttgaaaatcatgtactgaactgtaaccgctaacttgactggatgaactagtttgcttgtgtgtagagagtgtattgcttcctcagatttcactgttttcatctccttttccatcttagtctttattccttaagaccaaaaactgtaatatcctttagaaatgctctagaagatctgtattgtgtagaatgatcatgtatttataaatattttacaagtttagattataaaatgaaaaagaaggtcatgtgttttggggggtattttgcatgttcggannnnnnnnncccttcaccgaacccttctgattctttcaaactattgccaggtagttgttagtgtttctaattggactcttaatatgaacttcaagaagctgttaccagttatcggctctgtcatctgaaattttaacacttaatttaaggttacaattttagaatttgtttttgttgttttaccctttaagaaacacataaatcactgttt

SEQ ID NO: 241266 - DNA, 1614 bp, Homo Sapiens
  misc_feature (294)..(316): n is a, c, g, or t
  misc_feature (1431)..(1439): n is a, c, g, or t
ttggtgatgtttatcaagagatggaagccagccgccacaaagtaatctctggcactactctaggctatttgtcacccaaagatatgaaccaaccttcaagctctttcttcagtatatctcccacatcgaatagttcagctacaattgccagggaactccttatgaatggaacatcttctacagctgaagccataggtttaaaaggaagttctcctactcccccttgttctccagtacaaccttcaaaacaactggaatatttagcaaggattcaaggctttcaggtatgaattnnnnnnnnnnnnnnnnnnnnnnncaattcattagcctcagattcttcatctgtatacatcacaaggctcattcttgcctgctagtatggcctacatgccacttacgttttaagttatttaggaacacaaaggacagacaaaaaagccatatgcacatgcctcattttctcttatttttgatctatctagtaattcttttgctgcctgtctcttctccattttccttcttcttttttaagcatttttcatattcttcactgtcttctatttggtcttgattaggtgcatctatctcttcgctctgtcttccacaaacaaaaattctgccttcagacatttggtgttagtatttcacactcagttctccctttttttacataaggattgagtttctttttatgatgattttacctttatagcaattttgaattttgcattctgttgctagtattgattcaagtacaccattaagatacaacattctagaagtctattaccttagagttaattaaacatgatatttgaagaataatgaaatgctttatagttgtttgaggcataacaatgtgtatttgttttactggatcatgttttgaactgactagggagggtagcacctgcctcagatagtaccaacaattctgtttcactgggtagtctaaaactagcttatagtttaacttaacttgttgtgtatgtgaatttagggatggaaactttttttcccctatttattctttgtttccttctgggaaaaaaccccacaaaaatcagcactcctttatggatacattggagcttttgaaagaattgtaaactctaggaaggggaaatatctgtgtcttgatttcttagttgccttgaaaatcatgtactgaactgtaaccgctaacttgactggatgaactagtttgcttgtgtgtagagagtgtattgcttcctcagatttcactgttttcatctccttttccatcttagtctttattccttaagaccaaaaactgtaatatcctttagaaatgctctagaagatctgtattgtgtagaatgatcatgtatttataaatattttacaagtttagattataaaatgaaaaagaaggtcatgtgttttggggggtattttgcatgttcggannnnnnnnncccttcaccgaacccttctgattctttcaaactattgccaggtagttgttagtgtttctaattggactcttaatatgaacttcaagaagctgttaccagttatcggctctgtcatctgaaattttaaccacttaatttaaagttacattttagatttgttttggtggttttacct

SEQ ID NO: 241267 - DNA, 421 bp, Homo Sapiens
tccattagttctgtccctctagagaatcctaatacaattatcttccacatgtacgcacattatgtttacaaagtgggcacatctacttaagtaatattctcattatttgccttcatcattataatttttagtagctcatattatttctttatactgataaataatttaatagatggggaaatgtttccaatttttactagctatggaacatgttaaatatcctgtacatctttttatttatgaaattatttccttataatacattttttaagagtggagtgaccatatcaaagaaatggtatgtttacgtcactattacactgaatacccactgtgtgcttttattcttaccagggctagattacttttcaccagcatttacccgttatgctactgctggtactactggatatccaggttt

SEQ ID NO: 241268 - DNA, 2448 bp, Homo Sapiens
gagacaatcatttatttattggacagggcaaggtcatttaaagattggaaacatatcccaaaaacacgtgtttagtttggtgttacaggcattgatgctcacaacaaacaacattattcaatacatcatgtaaacaggccacatacaaccaggaagatgctgtcaagccactgagaagccacaatgcttagaaaacaatcattagggagttacagagaataatcacctccaactcattgatatgcatattctgcggctgcacagtatttggctggttccctggttattaagtgagtcgttccgtattttaaagagccttgattggtacacacttctgaatatcactgaaatcagtcaagcaaaggcttaactagctcacatcatatttttgaactaccctaggcaataattgactgtctcacagtactgtagataaaattctgtacttagcatatttagcagtgttacaacgcatccaaatcacctttaagtcctatggtacatacttgaaaaagacagcagaaactcactggagtaaatgaaaaaagaaatttggggagctcacctggcctgaggtatacaagctgctagcaaagatagacacacgtgaaaaccactttgtcaattatttgccaagtcatttggcctgatttttggcctgatttttagcctgatttttagcaggactcttcccgactgaggaggcaaagatttcaacatccattctagagactagccacagtattataagtagtaatatatcataaatgcttggttatgaggaaaaactactcagcataagattcacggagaaaaacctgttaggtatctggccctcttgcctgaaatctattgattttaccaaccactccctttcacagcaataagagttctcaagatgagaagaattttctcactccatatagaaaatcatatttgggaagccagtcccaaaagaccgaatattgtagaattccatttatatgaaatgaccagaataagcaaatctacagagagagaaatagattagtggttgccaggggctcggggatggggtgggcactgggagaaaatgagaggtgactgctcaagggtacagggtttctttttggggtaacgaaatgttctaaaattgactgtggtcacggttacacaactttgtgaatacactaaaaaccactaaattgtacccttaaaataagtgaattgtaaggtatgtgaattatatctcaataatgttacaaacatattaagaaacgaagacataccccaaagagaaggaaacaagaggctcttccaaaccaaatcgtaccagaagaaaacagtagccaagtctgatggaaggagcttgtttcttgcatgctattttatcatcatcactttaacccgatttcacatttttaattcatttctaaattattttaggttatcggcagatttctaactttgttctcattagagagcagagtcagtgttccgcagacagactgggctggcgtaacaaaccaaaactaaacaacaataaaaacccaatgaaaaataatctcatgctttggggctatgtgttaccagtcagaagagaagagctgatgtccatttctaaaggaaaataaaatgcctacaagtacaatggcatcttatgactcatgcctaaagcacatttccttttcaaacctgcatacagttattccctttttacacctatacaattcaacaaaagcaatgtttttatacctgtacaatccaaaaaaagcaacgttctctacaaagaaatgttgagcttcctacagctctctagctcaaagagctagccaatttccttaaaagtaaaattactgtttctaaaaatatcaactctgtatcctcatcctcactttcagcaacatacagtgaagatggaaaacttgaagactgctataaaccagaaactacaaaacaatttcttaaatgacctgattttcctaaaaaccttaaaaacattagttccaaatactgagaatatatttggcccaattcctttgaactctgtctttagattaatgacgagtttcctttatttcacttattcactagtttagtatgaaataaacagagtttgaatcagttaaactggctaatgacaattttcctcaatgatttttcttctgcataggcatgataatgaaatcacaaaaggtcttcaactagtcttcaactattcttacactatataatcaattagggaaatttttacagacaaatgaagagaacacaagtagctttacagtaagttgagcctgttacatatatttgttctgacaaagaatttctgacacaaaaattgctcactgcacacagaatctcagagaaatgatgaaacaagacagctgatggtagaaggtatatgggagcagggtagggtgaaaagtcacaaataaattaaaaactggcaagtacttgtgaagccaa

SEQ ID NO: 241269 - DNA, 1427 bp, Homo Sapiens
  misc_feature (78)..(115): n is a, c, g, or t
  misc_feature (397)..(420): n is a, c, g, or t
  misc_feature (885)..(894): n is a, c, g, or t
  misc_feature (1180)..(1189): n is a, c, g, or t
gtatcagcaccatgcctggcctgtgaaatgtatttttaaaaagctctgtagggccttccagtgttcagtctgtgtttnnnnnnnnnnnnnnnnnnnnnnnnnnnnnnnnnnnnnnaatcataacctgaaaggctttatataacattttaaataaattttctttcttttaacacagggatacaccaacatcagctggaccaaactccttcaataaaggaaagcatgggttttctgataaccagaagctgtgggagcgaaatataaaatctcatcttggaaatgtccatgaccaagacaattaaatgatgttttgaaattggggtgtggggtgggtgtaaagttaaaaggaacagtttccttttttaaagaatggtataagactatctttggagccgcnnnnnnnnnnnnnnnnnnnnnnnnaaaagattgagtggtacactaataaatgagagtttgaaattagaggtaatttatgttttatatacagatttcaagacatttgctaattttgtagtttcatgtgattagtttccaaaggttacagataataaagaaatcagaaatggtacctttttaagaattgcatatttttttagacacaactattagcacattaagagggaagcaaagttactgtctatttaaaactgcaagcagttaactctcttaactcccttattacctaaacttgtctggctcccaggaacagccttatagagagagggagtattgtattgggaagaaaatgttactgaactattgactgaaagtaaatttagataaaatacagcttttttccttatgggcatttgttttgtttcaagtcatcataaactaggtattgcattgctatccgtggatacagacgcttagctcttaaaagannnnnnnnnnatgtaaactgttgaatatttgaaatagtccacttcaccttaatgggtcttgtctatcttcattagtcttcaaagaaaaaccatttgctaccaaagtaaatcagtattttgaatgtgcttctcttgttttttgtttattagctagttcctgtaagcatttccaccagaacttgaggcaaatcgtaaggaagctgtttcttttaaaacacaaaccaccaccaaaaatttaaatgtacatattgcttaagtatttggctgtttttattttttaaaaggtataaacaccnnnnnnnnnnttaacattgtatgaagatggaaaataagaagatgcactttctgtaactttgtctaaggatttaaattactaacttatgaactccaatttgaattgaacttaactatcggctttcttactggtaaaattatatggtttattttaaatgcgtacatattgaccaaatggcctctgaaaaagcacattttagatactgaaattgaaggaaagaaaatgcatcttcaaacatttttggaatc

SEQ ID NO: 241270 - DNA, 1323 bp, Homo Sapiens
  misc_feature (403)..(426): n is a, c, g, or t
  misc_feature (892)..(901): n is a, c, g, or t
  misc_feature (1187)..(1197): n is a, c, g, or t
ttgggacgacaaagaaagcatcagccatatccatcaaacttggatcaagtaagcctaaagaaactgttccaactcttgctccaaaaactctttcagtagcagcagcttttaatgaagatgaagatagtgaaccagaggaaatgcctccagaagcaaagatgaggatgaagaatattggaagggatacaccaacatcagctggaccaaactccttcaataaaggaaagcatgggttttctgataaccagaagctgtgggagcgaaatataaaatctcatcttggaaatgtccatgaccaagacaattaaatgatgttttgaaattggggtgtggggtgggtgtaaagttaaaaggaacagtttccttttttaaagaatggtataagactatctttggagccgcnnnnnnnnnnnnnnnnnnnnnnnnaaaagattgagtggtacactaataaatgagagtttgaaattagaggtaatttatgttttatatacagatttcaagacatttgctaattttgtagtttcatgtgattagtttccaaaggttacagataataaagaaatcagaaatggtacctttttaagaattgcatattttttttagacacaactattagcacattaagagggaagcaaagttactgtctatttaaaactgcaagcagttaactctcttaactcccttattacctaaacttgtctggctcccaggaacagccttatagagagagggagtattgtattgggaagaaaatgttactgaactattgactgaaagtaaatttagataaaatacagcttttttccttatgggcatttgttttgtttcaagtcatcataaactaggtattgcattgctatccgtggatacagacgcttagctcttaaaagannnnnnnnnnatgtaaactgttgaatatttgaaatagtccacttcaccttaatgggtcttgtctatcttcattagtcttcaaagaaaaaccatttgctaccaaagtaaatcagtattttgaatgtgcttctcttgttttttgtttattagctagttcctgtaagcatttccaccagaacttgaggcaaatcgtaaggaagctgtttcttttaaaacacaaaccaccaccaaaaatttaaatgtacatattgcttaagtatttggctgtttttattttttaaaaggtataaacaccnnnnnnnnnnnttaacattgtatgaagatggaaaataagaagatgcactttctgtaactttgtctacgatttaaattactaacttatgaactccaatttgaattgaactaactatcggctttcttactggtaaaatt

SEQ ID NO: 241271 - DNA, 895 bp, Homo Sapiens
  misc_feature (644)..(667): n is a, c, g, or t
ttggcggggaaaatggcggacgggaaggcgggagacgagaagcctgaaaagtcgcagcgagctggagccgccggaggacctgaagaagaagcagaaaaacctgtgaaaactaagactgtttcttccagtaatggaggggaaagttccagtcgcagcgctgagaagcgatcagctgaagaagaagctgccgacctcccaacaaagcctacaaagatctccaagtttggatttgccataggtagtcagacgacaaagaaagcatcagccatatccatcaaacttggatcaagtaagcctaaagaaactgttccaactcttgctccaaaaactctttcagtagcagcagcttttaatgaagatgaagatagtgaaccagaggaaatgcctccagaagcaaagatgaggatgaagaatattggaagggatacaccaacatcagctggaccaaactccttcaataaaggaaagcatgggttttctgataaccagaagctgtgggagcgaaatataaaatctcatcttggaaatgtccatgaccaagacaattaaatgatgttttgaaattggggtgtggggtgggtgtaaagttaaaaggaacagtttccttttttaaagaatggtataagactatctttggagccgcnnnnnnnnnnnnnnnnnnnnnnnnaaaagattgagtggtacactaataaatgagagtttgaaattagaggtaatttatgttttatatacagatttcaagacatttgctaattttgtagtttcatgtgattagtttccaaaggttacagataataaggaaatcagaaatggtacctttttaagaattgcatatttttttagacacaactattagcacattaagagggaagcaaagttactgtctatttaaaac

SEQ ID NO: 241272 - DNA, 1693 bp, Homo Sapiens
ttctgccacgtatgttccatatgtcctatctatctgccctgcacaattatgagagggaaggaattattgcatttataaaatccttttcaaaagaggccattagcaaaaatactaatctaaagcttcagcttctccctgggccttgctctgatgctaaggtttaaactgcccctgaaggaggaagaaaataaataaattaaatgcttagctcttttagacagaagtaatcaattatgcaagatatcccttggttttattttaacttaacctttgtgaatacttcacaaaaatacacatacagaagtaaataaaactatacagttgaactaaatatccagcagatacaacaagtagtcagaagttcaaagatggataagttaggcagctgatgaggttgtctgcataatcaaaggggtagcacaaataatgaacaaataacttttaacaaaagcattctagttaacataaaagaaattggtagtctataaaatggttgaatgggtaacatgcattgatcaatacaacaaccaataatatttactgaattcaaactatttacttgtaaacatttaacaaagcattatgagatctaaatacagtctttgacaatttcaacaaaataagtcgtatgtttaaaaaataaagctgatgagcaatagatcattctatatattttctttcaacagttccagcaagagaaatagcagagtattttttaaaagtatacagcaaagattgttcctattataatgacaaactctggaaactgtaaatacaaataatcattgaacagtcaaatggtcatattcctaatcaggaagtagttacagtaagaacagtctgcaatccagttatacacaattgtcaataagaatgtgtttcttgtcagttgatttcatagttctttctctaagagacagcaaaactttggcaactgggtgtactgaaaatatattttgaaagttcgagatatcaagatacagtcatagcatttcgttttgtgaaaggtggtctgtacaccaaggctcagaggttgttaaagattgattccatgtggaaatagtgcaaatatcctgcacagatagcttacaaggttgctggcatagttattcaccagcagaatcttggattttgtttgcatagctcacacatcactggaatgtggaaaagtgtgctattttttggcaagagcaaaggagacattaaactgaagtgaattaccatgttggacatgctgaatccatgcagaacactggggcgaaggctgctacctgacatcattggtttttgtatactggttttgtttttgttgaagcagttctgttatagccagaagctttttcaatacgtgctagacagaggaaaaatggtatgaaaataaatgaaagctcggtcagcaatttcaggatgggaacctggatttgaaaaaaactgtatcaaagcaaaaggatgcataaaatattaccacaattcccctcaaaacataagtctctattattcagtcattggctgagtatttctggtcataactaagagaatttttataccctaaagtgaacagaaatttgtttgtgtttggcatgctcctattttttaggccagaactatcacactatcacatgttgtcagaagcagtttatctctcttttaaaaaaggctttttttatttaatatctaaggcaagtcaagccaa

SEQ ID NO: 241273 - DNA, 2143 bp, Homo Sapiens
  misc_feature (184)..(228): n is a, c, g, or t
  misc_feature (1687)..(1788): n is a, c, g, or t
  misc_feature (2005)..(2024): n is a, c, g, or t
cagcagtcacagctcagctggtcaaaggtttatagtgtttgacaccaggaccatgaagctcccatttggtagtggaaaaaccctcaaatatttcctatcaacagatgtgtgtgctagagaagaggaagttgtggaaaatatcccagtgatcctacaaaacattctctgtgttcctagctagggnnnnnnnnnnnnnnnnnnnnnnnnnnnnnnnnnnnnnnnnnnnnnaatcttgttgcctctgagtagtagactcttcaattctggaatttggttgccgaagactctaaaggagagactcactcagtaattcagtgactttagaagcaagctgagtatctcattctaaaatgacactgatttacactgttgagaatggttaagtacgtggggtaccttgcagcaaaagacaaaaagcaaaaagccagtagacctgcaattcacagctattcctgaggggtgcacattgcagcccactcttgagctccccagtgttctgagcaggggacagggcatacttctagtgatttgctcagtttaatcccttcatccaagaaaacagaccttccccaaccacacctgcagggttacttcagacaaccagcttctcattttagagtcccagttcctagaattggagaaaggaagttcccctttaagccctaggtcctgcccactagagcagatacgcaacattaaagagtgcaaattcaagtcagtttttcatatttagcaaacatccattgcacccttataaggtcctcgactttaagaaatttatatgaaatcggaaaacttaaatcttgaaactatacaaggatctactggaagcatcagcaggctaaactcatcacatggtattttcattccaaatttagtgttattgatcagtgtaccctcagaatatccttaagaagcaggaaggaaacaagttttcctcttcccacttccaagactgagaaagagtccagatgagctggtttgcccaagcaattcttatcaccagatactccgttattaaacgtgtctcctgccttctttgaaagcaacaggagaaatgaagcataggaaagtctgcaagctaacagtgtatcacctaggaggcttgtatataaatatgaagctctgcaaaatgtagttataatgaaaggcacttcctattaccagctccctaactctttttaaaagaattctatctccagggaaataaaactggttaagacagtgctctgatatgcttagtttagttccttcatccaagaaaacagaccttccccaaccacacctgcagggttacttcagacaaccagcttctcattttagagtcccagttcttagaaatggagaaaggaagttcccctttaagccctaggtcctgcccactagagcagatacgcaactttaaagagtacaaattcaagtcagattttcatatttagcaggtgatcttacaaagatatttttcaataaatggattatgtttttcaatgaatggatcttacaaagatgtttttcaataaatggaaggaaagatgtgtgtgcttggtttttttgctgagacccaaatgttgccagtgcaatcccccaccaggggtacaggtcaaatcaaagctgaatgaagagctcatcttcgatgtagctttccaggttacagaacgagacaataactgagcagcttcctcatatnnnnnnnnnnnnnnnnnnnnnnnnnnnnnnnnnnnnnnnnnnnnnnnnnnnnnnnnnnnnnnnnnnnnnnnnnnnnnnnnnnnnnnnnnnnnnnnnnnnnnnctaaattcaaagcctgaaccaaattgctttcctttgagtggcattggtacctggaatttcacctgttccaagggggggatatttgcaaggtgccgtggctgtgttgggaagatgggatgattgcttgagcccaagaattcgaggttacacagttacagtaaggtatgatcgtgccattacactccaccctgagcaacagaggaagattttgtttccnnnnnnnnnnnnnnnnnnnngatgacaacggaacgggaggtgggtgtagtcccagctactaaggaggcagaatcatgtgggttcaggagttcaaggtcagcctcagcaacataaggagaccctgtctcttaggaacaaa

SEQ ID NO: 241274 - DNA, 690 bp, Homo Sapiens
  misc_feature (576)..(604): n is a, c, g, or t
actttgtacaaaaaagttgggttaagctcgtgtaacggcggcggtgtcggcagctgctgtagcgaagagagtttggcgcgatgtctcacaccattttgctggtacagcctaccaagaggccagaaggcagaacttatgctgactacgaatctgtgaatgaatgcatggaaggtgtttgtaaaatgtatgaagaacatctgaaaagaatgaatcccaacagtccctctatcacatatgacatcagtcagttgtttgatttcatcgatgatctggcagacctcagctgcctggtttaccgagctgatacccagacataccagccttataacaaagactggattaaagagaagatctacgtgctccttcgtcggcaggcccaacaggctgggaaataattgtgttggaagcactgggggggttggggtgggcttggaacacaggtgtgtacagcgtgctgtagtggaagttttgtatcatagtaatcctgtttccactttgttatactctagccaagattgactgtattagatgaaatgtgaggatcttgttcaatcggaaacccccgttacctcctcnnnnnnnnnnnnnnnnnnnnnnnnnnnnnacttaaacatttttatgatgatttagatggaagttgttcttcgtcacttaatgttggttcccagtccttcaactgttcatatctac

SEQ ID NO: 241275 - DNA, 2207 bp, Homo Sapiens
ttggcaatgagctgactaaccacatggacgaggtgcagatccccttcctggactaccggacttacgccgtgcgcgtgctcttcccgggcatcgaggcccacccggtgctcaaggagctggatacgccacccaacgtggagaaggccctgcgcctcttcgggcagctgctgcacagccgcgcgttcgtgcttaccttcatccacacgctggaggcccagagcagcttctccatgcgcgaccgcggcaccgtggcctcgctcaccatggtggccctgcagagccggctcgactatgccacggggctgctcaagcaactgctggccgacctcatcgagaagaacctcgagagcaagaaccaccccaagctgctgctacgcaggacagagtcagtggctgagaagatgcttaccaactggttcacgttcctgctgcataagtttctgaaggagtgtgctggggagcctctcttcctgctttactgtgccatcaagcagcagatggagaagggccccattgatgccatcacgggcgaggcacgatactccctgagcgaggacaagctcatccgtcagcagatcgactacaagacactgacccttcactgcgtgtgtccggagaacgagggcagcgcccaggtcccagtgaaggttctcaactgtgacagcatcacccaggccaaagataagctgctggacactgtgtacaagggcattccgtactcccagcgtcccaaagctgaggacatggacctggagtggcgccagggccgcatgactcgcatcatcctccaggatgaggatgtcaccaccaagatcgagtgtgactggaagaggctcaactcactggcccactaccaggtgacagacggttccttggtggcattggtgcccaaacaagtgtctgcctataacatggccaactccttcaccttcacccgctccctcagccgctacgagagcttgctccgcacggccagcagccctgatagcctccgctcacgggcacccatgattacgcctgaccaggagacaggcaccaaattgtggcacctggtgaaaaaccacgaccatgccgaccatcgcgagggggaccgtggcagcaagatggtctccgagatctacctgacacggctgctggccaccaagggcacactgcagaagttcgtggatgacctctttgagacagtgttcagcacagcccaccggggctcggccctgcccctggccatcaagtacatgttcgacttcctggatgagcaggccgacaagcaccagatccacgatgctgacgtgcgccacacctggaagagcaactgcctgcccctgcgcttctgggtgaacgtgatcaagaacccacagtttgtgttcgacattcacaagaacagcatcacggacgcctgcttgtcggtggtggcccagaccttcatggactcctgctccacctctgagcacaagctgggcaaggactcaccctccaacaagctgctctacgccaaggacatccccaactacaagagctgggtggagaggtactatgcagacatcgccaagatgccagccatcagcgaccaggacatgagtgcgtatctggctgagcagtcccgcctgcacctgagccagttcaacagcatgagcgccttgcacgagatctactcctacatcaccaagtacaaggatgagatcctggcagccctggagaaggatgagcaggcgcggcggcagcggctgcggagcaagctggagcaggtggtggacacgatggccctgagcagctgagccccagctgtgatcatccagcatgatgcagcgtgaggacagctgagcagggaccgggacagccctcaccgcatgcgtgtggagtgtccggtggtgctcgggccgccgcagtgcagcgactgcccggccctccctcccctgcctcacccggtcgggtcccggctcttcctgtgtggaggtgatggtacctgccacaccacagctgcgcacacagctgcttgctcaggggccgggacagcactgggtgctcaggctggccaaggaccttcattgcctggcaagagctgcccagtggccttcatgggagaagggctgacctctgaggggctgaggggtgaggccagggccctccagggggaggggtagccagcttgggctgtccccttgagaccaggacaagaaggctgggggtgtcagcattcccagctttcc

SEQ ID NO: 241276 - DNA, 1241 bp, Homo Sapiens
  misc_feature (118)..(131): n is a, c, g, or t
  misc_feature (900)..(912): n is a, c, g, or t
  misc_feature (1120)..(1144): n is a, c, g, or t
atagtgaaatccctttaagcaacctagggtatacagttggtgtcccaactttcaggggattttcgggggagagtagaaacacttgattaacagttttcacccacacacgttagacaannnnnnnnnnnnnngccaagattttagtagtaaattcataaatataggaaatactttcactccttcagtgttaaaatagaaaaccaaacagtgccaacagtagtggcttaattattggtatacaagaaaaacacaacaacaatggttttcttaattacgcattttaaatatcaatatgtgcatttgtttttacagttataaatttttttctcacctgttttagacaacagcttgtaatagttttgaatccattaagatgttgctttcaatttgaaatattttgtgtatacatgtatataaaaaataacccaatgtatgactcatctgaccgatgtttaagatcaataacggcttatttttcaacatgcagttaggaagagagggaagcaagccaacctctctacagtatctttttgctggcttgtttttgtagtggtatcaatagtggtttttggagggaaccatgtgccttcagcctatctagtcaagatcagataccacgatcaacaagagcggtagaagagatggggaaaggggagtgggtaagtgttaaatatcaattttgtaaagtgtgcattttgtactccttctaggcacaggattaaaaacaggccaatgaggaaaaatttgttataattaggaaaaaactgcaatcaaatcaagacataatagccgaattaagttcttttaatagattgcatatatagatgtttagccatactcttagatcaactctttaagagcagaactttatatccaatttacatgctctagataccaccnnnnnnnnnnnnnacagtaaggtctggtattcaaatacccacttgtacactgacagctttaagaaaaacaggacacagagggagttgtcatttttagcagcaatgaaataccactaacccctttttacataccgaattcaagtcactatcagaggtgagtgcaccacaaagtcaccaggtacaaaattgctagttcatttttaaattaataacttgaaatnnnnnnnnnnnnnnnnnnnnnnnnntctttttataaacagcaaacattttgctattttatacataggctagcaggcttgtttcaatatgaaagtgctaattcatttacagatttttatccaa

SEQ ID NO: 241277 - DNA, 1384 bp, Homo Sapiens
  misc_feature (149)..(210): n is a, c, g, or t
gattttcagggaacagcaggcttcacagtcacagagaagctgactttcaaaacagagcaaagatggtgacaaactgatcgaatggagagatacgctcttatgcatgtgggcaatgtccccactcctggtattacccacagcaattcttnnnnnnnnnnnnnnnnnnnnnnnnnnnnnnnnnnnnnnnnnnnnnnnnnnnnnnnnnnnnnntcccttgcctacttcaccctaaacttcataaacctcttttatctgcacatgaataagattaaactactccaattattgtcttataaaaggaaggactgagaggataaaaatggtacaaattcaccaacatatgccaaaacacagagtatctttccttaacataagaaacaggaagagaagaaaatttaacagtgtgtcaggtatgtgtgtgcattgttataatcagttaaaagctagaaaactgaagcttaataactaatttattcaaggccacttatccaacaccacagagccaaaatttagccctgggtctgtttcatgtcaaagtcctggctggcaatttccacaaaactgccttccatcatcaaaagaagttaggaagataaacagtgagaacagccaacacattttttgctatctattttttcttgttagttctatgactatttaagaaaatattttggcattgaataatatttctattacatagcatttcctcctttgctaatgcttagtaactctacaaagatgactcatcatatcagaagcatcatgaattaatgcatttatctgcagcagctgctaataccacaaaaagagagaaaaccacagattatgcgccacctactaaatgaacacaacataacctatgaaacattcatgccaaaagccatgtttcaatctcatcaagtctctagacataactagcaaattaaagaaacagaggatagaggaaagcaaacattaccatagggatgcaattagcaaaacttaaattgtggcaaatgctacatgtgaaacaacctcatttcataaacaaaatcgcaaggaaaaaaagaaagatgaaagggaaacatacggattaagaagacacttaggagatttacgggattctactaattaaaaataataaaacaagtagcatttatgaggcaattggaagtttgaaccctcactggatatttactgatattaaagaattactgtaaatatcacttgcgataatggaattatcatttttttccatatcatcccatagctttcagagatatataaagaatatttatggataaaatgatcagatgtctgctatttgttacaaaataatactagaacatggggagtgagtgaggctaagttaaaaaagattgttcatggattcataattgcccaa

SEQ ID NO: 241278 - DNA, 1482 bp, Homo Sapiens
gcaaaattttagtgcactgccaaagtgctacaataactgtcatcccacagacatcccacatgcaaacactactgggacctagtacactagagcaaataagagagtatttagcaaaactctctggcaaaaacttttaaaaacgggaagtaatgaaacagaaatccacttcttatttgaagggctttagaaaataatcttcattttaatcacatatacacatagtattatctaagctcagaaaataacttcttcctgtatgcacagaacttcaatgtacactcagtaaatgttagcatttgaagaaaatgtgccatgaggagaatgtctgagggataatggcaggaaaaagatatatccattataaaagaggacagaaaggcatagcaaggatggggatgtgcaggaaagggaggggagagggaagaaagtaaactgaccataaaagaaaccaattcaaatggaaaacagcgactaaccttgacacaggaatgaatcatgaaggctggatgggtagactgggaggggtgaaaagaatgtatattctttgttttaagctatatataaaattgtcagatttagccaaagcctagttggaatgggagttggctaaattacatgaaatgtaacacagacattgccaaaactacttcacagggttgttctgaacaacgagacacaaattgtgaagatgttccccaaattgcaaaatgctacactaatgtaagacagatagtttacacaatattccagttcaatctttcctttcaactctgggaaattacaagtgcaaacaatgagatctacagagcacagaaagaaaaaaacctccactgctccattatcagattttcagggaacagcaggcttcacagtcacagagaagcctgactttcaaaacagagcaaagatggtgacaaactgatcgaatggagagatacgctcttatgcatgtgggcaatgtccccactcctggtattacccacagcaattcttagagggaaaattattcagtagagggaaaattattcagtagagggaagagggagtaaacagattcccttgcctacttcaccctaaacttcataaacctcttttatctgcacatgaataagattaaactactccaattattgtcttataaaaggaaggactgagaggataaaaatggtacaaattcaccaacatatgccaaaacacagagtatctttccttaacataagaaacaggaagagaagaaaatttaacagtgtgtcaggtatgtgtgtgcattgttataatcagttaaaagctagaaaactgaagcttaataactaatttattcaaggccacttatccaacaccacagagccaaaatttagccctgggtctgtttcatgtcaaagtcctggctggcaatttccacaaaactgccttccatcatcaaaagaagttaggaagataaacagtgagaacagccaacacatttttttgctatctatccaa

SEQ ID NO: 241279 - DNA, 2228 bp, Homo Sapiens
gattttattcacctcaagtctaaacacggtggaaaaaaaactggtctagagatggaaactatatttcatgggggtttattaaacagagaaagaggagaatctttcacaatttcacagtgctttctcattgaaataaagacatgatcaggaaaagtcacccttataggcaagctatcacctccctaagtaggggaggcaccaaaatctccagagaatcctgagaccacttgcacgagttgaattattttttaaaataaacttatgcttaaatatgctaggtctcaatttctataaataaggtaaaaaatagtatatttcagaagttttaatagttctttgtagagagagaacattttaccatgtacataattcacaagggtataaaggtttcccaatgtaaagttccttttacccttcaactgtaacccatagcatctgcccaaatactgctcatttttcactttctactatatgtctctttcctgccaactgaggtagttgtcacttaggacagtttaaggctctggaaaacactggtggaaataatcaactgcccacctggagggcagtctcagagctgaccctttggaagtctgcaatggagctaggcctttcaaaattaccacgctaaatggctggtctaaaggagtcattacggctttttaaaaaatcatctgcctttttccatcatcttggtgagccagtaagtctggtgctgtgcgcttgccatgaccatctatcttcctggctaaggtaattacagacttttccagggtataagggtgaagaccacaaagaaaaagaaccaagtaaatgacagacacttgagaatttgcttcctcacagatgacattgctggtttataaggggtactttgcaatggcaaaagaatctgaaactaatgctactgcaataacaggcagcatacatctcaggtcagaaacgcaatcataaataagtgtaagttcatggaaacttgacagctgaatgagcacccagaggcatgaagataacctggagcctatttcctggcaatgcaaattgtggctgctgcataactacaaattgtgtatcaagaaactacatagtttcaaggcttaaaaattacccagatttgggggagtatgggtggtgagaaaaggctgaaaggaatggacagagcatgtagacaaaggaagggaaaggaaaaggagacagtttcctgatttcatagcaactcaaagataacatgacccaatgacaggaaaatggagaacgtataaaaagcatccaaatcccctaaacaagatgacttctcctagctagcaggaataatgctactctgaacatacatagttcacaggtaagggaactgacccttcctgaaagggcaaaggcagggtaaggaagaatgggaagagaagaatacaaatgttttttaagatggaattgaaagttgaatataataaaaagcccagtacatctcacgtgcagaagagttacaggcatgttctaaaggcaaataggactttctatcatatgtatgagaactaaatcaaagcttaaaacaacagctcctggggctttaatggataatccatattaataaatatgtaggggcctagggggtgtgtcactctggagcacttgctggttctggaacatgagtttgttatgttttttaaaagacattcatttaaagaacaaaacaataaaaatctattttcctcccaaaacagttaaatcaataattattctaaagtcactgaaataaaagctggagtgaaggaggctcagatttgtggatttctctctggaagttgcagcctatagtctaaaagcattcctgcacttaacaacagttcttactttggagagccagccagtgacagaaatgccatgattgaatcaactttcaagaaggagctagaatgccatgctagctgtggccatccaatttctctggaaacataaaagtgggctgttagcttaaccaatgggaagtgaactacccagcattcactactttatccactctccttcctcagggatcccatagagacctcccatttccaaagggaggcctttttaggcctcttatttcagtaggagaatttctaccctatctatctcactctgtttcaaagggttgaaagcaattgcacaacacatgcaacatggaccaaggcaccaagccagtccacgtaaagataactgaccactacctaggttagaaagttgttctccaa

SEQ ID NO: 241280 - DNA, 1488 bp, Homo Sapiens
ttttttaaaaggattcatagcaaatatgaatattattattccaactaaaggttgatcaaatgtccatgctacttgttaattgaaatgtgggatttttttcctttgaccatacttttgcaagtgtgctgtctttaatgttcacacagaatttaaatgggatttaatgtcttagaaatgtaaaaattactcaagtttctctatataaaacctttacttttcattagaaagaacacagtaatgtaactggatgtgactttcagacatccctaaaagaaaagaaatgcttgcttggagatctgagcaagtaggtcctggaagaaataatataaaataaacaacttgccaactgttgggaagatttggtttgaatatttaaaattacctatcaacttagaattgggcttattaaatattccaatcccagaaatgaccatcagctaaacaagggtcaaagccagagtaatctctgagggcccacttcccagagagctgcccctttccttcagcaataccgctggccctgggttaggcaatttgtccacggcccttagggattcatatttatttggaatacagtcactgatccctgtttactttttaatacaaaaacatgtacctttttggataaacggaattggcgagagacaggcaatgggcaagctctggaagtggccatctgtggcctctcccgtgggagatgtttatccttttcgttacgtaacagaaactgacccaacgcacagaagatgccctcccacccaccccatcgaggcacaggaagaggctgccctccaggggctgcatgtgtgtccagctgtggcgtagccagttaaagaaaagttgacaacccacactacaacactgcatgaggaggaaaatgagacctaacgtctgttgacgggaacaggtggactgtggtgtcctcgagatctgtcctgtccctgggcacagaatgctctgatgacaaaatgacccccaaagctagctagaaacattgagaagggggcgggggacaaaaaaaggatacctctccgtgtaccgacatacaatactatacacagcaccaaaagtatcacaccaccaagcgctgtctcacgccagtggtgtgcgctcggcgtcatacccagcatgaaatgagcacgcttcacatgcagacgtggcactgggcgaacaggtaaccaacatgtcacaattcaccagagctgccgccagcccatccggcccctggatgaacacgctaccacaagggctccagccagaatgtgtgtcccttactgctggtaatttccatactggccctaaaagagatcaagacacagattacacccctatagtaatgagtgaaaggaagacagacgtccaccccagcccggacagggggtaggagggacaacagcaagcaaacaacctctgctcacatctctgcggggcagcgaacgactttccagaagccactggccaagcctggggctaacaacgtagacccaa

SEQ ID NO: 241281 - DNA, 1995 bp, Homo Sapiens
  misc_feature (223)..(248): n is a, c, g, or t
  misc_feature (782)..(1095): n is a, c, g, or t
aaaaatggacagcacattaaataaacaattctgtattattcattaaatattattacaccaaaaatcatgtataaattaggaaataaatgtacaaactattttgcaaagtgctttttaaaatatatacacaacattcaagatattcttaatgtaagacatttcagattgaagttttggggtaagtgtccttttctttcagaaagtattattaatacagcacttnnnnnnnnnnnnnnnnnnnnnnnnnnggcatattcccagattggcaaggaataaaaataaactatcttcacagttatctaaaatgtttaacattttcagtgggaaattttagtccccgattgagtttgcaaattaggtctatgaaaattgacaggaaaagaacacaatcaagggagatgactccctaactgaaattgctaacgcgtttgtcaattagcaattaagaactctcatttcggtgatcgaatatgaacacatacgtttatttttgagcccttaccagtgttaagggttttagaaacccttagtgcctacaaaataaacacttctctccccatttgtgcgtgacatccgtctcctaggagaggggagaatgtcctagaacaggactggtattcaacacaggcaagtcctttaatctgtgcctcagttcttcatctctaaaatgggaactgttacctgcctccagatttcctcataggggctgtcagaattaattcaagcaaaacacataagtgacttataaattctaaagcacccgactctggataaagaattannnnnnnnnnnnnnnnnnnnnnnnnnnnnnnnnnnnnnnnnnnnnnnnnnnnnnnnnnnnnnnnnnnnnnnnnnnnnnnnnnnnnnnnnnnnnnnnnnnnnnnnnnnnnnnnnnnnnnnnnnnnnnnnnnnnnnnnnnnnnnnnnnnnnnnnnnnnnnnnnnnnnnnnnnnnnnnnnnnnnnnnnnnnnnnnnnnnnnnnnnnnnnnnnnnnnnnnnnnnnnnnnnnnnnnnnnnnnnnnnnnnnnnnnnnnnnnnnnnnnnnnnnnnnnnnnnnnnnnnnnnnnnnnnnnnnnnnnnnnnnnnnnnnnnnnnnaagaattacttttaacttttaaaacaaaacatcaattaaagagaaatatcgttattactaggcctcatatatcaagcattggatatctcttgtattttcttggtagttcttggaaatctgtcagcatttatccaaagatttttttaaaaggattcatagcaaatatgaatattattattccaactaaaggttgatcaaatgtccatgctacttgttaattgaaatgtgggatttttttcctttgaccatacttttgcaagtgtgctgtctttaatgttcacacagaatttaaatgggatttaatgtcttagaaatgtaaaaattactcaagtttctctatataaaacctttacttttcattagaaagaacacagtaatgtaactggatgtgactttcagacatccctaaaagaaaagaaatgcttgcttggagatctgagcaagtaggtcctggaagaaataatataaaataaacaacttgccaactgttgggaagatttggtttgaatatttaaaattacctatcaacttagaattgggcttattaaatattccaatcccagaaatgaccatcagctaaacaagggtcaaagccagagtaatctctgagggcccacttcccagagagctgcccctttccttcagcaataccgctggccctgggttaggcaatttgtccacggcccttagggattcatatttatttggaatacagtcactgatccctgtttactttttaatacaaaaacatgtacctttttggataaacggaattggcgagagacaggcaatgggcaagctctggaagtggccatctgtggcctctcccgtgggagatgtttatccttttcgttacgtaacagaaacccaacttttttgtacaaagttggcttttatggg

SEQ ID NO: 241282 - DNA, 1443 bp, Homo Sapiens
  misc_feature (831)..(851): n is a, c, g, or t
  misc_feature (917)..(925): n is a, c, g, or t
ctttgtacaaaaaagttggcccaacatccctggtaaactaatgtttaatattatagaactgtcctcagaaactttgtcaattttcacggctataaggaaacagaacgactcttttaattctgtatttatcatttactttctgtatatatagtttaataacctgcttgggtgtaatttgccaagcttgaattctttaatgcatttgcataaattctatactgtttagagcttaaagctacagaagcattgttaggaattgcttggacactgaattttaaactttttgacattgttaacaagcatgttcatcttttcttgtcacttttttatgaaaaatatgcttaatgtatattacaaaggctttgtatatgttaacctgttttaatgccaaaagtttgctttgtccacaatttccttaagacctcttcagaaagggatttgtttgccttaatgaatactgttgggaaaaaacacagtataatgagtgaaaagggcagaagcaagaaatttctacatcttagcgactccaagaagaatgagtatccacatttagatggcacattatgaggactttaatctttccttaaacacaataatgttttcttttttcttttattcacatgatttctaagtatatttttcatgcaggacagtttttcaaccttgatgtacagtgactgtgtaaaatttttctttcagtggcaacctctataatctttaaaatatggtgagcatcttgtctgttttgaaggggatatgacaataaatctatcagatgggaaatcctgttacaaagtagaaaagctttagtaatttactcagtgtggtggnnnnnnnnnnnnnnnnnnnnnctcccttggtctataatgaaattgttacagcagtgcaaaataaaatcctatgtataaaagtgttcnnnnnnnnnattatgaccacctcttttttaatgtatttttagtccacttacagcttttacatgggtttaagcatgttttttaaaagggtcagaatggttaacactcaaccctttttaaaaattttgctaaaatgcgacaaatctcaccatactgaaattatttttgttgatggtgtaagcagtgtaagcaagtgttttctcctgaactagcacaaaagcacttatgcctgaaagaaagcataaagaagttctaactctgaaactaactactttcatttcgctcatggccttcaactttctacaggtcttccctgaagattcagcagtactttctcaaaggtttgacagtactcttgtgggaaatcaccaaatgctgtcatagttttgttttaactgtctccttgagggcagagggaagggtgagagaaaatctgttttcatgggtatttgtagtacagcctttttttctttcaagtggctgtatcaaattcactggtcttactaatcactgtctttaccagtgagta

SEQ ID NO: 241283 - DNA, 1134 bp, Homo Sapiens
  misc_feature (986)..(994): n is a, c, g, or t
  misc_feature (1060)..(1080): n is a, c, g, or t
tcaattacaatattacaaattcaactgcaggtaccaatattacattatttgacagggataataaaatgagcaaagactggaaatcacagacaataacattgctttctcaattaacagaaaggattcataacatattcttaatggtagatgtgatttgtagagaatgtggaaaagaactattgagaagtccacctgctgccccagactgaggcacattagggtggttgtgggaggagttatatttgagggttccatttttccttagggtattaaaatgcatgtcctggtttgttgtttatttgccattaagttctcttcttcaaataaaagaattaggggagaaagtatggaaaagaaacgcactaaacttctggaaaaattaacagaagcttaaaaataacaatttccaaagaatcattctcttcttggtatagagcagtacctgtcctagttgccttaactttttgtactcactggtaaagacagtgattagtaagaccagtgaatttgatacagccacttgaaagaaaaaaaggctgtactacaaatacccatgaaaacagattttctctcacccttccctctgccctcaaggagacagttaaaacaaaactatgacagcatttggtgatttcccacaagagtactgtcaaacctttgagagagtactgctgaatcttcagggaagacctgtagaaagttgaaggccatgagcgaaatgaaagtagttagtttcagagttagaacttctttatgctttctttcaggcataagtgcttttgtgctagttcaggagaaaacacttgcttacactgcttacaccatcaacaaaaataatttcagtatggtgagatttgtcgcattttagcaaaatttttaaaaagggttgagtgttaaccattctgacccttttaaaaaacatgcttaaacccatgtaaaagctgtaagtggactaaaaatacattaaaaaagaggtggtcataatnnnnnnnnngaacacttttatacataggattttattttgcactgctgtaacaatttcattatagaccaagggagnnnnnnnnnnnnnnnnnnnnnccaccacactgagtaaattactaaagcttttctactttgtaacaggatttccaa

SEQ ID NO: 241284 - DNA, 1148 bp, Homo Sapiens
  misc_feature (94)..(107): n is a, c, g, or t
  misc_feature (859)..(951): n is a, c, g, or t
aaatgtacagcataaagtctactttcctcttgaagaaaccataagctaccagctgttggggaggggctggagcagagcatatgaagcagctgcnnnnnnnnnnnnnnccaaatcaaactcatgacgcagctggccaagcaagccaagtgctgtcccgccatcccagcacagaactggaaggcaagtgactccctgtccctgttggtggaacccaggaaggaacctcagcagagccctccgtgtcctcctttcagcccagcccctgctttcccttctgctgacaggacaaccaggcctgtgtcacctactccatcacaaggcctggctccttcaggacctcataagcctttagaaccttggcaaattggattctatgcattcacttaaatagtaaaagtaaaatttgcaataatgaaaaggctgacacagtagcacaacatggttttggtttaacagcagcttaaaaaggaacaaaaaggaaacctctcatgcagacacatcaggtggcataaaacaataggcaattccacgcggagcatcattagccattctctctgtccgcacacaggactctggctgcacctcaggggcagcagctgctttcaggtcaagtctctcaccctctcaccccaggcaaaagcccttcctctccggcctcaggctgacccctcctagctctcaagagaatgaccaaatgcgagtgcccttagtgcagcacttgctaccatcttcaatcccttcccaaccagctgggatagaagatgccatctgattggaatatgaaaattaaagcatttctctaataacatagtaccattgatgaagtctccatagattttctaacccaaatgtgtgtgannnnnnnnnnnnnnnnnnnnnnnnnnnnnnnnnnnnnnnnnnnnnnnnnnnnnnnnnnnnnnnnnnnnnnnnnnnnnnnnnnnnnnnnnnnnnagatactttctgtcgccattacgttgcaccgttcagagctgcaagacagcagtacagatagggagaaatgcccaggagcatctcatcatgtggtgcatttagctcacttcacaagccgtgcagctgtccagagtctgtctttccatcagtcctcctcttttctcttcacttctgcttggttgttatgaaaacaccaa

SEQ ID NO: 241285 - DNA, 1709 bp, Homo Sapiens
  misc_feature (137)..(187): n is a, c, g, or t
  misc_feature (381)..(420): n is a, c, g, or t
  misc_feature (1410)..(1419): n is a, c, g, or t
ttgggttttaccttaaaatgttataatattttccagttgtcatgctgtcaacattaacaaaaaaaatcatgttaaggctttgtatcaaacattttgttacactctgtctgaaatgtaatgtggagtacttcagcagnnnnnnnnnnnnnnnnnnnnnnnnnnnnnnnnnnnnnnnnnnnnnnnnnnntttaatgctgggcacagaaaagtgttacaagttccatatcgtaagtccttaaaggggcagaaatatatgtagccaagtagaatttattacattttagtgttattattttaaaacttactgatactctttaacctctcctgcagtaatagttttgctttatttcttactcatttcaatttattgggtttgcaaannnnnnnnnnnnnnnnnnnnnnnnnnnnnnnnnnnnnnnnacagcctagaatcttgcaaagtctgaatattttttaaatgttctatcttaactagttcactaatacagtatttttagcagacagcattttcagacagcattttcataccaagtttgacttgtggtctccaatcttactgggaaggccctggtagtgtaattcttttccttattaaaaggtaaccaagtgcctctaagtcatgcttatttgtaaacaacaaagaagagtatatgtacctgctcaaaatttttttgataattgcttatataattaatttctaatgatgaggacatgtaaaagttgccagtaagaacatagtatgcatttaattaaatcaagatggctaatggaattaactttctcccctgttcttgccaggtggaaatgatttaagcatttctccttgcagttgtattgaagtaaattaccataggcatcaagatggctgcatcacattttcaaatgattttatattcagttgctacttataaagcagcattcaaaaagtcttttacactgtcatgttggacacaagcagactcagcttttatcaaaacttgtttaaataaaaaattgacagtagctgggttattaaattatgcaactgaaactcctgaattatatcttttctgtatcccttaataagattggagaccactgccgtttaggataatacaataataaaacgttttaatcagtactaaaactttaattaagccaataatgatgcatgcctgttgtagctgacagcatgggtcagtacatccttcagcgagtgccttactctaattgaaaccaagcacacgtaaggtacaatatgttagactctgtgattttgttttcaaaatcctctgttatggctatatttaaatttattttaaatattcctgtatgtattcatctaagcatttgggcatttggagtcttaatatacaagaaacacgtacttaaatttttatgcttatcaccgcaatgatggcaaacagtgannnnnnnnnncatagtttaggtgtcattgttgccagcacctttagtgctcagtcttcagtgaaaaatataaagtgccaaaaaaatcttgcaagacagaatccatacttaacactctttccaagacactgtgaccatgtacagtagctatttcctgatgaccaaatctctcaacgaatcatgttattaataaatatttttagcactcatcagtattctccaatgtgaccttctcattggagtacacagaaggaaagcaaagaagagcatctgacttctagctctggcttacagcctctcta

SEQ ID NO: 241286 - DNA, 1613 bp, Homo Sapiens
  misc_feature (681)..(973): n is a, c, g, or t
ttggttgggtcctggtctgggcaggccttgcaggctctgccggccacggtgctgggcgcgctgggcagcgagttcttgcgggagtgggaggcgcaggacatgcgcgtgaccctcttcaagctgctgctgctgtggttggtgttaagtctcctgggcatccagctggcgtgggggttctacgggaatacagtgaccgggttgtatcaccgtccaggtctgggtggtcagaatggatccacgcctgatggctccacgcatttcccttcgtgggaaatggcagcaaacgaacctctcaaaacccacagagaataagggaaggcagcagagggtctccaagggcatcactgggtctgctggcttctacactgggttctgctactccccagacctcagggacaactgccgggggttcagggttggtagcagggagtacccagtgcctacagggctgggcctcttctgcctcttaagcctgctccctcacccaggcactgggcaagtgaagagtttgcctgtactcttatctgggtgccttaaggagagagattgtgttcttcctctctcaggggtgataactcaggaagcctctgggttgggaagaccatcagttcttttgtcttaggtttcttttcctgtccctcttccatccccaagatgtgaccccataaaaatttttcctgnnnnnnnnnnnnnnnnnnnnnnnnnnnnnnnnnnnnnnnnnnnnnnnnnnnnnnnnnnnnnnnnnnnnnnnnnnnnnnnnnnnnnnnnnnnnnnnnnnnnnnnnnnnnnnnnnnnnnnnnnnnnnnnnnnnnnnnnnnnnnnnnnnnnnnnnnnnnnnnnnnnnnnnnnnnnnnnnnnnnnnnnnnnnnnnnnnnnnnnnnnnnnnnnnnnnnnnnnnnnnnnnnnnnnnnnnnnnnnnnnnnnnnnnnnnnnnnnnnnnnnnnnnnnnnnnnnnnnnnnnnnnnnnnnnnnnttttttttcctgagaggaagcctgaggttgaccagctctggggtttgtaaggcaggtctgttttctcctaggccctgagttttctgaatctctggttttgctttgttggcaaggagccagggaatcctgacctgagccagaccttaagctctatggttatttagctggccattcaggtataaggcagggtggtgtacctgctggcactatccagatggaggcaccaaacacccacatacctggcccaaccagacttctcccgtgagccaggcaaaggaaattgtcatctgccaactgtcctactcatattcctctcagtccttcttgggggtaagctgattacctgaaggacagctgaacccctggggtagcctcctatccaccactgcttaagtgcctatgggaatgtgggtctgcaccttgtcccctcataaggatggtaccaagcatttagtgcacagtggccccatcatagcctgcagcctcatcatttcccatctggacctggtacaaatgcacgtcacagctcagctcctccccactagcatcttctctaccttcaagaaccaggcagccctgccatgtcacaatagccaggggagtttccaaagatgtgggtggcaaatgcccctatagaaac

SEQ ID NO: 241287 - DNA, 1579 bp, Homo Sapiens
  misc_feature (1083)..(1108): n is a, c, g, or t
  misc_feature (1152)..(1172): n is a, c, g, or t
ttgcaacaaattgatgagcaatgctacttttataaagtgccaactttgtacaaaaaagttgggagaattctacatagtagagatgacaaatgggaaaagaaatgccagaagattttttcatttgcccaccagactatcagtgctttgatcaaagcagagctggcagaattgcccttaagactttttcttcaaggagcactagctgctggggaaattggttttgaaaatcatgagacagtcgcatatgaattcatgtcccaggcattttctctgtatgaagatgaaatcagcgattccaaagcacagctagctgccatcaccttgatcattggcacttttgaaaggatgaagtgcttcagtgaagagaatcatgaacctctgaggactcagtgtgcccttgctgcatccaaacttctaaagaaacctgatcagggccgagctgtgagcacctgtgcacatctcttctggtctggcagaaacacggacaaaaatggggaggagcttcacggaggcaagagggtaatggagtgcctaaaaaaagctctaaaaatagcaaatcagtgcatggacccctctctacaagtgcagctttttatagaaattctgaacagatatatctatttttatgaaaaggaaaatgatgcggtaacaattcaggttttaaaccagcttatccaaaagattcgagaagacctcccgaatcttgaatccagtgaagaaacagagcagattaacaaacattttcataacacactggagcatttgcgcttgcggcgggaatcaccagaatccgaggggccaatttatgaagtctcatcctttaaaaaggaaatagctcaccatactcctttccatgtacatccagtgagggttttattacgctaggtttcccttccaagattgtgcctttcagaaatgctgaggtaggtttcccatttcttacctgtgatgtgttttacccagcacctccggacactcaccttcaggaccttaataaaattattcacttggtaagtgttcaagtctttctgatcaccccaagtagcatgactgatctgcaatttaaaattcctgtgatctgtnnnnnnnnnnnnnnnnnnnnnnnnnncaaaacccacaagcacttatcttggctactaatgaagctctccnnnnnnnnnnnnnnnnnnnnncttcattgttgattgtgtattttcttcattcctggggagtactaacccaaaagcgtctgtctcttgttttctagtccagtttgaaattaatttaaaaaaaaggaatactgtatgtgaaattcatcttgggctttcccctaaattgcaaaataaggccatgtgtaaaattttccctaaaactaaaatatattaatgcatgtttgagaattttaaagcaccatggtcaaaaccaaaagctatattttgcatatttggactcagccatccattaagaacccatgttgtcctctggacatatttatcaatataattgggttttaaatagtataaaagaaaacttgtgatctatataatttatgtatcaccttcattgtaaaatttagcaggaaatgcatcacaattatgat

SEQ ID NO: 241288 - DNA, 1398 bp, Homo Sapiens
  misc_feature (733)..(743): n is a, c, g, or t
  misc_feature (1149)..(1169): n is a, c, g, or t
  misc_feature (1213)..(1238): n is a, c, g, or t
ataaggcaaaatgagcatgtcactccacagggaggccactgaaaggcactgtggtttcttcttgctttcatactcaggggaaagccagccaccatgctgtgaggacactctatggaagggccgtcaaggagaggaactggggcctctgccctcaaggaaaggaacttaggcctctgccctcaaggagaggaactggggcctctgccctcaagaagaggaactggggcctctgcctaacagccaggtcagtgagcagaaaagtcagccccagtcaaagcatcagatgactgcagccccaaccagtatcttgtttgcaaccttacaccacactctttgccagaaccaccagctaagctgctcccaaattcctgatccagagacctgtgagataaatgtttgctgttttaagacagtaagttttgggatggtttattatatagtaggtaactagtatcagtggtgagcctttggggggtttatgtgaattcatcatgccttgggaaaagcagggtaaagttgaggaaagaaaaggggtataaatgactaaaagagtagatgctgccttgttcaacaagtgcttaaaactagagttaagtgagctctgtgaatatatgagaatgactattaaactctatagccatactactagttctttttatcaattaaagatagtatgaaaggggaaaaaaagctccaaaattgttaatagcatctttattgtttcactggtgcnnnnnnnnnnntcataattgtgatgcatttcctgctaaatttacaatgaaggtgatacataaattatatagatcacaagttttcttttatactatttaaaacccaattatattgataaatatgtccagaggacaacatgggttcttaatggatggctgagtccaaatatgcaaaatatagcttctggttttgaccatggtgctttaaaattttcaaacatgcattaatatattttagttttagggaaaattttacacatggccttattttgcaatttaggggaaagcccaagatgaatttcacatacagtattccttttttttaaattaatttcaaactggactagaaaacaagagacagacgcttttgggttagtactccccaggaatgaagaaaatacccaatcaacaatgaagnnnnnnnnnnnnnnnnnnnnnggagagcttcattagtagccaagataagtgcttgtgggttttgnnnnnnnnnnnnnnnnnnnnnnnnnnacagatcacaggaattttaaattgcagatcagtcatgctacttggggtgatcagaaagacttgaacacttaccaagtgaataattttattaaggtcctgaaggtgagtgtccggaggtgctgggtaaaacacatcacaggtaagaaatgggaaaccccaa

SEQ ID NO: 241289 - DNA, 1445 bp, Homo Sapiens
gcctttaaaaccccccaaggggggtatagaatgtttcacatggctaaccagcattcctaggcagtcctcgctggcaaagtttctgatctatctgaccacaagcattgcagctttgggccatcaccttgagcagggaagtcaccatggaatgtgaggtcattcataacaaggagcaatctgatttgtcctccctaagtctgggccaccagagaggctgcgttacagcccatggagccttttctttgcaagttggcagttgttgctatgtggaaagagcagactgtgttttgagatgtgtgaagtagtttactgcctttttattaattattcctcaagttggaattgagtgaactgtcctcacctcatggatgcaaaaactgagaaaagcagggagaaggtggctcttggaagcttctgggcttcagggcccagggcttggctgagagcagagcagagaggaggaatgctctggctgagagagatccagctgctgtttagggcctgcttgatgactttggagtcagcaagtctgtgcatggccgctgggcaaagggctttaaaccccctaaggcaggcccctgacagcgcaagacaacctaaccctgtcccttggactgccctgaggtgggcaggtgggcatgcaggaggcaatatgagggaaatgctccacgcgtgcttgtttccttctattttttgaaaactagaaactgcctccgagagctcaagttcaccgagtgtgtctgctaaagcagcaacaggattttagcacctgactgtgcctgccgcggcaccagggctaggtgagcacactgcaggggtgagggtctgtctttctgagatactaactgaatgctgtcttcaagctcctttccccagagtaagggggagggctgtcttgggaatatgcagactgtctttcgccttcccggccagggcgttctgtctgccagatgagcccccagaagcccaggggcggatctggatcccagaaggctggatgagcccatgctgtcctctgcccttggccctctctctctccaggaggaagctgtgaactgcggggaggagtgtgtgtgccgaaccaagttaatccaagccgtgttccgaactagcctggtgccttctgagactgcaagctcagcccgtgtctaatgacaaagtccagctcgttcaactgggtgtcagcaagcctaaaaaattttaaaaaatacttggagggggatgtgcctggagcctgccagcacccagtgacatggcgagtgggggtaaaaccaggcaggcggcagctagggggagacagatgctgtgcagaaagtggggcgggcaggaaggggtgaggggagcggagaggaagagcttgaaaagagcagcattaactgggggtgagtgttctggtgtggatgggggttgggttgaagaatgggggtggtgcagattctggccaa

SEQ ID NO: 241290 - DNA, 1789 bp, Homo Sapiens
  misc_feature (1424)..(1434): n is a, c, g, or t
actttgtacaaaaaagttggctctataaggagctgagaacgagtacttcctctttgaccccaagaagttgtctgttgaagaatttttcatggatcttcacaattttcggaatatgtttttgcaagcagtcaaggagaaccagaagcggcgggagacagaagaaaagatgaggcgagcaaaactagccaaggagaaggcagagaaggagcggctagagaagcagcagaagagagagcaactcatagacatgaatgcagagggcgatgagacaggtgtgatggacagtcttctagaagccctgcagtcaggggcagcattccgacggaagagagggccccgtcaagccaacaggaaggccgggtgtgcagtcacatctctgctagcttcggagctgaccaaggatgatgccatggctgctgttcctgccaaggtgtccaagaacagtgagacattccccacaatccttgaggaagccaaggagttggttggccgtgcaagctaatgtgggtcctgtgaccgcggcagctcctcagcggagccgcagactgtcctgccctgcagcatgtgcctaaaggctcaaggggatattcctctggggtggccactcccaccaccctgaccctgtctttctctctggcctgctgctctctcaacatcacatacagcttcagctgcctggaggccagaaggaaagggcagtgcaggggagcctgagcccgacttagccagccctggctgttgtattaccaaagcaggtccatgtttgctgccttaaccctgtctcctctctgttactcagagggcctcatctcagacaaggcccagcctgctttttctcaggccctgactttctaatgggctttcccccctaggtcagtcttgctggatttgtgcttttcttttgtggtttctctggccctgagaatagcatggggcttgtaaacctttgggctagatccctcctttcattgctgttgtctctgctcttccctctcctggctgtggttatttattattagtggtgtggcactgggagctgctcctaaggaagcagggagcaaatcccacctttaccccaccttcctgggaaaggcctccaaagcaaaggatctggaccagtttccctgctgtgctgtggcccaggccagagcctgtgggcaggcaggcagggcatagcgacagtgtgggacctgcccccagcttctgccacgctttatgcccttgcctctctggacgctctgcaccaaccccaggctactgagccaccttccctcctcatgccttccctgagctttggtgcatctcatctggactatgggttgtactgtgaccatcccaacacctcaccctctgtctacaaggaaatgggaggtggagcctcctggctgagaaattgttttgcaaatggatctatttttgtatgnnnnnnnnnnnttttttaaagaaaactgttccttccccctttcccctccataatgtaagaagctttggtggcaggttacagagttctgggatttcttctcacaggcccaatcctgaatatgcccctggaccttctggacccttgagtccaaggcagatcctctctcccagggaatccgacacggaggaaccccttctctggttgagctgggccaggcctaagagtagcaggaactctaagaccacagagttttttataaatgtataaatgtatcaagccaaatgtgcagatgctaactggacattctggggaactgggcaccaggagtgccttcatacactgtacccagctctcttctaaagagaa

SEQ ID NO: 241291 - DNA, 666 bp, Homo Sapiens
cctctaaatttcttaatcacgattgttttcagctcagacatacacaaggcaagtagaattactaataaatcactttaccctcaaccattcaaggtctctaagagcatgcacatggatacatgacggggaaaggcagcaactcagcataaacactttagtattaacataaggagtatatatacatatacacatatgtatagaatatcttgcttttgaatatctatgggccatgaaacttcatagagagctgcataaaaatctagcagagaaaggatcataagtgaagtgccagccatggataacagactaatctgtgctcacaaaaaagggcaggcaaggaacacacagacatcactcaggaactacaggaaaactaagcgtagtgctgttttccaaatataaaacatatactaagtacaaaagttatagtaaatttgaggactacggaagtaatacttactatatgtacatcttttgttcacataaaaagcttaaagtaagatcttagcataaaagtatgctttctccagtaggatggtgtgagagggaaagaatgtaagaaggaacttgtacaagtctgaaaattaagtcttgaaagtaaaaggctaccataaaaaatattatgtcatttggtatgatcaaaatcagccaacttttttgtacaaa

SEQ ID NO: 241292 - DNA, 1426 bp, Homo Sapiens
  misc_feature (773)..(781): n is a, c, g, or t
tgtaacaaaaaagttggattggagaaaaactgcaaatgtaatatatttggaaaaacatttttcaaaaactactgcttagaaaacaccaggggatttatactaaaatatatttttgcagatgcagtaagtataaaagaaatttaatccaaaattaagtgtgtgtaaatatcagagaattcacagtagaaatatctaaggcactgacattttagacattgaactaatcagtgtgctgagtacagaaaataatccaaaattaaagttggtagataaattatttgtatataactttaaaagaggtagaaatatttttagttataattacatttaaagtatacttttttctttgaaaaaattacaaaatttttaaaaagtgaatgatgtaattcaactcaaattacttcatgcttttcattctattcacacgtgaaagcatgtgatcaattgctgcttcatcaaagatatgagacattcttttttgttaggtgggcaatattttttaccttttctatggaagagtaaagacattacaatgtaggatgcatgataaaaatctaagtggagaggctctttgtgtttaatttataatattgaatgatgtatgagggaagtgttcagaggaatattctgcattctagtgaaaatatcttttattttagttaaaattaaattaaaattagtagtatatcattttactaactacttttatgtaataaaatgcagcacatttaaaaaattttagattattgtgaacttaattttttaattaaacnnnnnnnnnaacatgttaagaccaattgtgcattcagtgaagtattatcatgccactaacttcaacctatcccaccttactcaagggtgttggtaaaagatagtaacaatgtactatttaataacagagtggactaacatctctaataatttctcttgccagtgactttaaactaaagaacttaattaaagaacattgttcccataggttaaatttttattcttatttaaacatatttttcttaacttttgtgggtacatagtgtgtgtatatatttatgccatatatggcatattttgatacaggcatatgaataggtattaatcacatcagggcaaatgaaatatccatcaactccagcatttatcatttgtattacaaaccgattctacacttttagttactttaaaatgtacaagtaaattgctattgactatagggtcattttcatgggtataataaaaattatatacaagtataaataaaatcctgagtcttaaaattctgagtcctgcttaaacattttaaaaattttgttatgtatttttctttgaacatgtctctctgcctgcaaacataacagaattttagtattggtttacatagagttaactatacccatatattactctaaaaataaatgttaagtgcaag

SEQ ID NO: 241293 - DNA, 975 bp, Homo Sapiens
  misc_feature (68)..(86): n is a, c, g, or t
  misc_feature (765)..(773): n is a, c, g, or t
tacaaaaaagttggtgattttgtagtgaaaaggctcaaaggaaacacagaaggcttaagccggtgtcnnnnnnnnnnnnnnnnnnntgaagtaaacatcactgggaataaagaatcttaaaaatctcaactcttggaatattaaatcaacttatacactttacttgaatttctttcactcctttttactagctacacattcattataacaacagacaaaacaattttattttcatttttgtcatttatattcagttctagaatttgaaaaatatcgtattcagaaatattcacttcggatttagttaagtgaaaaaaaataacagaaatgctcttttgttaacatttgatttatttaaagtccttaactgcaaatgatcaagaacattttccacggcttaaaatctggtattatttttgttatttaaatcaaaatatttttaattacaatcacattgataaaaattaacaatttaatttgtaattttaaccatcatttaaagcaatttcagctgtaaagaaaaagaataaaccatgcaataaattaacattgagaaagcaaagagaaataataatgaaacccgtctggctatactaacaccatgtccaactgtggaaagtgcataacactggatgaaacaagcacacgatggcaatgattaaaatggccactatcaataggatttttgaatcttggaccacgttttgaaatccagctccctataacttatctctcctccaacattgtaatattcccttttactgnnnnnnnnnttctttaaatggtatacactcatagaaactaattttatgtgttatgtgacctcagaatgacatgaccatggcactctgcaaagcaagaagcagagttcttgagggcaattcctgaggaattgattcccagggccatctgtgggtagagaggacaaaggggttggggtccttgtaactttcggtcaagcaactcttgagccaa

SEQ ID NO: 241294 - DNA, 1125 bp, Homo Sapiens
  misc_feature (193)..(206): n is a, c, g, or t
  misc_feature (784)..(792): n is a, c, g, or t
ttggagactgttactttattattgtattcaaaattcattgtgtatattactacaaagacaaccccaaaccaatttttttcctgcgaagtttaatgatccacaagtgtatatatgaaattctcctccttccttgcccccctctctttcttccctctttcccctccagacattctagtttgtggagggttatttnnnnnnnnnnnnnnggaagatggtcaagtttgtaaaatatttgtttgtgctttttccccctccttacctgaccccctacgagtttacaggtctgtggcaatactcttaaccataagaattgaaatggtgaagaaacaagtatacactagaggctcttaaaagtattgaaagacaatactgctgttatatagcaagacataaacagattataaacatcagagccatttgcttctcagtttacatttctgatacatgcagatagcagatgtctttaaatgaaatacatgtatattgtgtatggacttaattatgcacatgctcagatgtgtagacatcctccgtatatttacataacatatagaggtaatagataggtgatatacatgatacattctcaagagttgcttgaccgaaagttacaaggaccccaacccctttgtcctctctacccacagatggccctgggaatcaattcctcaggaattgccctcaagaactctgcttcttgctttgcagagtgccatggtcatgtcattctgaggtcacataacacataaaattagtttctatgagtgtataccatttaaagaannnnnnnnncagtaaaagggaatattacaatgttggaggagagataagttatagggagctggatttcaaaacgtggtccaagattcaaaaatcctattgatagtggccattttaatcattgccatcgtgtgcttgtttcatccagtgttatgcactttccacagttggacatggtgttagtatagccagacgggtttcattattatttctctttgctttctcaatgttaaatttattgcatggtttattctttttctttacagctgaaattgcttaaatgatggttaaaattacaaatttaaattgtaatttttatcaatgtgattgtaattaaaaatattt

SEQ ID NO: 241295 - DNA, 1991 bp, Homo Sapiens
  misc_feature (1651)..(1659): n is a, c, g, or t
gtacagttgacataattttcaataatactgacaattatgacattaattcaagtctacttggacctaaaaacattattcaatacaaataaaatgaaataataatgctgtgaaacactaaaaaaagttatatgtaccaccaaatatcacacaaaaatacctatttacataaatatttgtctgtggtcctatagtgaaagaaaacgttgttatggataatgcacagatcacctctattgtatgaaatcagttctaatatccttattttcaacatggtagctgacttcattaaatttgtttaccatcagttcagtcatttagaaatgaaacaggaaaaattcaatagttgagtttattactacacatgtgtaattcacatgcatattccacaattttaggtaaaaattatgacttgtaaagaatataaccaaaataaatttgttttgaatgccacatggatctgattcatgtcttaataagaaagaagatataaacataaaaagcatgtatagcgtttttccagaaattattttttcaaatgtattcaatctatcccagttgttttaatgttgcttcccttggcagtttcagttttcctgtgagtcaagacacacagaaagcccttatttcccatactcaacacattaacaagaaaatcatataacaaatcaaacaagttggcactattctaacttatccagatgttctttaatgtaagaaaatagaggggttgtgaaaaattcagaaataaagtgagatgcattttatggaactgaccatgaattttagccctagagtcttcattaagacaagatttaaatcctaaaaattcaatgttgacaaaattagacgaatgttttctgttggtacatcttggaagatgtagtttacctttattttgtggtaattacttcagacatcaaatgcaatgctatgggtgaaatgaacaaagatgcagtaacaagtgggagaaacaatctacagtttcttgtgctgaatgctacttcttccttctccattgaacttattcatattggttgtcttagacttgaaccatagttccaaaatccatagcaagtgctaatctctgggactttggggatttttaaaacgttataggagcagattctctttccaaataacaaggtaaatttagtattctagcaagcctttctttagcaagcctaaaccacattatctttcaacaaaagttactgaacattcactataatattggaattacatatttttaaaaagccaattaaaaatataaaactcttgaaataacattcatagctagattttaggttgatatgtttaattttatattctaaaatctgtagaaaacagtggatatcttggggaatagaccaatttggagaaattgtaagggacggaaaactccaaaaatacaagaataacaatattttaggattaaagttctaattgaagtttatacccttttcattttatcctccaaaattttaagaatattatattttcataagataccatattctaaggtagttttgagtaagaacaattcaagcaaaatttataagatttgccttcttagttaaggtgtaatgatctaattggactttttcttccagaaatgtaggcgtttgattgattaaaaagaaaactctactgnnnnnnnnngcaagagtcaatttaatataccaaattcacacagggccaaaacagaatgacagcttgaaagcttctatatttttcttcacaggtataatgtaattttgtccaggaaatgcttccaaatggctgagttacttatgacagctaataatagtcaactggcatgccagtgaaggactcagtttaatttgtggattcttttctccatgtgaataaagtaaatcagcttgacattttcaaatctagtcttttttaggtagtatgaaattgcagaattgtagtaattctattttatttaaaatttatttaagggaaaatcagccaacttttttgtacaa

SEQ ID NO: 241296 - DNA, 1245 bp, Homo Sapiens
  misc_feature (255)..(366): n is a, c, g, or t
ttggtactcatcaaattgtctaaagtggttttttccttttaatcttgtatatagtcccacaggagataagaaagttgactcacagaaggtagaaatatattacctaagcaaatctagaacctaaaaatagtgtgcattctaacaatagattgtagcagatggttcaacaataataaccaactctccctcttctcaccttctcatgataagaaatgacacacaaactgtctttaaaattgcttatcatcaataagnnnnnnnnnnnnnnnnnnnnnnnnnnnnnnnnnnnnnnnnnnnnnnnnnnnnnnnnnnnnnnnnnnnnnnnnnnnnnnnnnnnnnnnnnnnnnnnnnnnnnnnnnnnnnnnnataaataaataaatagccacaacatatagagaaaagttaataatatttctaaataagcaatattatctcatttgtaaaaatgaagagtatttaagaatattttaaacaggttctcagtatactgttgattctgaaacagtaatgccctagggaagagtagaggtacagattttctgaaatacttgggctccaaagtcatttcaacttgactccagaatgcagcattaccacatgaacttaaagcctcctcctctcaaacccaccacagcattgccctaactcagaggttgaagataaaacagttaacttatccaactaggccctacagcttctggcctcactgtggccattcccacctcttcagtgtcatcacactccctgctcccttctccctccgtggcccctcaaaagcaacctacttcttcccacctccaacctttgtacatattgttccctctgtcttggctgttctccctacttcactgtctattctatccatttgactcataatgatcccttggaccttatctcaaaagtctcttcctcagagctgtgcttaggttcacttttatttctctttgtatacatggctcaggaaaatgaggctaacctcaatttttaggtaccattatcactaaagttatttctaacaattgtcatgtttagatagatgttactgttactaatagtattattgctgcccattttagtagtgattattagtagtggtgacaatattattaatttttatagttaatatagtatgtattattttacagaatattcatatattaataatatattcaatgatctttaacaaatctttgaaagattttaacatgctgagatcatgaaattttaaagtgattctatgtttgg

SEQ ID NO: 241297 - DNA, 1974 bp, Homo Sapiens
  misc_feature (177)..(205): n is a, c, g, or t
  misc_feature (1769)..(1805): n is a, c, g, or t
actttaagcatttttgctttttcttctacatatctcaatagaaatgtgactacaaatcattacaaaaccactttttaggcaatgtatagttcactgagattacttagatctggatacactgggagataatatccaggaaagataatacattaacacaataatgcagtatatttcagnnnnnnnnnnnnnnnnnnnnnnnnnnnnntttaagctgtatttaacaggttaattaaaaatatggtaagacatagaaggcatcgtgaacatggctgcctgtttaccgaatcacagatctaaagaatgcatagataactgaagtgtcactaagatatcaggtaaaacattggcatccttttacaaacaaatacacacatactttcatacatactttttggccatggcagaaagtgtctgaacatactctttaacataattttacaaaattaatttgcatttactatacaatgccattttcaaaacaaaacgtctgcaaagttttcaatatgtaaaggctatcattcatcttaatgcatcctataattgcacatataaatcagtttgctacttaaagctagctcagaattcttgatcttgaaaacaagcaaatgtatgccttaaaaaatgaagagggagttctggtagagatttccaatataaaagtgggtaatttgtttagaattttgaaatttatcacactaaaatgtttcactacagcgaccgagatgaaagatcactgtaaatgatttctgaacagcttttcaaagggcacagcaaggattttcttaatgcagtaatttcttatgatggcactggttacttcagatcagtagtatgtcaattggtgaaaaacagactgcgtttctaaagtagcatagttttgtcataacattggggtgctaagacaattccggtccccctgtcccccacccctcatgaattctgagggaatggcaggtagaaaagccacccactcattccatcatgatctctggtggctaagtaccatgagttaggaatgtctaccacaagtagcatctggaaaatctcgtagatggaacaggctgtgaatgtagaatcctgccctctacaacacttttgaggcacgctgtaggaaaacagtcctggacttagatagggcaccatcatgaataccactgcgtaaggaatttggacatctttctcccactcgtgtagggaattctaagattccctgacaatagatctttccatacctgctcttcttagtatatgcccagaatcattctggaaaggctcttcctgacggatatggaggcagcacaacacagcaagaacgggctttgggagccgtgggtcctagtcctggttttcatgaactttggtgagatcttaggccagtgggtttagcctctcggtacttcatatttttacttctaaagtgtatttagtaccttctctacctggtaaggctcagatgtgataagaatgtggaaaccattttgacaagtacatagcagtgtataaacataaagcattacttttataattggatgttgtaaatgttaattttgacattaagaagaagtaaacaagactaatattgagattgatcgccttagcaacttccttttaaaacgacaatgtcaacgagagtctaaatttgtatgtctttccagctaagtttctcacctacatacgaaggagcaggaaaatgctgttttgggaaacttgttaaacagtccattactcctgtgtagactttgctcaggtatgaacatttcaaatcttcnnnnnnnnnnnnnnnnnnnnnnnnnnnnnnnnnnnnnctagttgagtccaacaaattctaatattaaatacataaaatcaaggaaaggttcaacctaatgtaatttgttgccatggacaatacatgatggacagacagctttctgggcaaaaagcatcagagggggatagagctggatgcagaattccagcagaacgtttacccaa

SEQ ID NO: 241298 - DNA, 1399 bp, Homo Sapiens
  misc_feature (928)..(956): n is a, c, g, or t
ggtcaacaggaaaagggcataaaggaaaacaaagcgttctttcaagggaaagtaagctgctctggaggccaggaactactgcttgcgttgacacggtgtgagtgggtatctttgccttgaagctgaagtttaaacttcctactggccgtgtggcacacacgttagatgtgtattaggttaagcctggccaactagagagcgaaggggcttattagttaaattgtgctaatatcagttaggaaaatgcttgtcatgttgtggtgaaatcttgagtttgtgttgcaatgcctgggacatgaacgggccatacaaacagaggaaagctctggggcttccaggcaatggccttgtgtcgagtcatcttacaagtgtccatcttgaaatcataaagtggatttaaaaagaagtagcagtgccacagtttatcaccaagaacttattttaatggaaatgggtctaatgtcccttcatgcaacaagacagatgaacaaaaaacaatggtcctaattagctatgagtgatcttgtatccaggtggaaacaaagggcatgtgtacatgtatatatctcttagatgaaatcacacatgttgtgaagggtagaaaaacgaagcaccaagcagtgctttagtctgcaaaggaaagtttttagccataggcatgttggctagtcgttccccttgatgttgccaaggagcagatgtatgaggtggcaagtctgtgtctatctagctgcttttaaaaaataaaaggaactttaagcattttgccttttcttctacatatcccaatagaaatgtgactacaaatcattacaaaaccactttttaggcaatgtatagttcactgagattacttagatctggatacactgggagataatatccaggaaagataatacattaacacaataatgcagtatatttcagnnnnnnnnnnnnnnnnnnnnnnnnnnnnntttaagctgtatttaacaggttaattaaaaatatggtaagacatagaaggcatcgtgaacatggctgcctgtttaccgaatcacagatctaaagaatgcatagataactgaagtgtcactaagatatcaggtaaaacattggcatccttttacaaacaaatacacacatactttcatacatactttttggccatggcagaaagtgtctgaacatactctttaacataattttacaaaattaatttgcatttactatacaatgccattttcaaaacaaaacgtctgcaaagttttcaatatgtaaaggctatcattcatcttaatgcatcctataattgcacatataaatcagtttgctacttaaagctagctcagaattcttgatcttgaaaacaagcaaatgtatgcttttaaagaaatgaagagggccaacttttttgtac

SEQ ID NO: 241299 - DNA, 1339 bp, Homo Sapiens
  misc_feature (918)..(927): n is a, c, g, or t
  misc_feature (996)..(1032): n is a, c, g, or t
ttggagcacatcccgtaccgcgagcacaagagcctgacgggcacggcgcgctacatgagcatcaacacgcacctgggcaaggagcagagccgccgcgacgacctggaggcgctgggccacatgttcatgtacttcctgcgcggcagcctcccctggcaggggctcaaggccgacacgctcaaggagcggtaccagaagatcggggacaccaaacgcgccacgcccatcgaggtgctctgcgagaacttcccagaggagatggccacgtacctgcgctatgtgcggcgcctggacttcttcgagaagcccgactatgactacctgcggaagctcttcaccgacctcttcgaccgcagtggcttcgtgttcgactatgagtacgactgggccgggaagcccctgccgacccccatcggcaccgtccacaccgacctgccctcccagcctcagctccgggacaaaacccagccgcacagcaaaaaccaggcgttgaactccaccaacggggagctgaatgcggacgaccccacggccggccactccaacgccccgatcacagcgcctgcagaggtggaggtggccgatgaaaccaaatgctgctgtttcttcaagaggagaaagagaaaatcgctgcagcgacacaagtgaccctgggcgcgtgcagccccctgaatcttctccgtgcagccccttggggcgcgaccttgtgcgaggccctcggggcccacccacagcggcccagggccagaccctggctggaagccagaacgcagactgcaggggccgcgcctggctcagcggccccacccccgggacgtggggtcacttccttcatgtaagactttggccgaaatttctacacctgtgtctagtcctcccctccaagagcattaactatttaaaacaaggaaaagaggnnnnnnnnnncagaggcccgccctaccccactcctgcccctccgtttctttgctgaagtgagtagtgtgatcctggagnnnnnnnnnnnnnnnnnnnnnnnnnnnnnnnnnnnnnttagcgtcataaagtccagcttgtctccctcgatccaaaggccgttttctcgaggggagggcaggcccggcctggaggggtgctgtggagctgtcttgcctcaggcctctcctgggagggggacaggcattgttgtcaggggtgagggccgtgtctcaggccctctccgaaaaccaaaggggaaggcaggggtggggcccgtggctgaagcccggctcctcaaccaaaatgctgcacccaaagctcggggcgccgcgggcacggctgctgcagtctcttcccagcctggccctgggcaaggggcggg

SEQ ID NO: 241300 - DNA, 966 bp, Homo Sapiens
ttggattacctttattttttatcatcttgagcttactgtttagttaccccgtttcccaaaacagcacaacctctgtgaccagttaactaagaaattatttccttggcagcaaacccagaattccatcacttactcttgtaaatagcaagaaagtaatttactagcagagtttgatagaaaaattctttaatgaaaacaagtttacacgttgaacttatggcttaactagaataaatctaagtaagttaaaactgtataaggaccaaacagataatgactggtatatatgcaggttctctcaaaacggtgattcctagttccattataagacctctttaaaagcaaaaatgcaattctgtagatgaaaacagttatctcagagggtcaaccacacaatgtcatacagagacgctggtcttaagccatttttttccatattcatataatttcaaaacatgagaagtatcctacttgctgagaagtgccaaatgaccctaatattcaaaatatcttagaaatgctatcctttagttaacatacccttaaattttgtaacattgattttaccctggatttagtccatacacgtcaatgtacagacttatcaaagtacaatgctggaacaactagtgtttgtatttttggaatctagaaaataaaaacaatatagccatgatttcaaataggtgagtttccttatataacatttattcatatttattgtataagcatcatgattttttcttccaattaagttttagtgacttcctaaagacatttttaacaacattcctcaaaaataaacttacttagttttcagttttagttactagtgcctgcctataaaaggaccttaaatgatttaaccctaaagccagattcattcctatatatacccagtcagttgtctgcaaagaagtcctaagacttcactgaatgcccagccacaaaactaaattaccccaa

SEQ ID NO: 241301 - DNA, 1008 bp, Homo Sapiens
  misc_feature (75)..(96): n is a, c, g, or t
ttatccatgactacttttaaccctgcagactaataatattctggcggtttatagctcggcaccttcacctgtttnnnnnnnnnnnnnnnnnnnnnntcagttacatatggggatgtggttgacttttgaattggcaggtagttgagtgtttccaaataaatgaagatgttaaaatatggggataaaggatatatgagtaattgtataaatgatatgctggagtgctctgtggaactcaagttacatgattttagctatgaaaggcaattttgctgtattggttgatgcatcaaaggtacatcttattatagaactggaagagcacatttcacaatgagattcagagaggttaaagacctttcctttgtagtccggatctccttcaaaaggtaaagtggaggaataattagtagcagagctgagactcaaacgcatggcttgactcttagctactgttctgtttcattgcctgacattacacattatggctgaagagaatctgaccaaatacttctttacttaatatttcttttcatatcacagctgagtgatctgcacagtggaatggtttgacacatggtgacggtaaattttgttcttttgtctaagggaaagccaattcagacatcagtttcatagaactatataaatgtaaagtagcactgctatgacacaggatgggttcttcagaggaagctttttggcagtgaaggaaggggaggcagaacagaactgggtatttgccaatatactctcctttgtggccttttcttttaaaagcaaaagtgaagggcgagaattgcccacaatcattttcttttaaataggaatttaatagtcacaacacaaagggaaaatgccaagtagataggtagaaagctatgggaaatagaagccattccaggcaagtttgattttgactcttacatgttagataaggtaaaagcatctaagtcataataacgatgttcagtcacccatccagataatcttttggagtctcaccaa

SEQ ID NO: 241302 - DNA, 787 bp, Homo Sapiens
caagtaaaataaggtatttattaatcgataatcagttaaaacaatgcttgggccacgcagctccgtgtgaggattttgctttgaactcttaggaaaatactagttcttgttaattcattggttgttttcaaaacatgcaataaagcacttttcctttagtttctctgaaagaggagcagcgactccatggtaaggctattccaaacagatgtggaagagcaagcacctttaggctggcggtacatcaggcacctttgccaggtctgcttatgtctaatgctaagaatgaaactcttgccagctcttggtactggtactcaccagcacccagccagttacttcatgcttttctgggccaccccgggtctgaatggccaggttgtcccggtcaccaggcaggagttctgtcctttgaactccatagtgacccctttttaccttgttccagatgaggacaggtgtcgggattccgatgacctcacagctcaagtacacctgggcaccagtgacattccagatgtccttggggggcgtcactatggaaggaccttgctcgcaggtgcccttgctgacctgggtgatggccttctccccgcggctctcggccctctggctggcggcgcgcagctggcagccgctcgggtaggtggtgccgtcgctgccgcacaccgggtagcggctcttgcacacgcacacgccgcttacacccggaccgccggctgctgccccggctttacccccaacttttttgtacaaagttggctattaagggaagaaagcattgctc

SEQ ID NO: 241303 - DNA, 1275 bp, Homo Sapiens
ttggcattgagtagttaaccacttcctatctggtattacagttaatttatgtgctcaacaacaacaaaattggctcccagatagctacttgaagtaacctatagtcataactgccagggagaatattgtcacaagttgaatctggaaaggcattgtaaggccagtgtactaagattttgatgactctacaaattatattttctgaacttgtggatacacgtttcactatgattaggtggtttttgctaaattgggcaataaaagttaaagaaccatgatttccaaagacataaaacagcctcatgttaagaataagccttttcctcctttatggaagagagatttaaaattgtgcagatggtataatgaaaattctctgtaaaatctaggtagtaaagtggttaacgtataatttgatttttgttgtgtaacaatttgtgattcaaaaactttgtattttgacagatgatcttccaaaacccaagactactgaagtaattaggaaaggctcaattactgaatacacagcagcagaggaaaaagaagatggacgacgctggcgtatgttcaggattggagaacaggaccacagggttgatatgaaggcaattgaaccctataaaaaagttatcagccatgggggatattatggggatggattaaatgccattgttgtgtttgctgtctgtttcatgcctgaaagtagtcagcctaactatagatacctgatggacaatctttttaaatatgttattggcactttggagctactagtagcagaaaactacatgatagtttatttaaatggtgcaacaactcgaagaaaaatgcccagtctgggatggctcaggaaatgttatcagcaaattgatagaaggttacggaaaaatctaaaatccctaatcattgtacatccttcttggtttatcagaacacttctggctgttacaagaccatttattagctcgaaattcagccaaaaaattagatacgtgtttaatttggcagaactagcagaacttgtccccatggaatacgttggcataccagaatgcataaaacagtatgaagaagaaaagtttaaaaagaaacaaaaaagagttgatcaagaacttaatggaaaacaagatgaaccgaaaaatgaacagtaagtttggcatctagtccaaacaagactgaagaatgtgctgatggagcagtgctgtttctgcattcataatgcatttattggcccatatttttatgtaacctgttacaaaatagacttgacttttt

SEQ ID NO: 241304 - DNA, 946 bp, Homo Sapiens
caaggtatatacacgtttatttaaaaaagtttacagttttcattatacacaactattaagaggttatagtcagaggaggcatgtgtcctgttgacagacgtgcctactagatcatcacaatgcaaggagaaaggtggaagggaggagacagggcgaggaaaaataagcgataaaaagcttcagatttcagttaggggctggcagtcccttttatcttttcaagtatcacacaatatgtaccaaatacaatctgtaaataatggccatttcttcccaagcccacagccaagatgagtgttaggctaaattcagagccctggctcttcctcagatgagtggaaaacctgcgcatgacagggccggctcccccttctcaaagggcttcctcccactcatcccatccctaacagaatcgccgaggtgttcacgggccagagaaagcacaaacatggattcagaagtccaaagaaatgcagttcgttgcgcccaatcagagatagatgatttcattcaacaaggctggaagcccagttgggaagtcgataaaaatcttgctaacttttttaaatggcttttacttttctaagtcactgaaacaaggaagggccacatgccatttaaaatcaaacactagttcccagagacttggtgtccagaaacttgacccacagaggctagcggaggatctgtctttcatgattctcagccatcccaacgggaggcctaacataaagcatgtgccaggccaatgccaactaggacttcagggggcctttggagggaaaaattcctttgagaggagacattcctcaggagcttagatcagccagctggcagtcagaacagcttttgaagtggatgagaaatgttaggtactggagagatgatatggcaactcctgataatgacctcactaggataaaatgctggttgaaactgcacccaa

SEQ ID NO: 241305 - DNA, 694 bp, Homo Sapiens
cgcctatataaagaaaatattccaataggagataaacctatgtacacagagttgctcaccccagcattatctgtagtaacaattagaaacaaatgaaatattcaaaaacagtaaattaggcagatgatgaaacaacatggcaaatgtatgatgctaagccaaatatacaaaaagatccctgtgagacggagcagggacccctctttggggtgtgccagggggattcccacaagcacagaaataaaggagaatcttgagtttccttcaccgaaaactccaggcacccagctcgccccgagaaggaaaccagcaagctgataagcaagaaggtcataacagtttcaaacaatagccagggaagttagagtcacctagagacatccttaacacgtgcccctgagctacttttcagaaacccagacccccaccaaatggattcacacagacgtcagataagggggaacaccagggactaaactctgacctccattctttgctctcagtttcttcctgaggggcctggccagaccttaatgttcctttctgcggaccccaagtttttagacaaagctttgcttccttaaccaatcacaaatcagggagtctttgaatccaccataacctgtaagcccgccccctgcctaccccacttcacctttcaggccaaaccaatatataagcttcatgtagccaa

SEQ ID NO: 241306 - DNA, 1820 bp, Homo Sapiens
  misc_feature (865)..(903): n is a, c, g, or t
  misc_feature (1028)..(1063): n is a, c, g, or t
ttggataaaccagtggatgcttctgcacttggcctgcatgactaccatgacatcattaagcaccccatggacctcagcactgtcaaggtacccactgcatggggcagatgggatgctcaggcagtgatgggagcctaggtgcaaaacaataagtctccttatgtgggcacacagcagtctttggttcttggcattttacttttataaaataatagtggaacagaaggtctggtgttttgagaatttgtatttcttggagtttgaaacagtagggtggggtttctttgtcttgagaaaaatactgtctataattaagtactaatgtggcagtgttgggttaaggaagttatagggtggaaagacaggcataggccacctctctgtcacttagaaatgatttctttttctagacataaatatttcttcaacccacccaaattcctttgacttcaaacttgaaccccagggcacagatccttaaggtcatccccactgtgctctcaagagagggctcttcttgtggtgtctggggttggcagggaaaggtgagtcttcctgcctgtgcagcttctgatgctgcctccttctgcagcggaagatggagaaccgtgattaccgggatgcacaggagtttgctgctgatgtacggcttatgttctccaactgctataagtacaatcccccagatcacgatgttgtggcaatggcacgaaagctacaggatgtatttgagttccgttatgccaagatgccagatgaaccactagaaccagggcctttaccagtctctactgccatgccccctggcttggccaaatcgtcttcagagtcctccagtgaggaaagtagcagtgagagctcctcnnnnnnnnnnnnnnnnnnnnnnnnnnnnnnnnnnnnnnnagaagagagtgaaagctcagactcagaggaagaaagggctcatcgcttagcagaactacaggaacagcttcgggcagtacatgaacaactggctgctctgtcccagggtccaatatccaagcccnnnnnnnnnnnnnnnnnnnnnnnnnnnnnnnnnnnncggaaggcagagaagcatcgaggccgagctggggccgatgaagatgacaaggggcctagggcaccccgcccacctcaacctaagaagtccaagaaagcaagtggcagtgggggtggcagtgctgctttaggcccttccggctttggaccttctggaggaagtggcaccaagctccccaaaaaggccacaaagacagccccacctgccctgcctacaggttatgattcagaggaggaggaagagagcaggcccatgagttacgatgagaagcggcagctgagcctggacatcaacaaattacctggggagaagctgggccgagttgtgcatataatccaagccagggagccctctttacgtgattcaaacccagaagagattgagattgattttgaaacactcaagccatccacacttagagagcttgagcgctatgtcctttcctgcctacgtaagaaaccccggaagccctacaccattaagaagcctgtgggaaagacaaaggaggaactggctttggagaaaaagcgggaattagaaaagcggttacaagatgtcagcggacagctcaattctactaaaaagccccccaagaaagcgaatgagaaaacagagtcatcctctgcacagcaagtagcagtgtcacgccttagcgcttccagctccagctcagattccagctcctcctcttcctcgtcgtcgtcttcagacaccaggtgattcagactcaggctaagggggtcagggcagaatgggg

SEQ ID NO: 241307 - DNA, 695 bp, Homo Sapiens
gaaagaaattttacaagatacattaagattgccccaagcatcttattatgggcccctaaggttcccaagttcccttcttgaacgtcagctgccaaccaacacatcccattatcctgggagctgacaatcctgaatgcaaacagaccccaccatctttcctcaactgtcctcagaaccatgagatgaacctcatttcatacgtactgtagggcttccggggtttcttacgtaggcaggaaaggacatagcgctcaagctctctaagtgtggatggcttgagtgtttcaaactcaacctcaatctcttctgggtttgaatcacgtaaagagggctccctggcttggattatatgcacaactcgccccagcttctccccaggtaatttgttgatgtccaggctcagctgccgcttctcatcgtaactcatgggcctgctctcttcctcctcctctgaatcataacctgtagccaggccaggtggggctgtctttgtgccctttttggggagcctaagggcaaaaagagttgtcagcaaaagaagcttcattaacctcttccagtatgttcccactgttataattcagtgatcctatttcctgcccagagtggagcttctgtttttccattcaatggccaagtaagaggtgggctactgggacactgtatagtgaaacagagcattttgctcttgactg

SEQ ID NO: 241308 - DNA, 1147 bp, Homo Sapiens
tacatcgaaagactacatagagatgaaaacgtctcctcaaaagtgactccaagagcagggcatttcttgctgtggtcagagttatccccacgaggctgagaacagccactggccctgaagatctgtcgtgaggccccacagaaggccaccaggagatggaaaactgagccggccagacttatgagcctcaggctgccctgaccattgtaggggcggaacacaggtgaggtggtgggtggtgggcagagcgaggagagaggaaagattgtgaaggaaagaagagagctgtatgagaacgcctgtccctagcttcagcattgggctgggggcggggtacactcccccattatcctgtgttttttatagcaaagaacctcttagccaaagagaagtgcagaaggtctgtcttggaaactccttttatggaatcatgaggactgcaaattcaattctgcacagctgggaaaaggaaagggccctggttctgtcgcaaacatgtccagcaaggtctgggaaggcctggcttttgagctcctccagggcaaggatttctagtatgggagaaggaggggcagagtcagggacctctgtgatgctcagtatgggaggacgtgggtgagggtaaaggtgcacactgaagaccccagatcagattatgcagttcccccactgaatgacccatccctgtggtttccaaggacagtcagaggaagtccacactcctcactgtggtcctgaagggcctgcacacactggcctctgtccggcccttttcatgtcaccctctggacagcagggcagcattctggcctccctctgcctgtcctcagtttctagaaggcctggaggaccgtttctttcttctccgcagctggcttaactcatccctactcttatcctggggaatgatattttcttctccacccctcatttcagccttcctggctcttggcctccagacccctttccttctccttcctctcttctctcccagtttccttgtgattctgcatgttctccaactcttctcccaggacttgaaggcttctggacaggattcttggagtttctatcttcagagggaatagatggcgctgactcctaaaatacatctccagcccagatcgcctgtctgaattccagccaa

SEQ ID NO: 241309 - DNA, 776 bp, Homo Sapiens
gacaaatcctggagaatattctttagctagaatgctagcttctttacataaaagagtgctcccactgaagaagtgccttttgagtgcaatgaatgtgagaaagccttcagccctctctcattggttaccacaatatttacatgaggaaaataccacagatgtggaggtaatattattttttcttcaatataacactggaggaaaccccttatgaggatgccatctgcctaaattgaatgtcatacatcaaatagctgcatacattccaggtatgtgggaactgcatagtatttttcgacctgcccaggtctcttgctagacttctgtgacttacagttctcttctaaaaagcatttcacctttaccacttggcaggtgcccacagtacatcattcgcctaactcatcatgatccagaagtaactttgattttgtttcattcaacagagggattttttagtatcctcagcactcattctattctcatttctttctctccaatgagttaggccatgaacttgactcatttttggcacagaggactcttttgataacttgaaaaaatggactacctttttcagggatcttttggatctcacagaattcttaagatggaattttccagcctgccagtcatgaatctcagacagcctgccacctattgccctgatttgtgttataataaaggccttgttgcttaagaccccttcagtctttgcaggagggcatggaagctccaagtgcttttctcatactttaccctatgcatctctttat

SEQ ID NO: 241310 - DNA, 1666 bp, Homo Sapiens
ttggctcatctccagacctaagttgggaaaggggaggggagcgcggaaagcggagaagccggaggagacgctccggagtgaccagcgacggctgaacgcagcccgccctccccaagtcgacgccgcaacccggggaaagcaggaggaccatgcggcagtagcagccatgctgccctttctgctggccacactgggcaccacagccctcaacaacagcaaccccaaggactactgctacagcgcccgcatccgcagcactgtcctgcagggcctgccctttgggggcgtccccaccgtgctggctctcgacttcatgtgcttccttgcactgctgttcttattctctatcctccggaaggtggcctgggactatgggcggctggccttggtgacagatgcagacaggcttcggcggcaggagagggaccgagtggaacaggaatatgtggcttcagctatgcacggggacagccatgaccggtatgagcgtctcacctctgtctccagctccgttgactttgaccaaagggacaatggtttctgttcctggctgacagccatcttcaggataaaggatgatgagatccgggacaaatgtgggggcgatgccgtgcactacctgtcctttcagcggcacatcatcgggctgctggtggttgtgggcgtcctctccgtaacatcgtgctgcctgtcaacttctcaggggacctgctggagaacaatgcctacagctttgggagaaccaccattgccaacttgaaatcagggaacaacctgctatggctgcacacctccttcgccttcctgtatctgctgctcaccgtctacagcatgcgtagacacacctccaagatgcgctacaaggaggatgatctggtgaagcggaccctcttcatcaatggaatctccaaatatgcagagtcagaaaagatcaagaagcattttgaggaagcctaccccaactgcacagttctcgaagcccgcccgtgttacaacgtggctcgcctaatgttcctcgatgcagagaggaagaaggccgagcggggaaagctgtacttcacaaacctccagagcaaggagaacgtgcctaccatgatcaaccccaagccctgtggccacctctgctgctgtgtggtgcgaggctgtgagcaggtggaggccattgagtactacacaaagctggagcagaagctgaaggaagactacaagcgggagaaggagaaggtgaatgagaagcctcttggcatggcctttgtcaccttccacaatgagactatcaccgccatcatcctgaaggacttcaacgtgtgtaaatgccagggctgcacctgccgtggggagccacgcccctcatcctgcagcgagtccctgcacatctccaactggaccgtgtcctatgcccctgaccctcagaacatctactgggagcacctctccatccgaggcttcatctggtggctgcgctgcctggtcatcaatgtcgtcctcttcatcctcctcttcttcctcaccactccagccatcatcatcaccaccatggacaagttcaacgtcaccaagcctgtggagtacctcaacaaccccatcatcacccagttcttccccaccctgctgctgtggtgcttctcggccctccttcccaccatcgtctactactcagcccttc

SEQ ID NO: 241311 - DNA, 1053 bp, Homo Sapiens
actttgtacaaaaaagttggagaacagaagcctggatctcggaatccctgacctgctggacgcgtggctggagcccccagaggatatcttctcgacaggatccgtcctggagctgggactccactgcccccctccagaggttccgggccttcaagagagtgagcctgaagatttcttgaagcttttcattgatcccaatgaggtgtactgctcagaagcatctcctggcagtgacagtggcatctctgaggacccctgccatccagacagtccccctgcccccagggcaaccagttctcctatgctctatgaggttgtctatgaggcaggggccctggagaggatgcagggggaaactgggccaaatgtaggccttatctccatccagctagatcagtggagcccagcatttatggtgcctgattcctgcatggtcagtgagctgccctttgatgctcatgcccacatcctgcccagagcaggcaccgtagccccagtgccctgtacaaccctgctgccctgtcaaaccctgttcctgaccgatgaggagaagcgtctgctggggcaggaaggggtttccctgccctctcacctgcccctcaccaaggcagaggagagggtcctcaagaaggtcaggaggaaaatccgtaacaagcagtcagctcaggacagtcggcggcggaagaaggagtacattgatgggctggagagcagggtggcagcctgttctgcacagaaccaagaattacagaaaaaagtccaggagctggagaggcacaacatctccttggtagctcagctccgccagctgcagacgctaattgctcaaacttccaacaaagctgcccagaccagcacttgtgttttgattcttcttttttccctggctctcatcatcctgcccagcttcagtccattccagagtcgaccaaaagctgggtctgaggattaccagcctcacggagtgacttccagaaatatcctgacccacaaggacgtaacagaaaatctgggagacccaagtggtagagtccagactgagggagtcacctg

SEQ ID NO: 241312 - DNA, 1741 bp, Homo Sapiens
  misc_feature (76)..(105): n is a, c, g, or t
  misc_feature (293)..(312): n is a, c, g, or t
  misc_feature (1259)..(1279): n is a, c, g, or t
  misc_feature (1325)..(1334): n is a, c, g, or t
  misc_feature (1390)..(1407): n is a, c, g, or t
gatgtttttaaattcggggtttcatagattcccctgaatctttagcaagttactaaaatgtctataaagttaactnnnnnnnnnnnnnnnnnnnnnnnnnnnnnncaactaatgcctttggaatttttaatgaactcaaaaactactttgtggcagtatgtcaagtaagtaaatgaatgtagagttgtaattacaacgttggagtttttttagacgaacattatctcctcttttcttaactagggaaatattgagtataattccttctgggtattaagaaaaattggttaaannnnnnnnnnnnnnnnnnnnaaggatttacttttcttaacaagtgaacaatttgcttctaagcgtcaatgaaaggcaacacctccctctaatggccaaaggaagagagtggcagtaagctggcttttccaatgtgtcacacaatccttcatgccattaagttctccttgttggaaaagaaattaggttgttttgataacttagaaaagttagttttagacaacagtgactttcagctacaaatacaaaatcaaatccatgtatataaggcttctgtaatcgatgtcttagaggaacatctgctcattttctccaagccccagtcctataaatcaaggcaagtcaagtaattaagcttcaactattttggcagctttgcaattaaaatgaacaaagcactatatctatccttccatatactgtatatattatagttctatcttgttacaccaaatctcacatgcagagagactaaaaatatccattttggtttcaggtataattaaaagccaataagggtcttgcatactattctttttcccctccccaaagtgaattctccatcagatttactactccctgactcaattatatttacctggaatatctgaatgcaggtatttatcctctcagaaaagaatatgtttacctgggatctaaacatactgtacacgaatatacataactgcaatacagcactgctgtttttaacagctccacttacacctcatcagtacctcacaaccgtgttttaggaaaaagttttgtgtaatgttatggtaaagagaagaaaattatgtctcttaaatattcctttagaacaaattcaggcaagtttaaaaaataaataaaatgaataaagccatgatttcaacaacagggctgtctacaaacatcaacaacaaaatttaaaaatttttaagacttaaatgtggccagcaccagactactacaacaacaacaaaccnnnnnnnnnnnnnnnnnnnnntggaagtctcattaagctatatagctatatgtagttgtattgtacnnnnnnnnnnaaacacaggtcaccatacactaattttcaagtccgtatcagaaggaatatctgttnnnnnnnnnnnnnnnnnncatgattcaacagaaaatgtgacagattccttaggtgcaactttagaaacctaagtttcaaaggagaaaaacagtagttactccaggaattttaactcactaaccacagttttatcatggctctgtaagacagaaaaatggaacaaaatgtatatagctgttggcgatacgagccttgtggctcaaattgcataccaaacatgggatggagtaaggctgatggctagaggtaatcacctctaagagaaatgaactggaaatgatttataatctaccctacaaggatataatgctaggttccatttcagagtagtcacagctttccctatgccaa

SEQ ID NO: 241313 - DNA, 896 bp, Homo Sapiens
  misc_feature (573)..(590): n is a, c, g, or t
ctaacttccagtaagggaacaggaagcactgcaacctttcatgtttaactggggtgacaaataattgagaccaaagtaatcaaagtaattcatgcaagttatctttaaaggtatacataagcttgaagaaagaaagaacactgttactgacctttgatattatggcagtaaattgcatactaaaataccttaattatcctagatgcctagatctggcttggcaagcatcatgccactgacatgctttagctctttttgtaactaaaagtgatttgcagttcaattactgagtatttcaatgtgactcattaagctgtgtgatgaactttgaagttaaatttaagcaaattctctacacctaatcacaccatcagcacaagcaggacaatgctggagcagcatgaaaggtgggtcactttaaaaagattcttccttttactgcatgatatattaagatgacagacctaaatttcaactgggttaatgagttagaatagatctgtttcccaaatttagcacacaataatttcagtggattagagaaagaaacctcagatgtgaagaaagtgaagnnnnnnnnnnnnnnnnnngcttgagctataatagctaacctgcagctctaaaaattgtcatgctacagagtactttcaaaaaattaagtttgtaacaaacataagaaaacagtgttttgagttgaagttgaccaactgctgcatagaaaatatgctaacatacaacagtcaagtttaagcctgtgcatagagaagataaagcacttatggtaactgcaaatggtaacgagtccttaaggtttgtacaacctagtatgggtccataaggaaaaaactgtagtagaaatgggtaggacaaacccaacttttttgtacaaagttggc

SEQ ID NO: 241314 - DNA, 716 bp, Homo Sapiens
aaagtgaatccccaaggaaatggaggatatatggcagggaaatatcttactatttgttccctgccatgatatttatgcttgcttggatataaaaatcacagttctagcacataaatgggatattagaaaacagaacacaaacataaagaaacaggttattttgcctatcagcactttgtttacttaggcttataaagtgtgttcacattcacttcatctaactataaaagaagtgactcctacttctttgcagagatgaagaaggagagacagagcaaggctgtgaagggcttaagctctcaaacccaagacagggcagaagcaagacacgactcctgctctgctggcaccgagtgctcctgtcctgacgtgggagctactggtctctagggggcagcactcacctcactaacaaggtgacagcacctgcaaccactggagaagcaacactggtccctgagagggcccggcacccccctttcacgccagaaccccgcacgccagcaccataggtgacaatgtcaggtttcatgcgaccgtagcctcctggtagctcctatgaataaaagcagcttggttgctacatctcgcacattggcatacagccgcatgcaatcatgagtgaatcaaatcagaacagagatatgggttagttaaaaactgtataaccttaggaaggtactggttttagtctgaaattcactccaggccaggcg

SEQ ID NO: 241315 - DNA, 1413 bp, Homo Sapiens
caagtaccgtacaaatcagcatcttgtttgaagggagattgaggacacaggcagatagttcctatgtattcacctgtatctggtatcatgatggtgaggaacagggttatgtcttgacatttgcagccctgaggacctccactgacaactggcttaagatccagaaggcatcttttccaaatcacataccaaacttgtattttaaaaatttgataataaatgaacaaaattgagagcttgtacaacatgtatatttcttgatcaagtgcttagataatacatgcttatggtattggttcaccagcagtgaatgtttctttggctgaccagcacttgttactctatgatattcccagacattgcttgcttgagacattggataaaaccacccaacttcacctatcatttgggtttatgggttcaggctttgctgtttgccactggaaatggatgtctgaatcaaaatttcaaatgattttgtttcacatgtccctctatctaaggttttccccttctcagtaaaaccttttcatgtatgatttctgttccctccctataattcaaatcttcttagccattctcttcaagctccaaacctccaaagttcaccagttacttggattatactcatttcacttagaatgtttcagtctgttgggatgtacagttccttcaaaacttgataatccgcagcaactaatgggacaaatggatgaatgggggaactcttcaggaagcaagtaatgcgtgctgttcagcaagcctacatgaaccattcagtaagaaatgttttaatagtgggctaaaagaagaaggaatcaattggtgaaagcaaaatgtataagatgagcttcattattatttaaagaactacagaatcaacatttgaaatacaatttcagattggtggctgttagattgaaataacatcaccattagctcaatctgatatgccaagggaaatacaaatgtgtgctaaaagtgcatcttaaacccaaaaatccttgcctgtcactcagactacaaagttggcatgtttgaccaaaattgatccaaagttttttaatcactcacaactaaaaattattagaactaagctggtcaggatgaaaatataaattaaaaaaatctgttctatgtgtcttaaattattctttggtcaaatgatgtgatttttgagagatctgaaaatataaacctatttctcatttccaaatacaaggttataagtatgtacagcaaggtagcattttcttactagaaaacaaggctttcaggtaccgtatcattccattaacattgtacacttttatagtccctttcctcccatggctacaaagtgctggacatacagagaatacaggaaagaataaaggagcaaatgaatagagcctcacaacacccctgtgccaa

SEQ ID NO: 241316 - DNA, 1603 bp, Homo Sapiens
ttggcagataagtgaggccgccattgctgctttgaacacctcagaaggggagaatggatttatcaggagtgaaaaagaagagcttgctaggagtcaaagaaaataataaaaagtccagcactagggctccttcacctaccaaacgcaaagaccgctcagatgagaagtccaaggatcgctcaaaagataaaggggccaccaaggagtcgagtgagaaggatcgcggccgggacaaaacccgaaagaggcgcagcgcttccagtggtagcagcagtaccaggtctcggtccagctcgacttccagctcaggctccagcaccagcactggctcaagcagtggctccagctcttcctcagcatccagccgctcaggaagctccagcacctcccgcagctccagctctagcagctcttctggctctccaagtccttctcggcgcagacacgacaacaggaggcgctcccgctccaaatccaaaccacctaaaagagatgaaaaggagaggaaaaggcggagcccatctcctaagcccaccaaagtgcacattgggagactcacccggaatgtgacaaaggatcacatcatggagatattttccacctatgggaaaattaaaatgattgacatgcccgtggaaaggatgcatccccatctgtccaaaggctatgcgtacgtagagtttgagaatccagatgaagccgagaaggcgctgaagcacatggatggaggacaaattgatggccaggagatcactgccaccgccgtgctggccccctggcctaggccaccccccaggagattcagccctcccaggagaatgttgccaccaccgcctatgtggcgcaggtctcccccacggatgaggagaaggtcccgctccccgaggcgcaggtcccccgtgcgccggagatcacggtccccgggccgccgccgccacaggagccgctccagctccaactcctcccgataaacaggccactgaagctctcgcccctgtaacttataccccacccagctcagttttgtcacttttctagccaaaggaagaccagtaggaaagcaaacccttgactctggcaggatttgcaggcagcaggcagcacccctctgccagccgggccccggctgcagaagtgctgttggtttggatgctgtgtgcctgtcaagattccctccggttttctggctagaaagctcatccgtttccggtttctaagagtcagttcagtggcagagccaccagggaaaagtgaggctcttgggggtggtttgaccctgcttacctgggagcacacttttcccttccccgatgacctgggatggtggccaggccgtgcccttgctgttgctgggcagtgtccttttggaaagggagctgccccaggctttagtgcagctgccaaccctgttaggcctggcctctcgaggcctcttctgacctcaagggtcacaccccctcaaagatcctctcacccatggtagttgctgctcgtggttctgtctgtccgtgcaccgatgcacacaccgcaccccaccactgtactctgaaattggcgagtgagttgagagccagctctgcggggtcatcacgcaccatggttg

SEQ ID NO: 241317 - DNA, 880 bp, Homo Sapiens
  misc_feature (536)..(545): n is a, c, g, or t
ttggctttcatctgaccatccatatccaatgttctcatttaaacattacccagcatcattgtttataatcagaaactctggtccttctgtctggtggcacttagagtcttttgtgccataatgcagcagtatggagggaggattttatggagaaatggggatagtcttcatgaccacaaataaataaaggaaaactaagctgcattgtgggttttgaaaaggttattatacttcttaacaattctttttttcagggacttttctagctgtatgactgttacttgaccttctttgaaaagcattcccaaaatgctctattttagatagattaacattaaccaacataattttttttagatcgagtcagcataaatttctaagtcagcctctagtcgtggttcatctctttcacctgcattttatttggtgtttgtctgaagaaaggaaagaggaaagcaaatacgaattgtactatttgtaccaaatctttgggattcattggcaaataatttcagtgtggtgtattattaaatagnnnnnnnnnnttttgtttcctaggttgaaggtctaattgatacgtttgacttatgatgaccatttatgcactttcaaatgaatttgctttcaaaataaatgaagagcagctgtccttctttcctcttttaagtgttcagctgtggcatgctcagaggttcctgctggattccagctggagcggtgtgatacccttctttttcagctgttcgtgccttcctttcttgtatccaccaaagtggagacaaatacatgatctcaaagatacacagtacctacttaattccagctgatgggagaccaaagaatttgcaagtggatggtttggtatcactgtaaataaaaa

SEQ ID NO: 241318 - DNA, 922 bp, Homo Sapiens
ttggcaagaaaaagaccagaagtacatctttgcatcattggaccagaagtcaacagtgatctctttaaagaagctgattgtgagagaagtggcacatgaggagaaaggtttattcctgatcagcatggggatgacagatccagagatggtagaagtccatgccagctccaaagaggaacgaaacagctggattcagatcattcaggacacaatcaacaccctgaacagagatgaagatgaaggaattcctagtgagaatgaggaagaaaagaaaatgttggacaccagagcccgagaattaaaagaacaacttcaccagaaggaccaaaaaatcctactcttgttggaagagaaggagatgattttccgggacatggctgagtgcagcacccctctcccagaggattgctccccaacacatagccctagagttctcttccgctccaacacagaagaggctctcaaaggaggacctttaatgaaaagtgcaataaatgaggtggagatccttcagggtttggtgagtggaaatctgggaggcacacttgggccgactgtcagcagccccattgagcaagatgtggtcggtcccgtttccctgccccggagagcagagacctttggaggatttgacagccatcagatgaatgcttcaaaaggaggcgagaaggaagagggagatgatggccaagatcttaggagaacggaatcagatagtggcctaaaaaagggtggaaatgctaacctggtatttatgcttaaaagaaacagtgagcaggttgtccagagcgttgttcatctctacgagctcctcagcgctctgcagggtgtggtgctgcagcaggacagctacattgaggaccagaaactggtgctgagcgagagggcgctcactcgcagcttgtcccgcccgagctccctc

SEQ ID NO: 241319 - DNA, 1246 bp, Homo Sapiens
  misc_feature (887)..(906): n is a, c, g, or t
gtttaccccgtccaacagggactcctgtgggactaagggccacaggtaattgaaaggttatagacttgaatgcgttttacacaaatattcatcaacaaactttcaattaccaaagaaacagaaagaaaaaagcagaaatactaaagtaaaatgctatttgcattccacttttaaaaagtttgcctcaatgtagtggaaacatctgaaaacatgttgagtaatatccagtttaaaagaattttcacttgtctgcgtagagtactattttaaggatccctttctaaggcttcctgaacaagggttcttctcccttcaacagtgctcttgatggagctggactgcttcagtgctcctagcgtcaagcagactgctttaaggcaatgaccaacaactacagcacttctgaagaccaaacattttcactattttgcactgaatattctataacaaactattccaaatcactggcatcttgttattactattccattcctaagccagatataaatgacaaaggagagcacagcactgtcaagttacccccagaatttgggatgctcgaaggctagaccgtagtatttactcacatgctacctgcatctcccatacttttctccaatattttccattcaaaaaatgaagtactttttaagtgtctgggttctggtttgacaccactctaaggagcaactttattaacccttctagttctcacttgcatttgttaaacaatactgactctcccaaaactatgataactgcaagtccaaagcacggtaactgcagagtagctagcatttttcctgaaactcagtagtttcttacctaaaaagtaccacccagaataagtgtttttaagaaagtgagaataaagcagagggaagacnnnnnnnnnnnnnnnnnnnnaaagctggaaggtgtttctatttggtatctttaaatgctatagatttgggattttaactaacagctttggctatagaaatgaagaacagacactgctgaatcttcatttgaatgctcaagtttcatggggcagggtggggggcgggatagctttgcaacccaaatttaagagaatcaggaggaaaacaaagcagcaaagaggcagctggtgcttactacctcttccactactacgcttcagactgacagaaaagcagctagctgctcctttaaattagcaatggttaattctaagcaggaaaagatgagctgcgaagaacagtaagaatcataaagccaa

SEQ ID NO: 241320 - DNA, 908 bp, Homo Sapiens
gacaatgattttaaagattatggtatcaagtcaaagtaaaccaagatttaagtaaattgggtgtctaagtgcaatcatatcatacggcaacgcagattaaaatattgtatttctcagtatacatatggtgaaaaattctgaaaaacaagttattgggtattatccatatgcaaatttacttatcttgatgaacacttcagactttaattatggcagatgaaacttattaatcaaaatggttaaggcaattttcaaatttgtgaaatttgatgtgcagacaaatttgtaagttttaaccttaaatgatagtcaaattttggtaatgggtggacatatgctgatttcctcccatttaatttaaacctttttgatgatgatgtgatataatcacatttattttatgttataatcaaataaaactatctcacttgatgtactcatgaattgtttgctcagaataaatatttaaaaagcattaaagaagtataagtttatgtgaatcagatttcttgagataacaaggcatctataaaatatgaaccattttattgaagaacagttatacagtgtagctacagatactgactagatactaaatatttctgcctgatttttcattgtcttcacaagttagggaatagaaatcaaaaaaccaaaaatctcaaatgatttagctgtccagaacatatttgacagttgataaatttataacagctctgacatataaatttctaattagagaatcctttcatttgaaaaaattgagatgatattaccctaatgaagtttttacctgaagttaacaaagtcctggatttgatatattactttgaatgcattaattctgaaaatttatatttagttctactttataacatttcttctcttaaggatgggatatgagccaa

SEQ ID NO: 241321 - DNA, 2798 bp, Homo Sapiens
  misc_feature (1570)..(1675): n is a, c, g, or t
  misc_feature (1751)..(1812): n is a, c, g, or t
  misc_feature (1825)..(1860): n is a, c, g, or t
  misc_feature (2202)..(2211): n is a, c, g, or t
agattaagccattcaattacacaacacagataaaaacggaagtttataacatataaacccagtacctgcccacactcatagcagtgaggggaataaaaatcaaggtggcactgtaattccatgactctaaaaatcaagtctatttgacattggtttgaagcaacagaacctttatagcagattcccctttttaaagaaaaacccaaggagagatgatcaagcacaaatgatcacttcatgcattttattgatagtctatattttaaatctgcagtatgacatcttacatagggaaaaaagcttcttcctaaaagataactattaataatcaaaccagctttaatatgattgacctttcaaggtcttgttttgctttaaacaagttaacttttagcagttgtaaagcactgtacaaaagaaaactgtgtacattctcaaaatttaatacagggcttcccaaccaggagtctgctggataggtatcggagaagggtgttatgttcaggtttaaattgaaagaaaatgagaaaccagataaagcaagccaaccaaattaacttcactttgtgctcctctctgcttttttgagtctctcccgaaggtcaggaagccctggtataacaatcactttagtctttacagaacatacatctatgtgctttgtgaccaaagacataaaggcagcctttgttactgttccccctccaaaccccttcaggttcttataagcttcagaaagctttccaagattgctgccctgttctttgtatgaatccaagtaaacaactataccaaagcagctcttcctgggagaagataaaacaggcacagatacatcaccaggccaactgcgtacctactcaacttgatacctgatcacatggccctacatccttaaaagcagcaccagggacaaatggagctatcaagaggtaaaatccaaacactggacagttaaaacacatacaaaccagttaaaagaacattagtaatggggcactaaatagagttaaggctggacagctggttcaaccataccttggtattgaaataattctgcaagatgaggaacttacagaggaaccttgaaagaggcaccatgatatgacagggttcactttcactgcatgtctttaagatatctactactcagcccaactgaccataaagcagctcgtggaactttaataaacaaatcctaataaaaataaataatttttagaatgttggagggtatgcctatttccttcagatctgatcaagacatgagaattataaaaccgatacaaactgttctgtgattatcacttgacagttctaacactgttatacagctcaattctatgctgcagcctttaagatacaaactggggttacatgagatcactcacttgttagagaagtatcagataaattttagaactgttccagttaaggaaaataattcttaatttcataatcctaaaactttttctaaaaatttttgcagggcaggtacttaactcatagctgttttagttgattaaaaaatctgatttaaaaataagtaaggctgggcgcagtggctcannnnnnnnnnnnnnnnnnnnnnnnnnnnnnnnnnnnnnnnnnnnnnnnnnnnnnnnnnnnnnnnnnnnnnnnnnnnnnnnnnnnnnnnnnnnnnnnnnnnnnnnnnttagccaggcaatgtggtgcatgcctgtagtcccagctacttggaaggctgaggtgggagaatcacctgagcccannnnnnnnnnnnnnnnnnnnnnnnnnnnnnnnnnnnnnnnnnnnnnnnnnnnnnnnnnnnnnagaccctgtctcnnnnnnnnnnnnnnnnnnnnnnnnnnnnnnnnnnnngtgacatactagttcctcggatcttttacttttttccaaatgaagtatgctgtcaatttacatttttcatgttttttcaaaagcacacaatttactagttaactcaatgaattacaatactgttattgaatataaacatactgaagaattaaagggaaaaaaacacacttgacactttaacatgtgtttaacaatcttgcatactaaggtacagaatacttcagaaagtaacaattagcatagtcttataagactaggagaataaaagtgccctgcaaacatggcttctatgtacttaatatggtaaaacatgtgacagggaagcctgtaaggtaaaacttnnnnnnnnnntcaaataaggcagattataattttttttgttcgcaaaagaacaaaggagaaaaggggaagaataaaaacattctccatctttaaaagaaaaaatattaacaaccataaggtgccactgtattttagcaagctgtaaaaatggccttttaagaggaattttgcaatctttacctccctatcatttgggtattttgggaactgaccgaaagtcatggctgatgcttcacccatttcatgtcatggacgcctgggaagcaggtagttaaatacaaagcatattatgtgataacccttcataaatataatttgagacactgacactaggagaggatacttggcacagaaaagacatgttatggggcgggggacacattacttgaggcaacacttacagccaatcagtttcctaatcttaaggtttggatgaattccaatcgtttttaaaaactgtgtgtgtacacacacatattttatttcctggtgctaaaggtcttataaactgtacaattacctacattccaacactaatgtgaacacttttctcaatccccacctccattaacaccattaaggtgtaactaacccaa

SEQ ID NO: 241322 - DNA, 1318 bp, Homo Sapiens
  misc_feature (154)..(204): n is a, c, g, or t
ttgggctgcttctggttctcttgtggccgccgtcgctgtccggctgccttgggctgccgaacagacaaggcgtgggccacagcacctcagaagccgacgcagctcgacgcaggggccggcaggagggtgggcgatcgcgtgtcggagggcgccnnnnnnnnnnnnnnnnnnnnnnnnnnnnnnnnnnnnnnnnnnnnnnnnnnntcagccgctggccgggccggccggggaatgtcgatgcctgacgcgatgccgctgcccggggtcggggaggagctgaagcaggccaaggagatcgaggacgccgagaagtactccttcatggccaccgtcaccaaggcgcccaagaagcaaatccagtttgctgatgacatgcaggagttcaccaaattccccaccaaaactggccgaagatctttgtctcgctcgatctcacagtcctccactgacagctacagttcagctgcatcctacacagatagctctgatgatgaggtttctccccgagagaagcagcaaaccaactccaagggcagcagcaatttctgtgtgaagaacatcaagcaggcagaatttggacgccgggagattgagattgcagagcaagacatgtctgctctgatttcactcaggaaacgtgctcagggggagaagcccttggctggtgctaaaatagtgggctgtacacacatcacagcccagacagcggtgttgattgagacactctgtgccctgggggctcagtgccgctggtctgcttgtaacatctactcaactcagaatgaagtagctgcagcactggctgaggctggagttgcagtgttcgcttggaagggcgagtcagaagatgacttctggtggtgtattgaccgctgtgtgaacatggatgggtggcaggccaacatgatcctggatgatgggggagacttaacccactgggtttataagaagtatccaaacgtgtttaagaagatccgaggcattgtggaagagagcgtgactggtgttcacaggctgtatcagctctccaaagctgggaagctctgtgttccggccatgaacgtcaatgattctgttaccaaacagaagtttgataacttgtactgctgccgagaatccattttggatggcctgaagaggaccacagatgtgatgtttggtgggaaacaagtggtggtgtgtggctatggtgaggtagcaagggctgctgtgctgctctcaaagctcttggagcaattgtctacattaccgaaatcgaccccatctgtgctctgcaacctgcatggatgggttcagggtggtaaagctaaatgaagtc

SEQ ID NO: 241323 - DNA, 2160 bp, Homo Sapiens
  misc_feature (85)..(109): n is a, c, g, or t
  misc_feature (2074)..(2112): n is a, c, g, or t
ttcttgacacatacaatacaaaaataaaataaagaatcccacccctttaactaaacttcatgtactatatcttggaggagccacnnnnnnnnnnnnnnnnnnnnnnnnntttcaagttcagcatcatgagccagctgtgaccagccccagggagctcttgttagctggataggcttggctccaggggagtctaccccagcccccaccatacttcttcctgtttcctcacttcccctttagtttttgttagccatagaaagatgttccttcctttcgttcacaaccagagaggaaagcgcccatccctaaccctgagctcaggggaaaagggtgggcttggaaacagaggcagaagcaaagctgcttggcttacagtaccattaggaaatggccccaggagtcagggtttccttctgagactctgagtcactgaagggatgtgttgaggtggaaggcgggaccccctccttcctcagacagacccaggcaaactaacaaacaaggcaaaatggaggcagccagtcctcctccttcatcttgactaacccaatggcagtggcccagggctttggggaatttcgatgggataggaaccaaagctactgccagaagcctgtttagttaggatgtccactgccccaggcaggtggtccccaggaccaaggctacagtaccttatcctttagaagcaggggagctgtgtgaagcactatgggaagtatacctctgactgcagcctcgggccacaaccctccagctgcctgactcaataccctagcactgagacccaagtcacagcgaaaacaacaggctacaattctcaaacgactaaatgctggcctggagtaatcattaaagagccaaaacccaggacatgagcccaagagctacctattttgtcacataaggagcagttcaaatatacagagctcttaaaaaacatatctaataaagcaaactcaaaattaaacacattctagaaaagcgggcctggcctgagatcctatattgactgctccagcccaagctgaagctaatcctgctgtctcccatccacaaaattccttctagcttggctgggtcctccttcattgttgccctaactgggaaatggatgacaatggccagaaaggaggggaccagggaagcttcatttcctatagaaattttttcagggaattcaagatcgacacttagatgctaaggttagcttcagagctgccaaggctctggctgactggaattctttcagtcccatcacaccaagaacctgactgctacttggatagagaaatgaaaggacaggggaaggaggggcatactattaagatcaataagaagcatcgctgggcctatatagctaattagtctagttccttgaagtagctctaggcataaaccaaaactggctgaactgtgacacacaagaacatgggaataaatgaacatcagataccagacactctaaacagtggtcagtcacttagtagggctcaaatctctgaggttgctcttaagctatgctaacataagccttttctaatccaaagaccagaagagacttttaaggtcaagtgttctgttgctgcaggctggaaagcatccctgccccctggcagcaaggccctacaaaggggccagtaaagaactgctgggtcaggtcctcctggctgctggctcagagatccagggagggaggtaccaacaaggtgaggtggtaaaggagaagacattcaagcagagaaccccaaatccccgtgtctccttcccttcttggctataacttagtgggatggttgagagggagaagaaatttcaaatgagccagattaaggaaacaaacaaacaaacaaaactgagaagaaatcaagtccccaacaggcactgaaatcaaaatgatttgttgtggtaacaagtcagaggcgatctgaggacccgacataaccgaaacgtcttggatgctggacagtctataactggcacatgccagggagacaagcaatgacaaagctcaaacactaaaggtgggaccatcactggattaatccagaaaggcttccagataaggaagcannnnnnnnnnnnnnnnnnnnnnnnnnnnnnnnnnnnnnnaagtctttaccgcacaaattctaccccttcacacacattctttcccaa

SEQ ID NO: 241324 - DNA, 3172 bp, Homo Sapiens
  misc_feature (1394)..(1404): n is a, c, g, or t
  misc_feature (2776)..(2800): n is a, c, g, or t
gcaaattgtttattaaaacacaaagcaatggacagtgaaaaacatcctgattttgtactttttggtgggagtggggtgggacatggaaggggtagggtcagatggagacagcccagaaggaaagccagctctatccacccctacagcttccccggccaaccaggttcaaagcccatcagttatatctcactgtgccgctgtcaatgcatgttgtggctgctggcaaagagttggtttggcctccacagagagaggatgggaaactagggtagaagctacaagggctaagaacttgatgctttttctccagtacttggtacagaatagagcagccaggcccaatgtggaagggtgggcttggtttcctgacaagccaggttagaccaataatggttgaagaggctgccctgggctcagaatgggcagctggtccttgcctgggagaactttgtggaaggaaaaggtaagattccttaagtccaaggagagaaccaatccagggtcaaatttcttttcattccctggatcacaacacaccagggaagagaggagtcaagaatgtctctccctgccagtgctcccctcctacctcgcaactcggctctcccttcccgacagttgtcctttgaaaggacggaaagcgcacttcagtttgttgttgtttttcctcatactgaaataaagcactgaagctcaaaatagaggtgagaatggagttctgctttccccagtgctatgtgcccccatctcacaagactgcctggatgcaagaggtgccaaggccctctctgccaactcaaacaggcactactgtttccttggctgccagcacaatcctggctccttgtgtttatactcctgggggaacctgtcccaagagatccatcctgctcttttcctgccaacccagctagtccccaaatcacctgctcttatcaagataatctggccccccatagcaggctagacaaaaggcagctggaaaggacaggccagactggaagcaagccacacagatgcaaagaagaaacctgccctcgctaggcagctgatctactggtaccaatctagtctcataacaaaatgaggaaatctagccctcttgccccagagagatttaaatacagagagtcttagtttggactgaaagagaaaaattgctctgatctttctaaagcttgaacattaaggcttctttgcaattttcttagagctctttgatcgttaattatatctttccatcgaagagaagcagatttcttctgagatttctgaacagttcctgggtgtttccggttctgcttccgtgtactatcactttgccttgcctcagtctctccttcctccggggccacagaaggagaaagcccaaagcatacccatcctgccctttnnnnnnnnnnngaaagaaagattcgtctctcactttggaaagctcacctactctcctaggtccttctggaggggcatggaggacaatattccatgttgccatttgatgccactaaggatccccaaggcaagaagacacttgaattatgccagagtaggccagcaaaggggagggaagggacagggaagcagccccatggcagggactataggacccctgcccaaacctgaatctagagggaatgccccaccctggctcagagcaggagaggaaaaggcactgtgctgaccggggtgggtccttccccaacccctagggagggcagagaacctgctgattctttccctgggtttcccaaggtgagccaatttctagggaaagggattttagcactaggaaaaggaaaatactgctgctgttttctgaagttctcagctgagattttagaaaccatatccaggcctttccaggagaggctagaggcaggagaagaaggaagagaaattccttaaaacagaagcttctcccaagagataaggaagtcaaaaccacagttctaaagctggaccaaacagttcccaggcacagaaagggggaggtaaacctaactcaaactgtgccctctcatcaaagcctaaatgcccgctaacgtgatcccagtagctcttaggcagggagggcaagagaacacgaacacgctctcaaaccaacaggtggccctgtgggcagggctagtcttcctgggagtctaacgccattgacacctgaagaaaactatcttcccagtcatgagaactcggggtgtcgattgagcagcctctcctcaacaatggagatttttcagaaaagtgagtctggtttaagggacacaaatcccacagagtttcttggcacaatgtttcagtaagcatgagtgagacccaaaaacgtccaatgagagaccaacaggcccctgacctaagtcagagctagactgcagaactctcagcccagctctgcagcagacatctgcgtcatcctcccagaaattcaactcaggccacacttctggcaaaagaagtttcaccctgactgtccttgttttcagtcagctgggctcagtgggatctaaaaacctgggacagagtgtagatccagtagaggagcccaggcctctcctccacgcacccctcactggcacccctcaccatctcccatacattccctatggtgcagcctctcagtcctagcactaagctcaaaatacagataagagaacaaacagtgcaaaaagcaaaaggtgaacaacagagtaattcttgacacatacaatacaaaaataaaaataaagaatcccacccctttaacctaaacttcatgtacctatatcttggaggagccacnnnnnnnnnnnnnnnnnnnnnnnnntttcaagttcagcatcatgagccagctgtgaccagccccagggagctcttgttagaaggataggcttggctccaggggagtctaccccagcccccaccatacttcttcctgtttcctcacttcccctttagtttttgttagccatagaaagatgttccttcctttcgttcacaaccagagaggaaagcgcccatccctaaccctgagctcaggggaaaagggtgggcttggaaacagaggcagaagcaaagctgcttggcttacagtaccattaggaaatggccccaggagtcagggtttccttctgagactctgagtcactgaagggatgtgttgaggtggaaggcgggaccccggtccttcctcagccaa

SEQ ID NO: 241325 - DNA, 1475 bp, Homo Sapiens
gacttctgcaggacttaagctaatactgaaaagatataaaataggtgcatcaaggaagacgttctggaaacgtaagaaaattaacagtggaagtgacagaagtatagaaaagaacactcaagtgcttaagaaaatgaacaaaacacagactaaatctgaagaccagagccatgttgttcaagagcatttaagtgaagaaaaggatgaaagactacactgtgagaataatgataaagcccctgaatcagagtcagagaagccaactcctctgtccactgggcaaggtaatagagctgaagagggaccaaacgctagttcaggtttcatgaagactgctgtactaggacctacactgaaaaatgtaatgatgaaaaataataaactagcagtttcccctaactataatgctacgtttatgggcttcaagatgatggatggaaaacagcatattgtattaaaattggtgcctatcaaacaaaatgtatgttcaccaggctcacagtcaggtgctgcaaaggacggtactgctaatttgcagccccagactttggacactaatggatttttaacaggagtaacaactgagttaaatgacacagtttatatgaaagcagctactccattttcatgttcatcttctatactttcagggaaagcaagttcagaaaaagaaatgactttgatatctcaaaggaataatatgcttcaaacaatggattatgagaaaagtgtatcttctttgtcagcaacatcagaattggttacagcatcagtgaatttgaccacaaaatttgaaacaagagataatgttgacttctggggaaatcatctcactcagagtcaccctgaggtattaggtaccaccattaaaagtccagataaagtcaactgtgttgccaaaccaaatgcatacaacagtggagatatgcataattattgcattaattatggcaactgtgagttacctgttgaatcctccaaccaaggatcattaccttttcataattactcaaaagtgaataattctaataaacgtcgtaggttttcaggaacagcagtgtatgaaaaccctcaaagagaatcttcatccagcaaaacagttgtccaacaaccaattagtgaatcatttttatcactagtgaggcaggagagctcaaaaccagatagcctattagcatctattagccttttaaatgataaagatggaactttaaaagcaaaatctgaaattgaagaacagtatgttttagaaaaaggacaaaacattgatggacaaaacctgtacagtaatgaaaatcaaaatttagagtgtgcgactgaaaaatctaaatgggaagacttttctaatgtcgattcacctatgatgcctagaatcacatctgttttctctctccagagccaacaacatcagaatttctgccacctgaagtaaaccaattgcttcacgatgtattgaaataaacctgatgtaaaac

SEQ ID NO: 241326 - DNA, 1684 bp, Homo Sapiens
actttgtacaaaaaagttggtattcccatactaagagtgtttggagatagtgtttgagcttttttgctggtgttaaaaatgcataatgaaagatggcagagagaggcatattatatccaattcatgagttgtttgtgttaacagaaagcttattttaatcacttaacattgttgatttgtctaatcacagtagcgctattgattaggagcctgacctttagatggttgacttgtgagtgtattcaatatggtgaaatatggtgttgatatatggctgcagattttagaggtgtcattagcaaaggtataggagtaaaataggggttatagtattccttactcaaattctgtatgtgctagagctggctggagtctgtggcatgctcattggtgtaagtcggtaaggactatgctttttgctccacatctctgttgtgggaaagctagtctcttgagcattcttgatcagaatggactggaataatttaactttcgtactttcccaggctattagtattatctaatgagtggcttaaagataccagaaacactgactgaggtctccacctgcttctggctgaatgaatgggagcttctagccattgaataagaggcagtagccaatgtttcttattctgaatggtccaggttgacttttataagagaaacactcagccttttaattgctgaaggtctgacccatagactaagattgcacattcttagtctaggttacacttgaactagactgcacccactgacgatatattcagttcaagtgttaactcacttggattagcatctggcctgtcctatctgaatataggttgagacgtgtattggaatctctgactagtcagaatacgttcttagttatattctcaatactgaggaatttttacttgtagaaactgaaggctcagaagaggatgataaagaaaatgataagaccgaagaaatgccaaatgattcagtccttgaaaacaagtctcttcaagaaaatgaggaggaggagattgggaacctagagcttgcctgggatatgctggatttagcaaagatcatttttaaaaggcaagaaacaaaagaagcacagctttatgctgcccaggcacatcttaaactcggagaagttagtgttgaatctgaaaactatgtgcaagctgtggaggagttccagtcctgccttaacctgcaggaacagtacctggaagcccacgaccgtctccttgcagagacccactaccagctgggcttggcttatgggtacaactctcagtatgatgaggcagtggcacagttcagcaaatctattgaagtcattgagaacagaatggctgtactaaacgagcaggtgaaggaggctgaaggatcgtctgctgaatacaagaaagaaattgaggaactaaaggaactgctactcgaaattagagagaagatagaagatgcaaaggagtctcagcgtagtgggaatgtagctgaactggctctgaaagctactctggtggagagttctacttcaggtttcactcctggtggaggaggctcttcagtctccatgattgccagtagaaagccaacagacggtgcttcctcatcaaattgtgtgactgatatttctcaccttgtcagaaagaagaggaaaccagaggaagagagtccccggaaagatgatgcaagaaag

SEQ ID NO: 241327 - DNA, 1117 bp, Homo Sapiens
actttgtacaaaaaagttggcttctgagtagtcaagcagtgcacaatcctggaggaagagaaggctcagcaagaagagcgcatgaggatggagtccagaagacaggccacagtgtcctgggactccggagggtctgatgaagcaccgcccaagcccagcagaccgggttatcccagtccgaggtccagcgaaggattttatcccagcccacagcacatggtacaaaccaatcattaccaggtttctggctaccctggtcacatggaatcacagccatggctggcagcatctatccaggtcaggcatctcttttggaccaaacagattcatggaatcatagacctcaggagatagcaatgtggcagcccaatgtggaggactctacagtattggacctgcgagggattgggcaagtgttgccaacccatctgatggaagagcgtctaatccgacagcaacaggaaatggaagaagatcagcgctggctggaaaaagaggaaagatttctgaaacctgatgtgagactctctcgaggcagtattgacagggaggatggaagtcttcagggtccgattggaaaccaacatatatatcagcctgtgggtaaaccagatcctgcagctccaccaaagaaaccgcctcgccctggagctcccggtcatctgggaagccttgccagcctcagcagccctgctgacagctacaacgagggtgtcaagcttcagccccaggaaatcagcccccctcctactgccaacctggaccggtcgaatgataaggtgtacgagaatgtgacgggcctggtgaaagctgtcatcgagatgtccagtaaaatccagccagccccaccagaggagtatgtccctatggtgaaggaagtcggcttggccctgaggacattattggccactgtggatgagaccattcccctcctaccagccagcacccaccgagagattgagatggcacagaagctattgaactctgacctggggtgagctcatcaacaagatgaaactggcccagcagtatgtcatgaccagctctccagcaagagtacaaaaagcaaatgctgactgctgctcacgccctggatgtggatgccaaaaacttactc

SEQ ID NO: 241328 - DNA, 2420 bp, Homo Sapiens
caaaataaaaacaattttctcaataaacagtgactactaaattgttacaaagaaaaattcttcaatacttattttattccatatgtaggctttttcccaaaagacatattaatattgcattacaaacaggacagctaatctggtcaagttgtgaatatatttgacaaaaacatttgatcttctactgtttttcatttattggatgcatttctttagcaattctgttagtcctttttctaaaatcaagttaaccaagtacagcccatacagaaatcagatgtgaaagctgacttctattttttaaagtaccctcttaactgaatgctgccagcaataatataattaaattacattttgtaatcaagtgctgtgtattacatatattgtgtatatattttcaatgaatattcatataaaatgaataaacaataccagcatactaaacttaatatggtttattttaaatgattgctggttccagataattaaaaaccatcaactctatggcagcaactataatacatatatagttcgttgaaagatggttttaaagttttatgagtggaatattattttttaaaatacaaatgacatttatagcataaggctctgtggttgaataatcagcaaattaaagaaaaatatcagagaaaggttttgaaaaataaagcatgtttcctgttaagagaattgattctttccttcctaaaaatggctaatagaaattaaaatatttaaacaaaaggttcctaaaattcctagaaaaaaattgaacttcagtagcagtaattaatgaggtcagactatcatggcaagctgaaaatctgttggtggtcagaagatacaactgctcaatttttacagaagtaaagtttattacatttgaaacaatacagcagaaacctcaaaagtttactcataaatatagtttaattcttacaaatcttcttttgaaaatgcaattcatatatgctgcaacctcagaagtttgaatttgaaatgaaatatgaaggtagtagtcagggaagtcacatcagagtgccttgtcaaatatccaaacaaatcagcacatacctcttccttgatacaggaggaaaaaagtgattctaaatatatccaagtgaatgcagaaaaatacattactatttgaggcagaccatgctaaaatataatttacaatgattagtttgcacttaagatggttaataacgcatttaaaccaatgaaatgaaggttaagttgaattttgtagtatttgctcagtctctgtactaaacaatagttcatctgaaaagtttggaaaaagcaaataacctgatacttctctttatgcttatcattttctcactgtcatcttaaatgcaaacaaatcaatacagcatcaagattttttacatattaaaatgaagactaatgactcatagactgtgtaccatatagtacttaatagatgagcttgcaatgaccatcacctcaattttttaaataacaccaagatccacaagccaaaataaacatttgattaaaaagttatgttattcaagataactcagtttcctttttctctttgagattgggaagggctgggtctttaaaaacctgaagaggagttggtaagaggaaaaaatcctcaatgctttaaaaaactcaactggttagaagtccatacaactactatgctggcatggacagagatgtttcctgtcacagaactgttcactttcccatagaagtacttcctccaagccaactatataaagatgtaaatcagctcacccatgattgaaactgaaataatccttcaaaatagaagtaagacacctcacccaaaaagatcttttaaatcattgctagctgaactgctattggtcatagtagttggtggctgtgcaaagttctgtgggttaaagaaaggattaccctgcataccaaaagcagattgtcctatcacgttcatctgtgtccccattactgaactgcccatagttggagaaccttgaggaggtacaaactgattaagccactgatttggtttctgttgtgataactggttcatgctaactttgggtttctgagggccaaagagattattaagggcagacatatctgtgggtctttgttgggtctgctttgcaccagcaggaggaacactcaaagcattgaagtttggcaaagtgggaggtgttcccagagtcatcttggtcactccaactgtgcttggactactgtagaagttctggtttgtattaacgggcatgttgaatcctgaagtctgaaagcccatattggcatttaggccatttgtcaaatttctctttgtattatcagttggtgtagaaaacatcataccaatgcccatggaaggaacagaagtgaaagtacttgaagcagaagatttaggccaacttttttgtacaaag

SEQ ID NO: 241329 - DNA, 1336 bp, Homo Sapiens
  misc_feature (1171)..(1221): n is a, c, g, or t
actttattttaactcaatgtgttgaaatgcaaaaaatattttcagcaacaagatacatgtattatgtatctatcattaacatcagctaattaaaaacgaggctgaaaagttcaatataagtttttatacacttgaatcttgaaaatcaatttccccaagaaactaatttttaaataatttttgcagaatttcattttcaaaaatgagactcaggtaagttacatcttcattttttaaaactgaatgcaaaatttactgggttacagtatacaatgataaactctgacaacaaaaaaatttaaatataataatttcttttcaaacataaagttcacatactgcaaacagaagacactgtgtgatttcattcctagtaaggagttagtcttgcatatgataggcactcaatatttgttcaactggacctaaaatttacatcattccatgaacacttaaataaagtagagctcattaatttgtataaaaaaggtttgtaaaatacactttgtgtgcggaaagtgctgtctttatagctgtctttataatctgagaacactaaaacgaacccactcacccacccaccttcttttgtaagaataaattgaatatttttattttatccatcaaagagcatgcatgtccaagtcagaataattcacctcttcaagtatacttggctctaagccaagtatacttaagtatgttgagctggattttcacaatccctgttctattttagtaacactgggtcatatctatgacccacattttataaagaattctgattaagattttaaatttatgaacaaaatttaaatgggtatattattaattctaattttggccatctaagctcttatttagatccagtttaaaaataaatgaataatgttcatgacaactttttgagatctttgttaatattttaaaacaattttattataattgatgtcctaaaaaggcactgttttcacatttcatcatgcagtaaattgatcacatttttgaaaattatcatttcctctgttaatcaattgtcctccaaagtaaagcatatttaaatgaaatatttctgctaacctgaactttcaacatttaactgatttctatttccagaaattcactctttgtaacataccacacacaagccccaagcaaatacaggtatgtnnnnnnnnnnnnnnnnnnnnnnnnnnnnnnnnnnnnnnnnnnnnnnnnnnntatttcatgcaaggttctccaattaccaattcaagacaatgacacatgactattcaaggaggtaacattggcaagccatattatggcaccttcattatttgtgctccaaatccaa

SEQ ID NO: 241330 - DNA, 919 bp, Homo Sapiens
tatagtgacttcccagtcaaggtttgtgtattaagagctgaccccatagccagctgcagtcactgtgcaaaaatttagagaaactaaattttgcaaactttactttgcccactttttattaatacatacatagtaaaaagaatatatttctccatgaacttaataatgcaaaagcatccaaagattttaatgccaattcacattatactgtgatgcttttatagggaaagttcttttgtaaaagaatgctctctcccagaaaaagcatttgggtatattattaggatactgaagaatttctccacatttagaaacattccaattttattcctttcagaaaaattattaataccactcactcagacttcagttctaggtgtgattggtaagcctgaagcaagcattccattgagaaaagtaaaatgtgaatgtcatgatgaatggaattctccttgatactagaatgttaccagtgtagcaacttaaactgtccaggtcatagtgagagcctgtctatgttcttacagtaattcagtgttcatcgatgcaatccaggatgctcacagagtgaattgagtccaattaaagtccacaaaatccacgaactctggttaagtactttaaaaaataaatctgacaacctttatctttacttctctgtataacagttttacaaatcaaggacttcaattattgggtgacttacttgctcccaatatcccacttctaactctcccacccacaccactccccccaaaaaataaactgaattggcagaggcagctgtatgaagaacctgcagagcagacatgcgacagcatccctgggatgtttcttttcccctcaagttctctgaagaggtaaatactattagtctgatgttgcctagtagagaagcctatgctcaattaagatccaa

SEQ ID NO: 241331 - DNA, 805 bp, Homo Sapiens
ttggggtagcgctgccccatacctgaagaccaagtttatctgtgtgacaccaacgacctgcagcaataccattgacctgccgatgtccccccgcactttagattcattgatgcagtttggaaataatggtgaaggtgctgaaccctcagcaggagggcagtttgagtccctcacctttgacatggagttgacctcggagtgcgctacctcccccatgtgaggagctgagaacggaagctgcagaaagatacgactgaggcgcctacctgcattctgccacccctcacacagccaaaccccagatcatctgaaactactaactttgtggttccagattttttttaatctcctacttctgctatctttgagcaatctgggcacttttaaaaatagagaaatgagtgaatgtgggtgatctgcttttatctaaatgcaaataaggatgtgttctctgagacccatgatcaggggatgtggcggggggtggctagagggagaaaaaggaaatgtcttgtgttgttttgttcccctgccctcctttctcagcagctttttgttattgttgttgttgttcttagacaagtgcctcctggtgcctgcggcatccttctgcctgtttctgtaagcaaatgccacaggccacctatagctacatactcctggcattgcactttttaaccttgctgacatccaaatagaagataggactatctaagccctaggtttctttttaaattaagaaataataacaattaaagggcaaaaaacactgtatcagcatagcctttctgtatttaagaaactt

SEQ ID NO: 241332 - DNA, 1397 bp, Homo Sapiens
  misc_feature (274)..(295): n is a, c, g, or t
ttggagttcttaaagatgaggacttaaaaaaatgcagtgctattaccaccatgcccggccccttttgtgtatttcttgttccatacttagaattaactaactttctaaggaaccttagggggtagtggtatttacagagcacagtgtaggttttgtcaccggcttctgagtaatcttttcctgctgttgataactcaggtagatactttcttttctcccaggagtccatgaagaatatcagctgccatattacgacttagtgccctctgtctcnnnnnnnnnnnnnnnnnnnnnngaaacttcagttaacagcctccttggtgctttaagcattcagcttccttcaggctggtaatttatataatccctgaaacgggcttcaggtcaaacccttaagacatctgaagctgcaacctggcctttggtgttgaaataggaaggtttaaggagaatctaagcattttagacttttttttataaatagacttattttcctttgtaatgtattggccttttagtgagtaaggctgggcagagggtgcttacaaccttgactccctttctccctggacttgatctgctgtttcagaggctaggttgtttctgtgggtgccttatcagggctgggatacttctgattctggcttccttcctgccccaccctcccgaccccagtccccctgatcctgctagaggcatgtctccttgcgtgtctaaaggtccctcatcctgtttgttttaggaatcctggtctcaggacctcatggaagaagagggggagagagttacaggttggacatgatgcacactatggggccccagcgacgtgtctggttgagctcagggaatatggttcttagccagtttcttggtgatatccagtggcacttgtaatggcgtcttcattcagttcatgcagggcaaaggcttactgataaacttgagtctgccctcgtatgagggtgtatacctggcctccctctgaggctggtgactcctccctgctggggccccacaggtgaggcagaacagctagagggcctccccgcctgcccgccttggctggctagcttgcctctcctgtgcgtatgggaacacctagcacgtgctggatgggctgcctctgactcagaggcatggccggatttggcaactcaaaaccaccttgcctcagctgatcagagtttctgtggaattctgtttgttaaatcaaattagctggtctctgaattaagggggagacgaccttctctaagatgaacagggttcgccccagtcctcctgcctggagacagttgatgtgtcatgcagagctcttacttctccagcaacactcttcagtacataataaggcttaactgataaacagaatatttagaaaggtgaggacttggggc

SEQ ID NO: 241333 - DNA, 2051 bp, Homo Sapiens
acaaaaaagttgggggaaagctcctcagttcggagaagtgtttaagatgatgcaggctgaagagacacctaaaactcctttgcagaaaagcatggacaggctaggaaagcaactgacactcttctcctttggcataatcggtctcatcatgctcattggctggtcgcaagggaaacaactcctgagtatgttcacgatcggggtcagcctggctgtggcggccattccagagggtctgcccatcgtcgtcatggtgacgctggtcctgggagtgctgcggatggccaagaagcgggtcatcgtgaagaagttacccatcgtggagactttaggttgctgcagcgttctctgttctgacaagacggggactctgactgccaatgaaatgacagtgacccagcttgtaacgtcagatgggcttcgtgccgaggtcagcggagttgggtatgacggtcaagggactgtgtgtcttctaccatccaaggaagtcattaaggaattttccaatgtctcagtgggaaagttagtggaggcgggctgtgttgccaacaatgcggtcatcagaaagaacgccgtgatggggcagcccaccgagggtgcattgatggccctggcgatgaagatggacttaagtgatattaaaaattcatatataagaaaaaaagagattccattcagttcagagcagaagtggatggcggtgaaatgcagtctgaagactgaggatcaggaagacatttacttcatgaaaggggccttggaagaggtgatccgctactgcaccatgtacaacaacgggggcatccccctgccgctgacgccccagcagaggtcattctgcctgcaggaagagaagaggatggggtcgctcggtttgcgggtgctggccctggcttctgggcccgagctggggcggctgacgtttctaggtcttgtgggcatcattgaccccccgagagttggcgtgaaggaagcagtccaggttctctccgagtctggtgtgtctgtgaagatgataacgggggatgcccaggagacggccttggccataggaagaaacatcggcctgtgcaacgggaagctgcaagccatgtccggggaggaggtggacagcgtggagaagggcgagctggccgaccgcgtggggaaggtgtccgtgttcttcaggaccagcccaaagcacaagctcaaaatcatcaaggctctgcaggagtcaggggcgatcgtggccatgactggggatggggtgaacgacgcagtggccctgaagtctgcagacattgggatcgccatggggcagacagggacggacgtcagcaaagaggccgccaacatgatcctggtggatgatgacttctcagccatcatgaatgcagtggaggaaggcaagggtattttttacaacatcaaaaactttgtccgattccagctgagcacgagcatctccgccctgagtctcatcactctgtccaccgtgttcaacctgcccagccccctcaacgccatgcagatcctatggatcaacatcatcatggatgggccaccggcgcagaggtgaggcagggccggctgggagccctgtgtctctttacctacctgcggggcttcctccaggggctgctggctgtgccccaaggctatagggatgaacaaatacagccactttccatcaggagttcccagaaaactgaagtgtgttgcactggagtgagactgggagtagaaggcagaggagaaagtacctgggccggcagagctgggtgaggatggaactttctgctccctctgcctggatgctctctctgggcaacctgcatggctcattctcatgcttcattccagtcaccagtcactgccttcaggaagtcttccctgattgcactcccactcaatcccctcaccctgctgtatttttccctagagaggaagatacacacagacacacttttccttatggatctgattgtgatctgtctcccctttagaacatcagtttcatggaggcggagtttgtgtttcatccctgatgtctagagataaagggcttgcca

SEQ ID NO: 241334 - DNA, 989 bp, Homo Sapiens
caatgaactggaataaagattccagtctccagccccgaaatcccggccgggttttctgaagggccctcgattcccgccccctcggcagggggcggggcaggaagcagccacatccggttccagattcggctctcagaggcttccggcgccgagaccgagatccccgtcggctcggtgtatcctcgctggtggagtaccctctgcttgagcgcatctcatgcgccagtagtggcgcccgccccgaacggtgtcgacggggcgttctctgagcggttcagggtcacccgtgggtctggccgaccgtcctgactcggagatccctgagctgcgccgccgcttccttcgtcaacatccagcagctacttgatgagcgccctccagtgggccttaggtccctatgccggcgcggggttacagcagtggacagacaggccggtccctgtcctcgaggagcccatgatccgcggggagacaggcatttaacgacgactcacacgatcacttaaatacaactgtggtgaaccgcacaagagggacgcgcggcggtctgcggggaatgacgaggccgacctcgtctgcgacccagggagggcaagggtggaccaggcaaagggaacagaggactgggacctggaggtgggcgggaggcgtttggttcattggaggaaaggaatagccctgtgtgtgatgagcattgagaggaggtctggcgagcaccatctagggctgaagaactaggcagtggctccagcgcggggcggtgggggggacaagtgagccagggcaagaagaatggatttggccctagagtacgggttctccaaatgtaacctcggccctacagatctctgagactatgtcagggggtttgtgagattttataacaaaattaagatgttagtacaatatcgtgtttcgccgccgggcgcggtggctcacgcctgtaatttcttatattgtttacatgttgcaataatattttggatgta

SEQ ID NO: 241335 - DNA, 306 bp, Homo Sapiens
  misc_feature (274)..(284): n is a, c, g, or t
ctttgtacaaaaaagttggctcccttgaggacagcgtaggccttttcctgtctgcctttcttctgcttgggctcttcaaggcactgggctgggctgctgtctacctgtccacctgcaaggattcaaagaagaaagcagagtgagggcactcactgccatcctgtggaagccaccatcatctctggcccaagcttctgtagtagctccctaaaataataccctatcatctgctcctaatccctccaatctctctccactgagtggctggaatgcnnnnnnnnnnnctttcacttatataagggataa

SEQ ID NO: 241336 - DNA, 1550 bp, Homo Sapiens
  misc_feature (427)..(505): n is a, c, g, or t
  misc_feature (1382)..(1390): n is a, c, g, or t
aatttaaagccagaccatttaagctaagttcctctatgtcctttgccgaggaaattaactggcattttaaaataactttaaaccacatattgttcccccattctataagattttctcccaaaggatcttgggtaataaacaatttggaagggtaatataaatgatctctggacaattttaattgttctcagagtacaatgaaaagatgctaaaacatcccagcaaatatttataaatgtttttagctcaactctccataaatcagtgtgctttttcatgtttctcataagatttacacctgaacaatttttaagagatgagctcactgtaattaaatagttaattcagtatggttacttaacagcttgctattcctgaggtataatgaccctaacatgctaagcacaggatcaaagatgctattacnnnnnnnnnnnnnnnnnnnnnnnnnnnnnnnnnnnnnnnnnnnnnnnnnnnnnnnnnnnnnnnnnnnnnnnnnnnnnnntacaggcaagtggaaagtcatggtttgtaaaaagacaaccctaaaagagtataaaaagccacagacggatcctttgaagagttgtataaaatatttcatcaaattatttttgagacttttgaggtacagctttagtgttataattcattttttaataaaatatagactgttttatcaaaaatatttatacattctgttacaatatattgcttttgccctcaataactgccaatataaaatctggatccagtggcctaaaatgtacaaatgcacttaatgtaaatgctggagtttgaggtgtctgcttggccactgtacaaaagtgatgaagtggtaaaattaaataataagcctacaacatagaatacattaaaacttgcacatatacatgttcacagcatgtatacaatgataatccctacggtttaaccaagttatggttcccttctacagcagacacaaaaccaaggtgaactaggttggcagatgtagagtgaataccaaaaaaagggtaatcggttcactgattctgaaagatatgactgaacatactgagcatctagactttgggaatgcatacaggtaacaatatcttggttcggctgattaaaagtcctcattcttaacatcttaagtaaatgctgatcctgtttgtttcagcactgtttaataaacaaaaaaaattgtttggcaagcagctctgttggaaagctataagcctgttacatgattgataaaaaaaggcaatataaagttttctcctaataaatatagaacatttataaaataagacatcaattcattctgtttttttaaaaaaaatcaagccccgagttgtatacaaactgccacggtttttgatattacagtaatgtcnnnnnnnnnaaaaaaaggagcatttgccttattcaaacagaatcatactttgtgtgaacagtaatagcattccaagcccttttttctttttataaaacatagttaagtgattaactttccttccacttaaggcgggcatatggcaaagctagggactataaaaaagtgg

SEQ ID NO: 241337 - DNA, 835 bp, Homo Sapiens
ttggtgacagagtcccgcggagttgtgggggccggaggcgccatgggagccactggcgacgccgagcagccgcggggacccagcggggccgagaggggcggcttggagctgggggatgcgggcgcagcggggcagctggttcttacgaacccttggaacataatgataaagcaccggcaggtgcagcggaggggccgccgctcacagatgacaacaagtttcacagatcctgccatctccatggatctcctccgagctgtcctgcagcccagcatcaacgaggagatccagactgtcttcaacaagtacatgaagttcttccagaaggcagcactgaacgtgcgagacaatgttggggaggaggtggacgcagagcagctgatccaggaagcctgtcggagctgcctggagcaggctaaactgctcttttcagatggagaaaaagtaatacccagattgacccatgagcttccaggaataaagcgtggccgtcaggcagaagaagaatgtgcccatcgaggaagcccccttcctaaaaagaggaaaggacggcctcctggacacatcctgtcaagcgaccgggcagccgccggcatggtatggaaaccaaaatcctgtgaaccaattcgccgggaaggccccaagtgggacccagctcgcctgaatgaatctaccacctttgtgttgggatctcgagccaacaaagccctggggatggggggcaccagaggaagaatctacatcaagcacccacacctctttaagtatgcagctgacccccaggataagcactggctggctgaccagcatcacatgcgggcaacagggggcaaga

SEQ ID NO: 241338 - DNA, 1405 bp, Homo Sapiens
  misc_feature (808)..(882): n is a, c, g, or t
  misc_feature (964)..(1058): n is a, c, g, or t
  misc_feature (1062)..(1101): n is a, c, g, or t
  misc_feature (1331)..(1350): n is a, c, g, or t
ttttcaattcctcaatttcccaaccctagcccacaattaggacatgtggaaccaggacagttaaaatcattcacacatcgcatgtttattcagggaccctctctctgccccagtctgctttccggagctcagaatccagccaggaatccaagtgaagaacagtacttgatttagtactgctgactggtggccgtggacgggagtgctgacgtttctcatctaatagatgtcggacatctgcaaatttctcaggtggtaatttgttaccaattcggtttttgatattgcttgaagatacactatctgccctcatggagttcctttaaaaagggggtaggatggggcacagttaaccaacttcaactgtgagacaagacccaaacaacaatctcatactttggaggaaacaatttaagaaatcctgtcttacatggccaacattcacttacaaatccataaacttataattatttgcttatggaaaccatgatctgcctgctctaaagagactggttctggtgagcaggttttcgaaggtggtttccacatgtgtatgtgctattacacagcatacaactacaagtcccccttttctgggacaaacgttaagtagaggcctacaaagagattggggcttccacttacacatgctgtgatgtggctgtagtcaacacacagtatagtctacagtctctctctttaaagggcagacttctctttcaaagagatatgctatcatgctaggtgccagcaccgttccggcagcattctctaccagaaagctctctgaaaaccaaaaataagaatnnnnnnnnnnnnnnnnnnnnnnnnnnnnnnnnnnnnnnnnnnnnnnnnnnnnnnnnnnnnnnnnnnnnnnnnnnnaccatcctggctaacatggtgaaacccagtctctactaaaaatacaaaaaattagccgggcgtggtggtgggcgcctgtggnnnnnnnnnnnnnnnnnnnnnnnnnnnnnnnnnnnnnnnnnnnnnnnnnnnnnnnnnnnnnnnnnnnnnnnnnnnnnnnnnnnnnnnnnnnnnnntcannnnnnnnnnnnnnnnnnnnnnnnnnnnnnnnnnnnnnnngacatctagggttttgccgtcctttgttaaaaccaattaatactaaaataataataatactgccctggatatttttatacacatatcatttggcacatgtgaaagaatacccacgtgacagctggttatggtggcacatacctgtaggcccagctacttggggggttaaggatctcttgagcccagaaattcaagtccagcctgggcaacatagagagaccctatctctnnnnnnnnnnnnnnnnnnnncccaactttcttcttttctataaggttgtgcggccccaacttttttgtacaaagt

SEQ ID NO: 241339 - DNA, 2065 bp, Homo Sapiens
actttgtacaaaaaagttggcatgcctgtaaagaacttgcagttgaaggagtataacacaggttacgactatggctatgtctgcgtggagttttcactcttggaagatgccatcggatgcatggaggccaaccagggaactctaatgatccaggacaaagaagttaccctggagtatgtatcaagcctggatttttggtactgcaaacgatgtaaggcaaacattggtgggcaccgatcttcctgttcattctgcaagaacccaagagaagtgacagaggccaagcaagaattaataacctaccctcagcctcagaaaacatccataccagcaccattggaaaaacagcccaaccagcccctaagaccagctgataaggaacctgaacccaggaagagggaagaaggccaagagtcacgcttatgacatcaaaagagagaagcagaaaggtatctgcctccttctcgaagggaagggccaactttccgaagagaccgagagagggagtcatggtctggagagacacgccaggatggagagagcaaaactatcatgctaaagcgtatctatcgttccacaccacctgaggtgatagtggaagtgctggagccctatgtccgccttactactgccaacgtccgtatcatcaagaacagaacaggccctatggggcatacctatggctttattgacctcgactcccatgcggaagctcttcgtgtggtgaagatcttacagaaccttgatccgccatttagcattgatgggaagatggtagctgtaaacctggccactggaaaacgaagaaatgattctggggaccattctgaccacatgcattactatcagggtaaaaaatatttccgagataggaggggaggtggcagaaattcagactggtcttcagatacaaatcgacaaggacaacagtcatcatctgactgctacatatatgattctgctactggctactattatgaccccttggcaggaacttattatgaccccaatacccagcaagaagtctatgtgccccaggatcctggattacctgaggaagaagagatcaaggaaaaaaaacccaccagtcaaggaaagtcaagtagcaagaaggaaatgtctaaaagagatggcaaggagaaaaaagacagaggagtgacgaggtttcaggaaaatgccagtgaagggaaggcccctgcagaagacgtctttaagaagcccctgcctcctactgtgaagaaggaagagagtccccctccacctaaagtggtaaacccactgatcggcctcttgggtgaatatggaggagacagtgactatgaggaggaagaagaggaggaacagacccctcccccacagccccgcacagcacagccccagaagcgagaggagcaaaccaagaaggagaatgaagaagacaaactcactgactggaataaactggcttgtctgctttgcagaaggcagtttcccaataaagaagttctgatcaaacaccagcagctgtcagacctgcacaagcaaaacctggaaatccaccggaagataaaacagtctgagcaggagctagcctatctggaaaggagagaacgagagggaaagtttaaaggaagaggaaatgatcgcagggaaaagctccagtcttttgactctccagaaaggaaacggattaagtactccagggaaactgacagtgatcgtaaacttgttgataaagaagatatcgacactagcagcaaaggaggctgtgtccaacaggctactggctggaggaaagggacaggcctgggatatggccatcctggattggcttcatcagaggaggctgaaggccggatgaggggccccagtgttggagcctcaggaagaaccagcaaaagacagtccaacgagacttaccgagatgctgttcgaagagtcatgtttgctcgatataaagaactcgattaagaaaggagacaagttccatgggatacaacctccctcttgttttgtttgtctctccttttcttttgttactgttcttgctgctagaacttttttaaataaactttttttcaatgtg

SEQ ID NO: 241340 - DNA, 1258 bp, Homo Sapiens
gagaaaacacattacaaaatgccccaagaggtgaggcaaacttgtgggggcacagagcacgcaagaaccagcctgacaaaaatcctaagctgctggctgtttagggagagtacaaagactgttctaaaggaaagccactgtgtgggggtttcaggggagacagtgacgggtctgcccagtgcatagcaatcccagctgggaactgaggaaggacaggggtaggggaagaggggcagaggcatttgctaagctcctgacagaaaccattacagatcagcctatcacattctcttcactacaataacaccaatataaatgaaagattctttaaaatagaacacaaaatggacaccaaaagaaagcaagagttttcaaaacaacagctttgtttgaaatgacttttgttttgttttatttttcatggggctttgtctgtttcttgccatgagtagcaaaccagtgtacaaaaatgtcacagacgagagcaacaagcgactaggttttcctgagcccaaatcagctcactctatatacacaaaaggagggctgcctccctgtcactgactctacccgccacaaagcgggcaggatgggcagtggggggagctccttcccagcctggggccttgccaaggagcccacaagggcctgcaggagaccctccataatcagcgtcagtgtcttgtctaacagcatcacacatggtccttttttcctcctcccctacctccccttcagtagaaaccagtaagaaaatcctcttcaggaggggacagaggactctgggtcaacatctacaaatccaaggaagtctttttggcagagggaaaaatggcccttctgccactccctgagccacctagcttacccccagggcactgccctgccccaataccagtgcacagagacctgctgacaacttgctctctgtggggagctgtgcccacttcataggacactgaattaccaatgatcacaaatataaaaacctcaacagaggctacagcaaaaggggtgatctgacagctagactgaggtactgtacggtaaagttcgccgatcaccctggttagcccggcgaccctgcaagcagcttctatgaatgcgatgaagtttgaggagagagagagaaagagattgctgacttggggagactgagtctgtggcttcagaaccctgcatgccttcacaggctgacagaggaacatgttactgttgtgcctctgggaggaagatgggccaaggatcatctttggtc

SEQ ID NO: 241341 - DNA, 1190 bp, Homo Sapiens
ttggcgtcaccggagcccactggagaagccccacaacggcctcctcttcccccagcacggggactatcagtacggccgcaacaacatcttaacagaccacttccaatacagccggcagagctacccaaactcgtacagtttgaaccgctatgatgtgtagagtccaaaggacaggaccagactgttggtgactccttccccggcccccacagcagtatcagaaacttctgacaatcagtgaatgtacaacccagccgaggggacggtgcataactctccatcagaagccctggggttcctggccccccgtgagccgcaggaggatgcgttgcctgcagtgcagacggccgtgagctctgggcaaacctaaacagagaccagtgtctcatgctctttcttcctggagtctgtcatctgagggccgtgtccctgcggagatcttggccacgttgtacctttccatgtggaattattccccaagcagtgtagctcagagcacttgtgtctgcattccagataacattcaggacctgtgtgaaaagctggggtcactgtggctgtagaccatgaactggcagtgggggtgtccagggcggtgcttgagaacgtcagactggctagtttaattccctggcgcagatacgcataggaccaacagggtcaccaagcagacagggagcccgcgagaatcattcaaaacatccccagccacagagatggatccagtttcctggtcatccccttatcagttcacaagttcctggcaaatgttccaaagcaaaaagcgattgcaattagcatccagttcctgcagcctggtgctctgccctgcacgtcaggttggcatccgcccggatccatatggaaggaaacttctctcttctcctttgcctcctcttccctcaccagaacattgcgcttctcttggggtggtgagaaggatcttcgagaaatcgtgttcagtattgcaagctctatttctgtggctcatgtcttgtgatatgcatcttcacctcttctgtgatgacttggtatgtagtttggtacatcttgattttcggaggatcttgcatttttctagggaatattttgtagttgtgtgtgtgtgttttggcctttggtccccattatgggatgcattaggactggcctatgcatcaaaaatctttttgttttgtaacgttttaaaa

SEQ ID NO: 241342 - DNA, 1227 bp, Homo Sapiens
ttggttcaaaataaacagagagctcttaacaaagacagtgctacaacaagtaattgaagatggctcaaaatatggattaaaaagtgaacttttctctggacttccccagaagaagattgtggttgaattcagttcacctaatgttgccaaaaaatttcatgttggacatttgcgttctaccatcataggaaattttatagcaaatctcaaagaagctttaggacatcaagtaataagaataaattaccttggcgattggggcatgcagtttggtcttctgggaactggcttccagctgtttggctatgaggaaaaactgcagtccaatcctctacagcatctctttgaagtttatgtacaagttaataaagaagcagcagatgataaaagtgtagcaaaagcagcacaggagttcttccaacgattggaactgggcgatgtgcaagcactttcactgtggcaaaaatttcgggacttgagcattgaagagtacattcgggtttacaagcgtctgggagtatattttgatgaatattcaggagaatcattttatcgtgaaaaatctcaagaggtcttaaagttgctggagagtaaaggactcctactgaaaacaataaaaggaacggctgtagtagatctctctgggaatggcgacccctcctcaatttgtactgtaatgcgaagtgatgggacttctctctatgcaaccagagatcttgcagctgctatagatcgaatggacaagtataattttgatacaatgatatatgtgacagataaaggacaaaaaaagcattttcagcaagtattccaaatgctgaagatcatgggatatgactgggcagaaaggtgccagcacgtgccctttggagtagtacagggaatgaagactcgaagaggagatgtcactttcctggaagatgttttaaatgagattcaattaaggatgctacagaacatggcttcaattaagacaactaaagaactcaagaacccacaagagactgcagagagggtcgggctcgcagcactcattattcaggacttcaaaggtttactcttatctgactacagttcagctgggatcgtgttttccagagtcgcgggggacacaggagtcttcctacagtacacacacgcccgcctccacagtttgggaagagacttttggatgtgggtacctgaatgacttcacactgcttgtttacaggagccacagtctgtttc

SEQ ID NO: 241343 - DNA, 2376 bp, Homo Sapiens
actttgtacaaaaaagttggatagtaggtcgattcacatcctcgtgctcctggccaccctcccctgtgcctcagtgacatgtagatgactgactgccaatacttgtcaccattccctggaagcagctacctaggggaaacaagatgtagtgctattgccgataacaagtaagattttccacactacagctgggtgtttctcttttctaaagtgaggccagtgttatttcccgggagtgttcagtcttgaccctagtcactgattttttctagttgttaatagagtggttggcttttaaggttcagagactgtggcttggcacctgcgcccaggctttgtgggcctttgccccttagaaagtagctgtaggcaaagatttgtgattttccaattacagtctcagctctagttttagtatctctaattctttggttcccttctcttccctgaaatatattagcacctgccagccaggccctcattttgcccagccagtgtgggcagatcccaccgtggagacatctgtagtgtgtatgtccttgtaacactctgttttcagggactacaacctttttccttctgtgaccagccccggattcaggctgtactaataccaggtatattgtggaatttagtataaaggccaatctgtcctgaagtccatctaatgtgatgaatcactgaaagtctcagaaagacctggttagtgtatgttctcatttaccacaggcctaccagccctgggcacagcagcttcatggcaagacataaaatgacactcaaaatccttcagatctggaaaccggctcagtattaaccctacctttggttgtcctgccctacctgctctgttagtttcttgttgcttgaactgtcttctgtcttatttcccttcctttctgtgttcctcttcacctctcttgttcccctccccgctgctctgtagtcatgttggtcctttcaggcacctctgtggcatagctcccctttggtaagttttcttaattgtcatagattaactgagtttcctggatgctaatttcacactttcggttggaggagatctccattgttcctacccctccgggccaaatgggccccaggtttccaaggaaggagcaatctgtgactcctaaaatgggttggggccctgccagagttaaagcagtgactggagggtggactggggggttgcagcatctttagacctagatctgtctaactctggggaggcacattgacatttccattacacacagcactgctgcggtgccagggacctagcgcagggcttttggtaatccataaaatggattctgagactgcgacggcaaggctgtcctgtcccccaggcacccaaggatcctgccagacagcacactttggaggaaggtctgcagggagcagctgagccatttgttcttgaactctgggaggcagaagtccccgcacccatcatgcgtggactgataggacatcttttcgtggtgtgcaccagtgctttccacacttgacagtggttggctttgatgaaccctcatgctgcaccttcagagccagtcctctagtttggaataaaaattgcagaggtggtttttgggtctttaccacctgcggctggtggacagcagccagtgtgtctggacacccaggggcattgagactgcatgttgtcacatgaccacttctcttcacacatctgctttcagtgcctggtgaaaaatagaccttggcctaacagtgtgactctctccaccgcctcagtgtagggaagggtccaggccagggaaggagcaccctctagtggaggcgggggtgaattcttaggtcgagctgatgcaagaaactccggtagccagcctctgtgaccttgtacatgagtttggtgtgcctattgtgatttaaaacaggtgggttatcaagaggaacttgagatctctttattacatggacatttacttcagggggaccactgtaagaaaagccaaactccaagaccaagtaagttagaggagtcttgattttttagacttcactgcggagttctgtacaccctttgccctgatgaatttgaatgggtttgatttgcaaatttggatttacacccattgttttggaagcacatcagctgaataaagttgaggtttattttatttagaaaatcacattttgttaaagaattcgatattcatttttataactaatggcgccctttttttatgtttctaggccagagattctcaaacactggctccatggccaggggctgggctggctgcttcagaagcagtgggggaagcttttaaattacatatccctggggcctaccccgaatcgaaattaaacccttttttaatcttcaagggaatttatttt

SEQ ID NO: 241344 - DNA, 2121 bp, Homo Sapiens
  misc_feature (254)..(291): n is a, c, g, or t
  misc_feature (1492)..(1528): n is a, c, g, or t
  misc_feature (1558)..(1613): n is a, c, g, or t
  misc_feature (1646)..(1672): n is a, c, g, or t
tttctgaaagtaattagtgtttaagtttccccagtcaaaaatcatctatactaattctttacaattcccattttttatgctacttgccatttgtaaaatctctccttcattttaacacttcttttaagagagttatattatcccataaagtccagtcaaactccttcaccttgttccttgtcagttcatgttctcaagggaaaatgcaataggaaagagaatagtttgtacaattctgatgctttgggtcctcnnnnnnnnnnnnnnnnnnnnnnnnnnnnnnnnnnnnnntcttggcctggcatttaaagtttccaaagcttgaccacaagctacttttccaactatcgccccatcactcccaactccaatttttcatttcaggcaggccaatttagttacccaacaagcttttctcaccttccaataacattgttcatgaaccattcctaccaatccaattctacccactcaccaaggctcatctgagttttcttcttccatgaagccttttccaatccaatcattccagtctagtgactactcttcaccaccctagagcacatattgtctatagaaatcatatgccactgacacactgccttatattgcttatctttcatcctcctgcctttctgactaaaccacaagtttctctaagcagggctgtacttcattgttttctcttacagaacctagtattagtctatgaacaaggtagaaatcggtattaacaaagtaataagtaaaaaacaacaaagttttctacatagcactacctatagattggtataacaatctgaatactatttccctaattaggtccccttcccaaaggttttttaaaacactattaacagaaatgaaaatattctggtaaatcataggttatcagtatacaaaataaatttagaaaaatatatggatatttgtcacacctaccaaagctaaacgtacatatattctatgaaataacaattccactcccaggtatacaccaatagaaatgagtgcttatgtctactgaaagacatgtgcaagaatgttcacagcagcttgatttgcagtagcccaaagctgaaaacaccaaatagccatgaatagcagaaatggataaactgtggtatactcgcaggctggaatactatacagcattaaaaaaccaacaaagtactgatatatacaactacctggatgtttaatacacttaaggctgactgaaagtggtcaaacacaagggcgcacagtgttcaatcacatttataggaagtcatcaaacaggtaaaagtcacaaatggaaacagatgtcaggaaaatggttacacagggatgagggtctaggtgatggtgagggtactgacagggagggagcctcgcagggtgctaaaaattgtctgtatcttgatctaggtggtggctacaggggtgtatacgtatgcaaaaatttattgagatttatgtactttaaaattatttatgagaagtattcctnnnnnnnnnnnnnnnnnnnnnnnnnnnnnnnnnnnnngtagagaatccctcaaatatagtttattgnnnnnnnnnnnnnnnnnnnnnnnnnnnnnnnnnnnnnnnnnnnnnnnnnnnnnnnnagttaaaggcagatttaatactataaccagtgnnnnnnnnnnnnnnnnnnnnnnnnnnngacaatatttgactacgaaaatggctgaagatatcagatgcttcccttttgacttggggtatgcttccttttcagatgatctactcctataaatgtactttccagacctaaatacaagctttaacacttattagctgagtaaccttgcgcaaattaacttctcttgacctgtttttcctcatcagaaaaattttaataatgcctattttataagattattgagagatgtaaatgacgtaacacttgtaaatttcttaaagcaatgtctaccacacagtaaaaactcaatgttaaatatcaccaaatagctgcactcttacaatagacaagtaaatatatcatattcataaatcatactatctgatgtcagtaataaacctctgaacatgtcccctctgagatgattaaaatcaaaagtaataagagttaccttcactatctgatcccaa

SEQ ID NO: 241345 - DNA, 886 bp, Homo Sapiens
ttgtcttgaagctgaaaagaagcaggacatgaaatagcagtttttcatcattctattctgttttttaatatcattttcttgaattattttgaccaaaattttaacattttacaaaattccttgacacaaatgcaatttacatgcacaaatgcaatccctggcctgctccctgcagcaaatcctctacagaggagagcaaggctgcctcctgtgttaaatttcaggagcatgctcttcatgtttcaaaagaagggagtgaatttaaaagtttaattctagctttacaagaagtcaattagtggtgacaatcacggatattctggtaggttatggcaagaggctggcacgagcatgctcggaggaattcctattctccgcagggtggctgaagccagtgcatgatggcccgactgctccaaggagacatcagccctgcccaggagtgcttggtgatgagcactggagaagggcaaatgacttctcttgaaaagactgagatccacacagcagagaaggtgaatgaacaagcagctcacctggccacaccaccgtaatccaaaccttcttccccacggaatttcaccatcagccgttttttcaagtctttcggtcgcatcttcattatctggcggtaagactcctgaagagcaacatcacagtttcagagagaagaacattcttattcttaaagttatgaaaggtcattgataatggagcccggttaagaacacgcatccattccaattcaagttttatctggctcctcatcagaatgtttcttcggcatctagtatattccatcatcttttttctcagtttctccctctgagacaacaacaaaacaaacacgatgccaggaaacactaaccttcagggaaacacccaa

SEQ ID NO: 241346 - DNA, 1565 bp, Homo Sapiens
  misc_feature (547)..(566): n is a, c, g, or t
ttgggcttctttcttcacattaaaacttttttccttcctctcttcttcatctcattatcctgattgactctgattaatagaaccatttttactttgctttgagggagatttttgatttaatggggaattttaaggtgtcatggaaatacagattctttgttttggccactgaatggactctctcttcagtgggattatcaaggaacttcagatcagggaaatctccacttcgggaccttctatctgcctcccaactcctcaaggtcacctatagaagcgagctaccaaaagacgtctcctaagcattttggtggcctagtgactcagggcagagtggccagcacacctctcatccgcccctcctgctccatcactgctgagcctctccccatctagaatgttggaactggagcatcataaagatagcaagctaccttccaaggccgagccagcccagagaggagcatgtcttcctttacctccccctaaggagatactacatgggagggggacacagaaaaagggaaggaaattggctagtctggcnnnnnnnnnnnnnnnnnnnnaaaggcaaagattgacattattgaaggaaaggggatgaggacaactgtgaactcacagtgagccctgtggaaagaagagacagacagagtgtgggtttgttcggaggcctctgctgtcaatggattccaggagcaaggccatttgtcgcgctttccaaatttcttaggcatttattttgataagtttatagccatcatgtttctaagagacttggagacaccagcaaactgctagaactcaaactcttcaattactcaaagaaggagccatttcagttaactcaagtgaatgaaagagttttggaatctgctgtgggtccttccctgttgaccatttggtaacttataatctgacaaaaactcttgagctgcaacaggccttgccagagggctcaggatgggaaaggaagaaggggataggaaaagaagaggtaattttacatttcccctttaaagtaaattttagccaactcatcattctgaaatgtccctataaagaatgagtcgaactagaccagaagccagcctactccttcttacatagcttctccaacaggggtagcaatgacctgtccacttcaaacacagataaggcctgccatcctcattggttaaaggcacacgtgagactttcagtgggctctgctgagaaggaaggcagcccaggagtcaggtatgcaggcattgcattgtcagtgtctgctctcagagtttacacattcaattgcttccaagggtgaatctcctgctctgtgaatgctatcagaccccaaaggccaaccttgggctgggtttatgtacgtttttccgaagcactgatgatcaaaattgaagacacattcagaggtttgattggttgagattaactggtgtggtggttggtgtatgtatgttttatttttatgtctttgtatgtagttttacataatgcaaattgtgctttttgatggacaagacctcataactgtgattaatatcaataaaaaggggatgttgtgg

SEQ ID NO: 241347 - DNA, 1499 bp, Homo Sapiens
  misc_feature (598)..(612): n is a, c, g, or t
  misc_feature (893)..(907): n is a, c, g, or t
tttacaaaatagaaaccgctgagagagaagccagcaaaattaatttatttagccaggaggaagaggtcagtttagtcaatgaattattcagggatcaaaaatctaccttagatagacaggtgcatttctctctgcacacacatgtgactgaggcatggctttgtccctgagaattttcatgcctcaggaatgatagtctgtcttcttagaggtggaatgacaaagtgaatggaagatgaaattgtatcccagcggatgaaataggactttgttctgcctacagactggttggttgtttgttctgacatgtttagccagagatgagaagaattctactgggaaaatccagatttaaactacttaaagcagctccctaaactactataaaatattttttttaaactgccaagaaatcattttttcatttcaatgtgatatttatatagaaaatgatttttatccaatgctgaaggtgtagtgaacatagaacagttgcaagatttgttttattgagcaacgtctttaaagatacaagaaacaggccatacactacaatgcaatgtgactgaaacagtatgtttaagtttcttttgccacnnnnnnnnnnnnnnntaaatacaaggaacactgccttttcatatatatttgattatggcacatgcacattttttatcacatcttaacttaaaatactcaaattttcttttcagcttttatcagggaactgcagtatgtatctgcatttttaaaaagtgcttattcctgtgtagtgaatacaaagcacacaaaatgaaattttttaagcacagagggttacattgagaaggcagccttactatttaggcacattacagtaattaaggtaactgtactgcagagatcacattcttcannnnnnnnnnnnnnncagcaaatcaacaggcatatgtttccatccagtagctgaagaaccactccatcacaatgtcttctgtttcacagaataggaaacttttataatggtgtttcctttttatagttgaagctagggtcagaaccttcaatctgaagcttcagagcttgtttaaggcttaattctgtctctgaggaagggtatccctccaacacttcctgatgccctctatcttgcattgttcgtgggactgaaaccctaccaagaaaaacctggttgctctgaagatgataatttggatttgtcattattccatttctcttcttctgttccccactttgttggtgaataagaaactgctgttgagatcgaccaatttcctgctgagctgaaggtatcataattttgcattgagattctgctggcatttgtttaggtggtgcagcagtcccggatttggctataggtcctcttctatcaaactgagtcatttcatattctaaaacctttggctgtgaagaattactttgtttcgcttttttcccagctgatccagacttggcagaattttctgatttcccccctttacttgctttagttgacccaa

SEQ ID NO: 241348 - DNA, 937 bp, Homo Sapiens
gatttttgagtaatatcatacaagggataaaataaaacttttacaatgtgaaattcaatgtacatttttggctatttacatacctcaaaccaagggaaaaataaaaagaaagcatttgtttgcaactacatttgctgagaagtgtaaatggaggacattaagcaaaacaaatatttgcatagccaaaacaatattgagaaaagtatttacttctgttttttaagtatcaaactatttttggtgagaattccagtgagggtgggggtgaaaacaaagaacaaaaattattggctgtactttgcagtacgcactgatttcaggtcatttttccttccaaaaccttttcttagaaacattcagatttttatttcattactgtatttttatcactttccttattataaactcatgatatttagggaatagacacagacggaatgttataaaaatgttataagcacatgccatcatagttgtgtagtggcaacagctgatttataaaatttaaagattttaatttcaaaaatatctattaaggagttttatatttggaggacaatttttactttttaatggagcagaagccattttcatttatagtattaaatcccccacagaaacaaataagcaaggcagggcatctccagcacccatcctatcatccttatcctaactcaaagtcatttatgttctattccaaaacataatttatataaaaacatcccgaggaatacttacttttgaaaatcgtatttttccaataggttctcttcctaccaattgcttcaagtgtatatagtatggatatgaaaacagttagctctttgaaaaacataaatcccttatgcaatgtcatatcttcgccctttggacacaaggtgcaattttgtaaaaacaatccaacttttttgtacaaagttggctattatgaaaaagc

SEQ ID NO: 241349 - DNA, 2541 bp, Homo Sapiens
  misc_feature (2247)..(2261): n is a, c, g, or t
ttagaaacattcagatttttatttcattactgtatttttatcactttccatattataaactcatgatatttagggaatagacacagacggaatgttataaaaatgttataagcacatgccatcatagttgtgtagtggcaacagctgatttataaaatttaaaagattttaatttcaaaaatatctattaaggagttttatatttggaggacaatttttactttttaatggagcagaagccattttcatttatagtattaaatcccccacagaaacaaataagcaaggcagggcatctccagcacccatcctatcatccttatcctaactcaaagtcatttatgttctattccaaaacataatttatataaaaacatcccgaggaatacttacttttgaaaatcgtatttttccaataggttctcttcctaccaattgcttcaagtgtatatagtatggatatgaaaacagttagctctttgaaaaacataaatcccttatgcaatgtcatatcttcgccctttggacacaaggtgcaattttgtaaaaacaataaaattaaataaatacaatttcaataattcaaagttaatagaaaaactggcagctttcagggttctctttctaaagaaaattacatgtaatagaaattagagcttcatcctctacagtaatgtaaatgtactgtatttgagatatgagtaaagttggttctaataatagtatgtgttcatatttattaatagactcattaacacttttaaggctactttgcaagagtcccattaattttatttaataaatgtcccatagggacaagaattcaatacttgaaacattcacatttgagttattaatattgccatgtcaccttaatatcaattgaacttatcaacttatctcgtagtcctcactatgacttatagatgacagacaaaatgagttttgctgactttaaaaaataaaagcaagaaaagccttacaataagattcaagtgaaacatttatcataattatacatttctatttccacgaacaatgtatcacatgtgtccttcatatatgaagatgacattactgacctttgttattaggacatattctaaagattttgttctagaagtagcaatggttttgtgctgaatctccaaattctctttcctcattcctcatcaacagtacatgaaaagaacagaatttctgggttctataagattaacaggcccattctaagatcaaatccacaaccttggcttctaaactgttatgacaacttttccagacatataaacgacccatctaagctacagctccactgatttaagagtaaggagactaaggctgtgggacacatgctcatttgaaccaattttaccttccttgtcatgaatttctctcttaaccctggcatccagccctcctgcatgcaattgtacaaagaagaaaacaggaaagagtatgaggatagaaaagtgcaaatccatcactattaagtaacaataaaaagtacacatgtgctatgattgacaggggagtggtgtcatctgtgaagggcagcacattttatattcatccagaatattcatccaaccaaaccattaaaattaatccaattgattttgagtggggctattttggtcatgcagcaatttacaaaatagaaaccgctgagagagaagccagcaaaattaatttatttagccaggaggaagaggtcagtttagtcaatgaattattcagggatcaaaaatctaccttagatagacaggtgcatttctctctgcacacacatgtgactgaggcatggctttgtccctgagaattttcatgcctcaggaatgatagtctgtcttcttagaggtggaatgacaaagtgaatggaagatgaaattgtatcccagcggatgaaataggactttgttctgcctacagactggttggttgtttgttctgacatgtttagccagagatgagaagaattctactgggaaaatccagatttaaactacttaaagcagctccctaaactactataaaatattttttttaaactgccaagaaatcattttttcatttcaatgtgatatttatatagaaaatgatttttatccaatgctgaaggtgtagtgaacatagaacagttgcaagatttgttttattgagcaacgtctttaaagatacaagaaacaggccatacactacaatgcaatgtgactgaaacagtatgtttaagtttcttttgccacnnnnnnnnnnnnnnntaaatacaaggaacactgccttttcatatatatttgattatggcacatgcacattttttatcacatcttaacttaaaatactcaaattttcttttcagcttttatcagggaactgcagtatgtatctgcatttttaaaaagtgcttattcctgtgtagtgaatacaaagcacacaaaatgaaattttttaagcacagagggttacattgagaaggcagccttactatttaggcacattacagtaattaaggtaactgtactgcagagatcacattcttca

SEQ ID NO: 241350 - DNA, 1352 bp, Homo Sapiens
  misc_feature (938)..(947): n is a, c, g, or t
  misc_feature (1180)..(1189): n is a, c, g, or t
atagccaactttgtacaaaaaagttggagaaaatgctaacagtggttactatgaagctcaccctgtgactaatggcatagaggagcctttggaagaatcctctcatgaacctgaacctgagccagaatctgaaacaaagactgaagagctgaaaccacaagtggaggagaagaacttagaagaactagaggagaaatctactactcctcctccggcagaacctgtttctctgccacaagaaccaccaaagccaagagtcgaagctaaaccagaagttcaatctcagccacctcgtgtgcgtgaacaacgacctagagaacgacctggttttcctcctagaggaccaagaccaggcagaggagatatggaacagaatgactctgacaaccgtagaataattcgctatccagatagtcatcaactttttgttggtaacttgccacatgatattgatgaaaatgagctaaaggaattcttcatgagttttggaaacgttgtggaacttcgcatcaataccaagggtgttgggggaaagcttccaaattttggttttgtggtttttgatgactctgaaccagttcagagaatcttaattgcaaaaccgattatgtttcgaggggaagtacgtttaaatgtggaagagaaaaaaacaagagctgcaagagagcgagaaaccagaggtggtggtgatgatcgcagggatattaggcgcaatgatcgaggtcccggtggtccacgtggaattgtgggtggtggaatgatgcgtgatcgtgatggaagaggacctcctccaaggggtggcatggcacagaaacttggctctggaagaggaaccgggcaaatggagggccgcttcacaggacagcgtcgctgaagctccactgttggcaaagtcttggcagtggtacattattcatcgtgtttgcattcttgttaannnnnnnnnnggctttggaatgtgacacagcctttttgatcatttctttgatgtgaaaagcatctttggttatcagttaaattgaggtggacattatttccccaatttcacaacaggattcacattgttaatttataaatctagacttggagaattaaggactgagaaatgaccatatcttaaactatctacgacaaagtgaacttaaaaggacatgcccactgaattcaggtcctttgagtnnnnnnnnnntcttctgctgcacattttgtttaagtgttactgtttctgcctgttaatgctgggaacacaaatagtgcaatttgtgcaattggagaatcttgccttttttcttggctccccccaaaaatacaaaccaacagaaacttgttatgcactcatcaaaatgtactaa

SEQ ID NO: 241351 - DNA, 667 bp, Homo Sapiens
  misc_feature (507)..(561): n is a, c, g, or t
cagacatcagtagtttattgtttgtttagtccaaaacacattcaatatggaaactcaaagaatactttccacctgaaacaattaaactagattctactagcatataatgcttaacacattacagcaataaagatggtaatccattgtcttctatacatactaaagccaagatggtaaagccaatttggttgcaatagtgtcataaggatagaatattaccatcaaaaaataaaacaaaatcagcaaataacagtaatggtagatgaatatttttactctgtttcactgaaaagaggacaaaatgttaaaactccacagtactgcaggtgaacaatcaccatgtaaacttctccatatgatgttttaatgttttattcatggtatgtaaagactgaagctgaatggctctttgctctacttttctattattacacttaacatttgtcattacttttggtgccagaacagttttcatggatggcagggcaatatcctgaattggaaatnnnnnnnnnnnnnnnnnnnnnnnnnnnnnnnnnnnnnnnnnnnnnnnnnnnnnnnggaaacagaaatacaagaaaatatgcttgggggaaaaaaaacattgacaataaaacaactgcttctttaaaagtggtattaataaagccaacttttttgtacaaag

SEQ ID NO: 241352 - DNA, 564 bp, Homo Sapiens
tgtacaaaaaagttggcttaatgtcaaccttcaaaaaagaaaaatctcacattcatactaaaaattccaactagactcaacaggaatgaagtctctatttgtaatggaaagtcccagcctcccgctgccgtccagtgcgtgtactgtacacatccacactcattctcactcagggttcccggaccggctgtcctgcctgcggaactgaggtaaactagctcaggtactgacactaggagggtctaccttacataaggtacaggtagaagcttgattgctaggcccaggcccacccagaccctccaatcctaacaggtatttaggcttgtttgttttttccctcctcagctgcacacgcagccaggtattaacgaggatcagagctgttctgaggggtgggaaggagcagccccgccaccactcactcaccctcagtcacatcggggagggggcaccagttacatttacatcacattatttataaaataagaattacatttcatataacatggccagaaggagctctagtcccccaggaaagctgccccaacttttttgtacaaa

SEQ ID NO: 241353 - DNA, 2700 bp, Homo Sapiens
  misc_feature (390)..(447): n is a, c, g, or t
  misc_feature (2438)..(2454): n is a, c, g, or t
  misc_feature (2485)..(2534): n is a, c, g, or t
tgccaaagtttaggcccggatggaaaggacagtaagttatcatatacaatttaagtttacaatacacagcatttctttaaatgatgtaacgcagtcgcaaaaagaagttaacaatactaacacgagaataatcaaatttttgttgttatccatgtgcagcaactaactgctttacaaaaaagcaaaataatacaatatatcatcacatatatttacagtatagtaaatatactttttttgtcaaattttacacaaactatttacaggtgaatatactgcattaaaaaaaattgtgtggctgacactaagaatgaatttttgcctaaatccattgcataacattgagtaagacatgcctcattatgcctgggagtcggggaaggatgtagnnnnnnnnnnnnnnnnnnnnnnnnnnnnnnnnnnnnnnnnnnnnnnnnnnnnnnnnnncctgggagggttgctggctggcactctgtctccccgactaggacacaggatagaagctgactgtttaggatgtgtcctgggcacctggctcagtcatgaacaggtgttgagtgaatggaagacagagctgtagccactttgccccaaatctactgaactgcatctccatctgggcaactaagggcatgcccctcggatgggagtactggcataacaggtagattatccaggacaaaaacatgactgagttcctggtttcctctttaacaagtcaggggaaacatctacaaaccgaaacgaattacttataatatttttaacagaacttatgtcaattacgcagaaatgggcaacttggtctaaacttcagaatttcttttatagattacaagtatgaagactaaaaaagtgttgcatttctcaagggacacatagtggtgagaggtttatctcatgtacattttagttacttggaaagctagattttcctcaaaagtcagaagttctttaaacaaggtaaattttaaaccttagttaagttttcaaactcctaggatgtacttactagtcaaaggtatttttgcatttcaaaggcggctcaattttgatttgtgccaatgctgatcatttcaggcggtatgaaatactacacccttggtaaacccgtttatggaaatatcagtatttttaacagtaaacctctggaagtttctttattttgatgggaagagcaaaatagcataacacccactatcatatgcaccaaaccaacaaacaaaaacaagaaaaacatcgaactaaagttatcaaaggcttacactgcctgctattccagggcctagaaactgtgaaacttaccccagaaacactgggttgtgggagagccaagaccatggtggcagcttggcatccttggcactgggttactgatctatttctaaacacagttctaatttcagcttttttatatagtcatagttgctctgtcattataaacattttcttctaatgcagcctctacaatagtttaaaaacaaaagtttagtaaattgcacctgtcttcagtatttccaacaattctatggtaaactcattaataatactaaggttttctttcctcttattttggcaaataattcttacttttcccaggactgtaaacaaatttaaaaaattaaattcttgttatttctgagtatcaaaaccaattttatttacattaacatattacattgttactgtgtggataaatgtgaaatatattattaaaatcagaacacttaaatgtaccattatttattgaattagctgtggaatttaatttactgaaatcctctaatgaaacagcactacaggaaactcccctctcccctaggtttattttttcccccctcaaagccattatatcttaacatataaagggaacctgggagtagagggattaatatctttttgtaataaatatggtttagttctaaattggaacatccagataccaatatgctcactgaagtcaaattattttgtaaactgcaggtaccacaaagaaattggatctgcattactatgaaaattccaatgccatgataatccataccaccagtatagcagcaattctaacagcccccctactgtcatactaatgcaggctgaccagtcttttcacagtgattaaatgcaattctagcatatataacctacatgttttcttaaagaggtttctgatttttttggagaggaggaggaagattaaaagacattcaaaatacatcttatcaaagaaatttataatatacaccatactctattcttggaaattatttaacaaaataaaaatatcagctaccctaaatgtcacgtaccattccattttgctatggagctaatgcaaacatctatgaaaattaccttctgggaacaattttcaacactttgttcactgattaccctgctcagaattagttaggaaagaagagggggaggggaaaaannnnnnnnnnnnnnnnnattactatacttagtatagttttggtttacnnnnnnnnnnnnnnnnnnnnnnnnnnnnnnnnnnnnnnnnnnnnnnnnnnataatcaactggagaaaaaaataaactagtttggatgactgagtttggataaggacttagaagccatagttttaattcagtaatgttaagatatatgtggtcgcacttattttcctgtaattattgctaatactcaagtgttagtatttcttaagaatccacccaa

SEQ ID NO: 241354 - DNA, 1473 bp, Homo Sapiens
ttggggctgcagcacctgggagaaggcagaccgtgtgagggggcctgtggccccagcgtgctgtggcctcggggagtgggaagtggaggcaggagccttccttacacttcgccatgagtttcctcatcgactccagcatcatgattacctcccagatactattttttggatttgggtggcttttcttcatgcgccaattgtttaaagactatgagatacgtcagtatgttgtacaggtgatcttctccgtgacgtttgcattttcttgcaccatgtttgagctcatcatctttgaaatcttaggagtattgaatagcagctcccgttattttcactggaaaatgaacctgtgtgtaattctgctgatcctggttttcatggtgcctttttacattggctattttattgtgagcaatatccgactactgcataaacaacgactgcttttttcctgtctcttatggctgacctttatgtatttcttctggaaactaggagatccctttcccattctcagcccaaaacatgggatcttatccatagaacagctcatcagccgggttgggtgattggagtgactctcatggctcttctttctggatttggtgctgtcaactgcccatacacttacatgtcttacttcctcaggaatgtgactgacacggatattctagccctggaacggcgactgctgcaaaccatggatatgatcataagcaaaaagaaaaggatggcaatggcacggagaacaatgttccagaagggggaagtgcataacaaaccatcaggtttctggggaatgataaaaagtgttaccacttcagcatcaggaagtgaaaatcttactcttattcaacaggaagtggatgctttggaagaattaagcaggcagctttttctggaaacagctgatctatatgctaccaaggagagaatagaatactccaaaaccttcaaggggaaatattttaattttcttggttactttttctctatttactgtgtttggaaaattttcatggctaccatcaatattgtttttgatcgagttgggaaaacggatcctgtcacaagaggcattgagatcactgtgaattatctgggaatccaatttgatgtgaagttttggtcccaacacatttccttcattcttgttggaataatcatcgtcacatccatcagaggattgctgatcactcttaccaagttcttttatgccatctctagcagtaagtcctccaatgtcattgtcctgctattagcacagataatgggcatgtactttgtctcctctgtgctgctgatccgaatgagtatgcctttagaataccgcaccataatcactgaagtccttggagaactgcagttcaacttctatcaccgttggtttgatgtgatcttcctgggtcagcgctctctctagcatactcttcctctatttggctcacaaacaggcaccagagaagcaaatgg

SEQ ID NO: 241355 - DNA, 447 bp, Homo Sapiens
tcctttgtgtcatttttgactgttcagttgctgagatttgcagataacctgaggcagggcttctctaacagctccaaagatgttgcttatgcaggaccacagacttgagtcatcagtaccttcagatggagattttgctagatttcagtgagaatttatttaccatgctaactccaggcagagtaaattagaaaaagaatccattatcaaatgtaatatttagacataattggcaccttacaaattgtattatctggtttcttgatgccttgtgcattggagatgagaatatatagtatcttctaaaatgtttacattttaaagcctactttttcctattatctttgcaacttggaggctaacatatgagtgaaaataattctcaggttgagttcttagttagttgttgctgctgttgttgttttgagatggagtctcaccctgtcg

SEQ ID NO: 241356 - DNA, 1157 bp, Homo Sapiens
ttggcaaaattatacttttctataaactacctgtttccttaaataaaatatgattgatgtttttgaaagcagaaccatcttagcctttgtgttattgggctttgcaaatagaaatacttttatttgacaaattatgaagaatgaataaaataactaacaatagacagactagccagatattaaactctttagtctgactcccacatctttataagtaggaatgtttataattttaaaaaattgtatatgaatagtgaaattgtcatcgagtcagtttagttaaattgacaataagttaacttcagggattcagattgatatgttctcattgagatatgcagaatctttgtgtttgcctttcccttttaggaagctgcagtaaaggaagatgaagaagaagtttcagataagggcagtgattctgaagaagaagaaaccaatagagattcccaaagtgagaaagatgatggtagtgacagagactctgatagagagcaagatgaaaaacaaaacaaagatgatgaagcagagtggcaagaattacaacaaagcatacagcgaaaagagagagctctattggaaaccaaatcaaaaataacacatcctgtgtatagcctttactttcctgaggaaaaacaagaatggtggtggctttacattgcagataggaaggagcagacattaatatccatgccatatcatgtgtgtacgctgaaagatacagaggaggtagagctgaagtttcctgcaccaggcaagcctggaaattatcagtatactgtgtttctgagatcagactcctatatgggtttggatcagattaaaccattgaagttggaagttcatgaggctaagcctgtgccagaaaatcacccacagtgggatacagcaatagagggggatgaagaccaggaggacagtgagggctttgaagatagctttgaggaagaagaggaggaagaagaagatgatgactaagcagtactctgaatggaccacagtgtttgcacatatttgcaattttttgctgttttggaagtgtatcataaaccagaaacagtacagaactgatgttgagggaggtgtagtttttttactcttgaaatgggtgcataatataactaggcagtggcggtgccttggtacaacctgaaaaa

SEQ ID NO: 241357 - DNA, 1747 bp, Homo Sapiens
aacgaaatatggcccacacactgaagatgtaaaccatataaatcaaaatcatagaacaattattcaatactcagaggcctacttaatatatacatatgaaatttcttacacacacacaataaatgcccacaaaaaccatcactgaagccgatcactgtacaaatatgaaaataaatctttatctttaacctcaattttatcttcagcaggagggttgtgcaacttgggtttatgcagatcacatcaagtgttaaataatcaaatgtcacatatgtcatataaagcagcaagtgaaaaaaataaattatgaaaatgcatgggctaaaagttaacagtgaaaaatatctccttatccaacattattttccacaatgaaattaaaatattttacaatgtatcaggatacatttaaaaaaggactgtagtataactatgattttaaaatatcttaaagaaaaacagggacaaggtgaataacttccatagtaatatgcaaatgtatcaagtctaagataaaaacattaaatatttttgttcttactgaaaatgtgctttaaatttgagaacaccttcatgaaatcaaaacgttggtaataatcatgaatctcccagcatacagagctttaagaagcttctctttaaacatgattgctaaccagagctctaagtctctaatttggattatgttaccaaaatatttatcagggctcaaatacttaaagatgattggttgaccatcaaaggcactggtgtaatctcatcaacgtggctatactgacaggacaatccagaggtaaagactatgaaaatacttctgtattatggtatactctttcacagattgtaaaacaaatataaagagacactttggagagaataaataaaggcaacacagtaacatataaactaacacagttttgtgcaactgcaccaaaacctaaacatgtgtcccatatatcagcatctacatatatctgatccaatgtcatcaaaagatgccactaagacaaacagccatggcaaaagttttcccatgccacataaataataccccccttattttgaaaaatttcccatatgcaagacattctttatgatcagaaatgtaatcttttctttttctggaaccaggaaacaggaattcatggcagagttactgaggatagatccaactttccagcaaaaatatcagatgtcttcaatagagagaaggcatgtttataaaagttaaatgatgttgtagctatttataatctttgcctgtaactatccggtcaattcccattttttcaaaaaactgatgcttgcggaatttaaggttctatcacaaacaccgtgaacagaaaaaagattgctacatggaattgtttcgattcaacaaaaataaatgtttttagcttatataatacaataaataacagctactttttaagttccttcagcaagctacttggggcctggacctagatgaagcaaggtaaattagaatcttttgttgtagcccaccctaggctcaagtgttgactcctttggctcttagaggcatctcagtggggaggtctgggaagcaatgcaggttctggaaggagagtaggcccaaccaggtcactggtgatgatgagccactagtcacattaaacaaaggaccctgactcacctttcctaatggtgattcctctttcaaggacattatttcaaaaccatgcatagaatttctttcattgattattacttaaggaagttccaa

SEQ ID NO: 241358 - DNA, 2087 bp, Homo Sapiens
  misc_feature (236)..(290): n is a, c, g, or t
  misc_feature (363)..(375): n is a, c, g, or t
ccttgaggacctccaaaggaaaaaaacagattctactaaggttctagctgaaatattatcaactccaaattgaagctgaagtattatcaactccaaataatgcttcgaggacctccaaaaaaaagagattctgcttagttgtagctgaagtattatcaactccaaacaatgcctggaggacctccacaggcaaaccactaatccccttggaggtcctcaaagcaccatttggagcnnnnnnnnnnnnnnnnnnnnnnnnnnnnnnnnnnnnnnnnnnnnnnnnnnnnnnnagtggttttgtgtgcaattaacagacacatgttctacccatacattgttttccaaaattattgtgtggctttnnnnnnnnnnnnncccacacaacaaattgcaaaaggcactgagataacatctgcttctagatcattgctaggctcgaaaaataaagcttgttctaccaggaatgacaagttagaacttagtatttgccaaagcagaaattatatagtgtcagttatttcaggcaaaccttattcggctctcatccccaactatctgtcagaacaattaaaagagatcaaaacagtccagcataactaggcttcattatataaggccattttgttctaagacactaataaaccaaaataagaaatattaaaatcaaaataaaagatattatttgagctattttcatacaaactgttggttccttatatcctcccttctataataaagggcatattttactgcaaagaaaattttactttatatatatcactagccataaatttttgaatgtcattaattacatgttgtctagtaccattaaccaaatagcgtaactattttatgtccacatttcacttctgtatttacaaacatatcagtaaagagttaacaatgagatgcgatcaaacatccatattatctgttttgtagacagcaatgtagatgattttgtaatcacctttcatcggagtgaccttatataaaaaataagtcaataatttagaggttctaagtctccaaaggagattttcaaatgtaaatatagaaatggttatagataatgagatttttaggaaacctctgccatgtctgcatcctgttaactgttatatcatcttttcttccagctgcgttcctttgcctgcaacaggggtcaagatgagttttgcctgacttctttgatgtcctgaactttccgtagtcctttttcttgaatttgttcattataaatatagcttggcatttgtttgatcttttcaactgtcttcactgcatcagtagttttattccatagttcttgcagatatttgacaggcttgttactatatttttcaaattcaaatccactgtaagctcattattagcagttgctttacagaatgctttagtccacctaaccttttgagaattgcacttcttttaaagtttttgtgacatttatgtttatacaatctgaacaccttgcaacagctgcagatgaacatcatgatgtggtcagggtagatgggtcccaaagaaactaacacttctcagtgctgagctcggatgggcctccactgaccaaacacggagcttgagaggaagtcaagaggtatcttggaattccacatgctgaccctgtcattcttgaaggaaaatgatgcataatttctgaataattcagaaagaacttaacaatctttccagttagtttttaaataacaattctgtttatcaaatttctgaattaacttttctgaattcacgggtttctaaaactggccttaagcaaaagtctgaaacctaggctgggaaccatgtaacccaggccaagaaggtactttaaagtgttttagagttgtttttcaacttagggggaaacaacagattccattaaatcccataaaggatttttttgtgtgtgaaaaagggcctgatgtaatctaggttagactcaggaggctttaacaagttttgtcttacgggtaaatggtggctattttcacagataacatcattactcccatcccttactatggtttatacaaaagaggctggagaataagtacatttttacagccgggtgtggtggctaa

SEQ ID NO: 241359 - DNA, 1380 bp, Homo Sapiens
  misc_feature (59)..(75): n is a, c, g, or t
  misc_feature (178)..(244): n is a, c, g, or t
  misc_feature (1170)..(1200): n is a, c, g, or t
ttggatccatttcttgtttcacaatgtttaaaagtgacagtaattcattttgtaaactnnnnnnnnnnnnnnnnnggttggaatagtgagcataataggtacaacctaacacattattatgtttattaactttgagacccagaaataaattcttttcttttcttgattcttgctcttnnnnnnnnnnnnnnnnnnnnnnnnnnnnnnnnnnnnnnnnnnnnnnnnnnnnnnnnnnnnnnnnnnnaattgtcaggattatgatcttgctgtttttcttcaatatgtatacaaggtgatgtgaaaagatgacttgggcagaggagtaagaacaagtaggcttgttcttctactttgcttcagaattcagttaatgccaaaagcgaagatcaagcccatgttgatgtctcgttgctcacctgcatttccagagagtgtgacactcatgcagtccctgagaaaaataaaatcagggacatacttctccttttagccttttaaaaattcaaaaacgtttagtccaagggaactttttatgctatcaggaaaggtttttgctgtttttgattctgattatcacagccaagtactttgttttatttctccctaattaataactacattccatgaggcctcttccaaccaaagaggccttttcttccaggagagtcccgcaggagatgctggtatgatgggcaccattggttaagtaaactacatgcaggaagaagtccttggggccagtctgccagctgagtcctggttttggatgaagagttaatgagatattgggccaggctcaatgctgtagttttaatgctaagaggttacgtttacttcacagagtacacctcttagtaacctctgacttaggcagctgcttaaagcaaattgcaaaactggcttgatttggaatgtttttattagaggaaaaaagaaagccatattatctggaaaaaaattcattttaaataccatcattcaacaaattatgttcagaaagtggtcagaacttaagcaagaaaagtaaagaaagaatgcagaattgtggagcaatgctttaggaaatatttctacctgaacacttgtactcttgaagtcacaacaaaataatgatgagcttttcacatcacctttatggtttcaatccctagctcaaagcttcctggaatnnnnnnnnnnnnnnnnnnnnnnnnnnnnnnngttaaaataaataaaacattcaatgtttttctccttttctctcttattacttctttccctttggcatttcatttgaaatgctttcctttggttgttggttttattctccccctacccctcccccttttcttataatcagaatataaacctgcaaagctctgctctgttttggttttgaaa

SEQ ID NO: 241360 - DNA, 1283 bp, Homo Sapiens
  misc_feature (95)..(125): n is a, c, g, or t
  misc_feature (348)..(408): n is a, c, g, or t
  misc_feature (434)..(461): n is a, c, g, or t
  misc_feature (965)..(992): n is a, c, g, or t
ttggagagagcctgtgctttgcctgccgccgcggctgggggagatctggcttttgcaacagcccaccccctttgagatcactctggcccggagtnnnnnnnnnnnnnnnnnnnnnnnnnnnnnnnaaagtttgcattgcaatccccctgccttcctctcctttctcccgatcaatgcatatttgcaaaaggattaagccacagatttaagcgccgggagcccatttctgccttgcaaaggagaccggactgaaaaacctaaagccagctctgatttcttttcgccaagtgggaaggtggtttatttttcttgctttttggagtcaacacccttccccaccagcccttnnnnnnnnnnnnnnnnnnnnnnnnnnnnnnnnnnnnnnnnnnnnnnnnnnnnnnnnnnnnnaccatcctctaaagaggcaaagggannnnnnnnnnnnnnnnnnnnnnnnnnnncccccttccctgtttatcctgaaaaggatttgaagacaagcttgaaggataaaaagccttggtgcttcccaggagccgagccgaggagcagaagaggaagagccgggggctgccgtagcctttggagatggacgagcagcccaggctgatgcattcccatgctggggtcgggatggccggacaccccggcctgtcccagcacttgcaggatggggccggagggaccgagggggagggcgggaggaagcaggacattggagacattttacagcaaattatgaccatcacagaccagagtttggatgaggcgcaggccagaaaacatgctttaaactgccacagaatgaagcctgccttgtttaatgtgttgtgtgaaatcaaagaaaaaacagttttgagtatccgaggagcccaggaggaggaacccacagacccccagctgatgcggctggacaacatgctgttagcggaaggcgtggcggggcctgagaagggcggagggtnnnnnnnnnnnnnnnnnnnnnnnnnnnnttctggaggggcaggttcagacaactcagtggagcattcagattacagagccaaactctcacagatcagacaaatctaccatacggagctggagaaatacgagcaggcctgcaacgagttcaccacccacgtgatgaatctcctgcgagagcaaagccggaccaggcccatctccccaaaggagattgagcggatggtcagcatcatccaccgcaagttcagctccatccagatgcagctcaagcagagcacgtgcgaggcggtgatgatcctgcgttcccgatttctgga

SEQ ID NO: 241361 - DNA, 1184 bp, Homo Sapiens
  misc_feature (998)..(1009): n is a, c, g, or t
tttgtacaaaaaagttgggtgatggactatagagggaggcgaaaaacaggggaagcctatgtgcaatttgaagaaccagaaatggccaaccaagccctgttgaaacacagggaagaaattggtaatcgatacatcgagatatttccaagcagaaggaatgaagttcgaacacatgtcggttcttataagggaaagaaaatcgcatcttttcctactgctaagtatataactgagccagaaatggtctttgaagaacatgaagtaaatgaggatattcaacccatgacagcttttgaaagtgagaaggaaatagaattgcctaaggaggtgccagaaaagcttccagaggctgctgattttggaactacgtcttctctgcattttgtccacatgagaggattacctttccaagccaatgcccaagacattataaacttttttgctccactcaagcctgttagaatcaccatggaatacagctccagtgggaaggccactggagaagctgatgtgcactttgagacccatgaggatgctgttgcagcgatgctcaaggatcggtcccacgttcatcataggtatattgaactgttcctgaattcatgtccaaaaggaaaataagactctaggggctccagataataagggtgaagcaagaagcatttcatttgcacatctttcttggacttgggatatacagttccagtttattagcagcaactgctagggaaatgattttggtgttttgggttaattgcttctaagaaaagtttcatagtggactgtttagaagaagaaatgaaagatccagtttgggattatgaaataaaccacaaattaaaatttttgtttaaactgtccaggatctgatttaaaaatatggtctttgttttatatgattaaatggtttgttttcatagatgatatgttactcattgtaaagaccacatatttttattcagcagtgttctttaaacgctttcatttaaaaagtaacnnnnnnnnnnnngcctgtgaattgagtgctctgatgtaaaacttctcatggagtgaaacagtgatttattttaccaaacattcaccaaagcaaagaaccggtttcagactctgaactggtatggtttggcagaatagtttaattttgctgtatttgattacttagaagataggaattttaaaatcaa

SEQ ID NO: 241362 - DNA, 2297 bp, Homo Sapiens
  misc_feature (978)..(986): n is a, c, g, or t
tttcttcagtgcaatttttaaagagaaacttaaatcctgttgtattctttcaacacaagcaatgatacttctcagagtctgctcaaaagctcagctctgtggactccgtgacaaaatgtacgcgtccactgccgaccctcttggtttctgaaaccaacctttcttcctgctctcctctttaagagcaaaccccaacatgtataaggtcacagcaagtggtagccaggaaaagctgtgggacccctcatttgagtcacatccatatggcatggagaaagaaaacctctctgccagaaggaactgaactctggaagtcttaaggaaggtcaccatgatcagcagataggaaagcattgccaagggctgtccctcaagagcttagttttcttagggagaccagaaagacatcagatcctgactgccctgttttgctcaagttctgaaatgagtggcatgatgaagagctggtggagctgagggaaagagtcaaccatgtggggtggggtagtgaggaaggtgtatgaggaaacaaactgggccctgacgaaacaggcggattggggaaggagaaagaaggaagggagagaaacctaaccaaagaaacatgggaagctggaaagtcgagggcacagccggaataaaggcacagatgggcaccccacaggaggggccttggccaggttgggatgcagagaaaaacaggcaggagggtgtcaatctatagcatcctgaaccccaaaaggtctgtaactggattctctaagccttgagaagttcacaccaaagcttcagaccagggaaaatattttggaaagatcagtctttccaagagtgagctcctttccaagaagctggacaggaaacccaataaatgtggatctgaaaaaacaaaatccaagagagaagcaaaatgggctgggggtgtgcaataagagaagcaaggaaaatggaaagactgtagctgaggatcttttattnnnnnnnnntggatgggactttggtgatgagagagaaaaagggcaaaagtctgcagttaggaatttaggtgaccgaagactgtcctagacagttgggagggacaggctgatggacagaagagagaaattcctttcaatgacaaccaagctgaactatttgataccagcagaactgggttctttagggattaagccaagacaaagacttgggaatcactcactccgaggatgaagaatgggttaatggctgaggagacagtcaaaggaatagagaggcctggctttgagggcctcttcaccaccagcacaagataaggcaaaggaccatttgtcagagacaccaagaaaggggaatttccatttggatggtcaatagtgtccagttctgccaaggacaagactaagctttgagaaaaagccatggatttggtgattggataactggtaacctttagaaaagtttagttgacagacagagaccgaagtgagttagtaaaagtcatgaagagaatgaatggcaacttaagggaagcaacatactggagaagttgagcagcgggatgaataacaaataggacagatgggaacagaaaaatctgggtgcatacgaaggtggatggaaaggagctggtacagatgggcacaaccagaaaacatgaggaggggaaaggaagggaaaaggaaggcaggcagggagagagacgtgaaatagccacagtcttaggggatgctagagaagcctagaagattcctcaggttggtgcaaagtattataagactaacgcatcagtacagagaatgacccaagaagggtaggagttcattccttaccttcataaagtaggctatccgccaagaatgaaaatgtcaactcaaagctatgggctgttttaagcaaggtggaagataatataagaagcatggtcctttcttcagacttactgccttgacagcacagaattcatcttatttccctcatctcccaagttatttgtatttccctgagatcagctcagaaacaactctctttaggctctctacaatgcggtagagcatgattagaagagataaaccttcaaacaatagtgttgtccaagacactaccctcacttatcccaggggaacccacggaatttcttcatttgtattaactcctgacatggcatggaagaagaatttttatcaaatacccttggcatcttatatcagattaaaggaccattaaatacactgaggtaaaattggcagagagtatagtttctattaataaatctaagtctattttgtctgttttaggcaacaaaggcaaaatggacccaa

SEQ ID NO: 241363 - DNA, 2289 bp, Homo Sapiens
ttttggtctagcttctcctcagattctgaagcatccttcaaggaattaccttcagtacatgttcctctgggttatcgttagagattttaggttcaacttcaaaaacagggtcaaaagggctaccactttcattggattcttcttccaaattttcaaaactgtctgaggaactgtcatcttcctttcccaaggttgagctttttgtcagcagtcttactagcattgactctggaatccttctcatcatgattttcaaatagccactcagcatcaaaatccatctcatgcttgactttatttaattctttcatgttaaaccccagcaacacgccaggcttgtacttttcacaatcacggacacacttcttccttttgttactaaaaagggaagcgatgtcactcttccataaccataaactggctgctagcttctcaatttctctcctggtgggatagggctgttgttgaaatactttgttagaaagcttttcctggcttcataggaatcatcttcatgacccttggggtctaaagctaaaacaacaggctcttcaggcttctcttcaaagaagctgggtgaatcactatcatcatctaactttcgttttttcagtaagggaaattccatttgctcgtaagtgcgcttcacaggtgccagacttggagactgattaagccgagagggtgcatttgtcttatcctggccattttgggtctttccaacgcccctgcagtgaactagatgcagagtgatagttgaggcggtcatgttgctggtatacacaccaaggcaatggatacatttgtaggtgagctttttctcaactggatgaaccgtctgaataacttggtgcctctctcgtaagtgatgtgcaagtgcatcagatatgggtccttttaggattgaaaagcaaagaggacaaagggttttcccaacatcttttttatagggcactgcagcttgaggtgaactttttacagggatatctgccttttcctgaacctttggctgtggctttggaggaactggaggattattttgggcatggtaagcaacagattcagctggggcatccctcagattgtatgtagttaccaggagatggatgttagtgtgactaccctgctgcaatgtcaaatcaaaactcaaagtagaatctgttttaggtcccatctcttcatcaatgtgaaccatccgcatgtgtgcggccatcttttccacatcattgaaagttgaacggcaatatggacaagacagaccatgaattaacatatggttgagcagagtatctgtgggtaaatagcgattacagtagaggcatttgctagtaaaattgtgtattttcataatgtagttggctactgctgggactttctcagctttatgttctttttcgaagtgcacactatagacattttcaggaaaaagctcattacagattgtacatattttccacttttgagttgaggaagtgttacctgggggagggcctgtggcagctgcagcaggtttggaactggactgacctaacactctggatgcctgtgactgagagagggaaggagactttaactggcccgatgagagagaagaggcattagcagactgcagggagtatcttgctggtgcctgggacctctgctctgacccaagcccataagaccttccgtttccacttggaagtaactgctttacagactgagattgttgaggaatggaaactggtgcgttgccacctagacccagtctcattgactgaccaacactgtaaccctggcctacagatttgactccatagttgttctgctgcagatgaacactggacatcatgttgactcctgtagaatttaagttaggctttggtattgagagtcgattcaccatctgctgtgatggtaaagaccggacatttccagaagcaagggaaccgatccttggtgggagtcccatgctcttcttgtcttgaggtttgggagcaattagcatcaagggtttggatcggggaaccactacatttgtgtgcccaatcatggcagtgacctgatagcctatacgttcatggtcttcgatgacatgctgtaccaaagcttcataggactttggcatgaaaaggcatcgcttgcagtgaatactactctcttctcgggcattcgagcctaaggggactgccccattgagtgatttttctcctgcctttgctatgtaaggtgctgccacatgctgaaaatgttccctgtaaatgtgcttcctaactatttcataaagaggatctcggtaagtgcacccaa

SEQ ID NO: 241364 - DNA, 1463 bp, Homo Sapiens
tatttacattcctttggaatattactacaaatacaatatacaatttaaaaaaacttatggggaaacacagcttatgtttttttctcctctttacaggcttctcagtatcattcgacttcaatggaaatttatatggacattttctgtacatatcttaaaaggcagagattacactgataaagcctaaagaatcctgcacaaatacaatacagaaaacagaaagtacagacgatgttatttggggtacaaatataaacaatacagtaccatttgagtaactgagcaacataatacccatactttatagaaataaaactgcaaacctggagaatgctctgacaaatattaaacattatatacacaatgaggtaaatgtaccttggtctcttgagaggtaatttaagtttaaagcaattgacattttgaagcatctccttaacatatgaagaaatatcaaacaccctattccgttggcacaacgtgaaaaaggggtatcaaaacatggttcatgatattcagttcacaaatcttgttaaaaaataaaaacaaattcactgaagttccttttaagttgtaataaacaggttgaatgttattaaccatatttttagaagtttacatttacaaacaagattgcataatgggattgaaaagtttaatgtactgacaatcatcttaatgtcctagaagtccagcactcttgagagggcccatgggtattccagtaatccaaaacagagacaagaagctgcagtacatgtccaaagataatccttagtatctcaaaatatctgagctggcattttctgccaaagtgttaacagaaccattatttggaatcactaccatttggagccagaacactgccatggtcaagaaacagttgacttacgattcttccagtgcaagaataaaaataagcttttgatgatgtgtctaatgggatagtgattttgttgtgcactctaacgatctctttgccatcttgttttaatctgacagttctcagacatagagaaaaaaggtaactcatgcatgtactacaaaatcgccaagtgaccacttacattttgtaataaaacctgaaatctgggattcttgatggccatggcactgtacaccaactcaaggcacttcttgagcactatcattattacagcagaattacaggctcagctcttcagaccttaccctgtcttataggcgatacaactggccactgtttctggcacaactccactgccacaggagccaccttgctgccatcccactcctcatccatggctgaagtcaaagcaggggcatcccaagcctcatctgctcaatctccaaacttggagacccctcccttccacctctaatgactgaaggaaatggaagtgggtcccacaacttccatcagccgttttactctaggtctccagagcagcggttcagtcaaacccaacttttttgtacaaagt

SEQ ID NO: 241365 - DNA, 1086 bp, Homo Sapiens
ttggctttctgagagttggctcaggcagacaagagctgctgtccttttaggaatatgttcaatgcaaagtaaaaaaatatgaattgtccccaatcccggtcatgcttttgccactttggcttctcctgtgaccccaccttgacggtggggcgtagacttgacaacatcccacagtggcacggagagaaggcccataccttctggttgcttcagacctgacaccgtccctcagtgatacgtacagccaaaaaggaccaactggcttctgtgcactagcctgtgattaacttgcttagtatggttctcagatcttgacagtatatttgaaactgtaaatatgtttgtgccttaaaaggagagaagaaagtgtagatagttaaaagactgcagctgctgaagttctgagccgggcaagtcgagagggctgttggacagctgcttgtgggcccggagtaatcaggcagccttcataggcggtcatgtgtgcatgtgagcacatgcgtatatgtgcgtctctctttctccctcacccccaggtgttgccatttctctgcttacccttcacctttggtgcagaggtttcttgaatatctgccccagtagtcagaagcaggttcttgatgtcatgtacttcctgtgtactctttatttctagcagagtgaggatgtgttttgcacgtcttgctatttgagcatgcacagctgcttgtcctgctctcttcaggaggccctggtgtcaggcaggtttgccagtgaagacttcttgggtagtttagatcccatgtcacctcagctgatattatggcaagtgatatcacctctcttcagcccctagtgctattctgtgttgaacacaattgatacttcaggtgcttttgatgtgaaaatcatgaaaagaggaacaggtggatgtatagcatttttattcatgccatctgttttcaaccaactatttttgaggaattatcatgggaaaagaccagggcttttcccaggaatatcccaaacttcggaaacaagttattctcttcactcccataactaatgctaagaaatgctgaaaatcaaagtaaaaaattaaagccc

SEQ ID NO: 241366 - DNA, 1030 bp, Homo Sapiens
ttggctggctgaggccgcgccagttggccgggcacggggctgctgtaaggccgaggttgcggcggaagcggagaccatgttccgagcggcggctccggggcagctccggcgggcggcctcattgctacgatttcagagtaccctggtaatagctgagcatgcaaatgattccctagcacccattactttaaataccattactgcagccacacgccttggaggtgaagtgtcctgcttagtagctggaaccaaatgtgacaaggtggcacaagatctctgtaaagtagcaggcatagcaaaagttctggtggctcagcatgatgtgtacaaaggcctacttccagaggaactgacaccattgattttggcaactcagaagcagttcaattacacacacatctgtgctggagcatctgccttcggaaagaaccttttgcccagagtagcagccaaacttgaggttgccccgatttctgacatcattgcaatcaagtcacctgacacatttgtgagaactatttatgcaggaaatgctctatgtacagtgaagtgtgatgagaaagtgaaagtgttttctgtccgtggaacatcctttgatgctgcagcaacaagtggcggtagtgccagttcagaaaaggcatcaagtacttcaccagtggaaatatcagagtggcttgaccagaaattaacaaaaagtgatcgaccagagctaacaggtgccaaagtggtggtatctggtggtcgaggcttgaagagtggagagaactttaagttgttatatgacttggcagatcaactacatgctgcagttggtgcttcccgtgctgctgttgatgctggctttgttcccaatgacatgcaagttggacagacgggaaaaatagtagcaccagaactttatattgctgttggaatatctggagccatccaacatttagctgggatgaaagacagcaagacaattgtggcaattaataaagacccagaagctccaattttccaagtggcagattatgggaatagttgcaga

SEQ ID NO: 241367 - DNA, 928 bp, Homo Sapiens
ttgggcctcagccgcctcgcacatttagtcttgccgggggtggtgtgattcccgaccaagatggcggccgtggggcgagtcggctccttcggttcttctccgccgggattatcctcgacttacactggcggccccttgggcaacgagatagcgtcgggcaacggtggcgccgcggcaggcgacgacgaggacgggcagaacctttggtcctgcatcctcagcgaggtctccacccgctcgcgctccaagctccctgcggggaagaacgtgctactgctgggtgaagatggagctggaaaaacaagcttaataagaaaaattcagggaatagaggagtataagaaaggaagaggattggaatatttgtacttaaatgtgcatgatgaagacagggatgatcaaacaagatgtaatgtttggatcttagatggagacctatatcacaaaggcctccttaaattttcactggatgccgtatctctgaaggatactctagttatgctggttgttgacatgtcaaagccttggactgctttggattctttacagaaatgggcaagtgttgttagagaacatgttgacaaactgaaaatccctcctgaagaaatgaaacaaatggaacaaaagttgattagagacttccaagaatatgtagagccaggagaagacttcccggcttctccccagagaagaaatactgcgtcacaagaagacaaagatgacagtgtagttttacctctgggtgcggatacacttacacataacttgggcattccagtactagtagtttgcacaaagtgtgatgccattagtgtattggagaaagaacatgactacagagatgaacattttgattttattcagtcacatatccggaagttttgtttacagtatggtgcagcacttatttacacttcagtaaaaaaaa

SEQ ID NO: 241368 - DNA, 857 bp, Homo Sapiens
actttgtacaaaaaagttggagcgctgtggcgccctggacgtggtcttcgtcatcgacagctccgagagcattgggtacaccaacttcacactggagaagaacttcgtcatcaacgtggtcaacaggctgggtgccatcgctaaggaccccaagtccgagacagggacgcgtgtgggcgtggtgcagtacagccacgagggcacctttgaggccatccagctggacgacgaacatatcgactccctgtcgagcttcaaggaggctgtcaagaacctcgagtggattgcaggtggcacctggacaccctcagccctcaagtttgcctacgaccgcctcatcaaggagagccggcgccagaagacacgtgtgtttgcggtagtcatcacggacgggcgccacgaccctcgggacgatgacctcaacttgcgggcgctgtgcgaccgcgacgtcacagtgacggccatcggcatcggggacatgttccacgagaagcacgagagtgaaaacctctactccatcgcctgcgacaagccacagcaggtgcgcaacatgacgctgttctccgacctggtcgctgagaagttcatcgatgacatggaggacgtcctctgcccggaccctcagatcgtgtgcccagaccttccctgccaaacagagctgtccgtggcacagtgcacgcagcggcccgtggacatcgtcttcctgctggacggctccgagcggctgggtgagcagaacttccacaaagcccggcgcttcgtggagcatgtggcgcggcggctgacgctggcccggagggacgacgaccctctcaacgcacgcgtggcgctgctgcagtttggtggccccggcgagc

SEQ ID NO: 241369 - DNA, 1579 bp, Homo Sapiens
  misc_feature (163)..(181): n is a, c, g, or t
catatctaaagtttaatttataaattaggcacagtaagagattaccaacagtaactaacaaaatagaacaattgtaacaatatatgtaataaaattatgtgaacgtatctctctcccaaaatatcttattgtcatgtagatcttagcaacctcagtatatgannnnnnnnnnnnnnnnnnnaagttgagaactttcaccttttcatttaaaaggaagcactttgtggcttctctttggcatatccgaatcaccagcatcactactcctgctctctggggccactgttaagcaaagtgaggactgcttgggcacaggcactgtgatgctgggatagttgatctgatcaccaagacggctactaagtcactagcagggtgggtggcgtatacagcgtggatgtgctggaccaagggatgactcacatccccggccggctggagccggacagcgagagatttcatcacgctactcagaagggcacaccatttgagacttaaaattctttatttctggaattttccatttaatatttttgaactgcagttgactgcaggtaacaaactgtggaaagcgaaaccatagatacgagcgggctactgcgttcaaaaggctcttcaactgttgtggatcctctgatgttctcggagatggtttaggtggttacatgccttcccgcactccttacattcgtaggatttcgccccactgtgcgttttctgatgttgtgtaagctgatggccgtgactaaagctcttcccacattctgtacacccatagggtttcaccccggtatgaattctctcatgtttcacgaggctcgatccataaatgaaagccttcccacactccttacatttatacggggtttcgcctgtgtggattctctcgtgctgagtgaggtgatagccacaattgaaggccttcccacattctgtgcacttgtacggcttctcgcccgtatgtatcctctcgtgcttaacgaggctcgaaccccagcgaaaggccttcccacactccttacattcgtgaggcttctcaccagtgtggatcttctgatgctgagtaaggtaattgactcgagtaaaggccttcccacattcttgacattcatagggtttctcacctgtgtgaattcttttatgctgaatgaggcttgaaccacaaataaaagccttcccacagtctttacactcgtaaggcttctccccactatgaattctcttgtgctgaataagtttatacacacggctaaaggtcttcccacagtctttgcattcgtagtctttctccccagtgtggaatctctggtgctgagtgagctcatcaccacgccgaaaggcctttccacagtctttacattcatagggtttttcaccagtatgaatcctcttatgaataacgaggcttgagccccatcgaaaagccttcccacagtctttacattcgtagggcttctccccagtatgaattttttgatgttgagtaagctgattgccccaacggaaggccttcttacattctttacattcataaggtttctcgccagtatggattttctgatgttgactaagttgccaa

SEQ ID NO: 241370 - DNA, 3209 bp, Homo Sapiens
  misc_feature (3118)..(3133): n is a, c, g, or t
gaactccaactttatggttacaaacgaaatttttatttaccggaatttaaatttcttcaaaaaagatacattccttccatttaatcaaagggtaaaaagccttataaacagaaataaagcctaaacatcacttatatttgaaactgaaagacaaacagcttcattaaaaatttatgaacacatagtgaaaatgtattttttacttaacccagttacaggaatgaggctgtttttaattttcttcactgccaacctcattttatccacagaacaaattttatttaaattaacagtagtaaaaatgtaaaacttaaattttgaacatgaaaatatgaaacaagaaaacaggaagtatcttcattatcaaacagattaacaaattctcagacagatattttctgaggcatagcaaaacacctacatcaaaagttgcattcatttaagaggtatcaatacattttcagtgctgagactatttgtagcacttacattatatacaaagcagcattatactactatggttcacatttgataaacacgaatttaagctttatgccacaatttcccaattcaacataaagctaacgcaatgacagttacccaatttcattctttttcttctgaaactgaataaggaaattatcatttaagcacatggaataatggccatgtctttttccttttaataacagtatattttaaaactcaaatacttcatatcatggaaatttgaccaagctgtacaaaggctcctaaatacagtacagtcaaaaagtttcctctttgcagactcaatttatagtcaatttagtacagataaatataggaaactacttcagattattggacaaataagaatttcagtgtgtcactacctataattaagtagcagcacaccacaaccacagcaagtaaacactaatctcctctactgcctttttggggtcttttccagtcacaggagctaatttacagggataccactgggtttcaaccaatctctgaaagttcctttattatgagttttgaaatttaactaatgcatcacctacaattctgttggctagtttttttcttactcttcactaattagttttaaatacaatatgtaatgttttcaaatttttataaacataggtgttgtactaaaatgattaatggcatttgaaatacaacaaatgggtaagatgttaaccaaaacaatgggattaagagtattttagaaagcgattttttgttaactagaaaagctacaggattcacaatgaatacagatacaatatttttaaccctgctcttttattacatcagtagtatagtaagtgcataaagtatagaagagaaagaaaatttcaggagagaaacttacaaaaaacttgaagtttgatgcgtcaaacacaaaatagtttaaaacagtttacagttcttataagcactatcataattttttctacccaaataattcaggtcttcattccatttcaaactgcaatccagaaatgaagattttcagtgtaaaaactgttcagagaaatctaattcattatgtaatacatcttattaatttcagttttcaagtattcaagtaatgcatacccaagtattttctgttacagcaacacatttacagactaagcctcaaacatggggaaaaattcatttaaaataattgatacacttttctgtccaacgacatcaaacccaagacatgacactggaatcacacaagtggtatataaaagttaaaaattttaaaataaggtggttcaatataaataatgtcttcttttcaaaaagaactgaaaacaggttatcttaatacataactaaattcccagtaaaaggacattctggaatctaatggactaaagaaaaaccagagcaaatcaattttgaaagatgaagctgctttaccacatacttaaaatgatttttcctctgtgcataataattactagcatttgtcttctgcataaagtcgcacaggttactgtcaacaagtttcctagcataaagcatcgctaactttgtctatcaactgaatgactgattgattaaaagcttaagtctgtatcactttggaatgcttattaaaaacaatttaaagcagaaaattgaaatgacagtattttcacttatattatgaagacagaaattcgtaaaatggtacagaaggcttctgtgtaatgtaaaaaagaaatatttgtataattttaaaagtggagggttctaacttttaattgagagtgggggaaactttttttctttaaatctggaagctgtagtaacatatttatgaagttaaatatttttagttcagcaaaaatggaaataattgtcattacaagattacttaagtcttttctgtcttttatgatcctatcatgatcaactttaaatttagagaagtcatttgagatatgcttaagttgaactaaagacttattatttgtctaatttctgtatatatggaaattagattcacattgggatatctaaaatttcaaggtttttttgtagaaaaaaattaacaaccctaaaaataggaaattattaaattacatttttaatttcctttagcttggaatcatgactcaaagaacggagctctattaatataacagtgtataaattcactgcttccaggaatctaacctcacaaaacctaacggctaactaaaaaataaagaaaagtcttattaagcactgagaggctaaataaatgagtactgacattaaccaaagccgacaaaccctatttccagttcctgtgatctcactgtgtagccacaactgttggctatttttactctaaaaccaacaagctgaatcatttccttacagaaaaatttctacaaaagggaagagaatgcaaaacaatacacagtctcatatgcaagatacagttcacactaatttacaaatttttatttacattttttatatacattccaggcagacctacttgatgagttttgtgctcatattgatctcagatgatcgtgtgtactgtatgatttactaccacatctctttgatttccagaaaatggtggtagcatggggttaggaggaaaagaaatcactggtcaggtgagatcatacaagtatgaaggggnnnnnnnnnnnnnnnnttgcggaatttggcttgttaaagcatccaggccactatggtctattgactaacattgaatatacatgaatgcccaa

SEQ ID NO: 241371 - DNA, 1246 bp, Homo Sapiens
  misc_feature (135)..(197): n is a, c, g, or t
  misc_feature (1044)..(1053): n is a, c, g, or t
cggggtaaaaacaaagaccgggacaaggaacgggaaaaggaccgggaaaagacaaggaaaaggacagagagagagaacgggaaaaagagcatgagaaggatcgagacaaagagaaggaaaaggaacaggacaaannnnnnnnnnnnnnnnnnnnnnnnnnnnnnnnnnnnnnnnnnnnnnnnnnnnnnnnnnnnnnntccagaacaccacccaggagttacaatgcatcgcgaagatctcgtagttccagcagggaaaggcgtaggaggaggagcaggagttcttccagatcgccaagaacatcaaaaaccataaaaaggaaatcttctagatctccgtcccccaggagcagaaataagaaggataaaaagagagaaaaagaaagggaccacatcagtgaaagaagagagagagaacgttcaacgtctatgagaaagagttctaatgatagagatgggaaggagaagttggagaagaacagtacttcacttaaagagaaagagcacaataaagaaccagattcaagtgtgagcaaagaagtagatgacaaggatgcaccaaggactgaggaaaacaaaatacagcacaatgggaattgtcagctgaatgaagaaaacctctctaccaaaacagaagcagtataggaccgacaagtgtacctctgcactcaatgctggaatcaaatccaaagcttttaattctctcaacaagatgtaaacaggaaagaaatctagttgagcatgaagataggatctaacagcttttccagttgttagatgactttgtggccatcttgttattgagtaagaaaataaagcatggacatcatgaaaataacagatgttacccaaactcatcttctaaaatctgtgcatttccatggtggctgacacacttgtcatgtggtctgttagtgtttgccaagaaccattgcaaataaattgaacatcaaagatccaagtttgtactatccctaaagactggagataagcattggaggctcttttaaaaaatgctagttactgaattttgtattgttttacnnnnnnnnnnatttcaatatatacagtttgatgatgtgcttgaaattggtgcaaatatatacacacccttgtaagtgcaaagtatgtaagaagttttaacatttacttcacaggacttgtgattgtgttaaattctcactattgtgttttcttttgctcactgtttaggacatttttctttaaaatagttttgcagattaaaa

SEQ ID NO: 241372 - DNA, 1787 bp, Homo Sapiens
  misc_feature (171)..(180): n is a, c, g, or t
  misc_feature (1502)..(1527): n is a, c, g, or t
  misc_feature (1696)..(1705): n is a, c, g, or t
tacaaaaaagttgggacacacttgtccatgtggtctgttagtgtttgccaagaaccattgcaaataaattgaacatcaaagatccaagtttgtactatccctaaagactggagataagcattggaggctcttttaaaaaatgctagttactgaattttgtattgttttacnnnnnnnnnnatttcaatatatacagtttgatgatgtgcttgaaattggtgcaaatatatacacacccttgtaagtgcaaagtatgtaagaagttttaacatttacttcacaggacttgtgattgtgttaaattctcactattgtgttttcttttgctcactgtttaggacaatttttctttaaaatagttttgcagattaaaattgcttaaataagtggattaaaaaactgacaatgcatgctactgttctctttcaaaaggaagagcaaccgtgttgaatactaataatgatgaattagtattcagtgtttagaatcattgggactacccacaaagtgagcatttctttttaaattttcttgacatttccaagcttattatgaataatattgcagtgtgtcttgtcagctgtaggtggcaaaggtgcccttataaaaaaggaaactggcttttcaaaatgggctatgggagcacaagctgaagctttagtgccttctacaatgtggtatactgttttctagaattttatatgtgctagtcattctcaattcatatggaatctagatggatatttcatgcatacccatagagaagtgtgtaagtgatatgtcagaagagcttcttactgatttcacctaaaatgagaaggaagtcctgttttcaagaatgacattagagtcatgcagctttgggaccatcagttttatactgtgataattgaaaatgaaacatgttcttattttccttaaattgaagaaaaccctttagttgtctacattggatggccttattacctctcaatcatcttttcataaatgatgtgcagaaattgtacttaaggacttaggagtatatgggaggttattggttttatgtttaaggatacgtttacttgagtttaagatacaggtcatccatcattcttaggctcactttttacagaaagtatgcaaatagtaaagtgacagcactgctaatgtttttccccagtactataacttgtggtttctgaactcattattgttgtatttccaaaaaagtaataccttttaattagtgtattaaaagttaagtataattattttaatgcaatctaatacaatcagattactcagttgccttacctcatgggaagagttacttttttagatctaaaaagctgaatagcatgttagttacttggtttcaacttgagttttcttttaatgttaataagattgaaactttagtatttagtggggaatggaaagagttgcccttgttgcaagtaatgaagcctgatttgattatgaagctgcttaatcactcttcatgtgttcagaattactgnnnnnnnnnnnnnnnnnnnnnnnnnntccctgtgtaccttaaaattttggaagatgctttactatgtaaagtatagatggtcattttaatcattcagccccatacggttgggtggtaaacaggttattttgatacaagaatgcttgggggcatatggaaagattgtgaaagagtgtgttttgcatcaacagctgnnnnnnnnnngatatataagtagaaatagagcaaaagttggaatttgttatttttagttccctgtttttaataaaggtaagtttttttgggg

SEQ ID NO: 241373 - DNA, 1542 bp, Homo Sapiens
ttggctaacttaatggaaggtaaacttctcttcaattaatgatgtcctccttttctcaaggtgtccaaagacaggaggtggtctgtaaaaggttggatgacaactccattgtccagaacaattactgtgatcctgacagtaagccacctgaaaatcaaagagcctgcaacactgagccctgcccacctgagtggttcattggggattggttggaatgcagcaagacttgtgatggtgggatgcgcacaagggcagtgctctgcatcaggaagatcggaccttctgaggaggagacgctggactacagtggttgtttaacacaccggcctgtcgaaaaagagccctgcaacaaccagtcatgtccaccacagtgggtggctttggactggtctgagtgtactccaaaatgtggtccaggattcaagcatcggattgttctgtgcaagagcagtgacctttctaagacattcccagctgcacaatgtccagaggaaagcaaacctcctgtccgcatccgctgcagtttgggccgctgccctcctcctcgctgggtcacaggagactggggccagtgttctgctcagtgtggccttggacagcagatgagaactgtgcagtgtctctcctacaccggacaggcatctagtgactgtctagaaactgttcggcctccatcaatgcagcagtgtgaaagcaaatgtgacagtacccccatttctaatactgaagagtgcaaagatgtgaataaagtggcttattgcccactggtgctgaagttcaagttctgcagtcgagcatacttcagacagatgtgttgtaagacctgccaaggacactgacccacagaaagccagagagagtgccttgtcatttcatcatggaaatgcatccatcaaagagagccacccagaggaagaggattgatgtccttgcaaatgcattaccctgtggaaaacgtaaccactggtcagccctagctgacaaaatttcaatattattttagcttctgtgaagtgggatttattgatccaaagtgctggacacggtattaggagggaatgccagattggagagatccaaacaacacagggacacttgcttactgtggagcgtttgtgttctttcgagtaaatccaatagcctgtttacctccttggaccattaagataatttttattatggacttagcaatgacactgaatccatttgtatttaaaactgtttaaaatgtagctgttatgacttggtcaactatggaagtgaagaaggttcagaattcttaagtcatagcttaaaaatatttactgtactttatctcactacaacagcaccacaatttaaattataaaacgggctttgaactataatttaaggagcaattataaatcaaaagtaatgaaagtttgtattatttttcttcattccacttaatttccttaggaataatcccctggttctgaacactgctgtgagccatatataaaactatattaaactgaacaataatgaggggcatagtttaaagcagtgcatcagttactg

SEQ ID NO: 241374 - DNA, 493 bp, Homo Sapiens
gtacaaaaaagttggcatcgagacctcacccttggattccactaacgtagaggaagcattcaagaacatcctcacagagatctaccgcatcgtgtcacagaaacagatcgcagaccgcgctgcccacgacgagtccccggggaacaacgtggtggacatcagcgtgccgcccaccacggacggacagaagcccaacaagctgcagtgctgccagaacctgtgacccctgcgcctccacccagcgtgcgtgcacgtcctccgcccgcccccgccacggtatcctctggcccctccctgctgtccctctgtggccggctcgttccagccctcccagtgagctctgcacggccgggccggggcccaggaaggacaggagccagtgctaccccgtcctgcccggggaaaagctagaagccccggtttgctgcacccatgaaactcgggtccccacagcgtcttggcggggtggggagggcggcaggatggacggggc

SEQ ID NO: 241375 - DNA, 2074 bp, Homo Sapiens
ttggcgatgatgatgatggagacgatcctgaagaaagagaagaaaagcagaaagatctggaggatcaccgagatgataaagaaagccgcccacctcggaaatttccttctgataaaatttttgaagccatttcctcaatgtttccagataagggcacagcagaagaactaaaggaaaaatataaagaactcaccgaacagcagctcccaggcgcacttcctcctgaatgtacccccaacatagatggaccaaatgctaaatctgttcagagagagcaaagcttacactcctttcatacgcttttctgtaggcgatgttttaaatatgactgcttcctacatccttttcatgcaacacccaacacttataagcggaagaacacagaaacagctctagacaacaaaccttgtggaccacagtgttaccagcatttggagggagcaaaggagtttgctgctgctctcaccgctgagcggataaagaccccaccaaaacgtccaggaggccgcagaagaggacggcttcccaataacagtagcaggcccagcacccccaccattaatgtgctggaatcaaaggatacagacagtgatagggaagcagggactgaaacggggggagagaacaatgataaagaagaagaagagaagaaagatgaaacttcgagctcctctgaagcaaattctcggtgtcaaacaccaataaagatgaagccaaatattgaacctcctgagaatgtggagtggagtggtgctgaagcctcaatgtttagagtcctcattggcacttactatgacaatttctgtgccattgctaggttaattgggaccaaaacatgtagacaggtgtatgagtttagagtcaaagaatctagcatcatagctccagctcccgctgaggatgtggatactcctccaaggaaaaagaagaggaaacaccggctttaggagatgcttctgaaattttggttgaattatttctgaccacgtagttcacttgcttggtttatgatgcctgaaataagaggaagtgatcagtgtcatccacatcagaataaatcaacaggcagacacacctgctgctttgtgcagcattgggagctcacgagttctgaccaggagtcatggatgaacacaggaaatgacgtcttgccacacctggggcagcctgagccatcaagctgtttgagttgcttcaaactgatggcaaaaataaactgggcagggcatgactcttggctttaacgcattcctgtattcatggcacagatagatccagttaagcagctctctgttggatttgtagcttcccgcagaaatttggtttaattttctttgtgtttttgcaggttgtgggctgcacactgcagaaagatacagctgaaaaagggttagcatctttccattcctctcattattagcttaacaatatctgctttgttttcatttgttttagaatagtaactggattagagcttgggttattctaatataattgccttctgtatgttaaaccaatttgaatggaggacgtctactgatgaatccccagtcaattctcttctgtaaagtggaggctgactggaaggtgtgagtccgagtcagttgaaggagaagtgctttgggatgggactgagatgtagccgtgctttagatggaactcataagcacttgggggtgggagagtattttttgccatcgttgtggaaaccggaatatgtgtaatgttatgcattcagtaaaggcaggccagctacactccacaggtagtagggaagaatgtactcgtgttaattgtgtatgatcgtttccatctccctggattcattggcctgcatgatgttatctttactcagacggctcctctaaccatgtttacaactatcaaccctgtgatcatccacggcagccttgtgacagttcgtgcccttgtgtgatagcacaaatttttgtgaaaagttttgtcaatgtagttcagagtgtaagtatttgttgctttgatgcaattgcatgagaactaaatagtctttggttagcaatttaaaaatcaaaaatagaacatgggagcactccct

SEQ ID NO: 241376 - DNA, 1220 bp, Homo Sapiens
ttggggaaatgtttaatggaggttacagtggatagaaactgcctagaggttcttccaacaaaaatgtcttatgctgccaatctgaaaaatgtaatgaacatgcaaaaccggcaaaaaaaagaaggggaagaacagcccgtgctgccagaagaaactgagagttcaaaaccagggccatctgctcatgatcttgctgcacaattaaaaagtagcttactagcagaaataggacttactgaaagtgaagggccacctctcacatctttcaggccacagtgtagctttatgggaatggttatttcccatgatatgctgctaggacgttggcgcctttctttagaactgttcggcagggtattcatggaagatgttggagcagaacctggatcaatcctaactgaattgggtggttttgggtaaaagaatcaaaattccgcagagaaatggaaaaactgagaaaccagcagtcaagagatttgtcactagaggttgatcgggatcgagatcttctcattcagcagactatgaggcagcttaacaatcactttggtcgaagatgtgctactacaccaatggctgtacacagagtaaaagtcacatttaaggatgagccaggagagggcagtggtgtagcacgaagtttttatacagccattgcacaagcatttttatcaaatgaaaaattgccaaatctagagtgtatccaaaatgccaacaaaggcacccacacaagtttaatgcagagattaaggaaccgaggagagagagaccgggaaagggagagagaaagggaaatgaggaggagtagtggtttgcgagcaggttctcggagggaccgggatagagactttagaagacagctttccatcgacactaggccctttagaccagcctctgaagggaatcctagcgatgatcctgagcctttgccagcacatcggcaggcacttggagagaggctttatcctcgtgtacaagcaatgcaaccagcatttgcaagtaaaatcactggcatgttgttggaattatccccagctcagctgcttctccttctagcaagtgaggattctctgagagcaagagtggatgaggccatggaactcattattgcacatggacgggaaaatggagctgatagtatcctgtatcttggattagtagactcctcagaaaatgtacagcacgaaaaccgaaagcgccatggctctagtcgaagtgta

SEQ ID NO: 241377 - DNA, 1837 bp, Homo Sapiens
  misc_feature (301)..(417): n is a, c, g, or t
  misc_feature (1688)..(1697): n is a, c, g, or t
tttgtacaaaaaagttggcttaatgttaaagatgtaattttattttcaaaacatctataacatgactttcagaagcagttcatttttccaagattcctcacattatactagataaataataggccctcagttaatacccttcagttattgaattaatctagtttgtggaatgaggtgtatcctgccaacttccctctgctcccaagtacactctgagaggtaaaatgctctgggaaatggaacaagaatcgagtggatgctgactctgtgtgcccacctcctcaactgattgataatggtnnnnnnnnnnnnnnnnnnnnnnnnnnnnnnnnnnnnnnnnnnnnnnnnnnnnnnnnnnnnnnnnnnnnnnnnnnnnnnnnnnnnnnnnnnnnnnnnnnnnnnnnnnnnnnnnnnnnnagaatacttcagggtcctctgtggaggatgtcttgagccagagtttaagcctgacacacaggctttggtcctcactgagctgtctccaagactggaactacttagtgactcggcaaattttctgccccccacccctcatcaaagctgctagttcagatgttgacagtgttttcatgaatgttggaatcttactagtccagacttacttaggatgttgttggggaaggcacttgggattttctgtgtcttgcattcacagagggaggccatttcagattcaagagcattggattagggaatcgtgaggcagggatgctactgcgtatttctctctgcaggttggggattaaagttcctttccccatgggtttgaagcagactcagactgtctcaggatcaaagcaaccctcaatgggtttgatttatgtcattgcttaccactccccaaccaatcccaggacagctgggtcactgtacccctttgtggatctgtacctgggcctctccttcctcatagggaccagctgattgaataaatgtgaccaccttatttccaccccccacccccaaaagctacattggaattatttttcctagaaatgtgtataacactcagaattgggcattgatccttaaagcttcatcccattcaccgtattcaacatctgtcatctcttagtgtctgcagtctgaacctaaccttgaccttttttccctctggtttgagaaaactttggacactatttctacttggccaggtgtgggctcaagagccttactctttccatctcagtttaggggcgcagccagctcctcttcccaatagggctctttctgctttccctctccttggccctagatttgtaatccatgaaaaagcacaaggtcctggctccttgcggtcacattctggttctctgtgttttgtggactctgctctcactgttcacccagcactagcagtaccagatggttctgtggagtcctggggaatggagagagcacagtctgactccctgccaagtagccaggagttgacttgcccatggtccgctggctttcccaccacttcctacaggatgggatctaagagactcaagagctgggtttctttcagcactctgtactgtcccaaatagcaaacaaatcactttgtagccagatttctgaatggaaatgagaaattgaattctccatggacttttaggtttatgggggagttttagctgtgtttcttggttttatttcagccaaacatgtctgcttttgannnnnnnnnnaaagtataagtggtctatatatatgttcaccttttaaatgtaaatgtttaaaaagtaagcatttatgtgtttccataactgacatctgatgcagacctcattctctccccctcttctaccctcctcttttcccccttttc

SEQ ID NO: 241378 - DNA, 1531 bp, Homo Sapiens
  misc_feature (694)..(702): n is a, c, g, or t
  misc_feature (781)..(796): n is a, c, g, or t
  misc_feature (941)..(949): n is a, c, g, or t
  misc_feature (1216)..(1284): n is a, c, g, or t
  misc_feature (1388)..(1404): n is a, c, g, or t
ttggcaattctgttaccagtcgagaaacacaagacaaggacatttggaggggggcttcatctgctgaaagtgtctcacaggtcacagccaaagaagagttacttcctactgcagaaacgaaagcttctttctttaatttaagaagcccttacaatagccatatgggaaataatgcttctcgcccacacagcgcaaatggagaagtttatggacttctgggaagcgtgctaacgataaagaaagaatcagaataaaatgtacctgccatccagttttggatctttttaaaactaatgagtatgaacttgagatctgtataaataagagcatgatttgaaaaaaagcatggtataattgaaacttttttcattttgaaaagtattggttactggtgatgttgaaatatgcatactaatttttgcttaacattagatgtcatgaggaaactactgaactagcaattggttgtttaacacttctgtatgcgtcagataacaactgtgagtagcctatgaatgaaattcttttataaatattaggcataaattaaaatgtaaaactccattcatagtggattaatgcattttgctgcctttattagggtactttattttgcttttcagaagtcagcctacataacacatttttaaagtctaaactgttaaacaactctttaaaggataattatccaatnnnnnnnnncctagtgctgattcacagcttattatccaattcaaaaataaattagaaaaatatatgcttacatttttcacttttgctnnnnnnnnnnnnnnnnggtgtttatttttaactcttggaagaggttttgtggttcccaatgtgtctgtcccaccctgatccttttcaatatatatttctttaaaccttgtgctacttagtaaaaattgattacaattgagggaagtttgatagatcctttnnnnnnnnnggcagatttccattttttgtattttaactactttactaaattaatactcctccttttacagaattagaaaagttaacatttatctttaggtggtttcctgaaaagttgaatatttaagaaattgtttttaacagaagcaaaatggcttttctttggacagttttcaccatctcttgtaaaagttaattctcaccattcctgtggtacctgcgagtgttatgaccaggattccttaaacctgaactcagaccacttgcattagaaccnnnnnnnnnnnnnnnnnnnnnnnnnnnnnnnnnnnnnnnnnnnnnnnnnnnnnnnnnnnnnnnnnnnnnctaagtggacctggaatcttccatctgcatcttaacatgctctctaggtgtttcttgtgtttgagaaccatgacttatgactttcctcagaacatgagactgtnnnnnnnnnnnnnnnnnctatgtgatgcctctattttccccaatacagtcacacatcagctcaaaatttgcaatattgtagttcatatattaccgttatgtctttggaaatcgggttcagaacactttttatgacaaaattggg

SEQ ID NO: 241379 - DNA, 1433 bp, Homo Sapiens
  misc_feature (392)..(400): n is a, c, g, or t
  misc_feature (479)..(494): n is a, c, g, or t
  misc_feature (913)..(981): n is a, c, g, or t
  misc_feature (1085)..(1101): n is a, c, g, or t
ttggtgagatctgtataaataagagcatgatttgaaaaaaagcatggtataattgaaacttttttcattttgaaaagtattggttactggtgatgttgaaatatgcatactaatttttgcttaacattagatgtcatgaggaaactactgaactagcaattggttgtttaacacttctgtatgcatcagataacaactgtgagtagcctatgaatgaaattcttttataaatattaggcataaattaaaatgtaaaactccattcatagtggattaatgcattttgctgcctttattagggtactttattttgcttttcagaagtcagcctacataacacatttttaaagtctaaactgttaaacaactctttaaaggataattatccaatnnnnnnnnncctagtgctgattcacagcttattatccaattcaaaaataaattagaaaaatatatgcttacatttttcacttttgctnnnnnnnnnnnnnnnnggtgtttatttttaactcttggaagaggttttgtggttcccaatgtgtctgtcccaccctgatccttttcaatatatatttctttaaaccttgtgctacttagtaaaaattgattacaattgagggaagtttgatagatcctttaaaaaaaaggcagatttccattttttgtattttaactactttactaaattaatactcctccttttacagaattagaaaagttaacatttatctttaggtggtttcctgaaaagttgaatatttaagaaattgtttttaacagaagcaaaatggcttttctttggacagttttcaccatctcttgtaaaagttaattctcaccattcctgtggtacctgcgagtgttatgaccaggattccttaaacctgaactcagaccacttgcattagaaccnnnnnnnnnnnnnnnnnnnnnnnnnnnnnnnnnnnnnnnnnnnnnnnnnnnnnnnnnnnnnnnnnnnnnctaagtggacctggaatcttccatctgcatcttaacatgctctctaggtgtttcttgtgtttgagaaccatgacttatgactttcctcagaacatgagactgtnnnnnnnnnnnnnnnnnctatgtgatgcctctattttccccaatacagtcacacatcagctcaaaatttgcaatattgtagttcatatattaccgttatgtctttggaaatcgggttcagaacactttttatgacaaaaattgggtggaggggataactttcatatctggctcaacatctcacgaaaatctgtgattatttgtgtgttctaatgagtaacatctacttagttagccttagggatggaaaaacagggccacttaccaaactcagtgattccaggatggtttggaaacttctcctgaatgcatccttaacctttattaaaaccattgtcctaagaacaatg

SEQ ID NO: 241380 - DNA, 877 bp, Homo Sapiens
  misc_feature (250)..(268): n is a, c, g, or t
  misc_feature (366)..(475): n is a, c, g, or t
  misc_feature (478)..(486): n is a, c, g, or t
  misc_feature (721)..(730): n is a, c, g, or t
gtcttctcatgttttacaacaagctgtgtctctgaaaactaaaatcagactttagattcctctgaaacagttctggttcccaagcatccgcaccatggtacccagacatgctcaaaatgtgctttcccttatctttcaaaacccaccaccaggaaaccaaaacggaccccactctgagagttccatgatgaaggtgtttaagaatcacattaaccccaagtaaaggcagtagatgaaattatccatttcnnnnnnnnnnnnnnnnnnnaagtgagactacattggcaaatgggaaaatgacaccaatcatttgattacagaaaatggttttataaatcctcctcttgaaattatgttcaggcccannnnnnnnnnnnnnnnnnnnnnnnnnnnnnnnnnnnnnnnnnnnnnnnnnnnnnnnnnnnnnnnnnnnnnnnnnnnnnnnnnnnnnnnnnnnnnnnnnnnnnnnnnnnnntgnnnnnnnnnaaaaaaaagaaattctgttcgaaagtatttcagaccaaaaggaggtcataaaaactgttcatataattactctatgagaaaaaaatccctgtatggaaaggggcactgaagatctggcacagagaaacaaggggagacagggcagtgataagatccagccctatttttctagcatgcatttacgaccttgtggatatgtctgtactgggtgttaatagccccctccttgtatttnnnnnnnnnnttaagaaattaaagtgaatctgtgtgctaatgaagtctgcagttacagaatctcaaagccaagcctgtaaagtctgtaaggcaagatctttgtcatcagggacgggaagagacggataagataatggtaggcactaaaggctgccaa

SEQ ID NO: 241381 - DNA, 701 bp, Homo Sapiens
  misc_feature (585)..(604): n is a, c, g, or t
caccggggtgacccaaagactttattttcaaaagcaggtaacaccaaagtactatgtggtatccatattcgttgcaaaaatgataattactggaattttccaaacatcaaatgaagggggatcaatggttaccactatcgttttcaaccaatatacagatgttcgctcaaggtctaggttttatttctacatagtagtattcacatgagttccctattctgaagtattatcaaaacgaggacccttgaaggtcgagcccagctttgtcttgacttcaaagatgacacagcagccaacctagaatcctggcttgctgcttgagtcctagaaatcatgtcttctcatgttttacaacaagctgtgtctctgaaaactaaaatcagactttagattcctctgaaacagttctggttcccaagcatccgcaccatggtacccagacatgctcaaaatgtgctttcccttatctttcaaaacccaccaccaggaaaccaaaacggaccccactctgagagttccatgatgaaggtgtttaagaatcacattaaccccaagtaaaggcagtagatgaaattatccatttcnnnnnnnnnnnnnnnnnnnnaagtgagactacattggcaaatgggaaaatgacaccaatcatttgattacagaaaatggttttataaatcctcctcttgaaattatgttcaggccca

SEQ ID NO: 241382 - DNA, 1128 bp, Homo Sapiens
  misc_feature (500)..(512): n is a, c, g, or t
  misc_feature (783)..(812): n is a, c, g, or t
  misc_feature (871)..(889): n is a, c, g, or t
ttgaaatacaaatatgcagattttatcgtggaaaaattctcaattgtgtttcttcatcagaacttcaactgaacctagaactttttcacacctcgatgagaaagaaagcaaaacataacaaaaacccagaaaaaagtaatctataagttgattggctgctgagacagcaaggactttttacagagacctgtacagcatcgcaccaagaggggcgatatctggcaagagattaaatagctgtgtctcgctttgtgcaggtcaccaacttgttaactcgtcatactataaaggggtagctgggaggaggaccaaactgtggggatccaagggtatgtgcaatgtacaacgtcatatatatacacacgtggcagcgtagccgctgcaggtaaaggttaaaaccagttttaagaggtgatctcagggttattcatacaatcaaggaggagagaaagaggtcagggtgttgtaggttcacacatgatactttgggggaaaagccnnnnnnnnnnnnnctcctcaacgtttaactaaaaacatttttaaaaactacagcttgctgctgacccagcgttttctgtttccatgtgagacattattattacagtatgtttacagtatcaggtgtacagtacagtacatgaaagggtctacactctactgcacaggcctctccagtgaacagggtctgttcacaactgcgaacttcttggctcctgcaagattgtgaatgtacaacaataaaccacacacagttcagcagtcaccttttttgtccttcagaannnnnnnnnnnnnnnnnnnnnnnnnnnnnnaccattaaaaacagttatgaaatgtggcatcccgttgatgcaaggactgggaaagccannnnnnnnnnnnnnnnnnnccccaaactcactgtaaacaacagtaactttggttaaaataaaaaaagtcttctatgtaggcagagctttgtcttttcaaagagggtggggtagggtcctgaggggagtaaggtgaggacaaggaacagaaaggcgtgaggtgatggagggaggggaggtggaaggaggagagagaaacaggagagactttttcccaagggagaagctggacagcacagccaacttttttgtacaaagt

SEQ ID NO: 241383 - DNA, 1347 bp, Homo Sapiens
tattttgatgtgtttccaaaaatcaaaacgttttcaaacacaaataagatataaaatacagcataaaatgtgatttagatctgtttcccacataaagcaaaaaaattttagaaattgtttggccagaatcaattggtagatcccacttatcctcccctccctgcaaaggcatcttcccgaatcaggccctagcccacccagggccaggagaaacaggaacacccactaggacggaggcgctgctggtgcagaactggtgctgactgctcacgtggcctcctttggtccaccctactttccaccaatcagccaaccaaccttgaccacagagaaaccgtgacttggccaaggtcatttgatgggggctgtcatacggcactaacagggagcgaggtgtggaccaagagacagccctggtgaggttgaaacactgagacaagccagtcttcatgcagtgagcacttgaatgatcacaggagaagagaacccatgtcctgaagccattgctcgatcttaccaatattcgggggtaaggaagtaggctaccaggggaatatttgcaaacgcgttgggactagttcggctgtgttaaaaaggtaggtgacttccaaaagcacttatgagcagaaacctgcctcacccctgccctgcagagccaatggatgagaggccaagagggaggcaggctcggggctgggccgcagcagccctggagacaggctgagccagcctgtccccagataggtctaggggccagagaggtgttcgactacccttgtggcatttactatggtgcagacgacagggagcaacaagcagttaagctcccccaaaaagagaaacacagtataaggcagtgttagaaaactttaaatacaggattaagatcaaatcggtaaggcatcacaaattgtaaaaaggaattttggctgcattcggcatagcaaacggacaatctgagtgagcgacagcctcaggaaagtggtgtgtcggggctgtccacagggcgagtgcagctgggaaagggcggtgctgctcagccagggcggcctgcgctttcgagaccttgctcagaaaaggccccatgtgaggtaactgggttgagtccgtgggtctccagtgctgggagctcctgccacaccccctgcccacagcggctgcggctctgcaagctggtctgagcagctggccaggctggcttgcagggtgctgctgctggggctacccctgtgtggtctcactagcccttccaccttgcctcaagctactaaaactcccagggtgttacccaataaaacacttggcaccaatccaagctgattttctgaccgatgacttttatcccaa

SEQ ID NO: 241384 - DNA, 1642 bp, Homo Sapiens
  misc_feature (925)..(944): n is a, c, g, or t
ttttatcaagtttaagcattctgggaagtactcaggtccacatttgctgaggtggccaatggctttttcatatcgtttcaagtatttgtctatagtaaacccgctgataattagtttccattttcttaagtgtattaagaaatggaagatattctttgggatccttctgtgacttctcagctaccatgaggaccaaatcaaagtcataggtgccaagagaatgatcatataattcattaacatctaccagatgcagcaaatatttcaaggcctcttcagcactcacagcatcaggatcagagggagcatttccttgaagctcgtgtactttttgcagtacaatttccagttctggggttgtcttctttacatgagatgtaagtatggataggcagtatttatgaggatttatgctctccatgactgctctcatagcatcgcagacaaggtctattttattcccgtcaggatccctggacaggtagacactgctggtaactggtgcagggtacatggtcttcgtgacatcttcttctttcaattccagagtcggctccgaattgcgcacgcgtctctgtccgcggctcccgctctctctccgacggcactaggcctccaaggatggaggcgccctccaggggaaaacgctgaagcgctgcaaagaagccagcgactcaatgggtgcgtcaactaggcagccgcagcactgggagtgcggcgcgggagtgacgtcaccaggcggagggggcgaggccgggcccgcttctggtcacttacggcggccggccttctttgtaggcctggcaccgtagaggtagaggagctacattggccgcgtcccctgtccctctgccctcttgcccatctgcccaaacttttgtatttgatctctgttttgatgtcgaaccccaaagcactgtaattnnnnnnnnnnnnnnnnnnnntggaacctgcggacctgagagcagcgcgcgtgcgcacgacacgcgctgtgcgccggaagagcacgcccagtccgggctgcgcggaggaagcgctggggtcccggagggcgggggtggcggcgccggaggtcgccatggctaccgagcccgaagccgcggagccggtggtgccttcgctcgtggatcgatacttcactcgctggtacaaaccggatgtcaaaggaaaattttgtgaggaccactgtatactacagcactctaaccgaatatgtgtcatcacattggcagaatctcatccagttcttcaaagtggaaaaacaattaaaagcatttcctatcagatcagtaccaactgtagcagacttcagaacaaggtctctgggaaatttaagcggggggcacagtttctaacagagcttgcacctctctgtaagatttactgctcagatggtgaagaatatactgtgtctagttgtgttagaggacgtttgatggaagtgaatgaaaacatcctccataagccatctattcttcaagaaaagccatctactgaaagctacattgcagttgtgttacccaaatttgaagaaagtaaaagcataacagaagggttactgacccaaaaacaatatgaagaaagtcatggtgaaacgcattaatgccaccaacagcctacgtcatgaaggattgacatggga

SEQ ID NO: 241385 - DNA, 856 bp, Homo Sapiens
  misc_feature (601)..(667): n is a, c, g, or t
ctttattggactttgttacatttattttacagtttagtattgtttgtattttgaattacattaaggcggaggatggggcactgtaatgtttttgaagtttaggacctttaaagctcttaagctgactccgctactgtaaagaaaagcagggtatctgcttcacactggcaaaataaggggctacatttccccatctgaccctcaaatcccttgaaacgctataccctgacataaaccactggtttaaaagacaatgattccaataatttatatcaagtcctgcttccctaccccacacctccaccctaactgagcctgtcccctctgtgttcctctgtctaattctgtaacaaaatctgaaatccagcctccatcagattctggctagatatctctgacctttgaatattgtcttattttagcccataatgagatcagcagctactgtcagtgctatgtcagtgctaaaaatgggttacactttgcaaaataactttattctttaacaatcttgtacactaggcaccaacactgaggctcagctgcctgtggtcataaatcaaatagtacgtactcaacaaataatagctgacaagtttgnnnnnnnnnnnnnnnnnnnnnnnnnnnnnnnnnnnnnnnnnnnnnnnnnnnnnnnnnnnnnnnnnnncttaagagaccacctacctccattcttcttcgaacacatgtttttcctgtttgccacctgaatacgtggaaccaccatccacccagctggttaaaccagaatcactcagaaatctacctctccttcatattattcataactgccagtgttaaaattctaattgctggccaggcacggtggctcatgcca

SEQ ID NO: 241386 - DNA, 994 bp, Homo Sapiens
ttgggaacactaacatcgacaatggacacgcctggcgcatgagtgcctgtcacagagttgtgacagtgccaagcactctccaacgttggtgcccacagccaccaagcccgacgcagtgcagcctgacagcctcccctacccacagtacctggcggtcatcaaagcccagatttcctgtgccaaggacattcacaccgccctgctggactgtgccaacaaggtcacgggcaagacacccgcaccacctgctggccctgggggcactctgtgaagtgggggacagggagtggggcaggcagtggttggtgggtggtgtgcaaagggaatgaagagcgtcctgggcctaaacacagcagcctcctctcttcctgcctgagcactgcagcgggagccagcagggggcagcagaggccaacagggagctcgcaggccgggcccctgcgtccctgccccttcttcctgctccccctcctagcctagggtagactttgaactgtgtgtgttgatgacttctctgttccacaggccctcccccattcttgcctgggtgtggagccctggctgtcccctctccctcagtccttcctgactgtctccagctgggaggtggtctctgtgtgccactcctctgtgtctctattacagttgtgtctctctcatcctgtctctttttcccttgtttctctgttcctgttaatgtgtttctccccatggtcctatttctctcactctgacctctctctcttagtcccctttagctgtcttctatccccagctcctaactgggactctgtgtctatgcagggggccagcacccctgggttatctggggctaagggaagggacttcatttccaggggccacagccaagcccagagtcccccagcggctcgcatgtcagcccagaccccagggtccttggcctaaagaggagcagtggagggcccaggctctgagctccacaggtctgagctgggaagcaactcacgccccc

SEQ ID NO: 241387 - DNA, 1511 bp, Homo Sapiens
tatcagcaatgggacggggcctccactttagcatctccacctgctcctctcagaggaccgcctttcattgcattcagctgtgatggtagcacgaacacaggtgcaccgaggacgaggagagcaggagcccttgtgctctctctgcatctgaggcaggacagcacagggtacggagcagtctgcagagaggccagctcatcagggaagcacttgtcttccaccttgggctttgactgagcactgggcaattggcctctggggatcaacgaaataatcctaaacagagttactctatgtcacactatggaatgttccaagtaggtggccgtgttttcaaaagatgtattttctccttttgttgttgccatttcataggtttaggattgggtgtgtgtttctcctctctgaatggcactcgaatgtttgctgactcctactctgtgtgactggggtgtacagctatggactgatgcatcccatcccatcatctttcatgatcaaagcagtctcttcttttttgacagctgaagaagcatcggtagggaatccagaaggagcgttcatgaaggtgttacaagcccggaagaactacacaagcactgagctgattgttgagccagaggagccctcagacagcagtggcatcaacttgtcaggctttgggagtgagcagctagacaccaatgacgagagtgattttatcagtacactaagttacatcttgccttatttctcagcggtaaacctagatgtgaaatcactgttactaccgttcattaaactgccaaccacaggaaacagcctggcaaagattcaaactgtaggccaaaaccggcagagagtgaagagagtcctcatgggcccaaggagcatccagaaaaggcccttcaaagcggtgggaaagcagagtatcaggagggaacagggtgcccaggcatttggggagaatgctgccaaagaaaaaaggctcgggagtccagccccaagggagctggaatagcctcacatagtgcaggggcccgagaacgtagcgggaaacgccgtctacaccaagccttcattcacccaagagcagaagccaacagtctcctctttgctgaaacccttctccatgggcatgccttctgccttccacaactgcaaaagccctacctcaggtcatagacagattgaaagacttagcctacaccattttaattttagaaaatgcaaaggctagagttaaaaaatatgaaggctgctaaacgagtcgtacattccagaaaaaaataccactttcataaaactcactcccgtgtggcccacagaacacccaaggccaaaaagattagaaaattgagaaagaaaagttatctcaatagactgatgctcgcaaagaggccgccgttctctgcagtgaagagcctcataaattccccttcacaaggggctttttcatcctcaggagacctgagtcctcaagaaaacccttttccagaagtatttgctccttcagaatgttttatagccaa

SEQ ID NO: 241388 - DNA, 1991 bp, Homo Sapiens
ttggcactgtcatgaccaaagttacatggccaagatgagctatggcctgggagtcccagactcttctgtgtgggcactttcctgggatatgctaaatgatgggaaatctgggtctcatgtttctgtgtggtcctcacctcaagcgacttctctttctgttcactctgggcttctgtgctctcattaatgtagttctcaatcttccattggtccgtatcccattctatcttggatgcctttacttcctgctgcccactgagaagcttcatcaggtggcctgtcctggagatgagcttggcacaggtcacttgcacatgggccccagagcagtccatcttcaaggtccggataacatgagcaatgagccttctcacattgttgttggggataagggactgtagctgctgggttagctgaatttcaaactgatcacctggggacgagagcaatgggtaattgaagcttttgggctcgggggacaggtcagtgcccacgttgttgtattcccattttgtctcagtttgtttaacagttggccctaagttgaatgcagtcccagcggaatctgcctcaggaggatgattgtagtttgtgttttcagagatggttccttctggcatgttagtgttttccataaaatcattttcttcaaaggcatttcttgcagttgtgtgttttgtattattcttttctataaaatgttctgaaggagcagatacttccagaaaagggttttcttgaggactcaggtctcctaaggatgaaaaagccccttgtgaaggggaatttatgaggctcttcgctgcagagaacggaagcctgtttgcgagcatcagtctactcagataacttttctttctgacctttggactctttttgaccttgggtgttctgtgggtcatgcgggagcgagttttgtgaaagcggtatttttttctggaatgtgaaattggtttagaagccttcatatttgtaactctagcctttgcactttctaaaatggaaatagtgtgtgttgtctttcaatctgtctctcacctgtggtagggcttttgcagggctggaggtagaaggcgcgcccttggagaagggtgtcagcacagagactgctgccttatgctcttggctgaacgaaggcttggtgtagatggcgtttcccgctaacttctcaggcccctgctgtgtgtgaggctgttccagctcccttggggctggactcccaagccttttttcttcggcagcgttctccacagatgcctgggcaccctgttccctcctgatgctctgccttcccacctctttgaagtgccttttctggatgctcattgggcccatgaggactctattcactctctgccggttttggcctacagtttgaatctttgccaggctgtttcctgtggttggcagtttaattaacggtagtaacagtgatttcacatctaggtttaccgctgagaaataaggcaagatgtaacttagtgtactgataaaatcactctcgtcattggtgtctagctgctcactcccaaagcctgacaagttgatgccactgctgtctgagggctcctctggctcaacaatcagctcagtgcttgtgtagttcttccgggcttgtaacaccttcatgaacgctccttctggattccctaccgatgaaatcttcagctgtcaaaaaagaagagactgctttgatcatgaaagatgatgggatgggatgcatcagtccatagctgtacaccccagtcacacagagtaggagtcagcaaacattcgagtgccattcagagaggagaaacacacacccaatcctaaacctatgaaatggcaacaacaaaaggagaaaatacatcttttgaaaacacggccacctacttggaacattccatagtgtgacatagagtaactctgtttaggattatttcgttgatccccagaggccaattgcccagctgttagtgagcaaagcccaccaacttttttgtacaaag

SEQ ID NO: 241389 - DNA, 1167 bp, Homo Sapiens
aatttccaaggaaactatatttcttacattgatggaaatgtatggaaagcatacagttggaccgagaaactaattctcaatcacaatcctctgacaactgttgaagatccgtatctctttaaattgccagcattaaaatatctagacatgggaacaacgctagtcccacttacaacacttaagaacattctcatgatgactgttgaactggaaaaactgatcttacctagccatatggcctgctgcctctgccaatttaaaaacagcattgaggctgtctgcaagacagtcaagctgcattgcaacagtgcatgtctgacaaacaccacacattgtcctgaagaagcatcggtagggaatccagaaggagcgttcatgaaggtgttacaagcccggaagaactacacaagcactgagctgattgttgagccagaggagccctcagacagcagtggcatcaacttgtcaggctttgggagtgagcagctagacaccaatgacgagagtgattttatcagtacactaagttacatcttgccttatttctcagcggtaaacctagatgtgaaatcactgttactaccgttaattaaactgccaaccacaggaaacagcctggcaaagattcaaactgtaggccaaaaccggcagagagtgaagagagtcctcatgggcccaaggagcatccagaaaaggcacttcaaagaggtaggaaggcagagcatcaggagggaacagggtgcccaggcatctgtggagaacgctgccgaagaaaaaaggctcgggagtccagccccaagggaggtggaacagccccacacacagcaggggcctgagaagttagcgggaaacgccgtctacaccaagccttccttcacccaagagcataaggcagcagtctctgtgctgaaacccttctccaagggcgcgccttctacctccagccctgcaaaagccctaccacaggtgagagacagatggaaagacttaacccacgctatttccattttagaaagtgcaaaggctagagttacaaatacgaagacgtctaaaccaatcgtacatgccagaaaaaaataccgctttcacaaaactcgctctcacgtgactcacagaacactcaaagtcaaaaagagtccaaaggtcagaagaaaagttatctgagta

SEQ ID NO: 241390 - DNA, 1651 bp, Homo Sapiens
ttgggggccagctcccaggaaagctggtctgcgagcggcccctgcccggctcccaggtccctgcgcgaccccgcccttcccgagaccccagccgggctgccgcccgcgtcccggaagctccagcctgaaccatgtttttcacttgtggcccaaatgaggccatggtggtctccgggttctgccgaagccccccagtcatggtggctggagggcgtgtctttgtcctgccctgcatccaacagatccagaggatctctctcaacacactgaccctcaatgtcaagagtgaaaaggtttacactcgccatggggtccccatctcagtcactggcattgcccaggtaaaaatccaggggcagaacaaggagatgttggcggccgcctgtcagatgttcctggggaagacggaggctgagattgcccacattgccctggagacgttagagggccaccagagggccatcatggcccacatgactgtggaggagatctataaggacaggcagaaattctcagaacaggttttcaaagtggcctcctcagacctggtcaacatgggcatcagtgtggttagctacactctgaaggacattcacgatgaccaggactatttgcactctttggggaaggctcgaacagctcaagtccaaaaagatgcacggattggagaagcagaggccaagagagatgctgggatccgggaagctaaagccaagcaggaaaaggtgtctgctcagtacctgagtgagatcgagatggccaaggcacagagagattacgaactgaagaaggccgcctatgacatcgaggtcaacacccgccgagcacaggctgacctggcctatcagcttcaggtggccaagactaagcagcagattgaggagcagcgggtgcaggtgcaggtggtggagcgggcccagcaggtggcagtgcaggagcaggagatcgcccggcgggagaaggagctggaggcccgggtgcggaagccagcggaagcggagcgctacaagctggagcgcctagccgaggcagagaagtcccaactaattatgcaggcggaggcagaagccgcgtctgtgcggatgcgtggggaagctgaggcctttgccataggggcccgagcccgagccgaggctgagcagatggccaagaaggcagaagccttccagctgtaccaagaggctgctccgctggacatgctgctagagaagctgccccaggtggcagaggagatcagtggtcccttgacttcagccaataagatcacactggtgtccagcggcagtgggaccatgggggcagccaaagtgactggggaagtactggacattctaactcgcctgccagagagtgtggaaagactcacaggcgtgagcatctcccaggtgaatcacaagcctttgagaacagcctgagccttcagccctcacagatgcccagcctcatagctgaagttgcctgaatgatcctcctgttgcatgtaacccattttttttccctgagcatgtccattgacagtgaggtcccaccccccatctctccttgccaaatagtttgtgccttgtcttgaagggggttgctccccttgccaacctcacactgctatgattgccaactctagcggtcccatgtcagccttctgatgatccca

SEQ ID NO: 241391 - DNA, 1072 bp, Homo Sapiens
acaaaaaagttgggtcatctggccctaataactacctccagggctggcggaagaccttgctgatcgtctcccatgaccagggcttcttggatgatgtctgcactgatatcatccacctcgatgcccagcggctccactactataggggcaattacatgaccttcaaaaagatgtaccaaagaagcagaaagaactgctgaaacagtatgagaagcaagagaaaaagctgaaggagctgaaggcaggcgggaagtccaccaagcaggcggaaaaacaaacgaaggaagccctgactcggaagcagcagaaatgccgacggaaaaaccaagatgaggaatcccaggaggcccctgagctcctgaagcgccctaaggagtacactgtgcgcttcacttttccagaccccccaccactcagccctccagtgctgggtctgcatggtgtgacattcggctaccagggacagaaaccactctttaagaacttggattttggcatcgacatggattcaaggatttgcattgtgggccctaatggtgtggggaagagtacgctactcctgctgctgactggcaagctgacaccgacccatggggaaatgagaaagaaccaccggctgaaaattggcttcttcaaccagcagtatgcagagcagctgcgcatggaggagacgcccactgagtacctgcagcggggcttcaacctgccctaccaggatgcccgcaagtgcctgggccgcttcggcctggagagtcacgcccacaccatccagatctgcaaactctctggtggtcagaaggcgcgagttgtgtttgctgagctggcctgtcgggaacctgatgtcctcatcttggacgagccaaccaataacctggacatagagtctattgatgctctaggggaggccatcaatgaatacaagggtgctgtgatcgttgtcagccatgatgcccgactcatcacagaaaccaattgccagctgtgggtggtggaggagcagagtgttagccaaatcgatggtgactttgaagactacaagcgggaggtgttggaggccctgggtgaagtcatg

SEQ ID NO: 241392 - DNA, 2133 bp, Homo Sapiens
ttgggcccatgatcgaggagctcaaacccccctctgccagtgtagtccagacagcaaacaagacggattctccttccaggaaaagagataaacgaagccgacatcttggtgctgacggcgtctacttggatgacctcacagacatggatcctgaagtggcggccctgtattttcccaaaaacggagatccttccggactcgcaaaacatgcaagcgacaacggagcccggtcagccaaccagtccccgcagtcggtgggcagctcgggcgtggacagtggcgtggagagcacctcggacgggctgagggacctcccttccatcgccatctccctctgcgggggcctcagcgaccaccgggagatcacgaaagatgcattcctggagcaagctgtgtcatatcaacagtttgtggacaaccccgctattatcgatgaccccaatctcgtggtaaagattgggagtaaatattataactggacaacagcagcacccctcctcctggcaatgcaggccttccagaaacctttgccaaaggccactgtggaatctatcatgagggataaaatgcccaaaaagggaggaagatggtggttttcatggaggggaagaaacaccacaatcaaggaggaaagtaagccagagcagtgcttggctggcaaggcccatagcaccggagagcaaccgccgcagctcagcttggccaccagggtaaagcatgaatcatcctccagtgatgaggagcgcgcagctgccaagccatcaaacgcaggccacctccctcttctgcctaatgtcagctacaagaagactctccggctgacttccgagcagcttaaaagcttgaagttgaagaatggccccaacgacgtggttttcagtgtcaccacgcagtaccaaggcacgtgccgctgtgagggcaccatctatctgtggaactgggatgataaagtcatcatttctgatattgatgggacaattaccagatcagatactcttggccacattttgcccacccttgggaaggattggacccatcagggcatcgctaagctgtaccataaagtgagccagaatggatataaatttctctactgttctgcccgtgccatcgggatggcggacatgacgcggggctacctgcactgggtcaacgagaggggcacggtgctgccccaggggcccctgctgctgagtcccagcagcctcttctctgccctgcacagagaagtgattgaaaagaagccagaaaagtttaaagtccagtgtttgacagacatcaaaaacctgtttttccccaacacagaacccttttatgctgcttttggaaaccgaccagctgatgtgtattcatacaagcaagtaggagtgtctttgaatagaatatttaccgtcaaccctaaaggagagctggtacaggaacatgcaaagaccaacatctcttcgtatgtgagactctgtgaagtagtcgaccacgttttcccgttgctgaaaagaagccattcttcagactttccctgttcggataccttcagtaacttcaccttttggagagagccactgccaccttttgaaaaccaggacattcattctgcctcagcgtaaaatgtcccaagcagcctcttgccagcagtgcagagcctggttgtcacccattaaaggataggtctccccggagtgcacagctccacctgggagcctggcgcgtcatcattggcctgacagcagagagaattgagaagcatttctcccctgccccaccccggggctgacatttctaagcaagataggaagggagcactttctaggctaggagttgggtgcatttgtaccgtgaaaagcattcctcagttgtggcttaatgccagttacgacgctgcctttccggcctgctccagcaagtagctactggttcacgtgcagtttggggctgtgaaacctaggcagaaacggctgtctgagggctgtccccgcctagacagggtcaatcgaggaatgccagatgtgcacggtttttggcaaagtaggggcacatttccattatagcaatgttagtgccaccaccttctgaacacagtggggagggctgtgaagctcatgtgacctgcatctgagtctctgatagaaatctgga

SEQ ID NO: 241393 - DNA, 1300 bp, Homo Sapiens
ttggcccacaggtttctgtggacagcgatacagcaggagtcagtgaaatcaactggggagctcacttgagctcttgataagaaatgtggagaaaagtaaaaaccaagctttgaagaaacagaagaaattaatcttttagttagttgaacataccaaagcagaggactggaatctgtttgttctaaccaacccgttctccctggcttggcacgtgccgtgagagcgcagcttgccggagggagggccgctgtgtgcgcctcacatctggctcccagtggagacttttactcctcctcatccgcagatgtgatagaactgaagtatctaggaattctgcctttgtcatttgttttaatttgtgtgccctgttcattttttttgtctttcccaaatcttggtagtctccttatagttgaagataaaatgttgagtgcacttattttagaatatcctagacataactgtctaagtaaaagcgctctattaatctaaaacactacaagagaatttaacaccatctctcaaatgcttttttggagagcttaatgggattctgaatatttgcaatgtggagtttccgccccgatctcacgtcagtgagggtctcctgtctctcaagtgtgtttcctttggctgttccctaatacaaaacacggacatatttttactcgtagcactcaatttagtaacttctagatgctaccgttgacctgagttaaattcatttagtcgtgtacgtaaaaactctccttttagtgtgttattttcttggccttcccttttaaaggttaaagtttctaacctaagaattaagtacgcgttcaggaagctgttgtctaggccttccccttgtgaatctgggttcattccaatacggcaagtaagagttggaaactttgagaacacagactataaaggcagcagcccgaacactgtcagactctaattggcgaccctgggaaacagttgccctgctattctttaaagaaagacgtttattctgatgataaaaacagttagccagactgtttttaaagcacctggcgggaagcagaaggttggatccaagcccttgttcagatttggtgcctgataagacaggggtttctctttttgtgacctttattattattattttgttaactgttgtaaccagttagctgttgtgttttaagatagaaaggaacaagactaaaattgtaaatactttgtaaacatcagcatttgtacttgaatagtaggattttaaagggcattgatagcataccaaacaaaaggcaaaataaagtgacctttttat

SEQ ID NO: 241394 - DNA, 1130 bp, Homo Sapiens
tttacaattccaaaaatcctagggtccttaagaattttgctaaatgtactctgcctgtgctctatagactctatagatagaaaaactatgcctggatgacagcacatcttttaaaatcatggtttactgaagacgttaagtccaccattcagtaaaagatttcttttgaaatgctactgatcattaacaatgtacctggtcacccaagaactccaatggagatgtacaaggagttgaattttttaatgcctgctaacacatccattccatagcccatggatcaaggaatagttttgactttcaagtcttattatgcaagaatgttttttgcaaggctatagctgtcacagtgattcctctgatggatttgggcaaagtaaactggaaaccttctggaaaggattcaccatttaagatgtcattaagaacattgatgatttatgaggggggtcaaaataccaatattaacaggagtttgggagaagttgattccaaccctcattaataattttgaggtgtttaagacttcactggaggaaataactgaatatgtggtagaaataggaagagaactagaattagaagtggaacctaaagatgtgactgaattgctgcaatctcacgaaaaaacttgaacagatgaggagttacttcttatgcataagcaaaaatgaggtttctcaagtaaaagctactcatggtgaagacgctatgaacactgttgaaatgataacaaaggacttagaatgctaccttcttagttgataaggcagtggcagggtttgagaggacttgatcccaaatttcaaagttttacagagaataaaatgctatcaagtagcatcacatgctacacagaaatctttggtgaaaggaagagccaattaatgtagcacacttcactgctatctattaggagaaacccacttttagcaacaactaccctgattagtcagcggccaacagcacttgagtccagaccttccaacagctaaaagactgtaactcactgcaggctcaaagggtcattattattttttgaacagtaaagtattctccaattgagatatgcacattggtttttttagacacaatgctattgcatacttaataaactaaagtagcaccaa

SEQ ID NO: 241395 - DNA, 1137 bp, Homo Sapiens
  misc_feature (357)..(390): n is a, c, g, or t
  misc_feature (403)..(453): n is a, c, g, or t
tcactgacaccatagtctaactcacagatgtctaactcagcacaattgaaaaagtgctttttcccgtcctggtgtccaggaggtacattagctgcagacagatgcacagcactgattacatatttctgtagtgagcctctgagttaatagagcaaatgtgctgtgtctattaaacatctaaaacgtaaataaccacctttcaaagaaagcacttcatctgtaagaaacagcttttgcagaaagtggcttaagatattcaggcacatgaaacaaacacaagtatactcccctctctaagatgtaaactaggacaaacttcacatttcattatcaatttaaactaatctgtaaactctnnnnnnnnnnnnnnnnnnnnnnnnnnnnnnnnnnatatatatatatnnnnnnnnnnnnnnnnnnnnnnnnnnnnnnnnnnnnnnnnnnnnnnnnnnnctaatggtttcagttccatggcaacaagtaaaaagataaaactccaagtctacatatacaaccaattatgaaactggttttaaacgaaggaaacatatgcaaaaaaatctttgtgtatttgataaagtcaacttaatataacaaacaaattgaaatagcttattaaaagtgtccgtatataaaaatggccttgtgatgtacagtaaaatgcaataaaaattatcctcctttgttccttccccccacccccagtaactaaaatggctactgatccacaactctttatgcttctatataaaagaaacgtaatgatgtgattaaacattttctaggttgtatgcttggcgaatgttgagggtgtcccggagcatcaaatctcgaaggcgccagagggcatctgccatggtggtgtgggcccctttgcttttcagccagtgagagggtaggcggctctcctgttctttcgacaaatggacgtcgcgtcttcgagctgaaaattaaagtacagagagacagaaattagaattttaagttggcaaaatttccctcagttctaaggtctgacgaacttattaaaacacaaaacattgaatatttattaaatattatgaattttaactgcagaatatttccaggcacatttcttatatcattttactaggcactaaaagatttgatcataaa

SEQ ID NO: 241396 - DNA, 1037 bp, Homo Sapiens
  misc_feature (103)..(115): n is a, c, g, or t
cctttccttgaaatttaaattcataatggggcttttctacagtgattgaaactggtaatttatcacaaaataaattaaaagaaaactcctacatataataccnnnnnnnnnnnnnaaagggaacacgctatgggatagagactagagaaagcagtgggacaaactgctgaccagcaaaaaagccgtataaactttcttttctgtgttgaatcttcagtcacaactagcaatcaccgtatcccagctttgttcttactcctaaacatttctatcccagaagcaactcttgtgctgtcatctctctggtgagaagtgctaaaaatgaaacaagacaagacccctgggccccaaggacctggattcctggccgagggaaagtgggccagcaccacagccctggtcccccagcaagaagcaaaggggctcttgggccaccgtggcgtctgtgctgcctccacctagcactccagcgggcacagccctgagggtgccgccctgggccagcctggatcccggggtcccactcaacgccagtgcgaaggagttcccttgggatgttctggttccaaagacaggtcagtcggtccggtgaggggggtggcgagggccacaacaggccctgccggaccacgctctgctgctcccttggactcagcagctgtttttcgtgggatggaaggattaaatagccattaagaaaaatagtaatccaaatgcctagtgtctgcggttaacactgctgttgtacccaagaattaaaaaaatatatatatatgtgtgtcacaacctaagcaaaggcaagggaaagagagggtgaggcttctcaaccacggtgagtggaaacactgaacaaagacgtgtgaaatattaacctttgtttttctgacctgagtttgtatcatgtcttgcactgtaacaggctccaatgctgtgagggcaggctggggagaggagcgcggccctctcaggatgggtgcccggcctgctttctgcctcgtgcccagagagcctacgggttagaaaacaactaaagccaa

SEQ ID NO: 241397 - DNA, 1029 bp, Homo Sapiens
  misc_feature (236)..(252): n is a, c, g, or t
  misc_feature (275)..(308): n is a, c, g, or t
  misc_feature (411)..(423): n is a, c, g, or t
ggacatctcagaaaaaggcaagctgtctgaaatgagcagagagggtgagttagtgttgctttgaccccggaatacagcctggcttccccctgcatcacctgggtgtggcgcctgtggcgtggatgaggttaccagtatcaacggcctattgtcaggtgctgagaaaggtgagatgtattcttttgtctatatacacatataaaaaataagagtgaggtagataaatgtttgggggnnnnnnnnnnnnnnnnntcaagaactgtcccatcactctnnnnnnnnnnnnnnnnnnnnnnnnnnnnnnnnnncctttccttgaaatttaaattcataatggggcttttctacagtgattgaaactggtaatttatcacaaaataaattaaaagaaaactcctacatataataccnnnnnnnnnnnnnaaagggaacacgctatgggatagagactagagaaagcagtgggacaaactgctgaccagcaaaaaagccgtataaactttcttttctgtgttgaatcttcagtcacaactagcaatcaccgtatcccagctttgttcttactcctaaacatttctatcccagaagcaactcttgtgctgtcatctctctggtgagaagtgctaaaaatgaaacaagacaagacccctgggccccaaggacctggattcctggccgagggaaagtgggccagcaccacagccctggtcccccagcaagaagcaaaggggctcttgggccaccgtggcgtctgtgctgcctccacctagcactccagcgggcacagccctgagggtgccgccctgggccagcctggatcccggggtcccactcaacgccagtgcgaaggagttcccttgggatgttctggttccaaagacaggtcagtcggtccggtgaggggggtggcgagggccacaacaggccctgccggaccacgctctgctgctcccttggactcagcagctgtttttcgtgggatggaaggattaaatagccattaagaaaaccaacttttttgtacaaagt

SEQ ID NO: 241398 - DNA, 1635 bp, Homo Sapiens
  misc_feature (146)..(185): n is a, c, g, or t
  misc_feature (381)..(390): n is a, c, g, or t
tttgagatatctatcagcagttcacaagccaggctatacatcagaaccctccagaaagatttagggagtgttgggtaggggaagatgcttgacttccattcccagagactgctacagtggatctggggaaggaccaggaacctgtnnnnnnnnnnnnnnnnnnnnnnnnnnnnnnnnnnnnnnnntactggtttataaggtctgaattacgacctagctctagagacctagtttgcattcacacctcccagctcctcacctgacttcttatatccaccaaagggcaactccactgggctgacgttatagttgttaatgaagcacgtcccagcctgaagctcagctaccactctatgagcccgttggatgtccctatgaagnnnnnnnnnntgtgtgcattattgagagtttcttaggctactactttaacaggaaaagttacactgccagttctagggttctcaaatcttactaaattctcatttcttcaaaatgttttaaaatcttttatcatccaggcaaaacagatatggattgggttttatagtcccatgcacatggtatctttaaaataagtaacagcaataagggtaccaaaattcaatggaggaaaaacagtctttttaacaaatggtgctgaaacaagtggatatctacatgcaaaaaataaaggtggagccctttcttacaccatacacaaaaattaacttaaacgcatcacagacctaaaaatgtcagactgagaactataaaactctttgaagaaaacagaggaataaatcttcatgaccgtgggtcagggaaagatttcttagactatgacaccaaaagtaacagataaaaaaaacagaattagaattggtcaaaatttaaaattttgtgctacaaataagactatcaagaaagtgaaaagaaaacccacagaaatgcaaataaaaaccacaatgagatactacttcacacccacaaggatggctaaaaccagaaggacagacaataacaagggctggtgaggatgtggacaaattagaaccttcatacgttgttcggaggaatgtaaaatggtgctgcgaatttggaagagtttagcagttcctcaaaaagttaaacataaagttaccatgttacccagcaattcactactagatatacacccaacagaaacgaaaatatatgtccacacaaaggcctgtacacatatgttcatagcatcattattcataatagccaaaaatgaaaacaacccaaatgcctgtaacagatgaatggacgaacaaaaagtggtacatatccataccacggaatattatttgggaataaagtactgataaatgccacaacacaaatgaaccttgaaaacattatgctaagtgaaagaagccagtcacaaaagaatatatactgtatgattccatttatataaaatgttcagaatgggcaaatccatggagatagaaagtagtttagtggatgccaggggctgggggtggggagtgggaatgaagagcaacagttaatgggcacaaggtttcttcttgagatgatgaaagtgtcctaaaaatagattatggtgatggttgcacaactccatgaataaactaaaaccactgaattttacgagggggtaagtgggtg

SEQ ID NO: 241399 - DNA, 1052 bp, Homo Sapiens
ttggtacaaggtcagcgtctacttgcagaattggtctcatgtgctcagctacgtcagcaaggctgagtccaccccagagattgccgagcagcgaggagagcgtgacagccagacccaggccatcctcaccaagctcaagtgtgccgcaggcttggcagagctggccgccaggaagtacaagcaggctgccaagtgcctcctgctggcttcctttgatcactgtgacttccctgagctgctgtcccccagcaacgtggccatctacggtggcctgtgcgccttggctacctttgaccggcaggagctgcagcgcaatgtcatctccagcagctcctggacatgtatctggccccccatgtcaggaccctgtacacccagattcgcaaccgtgccctcatccagtatttcagcccctacgtgtcagccgacatgcataggatggcggcagccttcaataccacggtggccgccctggaggacgagctgacgcagctaatcctggaggggctgatcagtgcccgtgtggactcacacagcaagatcctatacgcccgggacgtggatcagcgcagcaccacctttgagaagtctctgttgatgggcaaggagttccagcgccgcgccaaggccatgatgctgcgggcagctgtgctccgcaaccagatccatgtcaagtccccgcccagagaagggagccagggggagctgactccagccaacagccagtcccggatgagcaccaacatgtgaggggtgaaccttggcctccaggacatctgcaccccctccccacctccacggacctcggacctccaggcggctcagtgctgcctgcggcccagctaaggggcctggccactgggtgccacccagcctgtgtgccctccctggggctgaggaggcaggcggctgctatttgtggcccttcctggaaggagaggcctgcagggctcgaccctgtgggtttctgtccccagggagcagactgtgcggcacccaggcccagtggcaccatttcccagacccctcctgttcccgcctcagtcaggtgc

SEQ ID NO: 241400 - DNA, 1053 bp, Homo Sapiens
gaaatctgacatatcattttatttgaaaagtgaacagtttctttgttgttgcatcaaaatacagtccacagtttttactgaaatgtgtttattctatagcaagataaaagcatttttgttttagttaagcaaaatacaaacaacttaattgctgctatcataactcataaaaaagtataaaacagcataaaaacacaataagcaacgtagcaatgaatggtttatgtcacccagtgtttacgttaaagcctcatttaggaaaactttacagcacatgatatgaaaacttacaactttgaaagaaaatatttacattgattattcagatgtggtgtgccttttaaatattctactggtattacatcataataaaaactcttgctttttctttttaaatcttaacttttgtaataactgttttcatttaagtgcatttcccttttaaaaatacagtgtttttatttttcgaaacttgtcactcaaaacacggaatatagtattcacatttttttcttctaattggaatgaatataatgggctaacagtggtcatagatattgttacaacatatactgtggtttgatttggagaagtcatggataaaaagtggaaattagtcaataattgaatttagtcacttgcattttttttctggagagatttaggaaaaaaaataagagctttggcaaaagtctgtgatttacattatttttttcatgacaaaaaaatgccatcaactattcacgtcatacaaatgtttgtatgaaactggatcttcatatttcaggtagttacaactgtgctttttatttttagggcttcaggagttcagatagcctggaagtgtggtttactcacttctggagaaataaggccatttttctatgactcagagaggccagtttatagtcatcagtatgtcccaggattcattaaacagtttgattcacatattgtaggtatagcctgaataaataaaaaaggcatcacataaaagagcacagcttttcttgtttaaaaacaaagtgatttatagtcagctaaaagatccaa

SEQ ID NO: 241401 - DNA, 904 bp, Homo Sapiens
  misc_feature (572)..(628): n is a, c, g, or t
ttggcaagcgccttctccgcaccagggaagccccacccaccagaagccaagatgtccagcaagcgggccaaagccaagaccaccaagaagcggccacagcgggccacatccaatgtcttcgcaatgtttgaccagtcccagatccaggagtttaaggaggctttcaacatgattgaccagaaccgtgatggcttcattgacaaggaggacctgcacgacatgctggcctcgctggggaagaaccccacagacgaatacctggagggcatgatgagcgaggccccggggcccatcaacttcaccatgttcctcaccatgtttggggagaagctgaacggcacggaccccgaggatgtgattcgcaacgcctttgcctgcttcgacgaggaagcctcaggtttcatccatgaggaccacctccgggagctgctcaccaccatgggtgaccgcttcacagatgaggaagtggacgagatgtaccgggaggcacccattgataagaaaggcaacttcaactacgtggagttcacccgcatcctcaaacatggcgccaaggataaagacgactaggnnnnnnnnnnnnnnnnnnnnnnnnnnnnnnnnnnnnnnnnnnnnnnnnnnnnnnnnngtccataccagctccctgcccatgaccctcgctcagggatccccctttgaggggttagggtcccagttcccagtggaagaaacaggccaggagaagtgcgtgccgagctgaggcagatgttcccacagtgaccccagagccctgggctatagtctctgacccctccaaggaaagaccaccttctggggacatgggctggagggcagacctagaggcaccaagggaaggccccattccggggctgttcccgaggaggaagggaaggggctctgtgtg

SEQ ID NO: 241402 - DNA, 1302 bp, Homo Sapiens
  misc_feature (691)..(945): n is a, c, g, or t
  misc_feature (953)..(980): n is a, c, g, or t
aatttttagccaagaattatgatccccgcatgaatcttgcagtgttttgagctcccaatgccagattcttactgagataccaatgatagttggatttttaaatgatctcattagcacctcatagcaacctgtgaaactgctagagcagatgtgagtatcttcaccttacagatgggaacgtgagttgcaaagaggtgagaagacaagtgaccagtttgtggtagagctggaattcatagtcaagttttccagcttttaaaactcatgctcatattttaaattagacccccaaaatttatgtaccttgatgctttttgttcccaaactgtcttcccattgtgtgttctaaggaacatgctcatttaaacttctggctgtttcctctaaaagcagctcaaaataacttcaatgaaatgtggattaacaaaaaaagtattctttgttttctttgggaactgttacataagttctgcttgacatgattctttgtgttttgtttggcttttactgttgcttgggcaggggaaattaattttataaaattaagcaactacttatttcatggtagtcagtggaaaagggacagtatgcagaaatgaacctcaacttcagatactaagtaaaaactcttattctgtaactgtcatctgttaacaaaaatccagtcttccggcctggtgtagtggctcannnnnnnnnnnnnnnnnnnnnnnnnnnnnnnnnnnnnnnnnnnnnnnnnnnnnnnnnnnnnnnnnnnnnnnnnnnnnnnnnnnnnnnnnnnnnnnnnnnnnnnnnnnnnnnnnnnnnnnnnnnnnnnnnnnnnnnnnnnnnnnnnnnnnnnnnnnnnnnnnnnnnnnnnnnnnnnnnnnnnnnnnnnnnnnnnnnnnnnnnnnnnnnnnnnnnnnnnnnnnnnnnnnnnnnnnnnnnnnnnnnnnnnnnnnnnnntccgtctnnnnnnnnnnnnnnnnnnnnnnnnnnnntccagtcttccaagcatggcacatctctcttaaggaccagaaatggatttcaaaccatcctgttgtatcttttcctcagagaaggaactgctgcttctctctgtcgctatctagaaaccagcaggctccatgatggctacttataatttatttataaaacattttaccagtgagtgatgtctcaagtgagaggtggtaacagatacacaaagcagtttatagcatgcaatatttcaatgcctctgagaggtagaaacagcttgtgctctcagatggccctcagtccttccccttgtcatctttctgtcctagactgtgccaa

SEQ ID NO: 241403 - DNA, 926 bp, Homo Sapiens
ccttttaaagccaactttgtacaaaaaagttggggaaactattcccctttttaagttccttccaaatatgttagtacctaccctttactttttccccaagaccatctcagggtggagcattctgtctaagagaagaaagataaggaggctcccacccacctctcccaagagcagacattaaacatctttgtgctttgaagagagtgaattttggatagtcttgtgattctcagactaacttccagaattatactttaacccctcccagatatggtccgcctttggcattgtgtgtacatctgcagttttgcatggtgggttgttaatatttcaaatgtgtggtttatgaatacgtctgtataatcggcttctggagtgaaacagcaaaccccaaatcttcaaagttggaaggaactttaaaaatcatccggtccaatctctttcctctttctgccacctcccaaggcagaaatcccctcttcagcttcttttgtaggtgggaatccagcctctgttagatatgtccagagatggaaactcactcccctacaaaagatggagcttaatggagaaattgcaactttcattaaaaaacaaattcagatgaaatatcagtaactgtcttggacagtgctgaaatcaggtggttaaacgggtaaacaaaatatactgtattttgagaaatggcacaaaaacaggcagtcatctttaagggctatgcctaggcaaactactaacatgcattgtgagaatgccgtgtatacctcacgtactgtgtactttgtacatatattttaccttttatacctatgttcgattttgttttgttttgttctggctttgaggcttgttttgttgtctgtgtctgtctgaataacctgcgtgtctaaaaccacgtgaaatgtgaatgattattggcaatatta

SEQ ID NO: 241404 - DNA, 955 bp, Homo Sapiens
ttgggtcactttggctggtacatgtgctccctgtcattgttccactattctgaatacttgttggcagcagtcaataatcccaaaagtctgtccttggattcctttctcctgaatcacagcctggagtatacagtagctgctctttcttcttggttagagttcacacttgaaaatatcttttggccagaactgaagcagattacctggctcagtgtcacagggctgctgatggtggtcttcggagaatgtctgaggaaggcggccatgtttacagctggctccaatttcaaccacgtggtacagaatgaaaaatcagatacacatactctggtgaccagtggagtgtacgcttggtttcggcatccttcttacgtcgggtggttttactggagtattggaactcaggtgatgctgtgtaaccccatctgcggcgtcagctatgccctgacagtgtggcgattcttccgcgatcgaacagaagaagaagaaatctcactaattcacttttttggagaggagtacctggagtataagaagagggtgcccacgggcctgcctttcataaagggggtcaaggtggacctgtgacgggcagtggccccggtgaccttggggcctccgaccctgtgcagcctgggacaaaactgtttccggttggccgctgccacatggattttcttaatcgttttatgtcattagtcactcttctggaatgtcactcaagaccaagcggtcagaaggcctgaggacccaaggccccactggagcagtctgtccttatgccgaatcaaggcggaacatgggtgaaagacgagtaagggcaaatcacagcaatattccacagcgccctccagagttacctggggaggaccgaggccacacgccactgcccccgaggccagagtgtaagtaaaggataaccaggactcgctgggagagatggactctgtcctca

SEQ ID NO: 241405 - DNA, 926 bp, Homo Sapiens
aaacgcaatggaaactgggaaacgcgtgggccgtgctgagccggaacaccgggattgggacctggcgctgtgcagagagcgtcgtacacgttacctcgcgtaatgggctcagcaattcaaaggaaggggaggggttccattttgcagatgaagaaagaagctcaggggtgttaaataacttgcccgagttcggtaggagtccagactcaacccggaaacgaattcctctctaccgtgccccagtagccagcttgggacggggcaagtccctcaagccgtctacgccccacttttctccatctgtaaaatgaggccggtgacgcccctccacggccccttgtgcttcgactcggggcgggacctgggctgtcgcgggcccgggcgctcggagggccgagccggcaggagaggagagagcctgggaggagaggaagagcggcggcgtggagctggctctaccagcacctcacttgtggctgccgtgccagcgcctcccgcgggtggaagtggctctcctgcgccttgcggaaggcgtagcagctctggccgtagtcgcggaaggtctgtagatctagctgcgccacgggctgggccgggccgggcagggggctaccaccccgcgccgcagaggggctctctgcgccgtctgagccggagctgggggactcgaacaggtcgcaaatgccggagtctcccgggagcgggcacgggttcaggggatgcagcggctgcttcctccggaggcgcggacgcctgctcttcttcaccggggcgcgaaggttctggtcgttgtcccgcctccccgctcgggcggcggggctcgaggggctggtgggacagggggtcaccatgatgcggccgggtggccgctttactaccttcaacgcccgggctgcggcgggcagcaaacgccactcgaaagccaa

SEQ ID NO: 241406 - DNA, 2253 bp, Homo Sapiens
ttggccctatcatcccccttccccttttccttcctgtactgggattggagctgctaccttcgggggtcccttagggctgagatagtggaggcgctacccgagggaccagggtgaaaggggtcctgaaaaagactaattctctgggctggtatagtccttggccgggaggggcggggcatgcggcagtgcctggactgaggtttcagctacccctagtcgctgcctctggcttgctgcctctcgcttccctctcctgccctttgtaccctgcttctctgtcgtgtgtgggttcagctctggggagaaggggctttgggggtctccaggatcagaattcctgtactccatccacgcctccactgcagccccttcgactccaccggggccctgaggcggctggggtggggctgtctgggccccagtgggggagacctggggtcaccagctcccccaacccttcctcgcactcgctggtactatgccctgccaccacaggcccctgtgtccgtctgggatgaggaggaggatggtgccgtgtttaccgtcacaagccgccaatatcgacctcttgatcccttggtccctatgcctcccccacgttcctcccgacggctccgagctggcactctggaggccctggtcagacacctactggatacccggacatcagggactgatgtgagcttcatgtcagccttcctggctacccaccgggccttcacctccacgcctgccttgctagggcttatggctgacaggctggaagcccttgaatctcatcctaccgacgaactagagaggacaacagaggtagccatctctgtactgtcaacctggctggcctctcaccctgaggattttggctctgaggccaagggtcagcttgaccggcttgagagcttcttacttcagacagggtatgcagcagggaagggtgttggggggggcagcgctgacctcatccgcaatctccggtcccgggtggacccccaggcccccgaccttcctaagcccctggccctccccggcgatccccctgctgaccccacggatgtcctggtgttcctcgctgaccacttggccgaacagctgaccctgctagatgcggtgagaccctgacctctggcccctatgccccctgaccccttactaacctctccttgactccagatcctttccttgcttccaccccttcctgatccagctcctagcctcctccacctaccattttgattctccccttttccctttggtcgttacccttcaaaccctgtgcccctctggttccttggccacctgagatcctcagatccctgatattggaaggctgacctcacttgactatgaactttaacctctgacctctaccctgcaggaactttttctcaatttgatcccctctcagtgcctgggaggcctgtggggtcacagagaccggccaggacattctcacctctgcccatctgtccgagctactgtcacacagtttaacaaggtggcaggggcagtggttagttctgtcctgggggctacttccactggagagggacctggggaggtgaccatacggccactccgtcccccacagagggcccggctcctggagaagtggatccgcgtggcagaggagtgccggctgctccgaaacttctcttcagtttatgccgtggtgtcagccctgcagtccagccccatccacaggcttcgggcagcctggggggaagcaaccagggacagcctcagagtcttttccagcctctgccagattttctccgaggaggataattattcccagagtcgggagctgctcgtgcaggaggtgaagctgcagtctcctctggagccacactccaagaaggccccgaggtctggctcccggggtgggggtgtggtcccataccttggcaccttcctgaaggaccttgtgatgctggatgcagcctccaaggatgagttggagaatggatacatcaattttgacaagcggaggaaggagtttgcagtcctttctgagttgcgacggctccagaatgaatgtcgtggctataacctccaacctgaccatgatatccagaggtggctacaggggctccggccactgacagaggctcagagccatcgtgtatcctgtgaggtggagccacctggtttccagtgaccctcctgccccacgggtgcttcggccaacattgggtcatctcgcagtgggacagaggttttgggctctgttggggtgcctaccccgcttgtgtc

SEQ ID NO: 241407 - DNA, 1526 bp, Homo Sapiens
tccagggcataattcccaacaggacgctagtgtagaatcttctcatggatatggcagaagccctgcagggcttaaaatgcagtccaagctgcaagaatgtctgggcttcaataagcatccatcttattctccaaatagaagagagtaaacatggacccaaggcttgtattcatcttgcatttccacaaacttgtcttattagattagaataatcaataagccttgcagatacccagtgaaactgacgaattgcttctcttgcattatctgaataagaacatcttctctttcctacctctagaagctggctccagagatttcttcatttctctcccggatgaccttcatttgttcctcagcagcatttacaaaagtcagttatgtctctacactggaggtggactctctcacgcataaacctgcatgttgttgtgtggtggctcagacatgtgtgtcccaggtccccgctgacctcctccagcacccccaggggtagggctggtggtcacatctgaccagtcagaagcagagtggggtgatgaacttgaccactggtcaggagactctggggatggtgtcaggtagggatgctcaccctggaggtgaccactgtgactgggtgttcgctcagcagcatttgaggaagcataactgtgctgtgaagggggtgtggggtacttgcccacagaggctgggaaaggatgataggctgggagaatggtctgagctacctgcccgtcctgctggggcatcatggcagtggggaaagccacactgggcaaacgggccatttctggaatctggtacatggtgggcagggggcccgcaacagctggagggcaggtggactgaggctggggagcccccgctggttgggcaatactgcctttagggatgagctggaaagtcacaatggggggcaagggctcccgaggggtggttatgtgcttcccttcaggtggcctgctctggggagctatgccaggatgggtgccctcagctggagccaggaccataccaaacatctcattgtactgggtctcattcacctccatgcggttcatccaatctgctgggactgggactggatggagcctactcaagcttccagcactgccactgcctggagacacaatgtggtggtgggatagcaactggctcactgagggaagcacagtgctggccccatgtgccaaaggctgcatttcatgaaggttagaaaaagatagtgcatgctgggcatggactggggcaggaggggcggcagtggccaacatagggttgggtgaggcctgtaagatcccaggggatgtaatcattggagaggatgtggtgtcggaaacatacgtgtgaggagattctagggaatcaacaggggataaagttactgaactctcagacagttggaccttctcactcagagacttcttcctcctactacccttggcatcctttgcctccttggcaaggttagggaggctagtaggcatggtactcttggcactgggccgtctagacttctccaa

SEQ ID NO: 241408 - DNA, 1878 bp, Homo Sapiens
  misc_feature (1421)..(1441): n is a, c, g, or t
gagcaatgcttttttcataatgccaactttgtacaaaaaagttggcttatttagtccaccatgggtactgtgccacagcagaggcctttgccagatctacagaccagaccgttctagaagaattagcttccattaagaatagacaaagaattcagaaattggtattagcaggaagaatgggagaagccattgaaacaacacaacagttatacccaagtttacttgaaagaaatcctaatctccttttcacattaaaagtgcgtcagtttatagaaatggtgaatggtacagatagtgaagtacgatgtttgggaggccgaagtccaaagtctcaagacagttatcctgttagtcctcgaccttttagtagtccaagtatgagccccagccatggaatgaatatccacaatttagcatcaggcaaaggaagcaccgcacatttttcaggttttgaaagttgtagtaatggtgtaatatcaaataaagcacatcaatcatattgccatagtaataaacaccagtcatccaacttgaatgtaccagaactaaacagtataaatatgtcaagatcacagcaagttaataacttcaccagtaatgatgtagacatggaaacagatcactactccaatggagttggagaaacttcatccaatggtttcctaaatggtagctctaaacatgaccacgaaatggaagattgtgacaccgaaatggaagttgattcaagtcagttgagacgccagttgtgtggaggaagtcaggccgccatagaaagaatgatccactttggacgagagctgcaagcaatgagtgaacagctaaggagagactgtggcaagaacactgcaaacaaaaaaatgttgaaggatgcattcagtctactagcatattcagatccctggaacagcccagttggaaatcagcttgacccgattcagagagaacctgtgtgctcagctcttaacagtgcaatattagaaacccacaatctgccaagcaacctccacttgccctagcaatgggacaggccacacaatgtctatactgatggctcgatcagaattggatcctgcgcatttgccacagtggaagactacctacatagctatgcatttcaagagctcacacttatattgtggcatatagtcaacatggaagtagaccagctctgctgatttgaaatttagattttttaaattatgtactggggacaggtttttgtcgctttacattgcttcctagtttacagcatgatgcaaatgattttctaacttagtgttaggagaaattattttccatctttaacctcttagttgtctaagagttaaatattactgaatttcagacgttcaaattgatcatcacaaatcctttaaaacaattacctaaaagaaaccaaaaatcctgccttctttgtnnnnnnnnnnnnnnnnnnnnnaaggaaatggaacaagttgtgtttgtgttagcatgtgggtgatgtaaacttcaaattgggagatgttccgacccccactcccatataagcattcaatcagtgtaacttgcaaaatgcataaacatccgacagtttgaatttatagtgttgatggaagaaatcatttttaatgtgtactgtaaaacttgaaatactcaggagctgagtgaatatgtttgttgctacttacaatcccgacctgttagtcccagtagttttgttttaacatggtctttttcaactttgtttcctgtttaactacagatgacttctgttgtagactcacaagtttaactgttgtattataacagtattacatgtcaacggtgtggttatgacctttatttatataaaaaccaaatatttagtcaatttaccgtgtcttaatttaatctttg

SEQ ID NO: 241409 - DNA, 1136 bp, Homo Sapiens
  misc_feature (74)..(82): n is a, c, g, or t
ttggcctaactgcatttcaactcatcttttaagtgatttcagtcaaaactggaaaacaactaagatgtagtaannnnnnnnncctggttcaaaccttcaataacttgctcattcagcagtctctctgagctacatttttatttgtaaagtgactctgtctgcatggcaatgagcaggtgcgtgttttttccacattcgccctttcttgcagtatccagggaaacacatcattacaaagggtttctacctgaaatctttcatggaaggcctacaattcgaaaagctgcacatgtttacagaagagctcttaccctccatgcaaacactttgctctgtggtgtcacagctttgtgacaataagatggcaatctcggatctacaaggtgctgtcgggaatcaaataaaatatgttatcagagatatcatcacatctatagtgtttaacagagctttatgccaactactaagacaaagctttaacaaagtttatagaatactgaaactcgtaacaattacctctctacgtgatgctgtaaggaatcttgctaatttggtaggaagaggaagcatttaggaaagggtttagtatctaccaaaagtacttgacctcaagtaaccaatagtaatgcaaacttgctttaaaggaaccaaaggcattgccaagtatttgccaaaaggaggcactttttatttaaaatttgagactaatgagatctcaaaaatcagccccaaaaaggtattatccatttaaggttataattttcactaagatgtagatatttctcttattgttttcatgtaaaatagtatagagttgttttgttggtttaagagtaacattcagtagtaatacaaagttttttttctatgtagaaattagttttcttttcttgcttgcaatagaaatgcaatgtgataggtgtttctcttcttattttcattgtcacattatgtcttagcatctcactttatgaaaaaaaggagaaagataccaatctacagagccctgcttgttgaagcactagtttaatcaacaaaaaattatggcaatcgggggtccattcatctattgcctttatgttgtttttaaaagaaaaaccatgatgcctttgtatttgctgtttgcacccctgaaa

SEQ ID NO: 241410 - DNA, 1129 bp, Homo Sapiens
ttggcaccgcgaatgaagtttgcattttcctctgttcttgagcccagcttcttctcgtctcccaccccagcttcccggcattggaagaagggaccgtcctcttccttgtcttggccacccaaatcctggtatcgaaagggttgaacggaccggaagtgtgcagcagcgacgggtccccagctaatcgacgccggaagtagcaattactagacaagcattccgccgccggcttcgctatggcggcaattcccccagattcctggcagccacccaacgtttacttggagaccagcatgggaatcattgtgctggagctgtactggaagcatgctccaaagacctgtaagaactttgctgagttggctcgtcgaggttactacaatggcacaaaattccacagaattatcaaagacttcatgatccaaggaggtgacccaacagggacaggtcgaggtggtgcatctatctatggcaaacagtttgaagatgaacttcatccagacttgaaattcacgggggctggaattctcgcaatggccaatgcggggccagataccaatggcagccagttctttgtgaccctcgcccccacccagtggcttgacggcaaacacaccatttttggccgagtgtgtcagggcataggaatggtgaatcgcgtgggaatggtagaaacaaactcccaggaccgccctgtggacgacgtgaagatcattaaggcatacccttctgggtagacttgctaccctcttgagcagctcttctgagatggccccagtgaaccagcttctagatgacatagaatgacatgtaatgctaaattcattttggctttgcaagtcatgaagcttaggaggcctggcatcttgggtgagttagagatggaagtacattttaataggatgcttcttttctcttcccccagtgcctaggttgccagagcatttgcacaaatgcccctgtttatcaataggtgactacttactacacatgaaccataatgctgcttcttgtgcatgtctgctctgatatacgtcgaacaatgtagcagccactgtcatttctcagtggttttgcctaaccaaacttcttcctaaggagatttatattctggcctacacagcagtcc

SEQ ID NO: 241411 - DNA, 881 bp, Homo Sapiens
ttgggttctgaatcgctgtgtgtcacccgggcgctgcccaggaagggcagggctggggtgatgaccatggtaacacccgggtgggagttcgtgacatctccggcgcggagggactcgatgtctatggcaatggtcgcctggtggaagggacggaactagatcccttcgctcgggacgctcacattccaggcccttgtcctgcaggctgccgcgggcggacacgccagaggaggaggccggggaatggccgcggtgtggcagcaagtcttagcagtggacgcgaggtacaacgcgtaccgcacaccaacgtttccacagtttcggacgcagtatatccgccggcgcagccagctgctgcgggagaatgccaaggctgggcaccccccagcgctgcgtcggcagtacctgaggcttcgggggcagctgctgggccagcgctacgggcccctctccgagccaggcagtgctcgtgcctatagcaacagcatcgtccgcagtagccgcactactcttgaccgcatggaggactttgaggatgatcctcgggccctgggggcccgtgggcaccgtcgttctgtcagcagaggctcctaccagctgcaggcgcagatgaaccgtgccgtctatgaggacaggccccctggcagcgtggtgcccacgtcagcagcagaggcaagtcgggccatggccggggacacgtcactgagcgagaactatgcctttgcgggcatgtatcatgtttttgaccagcacgtggatgaggcagtcccaagggtgcgcttcgccaatgatgaccgacaccgcctggcctgctgctcactcgacggcagcatctccctgtgccagctggtgcctgccccacccacagtgcttcgcgtgct

SEQ ID NO: 241412 - DNA, 1392 bp, Homo Sapiens
ttggagaactggaaggccatggaggcactggccacggccgagcaggcctgcaaggagaagctgcactccctgacccaggccaaggaggaatcggagaagcagctctgtctgattgaggcgcagaccatggaggccctgctggctctgctcccagaactctctgtcttggcacaacagaattacaccgagtggctgcaggatctcaaagagaaaggccccacgctgctgaagcacccgccagctcccgcggagccctcctcggacctggcctccaagttgagggaggccgaggagacgcagagcacactgcaggccgagtgtgaccagtaccgcagcatcctggcggagacggagggcatgctcagagacctgcagaagagcgtggaggaggaggagcaggtgtggagggccaaggtgggcgccgcagaggaggagctccagaagtcccgggtcacagtgaagcatctcgaagagattgtagagaagctaaaaggagaacttgaaagttcggaccaggtgagggagcacacgttgcatttggaggcagagctggaaaagcacatggcggccgccagcgccgagtgccagaactacgccaaggaggtggcagggctgaggcaacttctcctagaatctcaatctcagctcgatgccgccaagagcgaagcccagaaacagagcgatgagcttgccctggtcaggcagcagttgagtgaaatgaagagccacgtagaggatggtgacatagctggggccccagcttcctccccagaggcgcccccagccgagcaggaccccgttcagctgaagacgcagctggagtggacagaagccatcctggaggatgagcagacacagcggcagaagctcacggccgagtttgaggaggctcagacctcggcatgtctgttacaagaagaattggagaagctccgcacagccggccccctagagtcttcagaaacagaggaggcctcacagctgaaggagagactagaaaaagagaagaagttaacaagtgacctggggcgcgccgccacgagactgcaggagcttctgaagacgacccaggagcagctggcaagggagaaggacacggtgaagaagctgcaggaacagctggaaaaggcagaggacggcagcagctcaaaggagggcacctctgtctgagtttcctctttggaaaaagaagttactgttcaacttaccaaaatgccttacacattccttacaaataaaccaaccaacctacacagcgttatccaggtccaacttccggtagctccgagagaagccatgagagacaagtctcttagagccacagaagtagaccttccagagccccagtttgtaaatgaacctgtgtcacatttgataaacactatcctgggc

SEQ ID NO: 241413 - DNA, 1063 bp, Homo Sapiens
actttgtacaaaaaagttggcaaagttagacaactaaactagtttttcctatcatgttaacctctgcttttatctcagatgttaaaataaatggtttggtgctttttataaaaagataatctcagtgctttcctccttcactgtttcatctaagtgcctcacatttttttctacctataacactctaggatgtatattttatataaagtattctttttcttttttaaattaatatctttctgcacacaaatattatttgtgtttcctaaatccaaccattttcattaattcaggcatattttaactccactgcttacctactttcttcaggtaaagggcaaataatgatcgaaaaaataattatttattacataatttagttgtttctagactataaatgttgctatgtgccttatgttgaaaaaatttaaaagtaaaatgtctttccaaattatttcttaattattataaaaatattaagacaatagcacttaaattcctcaacagtgttttcagaagaaataaatataccactctttacctttattgatatctccatgatgatagttgaatgttgcaatgtgaaaaatctgctgttaactgcaaccttgtttattaaattgcaagaagctttatttctagctttttaattaagcaaagcacccatttcaatgtgtataaattgtctttaaaaactgttttagacctataatccttgataatatattgtgttgactttataaatttcgcttcttagaacagtggaaactatgtgtttttctcatatttgaggagtgttaagattgcagatagcaaggtttggtgcaaagtattgtaatgagtgaattgaatggtgcattgtatagatataatgaacaaaattatttgtaagatatttgcagtttttcattttaaaaagtccataccttatatatgcacttaatttgttggggctttacatactttatcaatgtgtctttctaagaatcaagtaatgaatccaactgcttaaaggttggtattataaaaagacaaccacatagttcgtttaccttcaaacttt

SEQ ID NO: 241414 - DNA, 1124 bp, Homo Sapiens
ttgggattgaaatgttgggcttcatgttgtttcaactgcagatgtgattcagcactgccagcgagtcaaacccatcattgatctcgtccataaggtcatcagtacagacctgtcgatagcagactgtctcctgcccatcacatctcgcatctacatgctgctgcagcggttaacgacagtgatctccccacctgtggatgtcattgcttcttgtgtcaactgcttaactgttttggctgcccgcaatccagcaaaggtctggactgatcttcgtcacacaggttttttaccatttgtggcccatcctgtctccagcctgagtcagatgattagtgcggaagggatgaatgctggagggtacggaaacctcttgatgaacagtgaacagcctcagggcgagtatggggttactattgcctttctgcgcttgatcaccacccttgtcaaggggcaacttggtagtacccagagccaaggacttgtaccctgtgtaatgtttgtgctgaaggagatgcttcccagctaccataagtggcgctacaactctcatggagtgagggaacagattggttgcctgatcttggagctgattcatgcgatactgaacctgtgccacgagacagacctgcacagcagtcatactcccagcctgcagtttctctgcatctgcagcctggcatacacagaagcaggacagacagttatcaatatcatgggcattggcgtggacaccattgacatggtgatggctgctcagcctcgaagtgatggggcagagggccaggggcagggccagctgctgatcaagacagtgaaactggcattctccgtcaccaacaatgttattcggctgaaacctccttctaatgtggtgtcccccctggaacaggctctctcacaacatggtgctcatggaaacaacctcattgctgttctagccaaatacatctaccacaaacatgaccctgctttgccacgtcttgccattcagctgctgaaacgtctggccacggtggccccaatgtcagtgtatgcttgtctgggcaatgatgcggctgccattcgtgatgccttcctgacccgattgcagagcaaaattgaggacatgcgcatcaaagtcatga

SEQ ID NO: 241415 - DNA, 788 bp, Homo Sapiens
actttgtacaaaaaagttgggaatctacttctgatccttacctttgttgcagctgctgttgctgccccctttgatgatgatgacaagatcgttgggggctacatctgtgaggagaattctgtcccctaccaggtgtccttgaattctggctaccacttctgcggtggctccctcatcagcgaacagtgggtggtgtcagcaggtcactgctacaagtcccgcatccaggtgagactgggagagcacaacatcgaagtcctggaggggaatgaacagttcatcaatgcagccaagatcatccgccaccccaaatacaacagccggactctggacaatgacatcctgctgatcaagctctcctcacctgccgtcatcaattcccgcgtgtccgccatctctctgcccactgcccctccagctgctggcaccgagtccctcatctccggctggggcaacactctgagttctggtgccgactacccagacgagctgcagtgcctggatgctcctgtgctgagccaggctgagtgtgaagcctcctaccctggaaagattaccaacaacatgttctgtgtgggcttcctcgagggaggcaaggattcctgccagggtgattctggtggccgtgtggtctccaatggagagctccaaggaattgtctcctggggctatggctgtgcccagaagaacaggcctggagtctacaccaatgtctacaactatgtggactggattatcgacaccatagctgccaacagctaaagcccctggtccctctgcagtctcta

SEQ ID NO: 241416 - DNA, 1182 bp, Homo Sapiens
  misc_feature (179)..(191): n is a, c, g, or t
caaacaaaccaaacaactgagagagggcatgctagtggagggaaaaggagagagtacaagagttgatactgcatcagagttccagggcagatactgacaagtgactgaactttgactgtgaagtcttcccatttatttttgaaatgggagtcgatgccttttgtacgttatcaaagtgnnnnnnnnnnnnncctcctttactcagacatagagcatcaaaatatcacgagtaaagccaaaccccagcttttcactggggctgatatcttcctccccatggcccactgccccctcatattccccagcacttggactgtgtcacatgggtattgattgtatacttgttgtcttggcctcatgcaaaaaggcctgggtctagatctagtcagatgagttttttttagagcatgttgatgatacaacacctgtttaaatgtctgccttatatgttatttggtcccactgttaataatagatttattactatgtatatttactattgaagatgggaatgtgatctgcatagttatcagtctattttgtatgttgtaaaaagcttctaatttaggtttaaggtgggctggctacaagagcactaaaactcctcaccttttaaactgctctttttatctgcttgtgggaatgtcgtctctttcgtggaagattgggtggtctcatgttgaggctgttgcccagtcccattaactcccttgtccccccacagaaggaagagacattgcccagctaagcatcaggaagctgtgttaaaagcccttctatgggtttggttttgtgatgtttttccctaatgggaaaaacgttatagttgtttcttactgccctgtctgggaagcagggcaaacctccaggtttttaaatgagctagatgcccctcttcctcttctctggtcactgaacctggaccaaagcactttgatattccaggtgtgattttctctgtcatggggatttgctccactgcagagccccatcattttcacagcgtagccaacagagtgagaacctagggctaccctagctgatggatgtgaggctgctgtctacaggagctcatcccagccctgttaactggcagtggcaagatactcgtcatcggccattgcactggggaactccctcacccatggcttcccaacttgaaacccagatttacttcaggga

SEQ ID NO: 241417 - DNA, 990 bp, Homo Sapiens
cacatattgtataattttcattatatgaaatgtccacaatagacaaatttgtagagacagaaagtaaattagtggttgcctagggatggtcgtggaggttgggggaaatggagagcgactggtaataggagtacagggtttctttttagggtgatgacaatgttctaaattatgtgatgatggttgcttaactctgaatacacaaaagccattgcctgatatactttaaatgagtacgctgtatggtgtgtaaatgatatctcaatagagttgttatttttttaaggattccatgggtatttctgctgattcagaaccactgccccacactacctaaactgtggaacagaaactcctgaagagtggcagagagtcacactcctctttgaaccgtgagagacacaaataccattgggaataaagagtgggtagattacaaggcaactctcaaatctaaactgaagtcaacagatggggtttgatgagaatgattcagaaaccagggaactatttgcagtaaagtgaatcaatacttaacagttccttgcagtccacaaattaaattgtcaagcatggagaaaagacacgagggctaaagagccccagcctcatgcagggagtggccgactgaagctcagaggccaaaagatagcaccagccctccatggtggatcagccatgcagaggtgggcacacatgctctgtcatccaggaccactctgcatgacaaccatgcaaaggaaaatccttcctcccgtcccgcagttaatgaaagaacccacagtaaagatcatcatggatgaacagacagagctcatcatggatgaggccccaaggaactgagaaaaaccctccaaggctccaatttttaaagaaatcaccttcaccatcagcactgtgataaatggcaacctggacccactgtgggcaaagctctaaggaagtgatgttacaccactcaccctctgtgccttcacacctagaagccaa

SEQ ID NO: 241418 - DNA, 792 bp, Homo Sapiens
ttggctcttccagctaatgaaccagctgaaggacctgaagaccctgaactaccggcacgcctatgacctcatccagaagtttggggacctggaggtcaccgtggacttcctcgcagaggtggacaagctggtgcagctgattgagtgccccatcttcacatatctgcgcctgcagctgctggacgtgaagaacaacccctacctgatcaaggccctctacggcctgctcatgctcctgccgcagagcagcgccttccagctgctctcgcaccggctccagtgcgtgcccaaccctgagctgctgcagaccgaagacagtctaaaggcagcccccaagtcccagaaagctgactcccctagcatcgactacgcagagctgctgcagcactttgagaaggtccagaacaagcacctggaagtgcggcaccagcggagcgggcgtggggaccacctggaccggagggttgtcctctgacaggcctggcacggaggagggcccaccgagtggtcccatgaaacactaagggtcgtcacgccctcccgaggagctcaaggacctgcctgtcaggaccagggctgggcctgccaacccagggcagtgttggggccggaggctgctgtgtctgcccaagctcctctcacagtccagtccccaggcctccagcgctgtcagctgcaccctggcattctcacagagctggctgcccacccagtgggggggctatagcctcagagaccactcatcctctggaatcaacctctttctaataccctcttggaaaaaagagcttg

SEQ ID NO: 241419 - DNA, 955 bp, Homo Sapiens
actttgtacaaaaaagttggctgtaatctcagaggcttgtttgctgagggtgcctgcgcagctgcgacggctgctggttttgaaacatgaatctttcgctcgtcctggctgccttttgcttgggaatagcctccgctgttccaaaatttgaccaaaatttggatacaaagtggtaccagtggaaggcaacacacagaagattatatggcgcgaatgaagaaggatggaggagagcagtgtgggaaaagaatatgaaaatgattgaactgcacaatggggaatacagccaagggaaacatggcttcacaatggccatgaatgcttttggtgacatgaccaatgaagaattcaggcagatgatgggttgctttcgaaaccagaaattcaggaaggggaaagtgttccgtgagcctctgtttcttgatcttcccaaatctgtggattggagaaagaaaggctacgtgacgccagtgaagaatcagaaacagtgtggttcttgttgggcttttagtgcgactggtgctcttgaaggacagatgttccggaaaactgggaaacttgtctcactgagcgagcagaatctggtggactgttcgcgtcctcaaggcaatcagggctgcaatggtggcttcatggctagggccttccagtatgtcaaggagaacggaggcctggactctgaggaatcctatccatatgtagcagtggatgaaatctgtaagtacagacctgagaattctgttgctaatgacactggcttcacagtggtcgcacctggaaaggagaaggccctgatgaaagcagtcgcaactgtggggcccatctccgttgctatgggatgcaggccattcgtccttccagttctacaaatcagcatttattttgaaccagactgcagcagcaaaaacctggatcatggtgttctggtggttggctacggctttgaaagagcaaa

SEQ ID NO: 241420 - DNA, 1447 bp, Homo Sapiens
agcaatgttccacattcatgtgggcttaatcttcaggggtggatggtatagggaagattcacagaattgccagaaacaattaagggtgagacagaggaggccacaaggggctggttcaatggacaggggaaggaaagtagggttaaccaagagggtggcgatgggaatagtctggggactctgggccacagccgcattgacaggctggatcatgttacagccaccgccaaggctcacaatcttcacagtggtagcaggaacagtgaagataacagatgcagggtggataacaggggcaggtttgatacagcgaaaggccctggctccccttctttttgagggtctccgtctcacatatggctttcgaaacatggaagaggcaggggagggcatcattaccttgggcacaggggcagaagagagcaaagtctgggactcagacagagggaagcttgtcctggcctcagggggcatagcaggcagtgctgcaggagactcaaaactctcacctccactgacccccagtggagggacacctggaactgtctgtaaaacagtggctggctgtattgggtgaggaatccggagcaccattttgctcggaggggcttctgaatgagttgattgggctggtgttttcccagggttgaagctgggctggagagaggggctgggttggataaggaggggtttcaggactgatgaacgcttctgtctccaagccttcttggggaaacggtcggcaactggcttcagtttcaggactacacccttaggcaatagcagtgggtaccgagtttcactccccaactctgagttgtctttttctaggccttgatctgagttgatctcagtggttccagtcatatttcctacctctctagcaccatcagccatgtgccgcagttcttcctggatggatggcagactggcctattggaaatgagaacactctgatccagcacatgtcagaatttgggaaaaagaataggactttctaagtttagggacctgagacaagctcaaggcatctttccaagggactctgcatatgaaatttctacaaagaccacagtccaattatacactttagaaactcttctctgaatttcctttagcaaattaccattttacccattattttgaaaatgttgtagaatcacccggagaagggcagaaaagtaagggaagaaaggtgaatcaggaagattcctgaagtcctagttctacaactaaagcattagacgattaaggaagtccttgatattctctcagaactttcagtgaccttctgcctcctacagacttcgaggaagagggctgtacctttaaccagaatgggagccggtgttcttctctctctataggtggcttccactgatgtggctggatctcttcacagcattttcctaggactggcagctgtttgccaacttttttgtacaaa

SEQ ID NO: 241421 - DNA, 1078 bp, Homo Sapiens
ccagaaagagcaaggtactgtatgcccagctggggaagggcaagacactcactgaccaggtgcccaccccaaggctcaggaccacccccattgcctgtgaacacatttgcatagcactcaagaaggtttcccagaatagcgacaggtaggcctacaaaccacaccaagaagaacgttcttaacagatggctcacgagagacataaaaggttctggaagtgccttcaggcccattaccatgactggccctgactctggccctcacagagcggcaagttcatgggtcactggctcacactaaatgctcagccgccagcacagatccaaacaagacctccatgagcagagaaactgcagcggctgaacacactccccaagcctcaggggagaaggtgtagaacaaatattttttaaatagccatcatgatgtccatgtttacatgaactaggtcctttgcttacctgctgtctcaacttctaaaagaatagtaattcagctgaaggactcccaaattaggaatgtcaaacacacaaaaagcaaatttctcagaatgctccaccatatgcttcgggacaaattatgaagctttgtaacagaattttgacccaagttctatttcttaattgactttaattttactagaagcgaatgttgataaaattacaacctatgacagttttgtgactatttcctaagtccagattcttacctgatatctacctttcgtatctgacagctgacgtcctaaaaatttcaaagtcagaaagatttctgcacggatgtgcaatgcaaacttatttcataaagcctctcaacttcataaaagggaaaaaaggttaagttacagggaggaagaaaagtgtttatgaagctgatgtaaatggcgtgtggggggtgcagcccactctttaaaacaccatcctgtgtgtgccaagtaccaagcaagcctgaagagatgcctgtaacttctaacctcctcctgaaccccaagactccagccctcacaggagttgtacatgtatgtttccattttgttgtgtggggctttttaaaagcatacactaacattgtgagccaa

SEQ ID NO: 241422 - DNA, 1152 bp, Homo Sapiens
  misc_feature (216)..(224): n is a, c, g, or t
gaaccgtttcttctttagttacaatccatgaggctctctagggcctctccgtgtggccagcacagcaaccatgctatgagcacaaacggctggcctgagatctggcccagctgccttgcccactggtctgcacagggactcatgggcacagcctgtggtgaggaggagacacctgtcatgccagtcctgggagcacaccacccttctgcaggcccnnnnnnnnntccctacacagacgccgctcatcctctgtctccccttcccaagtgacttcacttcagtcctgtggaccaagataaggctatccccacaggctctctcttcttcaaataatgagtaggaaaaagagacaaactttctgaaacatgcagtttccgacccaaataggccacataccccaacttctgtgttacttggtcagttgagcccctggagccctcaggacctactgataaagcatgtcctctgcagtatactcaagagtctgctgcccttcagaaagccagagggaacactcacaaatgcagaggtactagaggggagaaatacgtgctctgccttcccccaggccaaccacactctgctttagagaccctctcagaaagcaccagagaggaggaccagacgctgccacccacctcaagccacacccctgccacctgctgctgcgcccaatggaggtcctgtcctgtccgggcaacagccaaactggcgacaatggacacatccaacagtcagctgtcggataaggtgaaggtggcccaactgctcagagtaacactgttctcaaatgtttaaaaaggacaggtgaagtctgggtctccttttttaaagcagacaccaatacttacataactagtacatgttggcctttcaccagcactcactggcactcacaggtgccttacataccttacgggggccaacactgacaggtattagtacgtcgcaagttgctgtaataatgtatttcctctcgttactgttgtgtcccccaagacacatgcaaattatttcctagacctcattcatcacagccagatgatgccaccagaaagagcaaggtactgtatgcccagctggggaagggcaagacactcactgaccaggtgcccaccccaggggctcaggacccaacttttttgtacaaag

SEQ ID NO: 241423 - DNA, 1719 bp, Homo Sapiens
  misc_feature (163)..(173): n is a, c, g, or t
gtacacaatgacttaaaaataaaagtcacattatagggataacaaaaacaactacatcaatctaagctaaggagtgtcaaacagggagggctgggagttaccggttctattagtacaacttaagtggaaagcaagcacttaaatacaatttatggtaacaggnnnnnnnnnnntactgcagagagctgttcaaagaccacaccaagttgtctgcatcattaatttccagtgtttcacaattagtaaaatacatagctacatatccctgtgagataaaaatacctttccacctgaattacactgggatcagggcagtaacacgaagctactgacccaacattagttcaagtgtgtgcagcaaatgtcttagccacctctttcatatagctatataattaaaaactatgtaaggagctgggtggtttgagggaaaaaaattaaatcaaaacagtattgtgctcaattaataaaagaaaaccctgatgaaaaattatatgccaagaagcttagactataaagatttttattgcatttttaggtaacctggaagttcttatcctgaaggggaaaagtgggttttcaaaactacctgaacagatgctaaagtgctttattaattggctggcttcacaagtatttcctggaataacaaaaattaatcatagtaaagggataccaactatttcacaaaatgtacattccaacatcatttatgactacagtcataagagatactggaatacttgtccttattaagtggacagttgcatattcagaactgatcatcacaaccctttggatattcaaattacttacacaaagctgaaatatggtatcacagacctttgcaaaaaagaagaacttgtttctttttctacactttaaataatctgcttcagattacagttcacaaatacaagagtcctaacttttcaacctttccagttgcagtttaaaaatgaacactttctaaaagttaaggtcaagtgttacagcaagagaagaatgattcctattgaaaagcacatagattttagttaataatactcatgatagattgtaaactggattgatcacattctactcaactggtatcaaattaacacatcagcattacaagtattaaatgtttttctattactatagaggatataaaccaaaacattaatatggcagttatgttctttaggcacagtttagtgatttttttaaaaaataaatactattgaatttcaattgaagttttaaactcaataaccaaagggtcaagaactctgattaggaaaaaagaaaagataactttacgctaacaatgtaagctgtttaaaatttctaacacttaacctatctgagttttatttaagattactttattaaaaatacaaggaatctgaaaaaagatcaatacaattatcttaaagtacaaagtcataagctgtagcagtttttaactaaaatttaaaaacacaacaaggagggcagccctttagaccaatttattttatatccatttaaaatatcatccaacaaaggacaatgaagtttacatctgggacaggtatacataacttgaggcatttggagtccatcgtgcccactgaataacaactttgctgctgaaatttcttaaaacttaccaaactaaaacaaaaggctgaatgatacaaaaggaggagctcactctctgatggtaatctgtcccaacttttttgtacaaag

SEQ ID NO: 241424 - DNA, 948 bp, Homo Sapiens
  misc_feature (74)..(100): n is a, c, g, or t
atcaatacttgatgaataaagaaataagaaatgaagaggcactccagcctgggcaacagagtgagatggtctcnnnnnnnnnnnnnnnnnnnnnnnnnnncgactggaaaggagatgagggtacttgtgaagccatattatatgacacgctctgtgctaggacttttatataccttgtctcatctcttcatctcatataatccttacaaggatctcaaaagtggggaaatccccatataactgaagacgaaggcagttcagaagttcactgatttgccctaaggttcctcaatttgcaaacgtcaggccaatgatccaaccccaggtatgtttggcagtgaaggaccagttgagtcacagctgcaagtaaccaccctgcagtggtccctatcttggccgttagcttacattgacatttaacactcaaatttactcagtaacaccagctatcatgttttccactaaaactccacagcattctggcaacttttctattttagagcaataaagtaaattgttagcatccctttgacatataaatatttctacaaatagtaattctctagccattcatttggagtatttaaaactcaacattcatagcacattttatgtgacaaagaacttctgttcagaacacaaaaataagtcgtacatcttcattaaaaacgggtgaagaatttgaacaaacatttgcaaactaaaatacaaatgaaatacactcaacatcattagtcatcaagaaaataaaattatgagataatcactaataatcactacatatgcaccacagtgattaaaatttttttaagttaagccacgtgacccaacaaggtgcattcactcaagagaaacgcaaatatgtccactcaaagacttgcacatgaatgttgagagcaggtttatactgaatagcggcaatgtgaaaccaacttttttgtacaaagt

SEQ ID NO: 241425 - DNA, 1092 bp, Homo Sapiens
  misc_feature (407)..(415): n is a, c, g, or t
  misc_feature (953)..(968): n is a, c, g, or t
gaaaaaagctcatttcatgctctgcaaaaggagagactcccatgaagccttttgaaagggatcatcatgcagctcaactttctgttggattccatgctaagcaagctaaccttatcctgcattgttagcactaggcacccagctgccacctctccatcctgctgcccttaggccacatgggagcagtccatgcatgacagcctctatcctacaaggcctatgagtatggattgggggggccaaaaggaaaaagctccatgtgcctctttgtctgcgtgggtcagaagagttgtgcacgcagattagcaggccaaggtctgagccacagcagcatttttatttcagattttgataactgtttatatgtgttgaaaaccaaaatgacatctttttaaagcttatccatnnnnnnnnntagatgtcttttatagtggaaaaacacatggggaaaaaaatcatctattttgatgcagcatttgataatgataaaacacctcacacctcactctttatagtgcacaaaatgaatgaggtctgggctaggtagaaaaagggtcaatgctatttttgtttttagaatcattaccttttaccagcttttaaccatctgatatctatagtagacacactatcatagttaacatagtaagttcagcacttgtctcattttaatgtaaagatttgcttccattttcctacaggcagtctctctcttcctcacagtcccactgtgcaggtgctattgttactcttacgaatattttcagtaatgttattttcttctaagtgaaatttctagcctgcactttgatgtcatgtgttccctttgtctttcaaactccaaggttcccttgtggccctctcccttaccctgggaaggcctcttggagaccttacccctggctgtttggactttgtatactttaaataatttaactacccttaattacttnnnnnnnnnnnnnnnngctttatgattttcataacttattgctgattttaatggattgttaatttcagtcctgtagttttattttatgtttagatagggctgggcaaggaaaaagaaaataaagacaaccatatttagca

SEQ ID NO: 241426 - DNA, 1343 bp, Homo Sapiens
ttggtcccccttccactgcagcctcgctccgtgccttctgcgcgcctgggatcccggagcctgcctaggttctgtgcgctcccgcccaggccggtgcccgccgcccgcctgcgccccagccccgagtgcgagatcgagcgtcctgagcgcctgaccgcagccctggatcgcctgcggcagcgcggcctggaacagaggtgtctgcggttgtcagcccgcgaggcctcggaagaggagctgggcctggtgcacagcccagagtatgtatccctggtcagggagacccaggtcctaggcaaggaggagctgcaggcgctgtccggacagttcgacgccatctacttccacccgagtacctttcactgcgcgcggctggccgcaggggctggactgcagctggtggacgctgtgctcactggagctgtgcaaaatgggcttgccctggtgaggcctcccgggcaccatggccagagggcggctgccaacgggttctgcgtgttcaacaacgtggccatagcagctgcacatgccaagcagaaacacgggctacacaggatcctcgtcgtggactgggatgtgcaccatggccaggggatccagtatctctttgaggatgaccccagcgtcctttacttctcctggcaccgctatgagcatgggcgcttctggcctttcctgcgagagtcagatgcagacgcagtggggcggggacagggcctcggcttcactgtcaacctgccctggaaccaggttgggatgggaaacgctgactacgtggctgccttcctgcacctgctgctcccactggcctttgagtttgaccctgagctggtgctggtctcggcaggatttgactcagccatcggggaccctgaggggcaaatgcaggccacgccagagtgcttcgcccacctcacacagctgctgcaggtgctggccggcggccgggtctgtgccgtgctggagggcggctaccacctggagtcactggcggagtcagtgtgcatgacagtacagacgctgctgggtgacccggccccacccctgtcagggccaatggcgccatgtcagagtgccctagagtccatccagagtgcccgtgctgcccaggccccgcactggaagagcctccagcagcaagatgtgaccgctgtgccgatgagccccagcagccactccccagaggggaggcctccacctctgctgcctgggggtccagtgtgtaagcagctgcatctgcaccgagctccctcctggaccagccgtgcctctgccccgcaccctctgtccgcaccgctgttgccctgacaacgccggatatcacattggttctgccccctgac

SEQ ID NO: 241427 - DNA, 1281 bp, Homo Sapiens
  misc_feature (673)..(702): n is a, c, g, or t
  misc_feature (721)..(735): n is a, c, g, or t
caacttttagttcaaaagtagctcgaaacttggactttgagtgtaagcaaattttaagaatactttattttacttatattttacttgtacgtaatcacaaaagttatttggattaaagatgtacgtatagttaagtttgaaggagcattttcaatatttataaataaaattccaagtgatatggaaactctttaattggcagcttttctctttctttgtaaaacataacggctcattaacaactgatggcatcttagaggctatgtcaaaaatctgtgtgttcttaagcacaactggcttaaagtaatgagcctaagaacattctatctataaacgacacctgtcccttattaaaaaccatgggcagaaagtcaagtgtgattatagatgataaaatattattttcattcataacaaattcaaccagaagctggactaagctatccatactgacagtaatggtatatactaagattgccatttgacggggggcaatatttcatgtaaataacaagtgtattccccactctaaagaagtatgacaagtatttgctatatagtaatataccaaatgacagtgatttcacattcattaactacatttctgatatcacatattatattttcatttatcttaaatagctttattttacaaattcttaacagatgaggnnnnnnnnnnnnnnnnnnnnnnnnnnnnnngagatggagtctcgaatgnnnnnnnnnnnnnnngaacctaccctacagataactcactgcctgtgtacgataacggatatgtagaagtgattatcactgcagcactactggcaatagcaaaagcctgggaacaacctaaatccattaaggggactgggctatgacacgaccatatgatgaaacactcaatttgtaaaaaggaaaacagaagctcttcatatatgtatggtattatcctcaaaatttaaactggaaaaatttgaagagagcagtgtaatgactgctaggtatgcgtatatgtatatgcactgctcatgtatgttgaaactctttctggaaggatgcgtaagaagccaaggacctggctgtctctggagaggagaactgactggctggggtactggtgcaggaagaataatttagatttttcattctaaatcttctgtagttttttgatttttagagatatgaatggcttaaaaatataaatttaaaataattttaaaagaagcattcacgagaactacttatctgctaggcaactttcaaatcttatataataaaaactctaagtgccaa

SEQ ID NO: 241428 - DNA, 434 bp, Homo Sapiens
tcaccccaccctcagcagagacagaccccagatctgggcccaggactttgtgcagggaggggaaatgcaggtgactcagcccatattcctccatcaaaccagccttgaagatgggttaaatcagagcttttcattccacaaaagagaaattttaatggggtcagaacattgatcttctaatatttgaaagcctgttaactaggagagagagagcaaactattttgttgtaggaggacccacccagctctgacggtttaaagcgtcatgaatgcgaatttgaactccagaaaagcagagcttcctaacaatgggacttccacagcaatgggatctgcttcctctttcagtttgtgccttttctatgagcgagagactcctaggaaagcagcagcccattaggaaaacgtgtgggaactcactcgcaggttcttta

SEQ ID NO: 241429 - DNA, 1353 bp, Homo Sapiens
ttccatcattttttgaaatcttccttggcttgcattattttatttttcttttcctgcgttcttcctctgccctggtctttacatactgatcaaacacgtgttttctctctttaggattgagaagtaagtaccggggatcaaaaactatcttgtgcaactccttctcccacgttgaaaaagcagacacctttaaaataaaaacgtattgcctcataattaagtctcctctaaaaatataaaggtcataattttgcttgaaatctacaggatatctgtttataaaggagacataaaaccatactgaagtttccatcactaataaatgacaagcagtgggaggctagcaatagcaaatttccacactaattggctctgaacattcctatattatatagaaataacagacacttaattactcattaaaataactactactgtgtgacattttaaaaatcagtacatcagaaaaagccttgaagatttatattttgatttctcatgcttgctccaatcttgtgaacaatgttgtgatttaaaattgaacaattttacttattcaaatgaatctgtgaatataaccaaatagttgaaatcccttctcaattaaattgcaaataataatatcacaaagtatcagttctcctttaacaaaagccattctcaagatattaaaggaagaataatcatatataccttacctatcccaagcagtccgccattctgtaatgttaatactcgtcttatattactcaccacaatttaatgacccaataaatgttaagtgttatttgtacttaaaaggacagtaaaatggcatttagttaaatatgataagattagccaagaaaaaggctgttgcaaaaaatgtacagtaattttaaaaatccccttatccccccccataacatgagcactaaccttagatttgaccttttagcaagacatatttatattacttatacaaaacagaaatatctcccccaaagattgttttctgacccctctctctagcagcatgtccttgaactgcttcattcgagcctccagagggacaatggccctttctcgggcagctttaatttcagcttccatggcagcttctttctctgagtcaatgtctttattatcgtctctcctataaaaaataaaatataagacatcaactgacaaaatattaattctcagatcttattagaaatcttaaaatcaaaggaattttcaagactcactactgagcagcatatttttggcaaaaacaaattatattgagggtttcaaatgaactctaagggataaataactttcataataacaaaattaaaatgggcttctaatgatttacaatggctccaa

SEQ ID NO: 241430 - DNA, 1551 bp, Homo Sapiens
  misc_feature (592)..(766): n is a, c, g, or t
  misc_feature (1169)..(1198): n is a, c, g, or t
aaaaaagaaatagaaactttggcatctttctctcccattccaataattactatactgaagtttgtattagtaaatcctttgattttcattagtttgtgtatcttattgcttaagcaatatattgtttagttttgcctcttttttacctttactgtatttttactcttactaaatatatatttctatgtcttgctttttacactcaatattgtttgaagcttgtctgtgttgatgcatgtaactgtagtctgcccattttccttgatggatagcattccgatatgtaaattaccaacttgctcggaggtgcagccattaaatcctcattttgagcaatcaccccaagtaagactgatgcaggtggacttttgctcacacttcgggaattactgtcttagaggacacagtccgagctcttacctcccagtttcccaagtctctacatcagccttttaattttagtagaactgtttgttttccttttccaaaaatattttctcatcattcttcgcctagataattcttatgctttaagtctctccattaagctataaactcctccaaacattgtcattattatcattgttgtcannnnnnnnnnnnnnnnnnnnnnnnnnnnnnnnnnnnnnnnnnnnnnnnnnnnnnnnnnnnnnnnnnnnnnnnnnnnnnnnnnnnnnnnnnnnnnnnnnnnnnnnnnnnnnnnnnnnnnnnnnnnnnnnnnnnnnnnnnnnnnnnnnnnnnnnnnnnnnnnnnnnnnnnnnnnnnnctggaatgtggatctctttaactatcttacttgtctctgaacctctaggatctagggtaggactttggtgtgtggaaggcacttgattaatgtctgttgagctgcactgaaaggaaaagccaaggagaccagatggaaaacaatccgtttagttcagatgatggcagtggggatggaaaagaggagctggaaataagacttggcatgacagactattacatagctgaatctggggcgtgaggttagggcagggaatgaggaagggacaaggcatttccatttttttcactttgagcacttctgtattttctggaaatgtttacaacaagcacgtggtgctttaataattttttttaaagaagagaaagtgtagaggcagcaactacatgactaggcaccagcnnnnnnnnnnnnnnnnnnnnnnnnnnnnnntccaagctgaccagcaggcttctggcaaggcaatgtaggagaatggggaattgaaggcagaaagagaaatgcctgggggaatgcttccgggggagatactgactgtaatttggagagtctgcttttgggaagcagcaggtcattctggggaggtctccaccaagtagctagacttgtaggtctgaaattcaggagagaggttgagccagacccatgctctgagaaatgatggttgaagtcataagctaaatgtgcggagcaaaaaagaaagaagaaagaagacctcaaccaaagtgttgacagggtcaggcatatctgagtggaagaagaagaggagccaggccaggcgccaa

SEQ ID NO: 241431 - DNA, 1374 bp, Homo Sapiens
  misc_feature (233)..(294): n is a, c, g, or t
  misc_feature (885)..(899): n is a, c, g, or t
ttggcagctattgagatcttcgaatgctgcggagctggaggcggaggcagctggggaggtccgagcgatgtgaccaggccgccatcgctcgtctcttcctctctcctgccgcctcctgtctcgaaaataacttttttagtctaaagaaagaaagacaaaagtagtcgtccgcccctcacgccctctcttcctctcagccttccgcccggtgaggaagcccggggtggctgctnnnnnnnnnnnnnnnnnnnnnnnnnnnnnnnnnnnnnnnnnnnnnnnnnnnnnnnnnnnnnnatgcatcccttctacacccgggccgccaccatgataggcgagatcgccgccgccgtgtccttcatctccaagtttctccgcaccaaggggctcacgagcgagcgacagctgcagaccttcagccagagcctgcaggagctgctggcagaacattataaacatcactggttcccagaaaagccatgcaagggatcgggttaccgttgtattcgcatcaaccataaaatggatcctctgattggacaggcagcacagcggattggactgagcagtcaggagctgttcaggcttctcccaagtgaactcacactctgggttgacccctatgaagtgtcctacagaattggagaggatggctccatctgtgtgctgtatgaagcctcaccagcaggaggtagcactcaaaacagcaccaacgtgcaaatggtagacagccgaatcagctgtaagaggaacttctcttgggcagaacgagcccttccaaaaactacaatatgatgactgtatcaggttaagatatagtctgtgggatggattatggaatttaaaccatgtcacagctgtgaagatctggcacaagatagaatggtnnnnnnnnnnnnnnnttttaagtgacagtgccatattttggacagtacctttcaatgattaattttaatagcctgtgagtccaagtaaatgatcactttatttgctagggagggaagtcctagggtggtttcagtttctcccagacatacctaaatttttacatcaatccttttaaagaaaatctgtatttcaaagaatctttctctgcagtaaatctcgcaggggaatttgcactattacacttgaaagttgttattgttaaccttttcggccccttttaataggaaagttaaacgttttaaacatggtagtactggaaattttacaagacttttacctaccacttaaatatgtataaatgtacataaagacaaactagtaagcatgacctggggaaatggtcagaccttgtattgtgtttttggccttgaaagtactaagggaccagaatctgtcatggcaacaggctttataaaaaacacttaaaaa

SEQ ID NO: 241432 - DNA, 1548 bp, Homo Sapiens
  misc_feature (285)..(357): n is a, c, g, or t
ttgggtcttcgcaactgtctccgcgtggcgcgcgcctctagccgcccttcccctggcggctacggccggagggagcggaggcgagcgggagtcgggctccatggagagcggcggacaactgggcagaggcggagctttcatctcggcaccctggttccagtgacccgcgctagcgtcccgtcccgcccgcgtcggagcggccgccggccccgggactgaccggcctcgccgcacctcccgcaccgactagcgctcccgggcgctcctgcgcccgactcgccctcnnnnnnnnnnnnnnnnnnnnnnnnnnnnnnnnnnnnnnnnnnnnnnnnnnnnnnnnnnnnnnnnnnnnnnnnngagcccgcctctatgatgaagttcaagcccaaccagacgcggacctacgaccgcgagggcttcaagaagcgggcggcgtgcctgtgcttccggagcgagcaggaggacgaggtgctgctggtgagtagcagccggtacccagaccagtggattgtcccaggaggaggaatggaacccgaggaggaacctggcggtgctgccgtgagggaagtttatgaggaggctggagtcaaaggaaaactaggcagacttctgggcatatttgagaaccaagaccgaaagcacagaacatatgtttatgttctaacagtcactgaaatattagaagattgggaagattctgttaatattggaaggaagagagagtggttcaaagtagaagatgctatcaaagttctccagtgtcataaacctgtacatgcagagtatctggaaaagctaaagctgggttgttccccagccaatggaaattctacagtcccttcccttccggataataatgccttgtttgtaaccgctgcacagacctctgggttgccatctagtgtaagatagagagaactgggtaggcctctcccaccatgtgcagtctcatggggagaggcttctttcgtttcctcgtcaaacatctgattgacgcttgcaaactgtctgaatttgccatgcaaggttttcaaacaatttgcatgtttttcagatgctttcaaatctttttttaaaaaaatagtgtaaaatattttaataagccaaagccatgtggaatttttgtttagatgccttaactgtgccacaccccacaaccccctatattattttggttgtctatttctcacagcatattttcagttttttgtccatttgacatcagtctgtggtttattttgtcatcagattacttgtgggtatacctaccccaaattgttttctcattcacagcattagcatattcagcaaatccatctgtggtgggaattaaaaatattattggtattaaagaaatccattcaccccaaaacttgttttacaggattacaattttaattcaaaatttccagatttgggctatttctgtatgatccaataacttattttgtcacagggcttaatttgccatttttggggatttgtcgactcattttgtctgaatttcacaactggtattatgtcactagctacctgatatggctattt

SEQ ID NO: 241433 - DNA, 1064 bp, Homo Sapiens
tcaccatccaaccctgtggcagagcaggcttgaccctggggttgcagactttttgctatgattacaagatgaacataacacattcttccatgtccttgtgagacacttgacaagggagcaatggctatggataaaaacactagcctgtgaaattctttgatttatgctgccattagagctttgagattttcctgcttctttggccccaatttttctcaggatatacattcaatgggtatattgtacacaaatctgtgcctttggtttgatgaggttagagctaaaacaaatttagaattggttatatttgttaatatatcacacttccctcaaaaagtcatagattctttatacagttaaccttttactggactgcttttaaatttagggattcaatgaggtatcttgatattcataaactattaataaacattaaatttttagaaatctcctgcataaagtatgaattttcgtcgtatttagtcaacagagactgactgaatgaaagcatagttgaaaataagaccaccactattaactgaaacgtcacactactaggaccgcacagcccgcagcttgtgtctgccttggcgcaggagggcagcccctcttttcaggcccctgggtagaggggaggtgggcagtggctgccggggtcactccggcacaaactcatacaaactcacgtgcgccaaacatccgagacagaagcctgtgcctccatcgggggaaagcgcctttgggggagggagctaggaatttagaagcttagttaattatttgctaaaaaaatccatttttttcttctcacatgtatttgtagctttcatttcaaagattttcccctatatttgctcttattaaacaggttctaaaatgggctttttcagggtctttatatctcaaaaacaattagaacacaaaaagtgaagcttattacctagtaactctttccttggctactctcattctaataggtctcccctttttatttcagatcaactgttattttcagataaaaataaaattttcaaaagaagagaacactatttgagtgttatctc

SEQ ID NO: 241434 - DNA, 1320 bp, Homo Sapiens
  misc_feature (340)..(359): n is a, c, g, or t
ttcttatagaaaaagcaaagctcaccttattatctttggagttgggatttataaagaggaaaataatactttttaagctacactgttttcataagatgcaataaggttcagcaataatattttaaaaatagaacatctctgatctaacgaaagttctctggagtacacatggattggaatacatatctgagaataaaattaaaagagccagttgaagctgaaagctctggaagcatttgctagccaagtataaaagtctaaaatgtatgtgacattggcacatattcaaaattaaagtatcctttataattcaacagtcattaaaatagggaagaaagcnnnnnnnnnnnnnnnnnnnnttgtctgaatttcaaaatgcttcacttgaatcattgccaacaggggtactatagttccaaattctcatttagtttgtgtatgttaaatatgaattatatccagttttcaaaaatagtctttacaccataaattttatatacaatatattatttaacttaattatttaataaattatccttaaagaccctgttatgtctgcactttatgcccatttcttacagatgagaaaaccaagggaaagcagtgaaataagagaaactgccatgtgttctcaataacacaaggaaagtgaagtgaatataaagtggaacttgttataagtgtttgtagtttatttgctcccccaccccaagggtccaattgtactattttcagaaacatacctaaagcaaatatgctaaatctccagtcatgtgaactgggatatgacaagctggcacgagacagaatggaaagacaaaacatggctttactgctcaccactttgtgttgaatgttagtacaaagatctactgggggtaccccagatctagacccaatcaaccttgtaaagtaattgctttgcctctgattgctctaagggaaacccatagacaataaatacagagaactaacaagcgcaagaaatgagagtggctggctagagactttctttttgccataatgccatagtaactgtcaaagaagtcctctgtggacactaatctaagtgctgcaaaggctcgtcttactcagatagttcttaggtttatacagggctccaggtgtaaagcacttcacaaacattacctgaaatcattgtgcttctcagtaagttgtgcttcctgctgaagcttaagtagcaaatacatcaaccaaaaactgcccattagatctcagtcttcacaaatgattcttggttgtagtttccagtcctctatctaagagactcttgaaaattaaagtatagtaaattcccaa

SEQ ID NO: 241435 - DNA, 1219 bp, Homo Sapiens
  misc_feature (54)..(76): n is a, c, g, or t
actttgtacaaaaaagttggatccttcctaattatcttccaaaggaattatttnnnnnnnnnnnnnnnnnnnnnnnagagacataaaggagggtgatgtgattttcagctagtcctttcacattttcaataatgaggtaatcatgttacatacacattagtcctcagttataaagtgaatctcagatagaaattaaaagtgcagttgtgttaagactctttcatactaccctttagtcataaggagaaaaaaacactcaaatagtagaagcagcaagtagcaaacttcaggagagctactttctatccaaataatttaaaaaacacttttcacctactcctttcatggttataacacattggcagactttttgctggctctgggagccatgattttaatcacattctgcaaggtgacaaatgtcatacattccacattgtgtggtagccatctctttagactcatgtgttttggggaaaggaagaagttcttggctgagtactattttgaactttccagaaccctctcacaccagagacagttcttctctgttcagtttccaatccccgataatttgctaaaataacattgtacatccaagagagggaagaagagtatgtcagtatattatgcagaagatagatacagccttttcagaagatctccactagtttttgttccaaaaattcaagtttatgggagaaatctcaattagccaccttttcacagttgtgtggatataacatttgggggatctttctggactcctacctacctgtgcattttaccggcacctcaggaaaggagggtgaccaggttgtcttagcttgtactgcttggtgatctctgaggaccttctaattcagttgtaccccagtgttccatgtatagaaaaacttcattagaacaaactttacttgatatgaaactcctattaacagtctttttttgaaataaaaagtagcttgagctttcttttaaaatcatgtatcttgattgttgatttaatgaaggatttccttttaatgctgcttttgagcttcaaggtaataggacagcaggaacctaaaatatctgctcatcatctgctcataggaaagatactcagagacccatcatgttctctttttgttgttacactgttgggtgggtataacaattgggaaaatgaacaaactgattgattgtgcaaactacttttttatgacaagcctaaacc

SEQ ID NO: 241436 - DNA, 812 bp, Homo Sapiens
  misc_feature (512)..(520): n is a, c, g, or t
attttgtgaatacatttaatcttctggattctttttaagtctcactcactgtccaaaagatttagttcaagtacctcagagaacataaatactatatggagtcaggaagcagaaaaattatttttcatcagtttgatgaacctaaaggggagacactacattgtaggtttttaaatttaagatttattggagggttgggggaaaagtatagcacaaactgcttttcaaagactaggtttttaaaaactctaagcaaacaatttccacttcagattatacatattttaaaaatcagcattgattcgtgagcatatattttactataatgaagggaaatatggcataataaaattctgaaagcaatttttcccaattaaattatagtgttgaaacatctaatagaggaatatttaataggtaagttgacttgcttcttgcctttatgttcctggatactgaggacattcgtgtgtatttttcaaattcaaacaatcaaaacatttatttattcnnnnnnnnnagtatacggataacaaaagtatatagcaacataataaaaatgcaagaaactagatctgttgatacagatcatctttctaactcttaatggtttgacaaaagatgttcatctctgtaacagctttggctttaagacttcccacatttcttcagtttgctgtttggctacagcatctccagagtagtcaagacagtttgcattccacatgccaatgccccgtaagcgatagttttgtatatatgttgcctttaaagaaatactctgagggttatcataccatacttgatgccaa

SEQ ID NO: 241437 - DNA, 1061 bp, Homo Sapiens
ttggctaggcctacggaagctgggtcttcttgctgtgaggtcgcgttccccagtgttacggagggtccttgaggcaggagtgaaaattgggtctgggggttagtcctggggtggaggtctgggcacgccgggtcggaccccctccatcttcggttttgcacaccccgctttccagcgcggagtcgcggcgggtagggcggcgtcgcgtgcgtgacgtcatccagcggcgcctcgcgaggctccagtggccttgacctcccgcggcgtgggaggctgcgcggcgatgctgcagttcgtccgggccggggcgcgggcctggcttcggcctaccggcagccagggcctgagttccctggcggaagaggcagcgcgtgcgaccgagaacccggagcaggtggcgagcgagggtctcccggagcccgtgctgcgcaaagtcgagctcccggtacccactcatcgacgcccagtgcaggcctgggtcgagtccttgcggggcttcgagcaggagcgcgtgggcctggccgacctgcaccccgatgttttcgccaccgcgcccaggctggacatactgcaccaggttgctatgtggcagaagaacttcaagagaattagctatgccaagaccaagacgagagccgaggtgcggggcggtggccggaagccttggccgcagaaaggcactgggcgggcccggcatggcagcatccgctctccgctctggcgaggaggaggtgttgcccatggcccccggggccccacaagttactactacatgctgcccatgaaggtgcgggcgctgggtctcaaagtggcactgaccgtcaagctggcccaggacgacctgcacatcatggactccctagagctgcccaccggagacccacagtacctgacagagctggcgcactaccgccgctggggggactccgtactcctcgtggacttaacacacgaggagatgccacagagcatcgtggaggccacctctatgcttaagaccttcaacttgatctccgctgttggcctaaatgtgcacagcatgctcaagcaccagacgctgg

SEQ ID NO: 241438 - DNA, 967 bp, Homo Sapiens
aactttgtacaaaaaagttggcgatgtcgtgtttgcctcttcctctaagtgcggaaaggataagaccaagtctgtttcttccaccatcttcttccactgtgaccctctggtggaggacgggatccccgagttcagtcacgagactgccgactgccagtacctcttctcttggtacacctcagccgtgtgtcctctgggggtgggctttgacagcgagaatcccggggacgacgggcagatgcacaaggggctgtcagaacggagccaggcagtcggcgcggtgctcagcctgctgctggtggcgctcacctgctgcctgctggccctgttgctctacaagaaggagaggagggaaacagtgataagtaagctgaccacttgctgtaggagaagttccaacgtgtcctacaaatactcaaaggtgaataaggaagaagagacagatgagaatgaaacagagtggctgatggaagagatccagctgcctcctccacggcagggaaaggaagggcaggagaacggccatattaccaccaagtcagtgaaagccctcagctccctgcatggggatgaccaggacagtgaggatgaggttctgaccatcccagaggtgaaagttcactcgggcaggggagctggggcagagagctcccacccagtgagaaacgcacagagcaatgcccttcaggagcgtgaggacgatagggtggggctggtcaggggtgagaaggcgaggaaagggaagtccagctctgcacagcagaagacagtgagctccaccaagctggtgtccttccatgacgacagcgacgaggacctcttacacatctgactccgcagtgcctgcagggagcacggagccgcgggacagccaagcacctccaaccaaataaaacttccactcgatgatgcttctatattttgcctttaacagaaactttcaaaaggaagagtttttgtgatgggg

SEQ ID NO: 241439 - DNA, 1077 bp, Homo Sapiens
aaagctgataaaacaaagattggcgtagtaagaacccaattaataaaactaattttcaaaagaaaaaataattaaaattaattatattgcgtatgacgagaaaaagccttgcatttagtaagcctttaaaatatcctgtttacagtaggattttgaaggtagtaagggcttaagatatgtggagtctctggtttaaaccttcacacagtttttaaaaaatcagccatcattattctcatgttgaaattccgtatgaacactcatataaagaagaaaacatttaaggctaaatgtcgaaaatatttaaggctaaaattggaacttaacatgtttgtttcagaagttaacataggtccaggcatcctacagctcactcatattttaaattagtgaagaaataagatatatgggtgggtgaagagagggaaaaggaacaatttgccgaagaagtcatctgtgcagggaaagctaattgtatctcactgaagactcaagcatcaattttaagggaaagctgtcacatttagtgccttaactaaagaagttaaacccaataattttccagtcttttaattcatttataagataggaaaggaaagtccaaatattattaaaacaatgggccctgtcttttaaggtttggcggtgagactctctttgactaaagagaaagacgacaccttcagaagcaaagtatttcaatgactgatgctaagagaagcaacgagacaggtcaggatatgaaagagttggccccaacaaggcaggtgtctccagggggaatgcagaaaggaaatattgccaaagaaattaaagaagtcttaaatattatttccaaagagtgaaacgaaaaattttaggaaaagagaatcagaagacacaggcatatatgcatgtgcctggtgtatgatacgtgtagcacaggatggaagcagagagcagatcttagtcttaacacccttgaggagactgactctgcacctcagacagtcacatatcctaaagttcagaaggagctgggtagtgcattttcagaatttagaagtagtaaaggtaatgaaacaactttttttccaa

SEQ ID NO: 241440 - DNA, 913 bp, Homo Sapiens
ttggcttctcctttaccaagatggcggcttgtccctgtttcgccacagttcctaccttatgagctcggttttcttatgcttataagagtggaacagcaaaagctggcaggctgacagaggcggcctcaggacggaccttctggctactgaccgttttgctgtggttttcccggattgtgtgtaggtgtgagatcaaccatgagttccgttgcagttttgacccaagagagttttgctgaacaccgaagtgggctggttccgcaacaaatcaaagttgccactctaaattcagaagaggagagcgaccctccaacctacaaggatgccttccctccacttcctgagaaagctgcttgcctggaaagtgcccaggaacccgctggagcctgggggaacaagatccgacccatcaaggcttctgtcatcactcaggtgttccatgtacccctggaggagagaaaatacaaggatatgaaccagtttggagaaggtgaacaagcaaaaatctgccttgagatcatgcagagaactggtgctcacttggagctgtctttggccaaagaccaaggcctctccatcatggtgtcaggaaagctggatgctgtcatgaaagctcggaaggacattgttgctagactgcagactcaggcctcagcaactgttgccattcccaaagaacaccatcgctttgttattggcaaaaatggagagaaactgcaagacttggagctaaaaactgcaaccaaaatccagatcccacgcccagatgaccccagcaatcagatcaagatcactggcaccaaagagggcatcgagaaagctcgccatgaagtcttactcatctctgccgagcaggacaaacgtgctgtggagaggctagaagtagaaaaggattccaccccttcatcgctgg

SEQ ID NO: 241441 - DNA, 939 bp, Homo Sapiens
aatgttttccatagctggaatcagatcagcgcaatttgccaacaaaaagtaaaaatccactaccaacattcacactctgagtgcccactacagcaatgcagtgtagaggggataaagcaaaatacagagacgaatgaggttaaaactgctgtttggagccagatgacttaatggagaaaacaaaaataaacaatacaagatacaaggttccaaaaggcataaaagagctttaggtcattacaggtacccaggaatcaaaaagactttctcaaaatagtggcatttttgccaccccatgaaagatgatattcacttctgaaggatcacatgccaacaacacagcatcaggattaaggaaacagactacatataattccatatatttggtaaatcatttttccagtttattgtgctcctcaaaatggcttaaagaaaacagcataatactatacatgtagaatgtactcagccactcaaatgagtaaatgtggtaaagatcacatttgtcaagttgaaatgtcagttaacaggaaagaaaggtggtcagtcatcataaatttttgtcaaaagtagtaatacaaagaccttccacagttcttggacactctgactgtaaagaacaaacaccactgtaaatatatccagggctgtaggtaaacgtgacaacacaaaccagtatgtatagcccccaacccccgaacccctcaaaccatgcccaccagctccttggagaaatggctgattccagatgtggagcaggtaagatgcaaaatgagtctggaaaagcaagatgttttgttgtgccataaagaaagaaagtgcttaaagaatcatggagtatgtcaaaacagcttgaaggggctctactggccaaatccaagacaatttgtaaattaaaatactgatattaggctgggcgcgatggctcacgcctgccaa

SEQ ID NO: 241442 - DNA, 1909 bp, Homo Sapiens
cagagggatgtgaaaaataaaaatgcagattaatttaatgagagttatgaactcactacacaggggggagtctgggctccagtttaacgtactttaaaaatggagaaaattgctttttcaacttaaattgagaagaggggatgagcattactgaaacagttcatgcatacctaaagaattctgggtacatagccaaaatggtaagaaactaaagtgaaacaaatgtgaaagaagagcttgatcacgattaggtagagctaacaacactttaatatttgccaataacaaaattatagccattaaacattaagttctatttataaaccaatttgaaactagtatagagtaaaaagtagaggttgaggaatcttgtaaaacaaaaaaattaagctttgtaatttcagacagaggctttcaaatattcttactggaaatgccaataaaactatcagaatattgctagtttctcttgagttcagaggaatgatccacagatttttatatgcctccatctgcccactttatgtggccaaagcaaacatacccagtcacttcagaaattagccctctattacagtcaatataaaagaggatcaagtagatgagaattttgagttcatgaccctgttatctgtagataattctgttctcaatcttagttgaaacttggcaaaggaaaaaaatttaaagggttgccttgatggaatatataaaaaggagtcgcttcctaaatacatttcaaaaaactgtatgatattgtattcttcgtagaaaaatataatatatgctaagtatatgtccccaaatttaatataaacttcaaaaacagcacaaaaataattctttttcaggtcttttttaggcacaagtataatgtgaagacaaaggcagcaaattcatatgcactttataagaatatactgattttaacattttctaaaacttttactacgttttggaaataacaacgaaaaatcccaattccatggaaaattgctatgaaagctaagattccccgatggaattaaccacttgctgaactgcatttgaaagagctaccgtaagttgatgagatgtaaagacaataaaaaactatacgttttcctttaaactgtttcatttgatattaatctgttaaaggaacagagcaagaaagaggtatgtgctaaatgtaccaattatgtaagtttccattaaaaacctcaaattgtttcctcttgtgctttccagaagaaaagaaagcttgcttcccaagacaatactaaattaaaatttgttttctaaacagtctgtagaagtatttatcttcatcatttatgggtaagttttattttacataaaatcaaaagcaaaacagaagaattacccggtgataaaaacaaattatctgctcttttaaataaactattattttaagactatcgtgacaacatgagaatcaagtgactactgctgtaaatttatataatacagaccagctacttaaatgatgactacatccggggaacaatggtttacagtgttaataaaaatgtgctcactcagagttgcacaagtgaagtccaccttccagctcaaaataaacaaaaagaattgggttttgacatgaatttgtgatattatgatttttaattccttctaaatagttaacagatattcatagttttacttttaggaaatatgctgcaggaattattacagagctgttactacatttttacagagctgactgaaaaagtttattctctaataataaatttgctgtgacagctttaaatcttggaaagaaaaagataatgtgaggaatctatctgaatgctttaaaacctcatacagttgaggactgagacctgtatgtttcttgagaccaagttatttggcaaatataacttactccctcactgccaaa

SEQ ID NO: 241443 - DNA, 1393 bp, Homo Sapiens
  misc_feature (227)..(252): n is a, c, g, or t
gcatgcacatacacaatcccaccctgtgaaccaagttcagcttggagagatgggggaagtggaggatgctgagaggagtgttgaaatatctgaagggctgtcaacgtggaagaggatttggaatagcaagaatcagtctagagaacaagacaaaagtgtggacatacaaagagggagatttcagctctgcatatatgagacttccttcacactcaagcctcactctnnnnnnnnnnnnnnnnnnnnnnnnnncggtgctttctgttaagggagtgttttggcagaagccagaagacagtctgagataatctcagtctcagacaacgggtagcggtaggtcatttccaaagcaagttgctttcattatcctgcgcggttcactaccccccacccgcaactggatctttccacccctgggcctcaggctccctaggatagaggaggggcagtgtgagacccagagcagtgctcccaaccagatgggattgctgtggatgataaaggatggcatccagggcgcgagtctgggttccagctcttctccaaattgctccctcaagagaagacgctgccggactctgttgtgacaataggcacatagaaaaagatcacaaataactgttgcaagacagagggagcctccctgggacctcactatgcctctggtcactggagagccaccgcaagcttccactgcagccatgggatgggttctatgaggctacaggcaaagtcagctgcatctacgttacaaagtttagacaaagagtggaagagacatgtttaggaacttcacagtacctttggctccgtgagttcctcccccacccccaaaaggaagggacaaggaaaggggaaagagacaaatggctgtcgtgataggttttggagctattgggatacctgctgttgcggcgcccgaagtgccccccaggcctcctcgctgccgttcccgctgctggcccgagccatacctccacctacagccccctgaggaccacagcctcctctaccgccagccgccccgcccctgccacctctgctgccaccgccatggtccctgcccggcccatcttcgctgaggccaccatcactccgcggccggagcttccatccgggcagaactccaccaactaggactcagattgctctgccctaccaatcatcatcgtcccttgacggacgggccaataggaacagatcagaggtttctccctgtgaccaatccacagcagcgcctccgccgctcacccagacaacaagagcttgtacagacaaagagtaggtgaaggttcgacccacggccctgactgacagcggcaatagccaatacagacaacagaacaggctctggcatatcaaccaacgaacagccgcccaggaagagcaaggc

SEQ ID NO: 241444 - DNA, 1092 bp, Homo Sapiens
ttggccaaatcaaaagaaaacactatgcaagaatctcttccttctggaatagtaaactttagagaggaaatttgtgatatggattctagtgaagcaatgtctcttgaaagccaggagtcacctaatgaaaattttaaaactgttggcccgtgtttaggagactcgaaaaatgtttcacaggaatctttggagacaaaagaagaaaaaccagaagaaaccccaaaaatggaactgagtctagagaatgttactgttgaaggaaatgcatgtaaagtaacagaatccaatctagagaaagcaaaaactatggaattgaatgtaggaaatgaagctagctttcatggacaagagagaaccaaaactggtatttctgaagaagcagcaatagaagaaaataaaagaaatgatgactctgaagcagacacagctaaactgaatgccaaagaagtagcaactgaggaatttaattcagatattagtctttctgataatactacacctgtaaaattgaatgctcaaactgagatttctgaacaaacagcagctggggaactagatggaggaaatgatgtatctgatctacactcatctgaagaaacgaataccaaaatgaaaaattatgaagaaatgatgatcggcgaggcaatggctgaaactggccatgatggtgaaacagagaatgagggcataactaccaaaacctcaaagcctgatgaagctgaaacaaacatgttgactgcagaaatggacaactttgtttgtgacacagttgaaatgagcactgaagaaggaatcattgacgctaataaaactgaaacaaatactgagtatagtaaatctgaagaaaattagataacaatcaaatggtaatggaaagtgatattttacaggaagatcaccatacttcacagaaagtggaggaaccatcacagtgtctggcatctggaacagctatctctgagctaataatagaagacaataatgcatctcctcaaaaactaagggaacttgatccttcacttgtgtcagcaatgacagtcctagtggcatgcagacacgctgtgtctggtctcctttggcttctccgtctac

SEQ ID NO: 241445 - DNA, 1537 bp, Homo Sapiens
  misc_feature (198)..(243): n is a, c, g, or t
caaacatgaattgttacagtacttgaaataaactttatgagaactgagtgactacattgcttcagatagttttatactgctaggtcaacgctgctgacagtaataagaataggatgtgagattcaatatgctcattctatctcaaactctgtcacacatacaatgactgctatttatttcctcgtgagccatctgggnnnnnnnnnnnnnnnnnnnnnnnnnnnnnnnnnnnnnnnnnnnnnngtaggagtcagttagttctgctaactaactaaccaaaaaccttaattgtatggccatcagcaccctagccctttgtcatgaaagctaccaataaggtggaaatttaaaatatgagatattttattatacatgttttattaaaccctatatgtgcagaaatgattgtccattttccttcttaacttgcttttgtaagacttattaagtagaaaatataaatctcaagctccttaaatgtgattttgaggaactgagaccaaaacaattttttgctgtggaaccagatccttgaatgcactacaggaaaatattatttgatatgaaatttttttggtacacacaatttttcaaaaatatatctctctccacaaagttaattcaaattgtagaattcttccaagtcacagatggagttttcaaggctctgggtacttacctttgagttccacatcctttatctctggagctcttaactgagggaacatggaccattaggtcatgaacagactttgtagtctttgaacagcctgaaacagtatgtgatacttgatgtgcatgtacacaggaacatttttctagagtaatggcacatacctttcatcagattttcaaaggtttctcaaaatgctcaagaaccattgttagatatttaaataaccagagtgtacagtgtccaaataccaaattttgacacttgtaagatgtcttaattaaaacaagccatgaagttcagcgtcacaataaccagaaaagcacttgtgagagtagttctatgtctttacttcctagtggtttacacactctttaacccatatggcaatctggcttctgtctccagtgctctggaattacttctgcctgtatgattaagttcctcattgttaaattcgaaaatacattctttggtatttatttgacctcttggtggtaatatagcgtaagagcacagactctggagccaaactgcctaggttcaaatcttagctctattactttctaactctgtgactttgggcaaatgacttaactctctcatgcctcaaagcagaatcctttgtaaggtttatttatatagtggtgtaaagagtacttacttcaaaagctttggtcagtgtgagaaataagctcctaacaaagaaagtgttatgtaatagttattatctggtacctctgatcacaacatttttgaaaatcacttgaaatctgcctaagtttcattctgcctttgatggctccttattttcatctccctacttcaggcttcctccctaatatatcttttatgccaatccaa

SEQ ID NO: 241446 - DNA, 1114 bp, Homo Sapiens
ttggcagcacggagatgctgcacaacctgaaccagcagcgcaaaaacggcgggcgcttctgcgacgtgctcttgcgggtaggcgacgagagcttcccagcgcaccgcgccgtgctggccgcctgcagcgagtactttgagtcggtgttcagcgcccagttgggcgacggcggagctgcggacgggggtccggctgatgtagggggcgcgacggcagcaccaggcggcggggccgggggcagccgggagctggagatgcacactatcagctccaaggtatttggggacattctggacttcgcctacacttcccgcatcgtggtgcgcttggagagctttcccgaactcatgacggccgccaagttcctgctgatgaggtcggttatcgagatctgccaggaagtcatcaaacagtccaacgtacagatcctggtaccccctgcccgcgccgatataatgctttttcgcccccctgggacctcggacttgggcttccctttggacatgaccaacggggcagccttggcagccaacagcaatggcatcgccggcagcatgcagccagaggaggaggcagctcgggcggctggtgcagccattgcaggccaagcctctttgcctgtgttacctggggtggaccgcttgcccatggtggctggacccctatccccccaactgctgacttccccattccccagtgtggcatccagtgcccctcccctgactggcaagcgaggccggggccgcccaaggaaggccaacctgctggactcaatgtttgggtccccagggggcctgagggaggcaggcatccttccatgcggtctatgtggtaaggtgttcactgatgccaaccggctccggcagcacgaggcccagcacggtgtcaccagcctccagctgggctacatcgaccttcctcctccgaggctgggtgagaatgggctacccatctctgaagaccccgacggcccccgaaagaggagccggaccaggaagcaatggcttgtgagatctgcggcaagatcttctgtgatgtgtatcatcttaaccggcacaagctgtcccactctggggagaagccctactcctgccctgtgtgtgggttgcggttc

SEQ ID NO: 241447 - DNA, 898 bp, Homo Sapiens
ttggctcccttttcggagatttgaatttcccccagcgaggcgagtgaggcgaaatacccgtatggtgatagctggccttttcgcgccaatactgaaaaaggcagaacgttcctccgctggcgccagccaatcagcaggactcctgccttccttcggggcaaggtcgcagcatctgcctcggaaatcacgaaatcacggggcttctttctgctggctcagccgggaggcccagagtgttctgcagaggctgcgtattgaaggctgctctctgaagctccctgccccaggtcacgccgccggttccagatgaatccagagtgggggcaggccttcgtgcacgtggccgtggccggtggcctctgtgccgtggctgtgttcacgggcattttcgacagtgtttccgtgcaagtgggctatgagcactacgccgaggcgcccgtggccggcctccctgccttcctggccatgccgttcaactcactcgtgaacatggcctacacgctgctggggctgtcgtggctgcacaggggcggcgcgatggggctgggtccccgctacctgaaggacgtgttcgcagccatggccctgctctatggccccgtgcagtggctgcgcctgtggacgcagtggcgccgtgccgcggtgctggaccagtggctcacactgcccatctttgcatggcccgtggcctggtgcctctacctagaccgcggctggcggccctggctgttcctctctcttgagtgcgtctccctggccagttatggcctcgctctgctgcatccccaggcttccaggtcgcacgggtgctcacgtggtggccgctgtggggcaggcgctgcgcacccacaggccactatggcaacaccacctcggctacctacttaacctttggggg

SEQ ID NO: 241448 - DNA, 1579 bp, Homo Sapiens
  misc_feature (525)..(812): n is a, c, g, or t
  misc_feature (1334)..(1346): n is a, c, g, or t
gaaacaaaaattattaaatatgtttattttttctaaaagtgtcaaatgtagccactgcccagggcattaaaaactcacttatccacaacactgccgtcttcaggaaagaaccaagagttgattcattcccctttcctggagctgttactagttggttgttgctttaagtgtaataaccctaagaaaattcccaataaaaatcactgttcttaagtgtcacatatttcacacctctggtaccctgtagaaacgcttgtattacatgggaaagcagcatctgaaaagatctatttcctattctagttcattccaagccctgttattgaaaacctcttctctagaagagagagtcactgctctctcttaacacagtcgctgctatacttcagcgtgactgaccatacatcattttccattctgggacagaggaagaagacgggtgggggagttgatctggctagcccagagctggacagtgccattctattcttccctcccacttgtctacacggtggttattactannnnnnnnnnnnnnnnnnnnnnnnnnnnnnnnnnnnnnnnnnnnnnnnnnnnnnnnnnnnnnnnnnnnnnnnnnnnnnnnnnnnnnnnnnnnnnnnnnnnnnnnnnnnnnnnnnnnnnnnnnnnnnnnnnnnnnnnnnnnnnnnnnnnnnnnnnnnnnnnnnnnnnnnnnnnnnnnnnnnnnnnnnnnnnnnnnnnnnnnnnnnnnnnnnnnnnnnnnnnnnnnnnnnnnnnnnnnnnnnnnnnnnnnnnnnnnnnnnnnnnnnnnnnnnnnnnnnnnnnnnnnnnnnctactgtgttaagcatgaaagaaaatccaactgggttagatacagcaggttctcctaaatgtcttaacccatgtttatcttgttctgctattccatgagcaaagagaataaacacaaagctgtgagagtattaaatatggacactagatttacatttccaacaagaaattcatctccctccaaagtcccagaccagggctagaatgtggttcatttttaacaatcaaagtggcaagatctgtttggtgatcactgtaaaaacaggaaacatagctaatgccctttcatgttgaggtgctacaaaggtccaagcttttaaagactatggcctcaacgtccatgtgtgaaacaagtgtattagaaaattctttaagtcttgttgccttaacttagagatctccaggcaacaggcctgacgatagccatggctgtaccacttaactatgattctattccaactgttcagaatcatatcacaaaatgacttgtacacagtagtttacaacgactcccaagagaggnnnnnnnnnnnnngacgcctcaaaattcactcaacttttgagacagcaatggcaataggcagcagagaagctatgctgcaactgagggcacatatcattgaagatgtcacaggagtttaagagacaggctggaaaaaatctcatactaagcaaacagtagtatctcataccaagcaaaaccaagtagtatctgctcagcctgccgctaacagatctcacaatcaccaactgtgctttaggacccaa

SEQ ID NO: 241449 - DNA, 1316 bp, Homo Sapiens
caggctccaggcagggtctgcatgtgcctctgccagccacctagaccctgccagccggggcctttaaattctcccctcgtggtctccagggccactcactagcgtgattttcaagctgtaaactgggaggaccctatttcttttcaccttgcacggaacaccaaggctgaaaggcagtttttccggaggtgccagcctgtctcacatttccgcttcagctgcggggtccagctctatgtgggcggtctcctgatgaagtcaccccgggacagacactgttctgtctcctgcttccagtccagtaaagatgccaggatcccccagggcatggcaggcaccctcaaaggcagacgtggggaggccctggtgggcagaccccagcctgctgacggggggcttctccctggctgccactggcccacccactgcgctgcagtccacctggtgctggggctgtggggcacaggccctcaggacctgcaccctttcctgcccaggaggtccaggcctgacatccttatgtcccctggaaagcccactcccatcttcagggtaggagggcagctgcatgctgggctgacttgggcctgtcctgggacacccctgcagaccaggtgcagcagggaatgtggctctgtggggttgctgtgggcaggttagcatggagctgggctccggaagggagttgccacgctgcctgccagggcccctcctctgagacaggtgccttgtgggacagtgtaccaaagtgccctggacacgagggggccctgcgccccccacgcactgaccccgcatcggaggccctgcgccccacacacactgaccccgcatcggcatcgggggccctgcgccccccacgcactgaccccgcatcgggggccctgggctgcagaacccatcgatgctgttgccgtgcccctggttctggtgacactgggaccctccaggttgggctgagcagggcccccccaccagtgcgtactccagcaccagcgggagtgggcctgggcaggggctgagggagtgacacccaaggggacctgccccagcctcctcctgtaccctgggggttctcgttttccttggctgagggaggtggcctctcccagctgaaacctggggacaggctgggcgtgagagcaaaggggggtgagcaggaccccaggccttggaaatcctgagtcgggggaacaggctttgcctatgacgtgcctgggagctgtctgggggccctcctggggagccaggctcacaggatgttgtgtgggactcaacgtggggcaacgtcccggccaagagggggaaggccccaa

SEQ ID NO: 241450 - DNA, 761 bp, Homo Sapiens
taggcagtcatgccattcactgaaaagcagaagccaaaggaaaaccggagcctaatcaagtgttttaaacacatcaggtttgaaatgcctatgaagcacccaagtggaaatgctgagtaggcagctgggctccaggtatcaatctagtctgggaactgagtttggaagataccagcaaacatcaagccaccaatgaggattaggtcacctggagattcccaattccatggaacagagggcctgagactgaatggccaacatttagacaagaagtctgccaaggctcaatccaggtctcaggccagaactgttagcgcaagaagctccttgctcctaagaacagagcctggcctggtaggtgccatgctggttccctgaggatgatacctgctcaggaatgaaggcaacatgcacaaaggtaccaggtgagggactggacccagggataccacacccctgcatcttctgtacttcctctaacataggtggtcagcatactctttcactccttatccaattttatcaaaaatagagattagggcaatatgacataacagcattaagcactaaaccatttgacagggattcctttcaaaagtgaaaaccagtgtacgattatacagcttctccactaatctttgttaccaacagccacttaatctaatcctaaagactgagtacaatattccttctacaatactttgaacactcacttcaatttattgcatattttctaaatgcacctctctctctcttcccaa

SEQ ID NO: 241451 - DNA, 1527 bp, Homo Sapiens
ttggcccaatctcagtctggtactggtaaaacagctgccttcgtgctggccatgcttagccaagtagaacctgcaaacaaatacccccagtgtctatgtctctccccaacgtatgagctcgccctccaaacaggaaaagtgattgaacaaatgggcaaattttaccctgaactgaagctagcttatgctgttcgaggcaataaattggaaagaggccagaagatcagtgagcagattgtcattggcacccctgggactgtgctggactggtgctccaagctcaagttcattgatcccaagaaaatcaaggtgtttgttctggatgaggctgatgtcatgatagccactcagggccaccaagatcagagcatccgcatccagaggatgctgcccaggaactgccagatgctgcttttctccgccacctttgaagactctgtgtggaagtttgcccagaaagtggtcccagacccaaacgttatcaaactgaagcgtgaggaagagaccctggacaccatcaagcagtactatgtcctgtgcagcagcagagacgagaagttccaggccttgtgtaacctctacggggccatcaccattgctcaagccatgatcttctgccatactcgcaaaacagctagttggctggcagcagagctctcaaaagaaggccaccaggtggctctgctgagtggggagatgatggtggagcagagggctgcagtgattgagcgcttccgagagggcaaagagaaggttttggtgaccaccaacgtgtgtgcccgcggcattgatgttgaacaagtgtctgtcgtcatcaactttgatcttcccgtggacaaggacgggaatcctgacaatgagacctacctgcaccggatcgggcgcacgggccgctttggcaagaggggcctggcagtgaacatggtggacagcaagcacagcatgaacatcctgaacagaatccaggagcattttaataagaagatagaaagattggacacagatgatttggacgagattgagaaaatagccaactgagaagctccaccagccactgatgccagccctggcactgcccctgcacaggagacaagtgcatttagggcacaggccccgacatcaccccaaggacaacggcagaagtagagagaaactacctacctcacttcaaattatgtttggacttgacaaaaataggtgcaaatgagggggggcaatagaagaaaaaatttgcattttggaaaattgggtcctttccccacttttttaaagccacattcccccatctttataataatctggtcacagtggtagtcgctggccccaggaccccctcctgattttggctaggcatcgtggaaccagctccagcccctgaagaaacgatagatgtgcaagttgtgcggaagaggctgagtggaaaatggtgtgagccccaccgctgtgcatcgaatggagggaagtggcagcagagaggccagagctgccccctctctgtctcttcaatggacccttcacaagtgtttc

SEQ ID NO: 241452 - DNA, 1012 bp, Homo Sapiens
ttttcaaatattagacttatataaaaataaaggggtcttaacaaagttcatctgtgagttagcatatctctttatttcaaaacaatccctgcaaaaacttaactttccagtccatttaaacaacaaaaactaaaaatgaagcttggtttaaataataaagtgaatcatcttgtctcctagttctcacaccattggaacaacttccatttcctgacctaattctatcccaccattgaatttcaaaaattaatgtaaataccatcatatttcagttatttcttaacagtgttaagttcgagcctaaaaatgatggccaagtgtccctttaaggcaaagaagacagtaggtggataaatatcctgaaagacaaaaccatctattatcattatagaggcagaacattttgacatgatcttttacaaacagaatagatacactgcataccatcgaagaattttttctttataatggcatactaggggacaagcttcataatagatttatgttacgtttgaagaagtagagacttttcccagatgagagcaatacaagaaataaagccattaatggctgttatggttacaatttaaaataaaggacacatcggatgctgtaacagaagtactgcacgctaagtgatgctctcttgtaattgaaagagaatgggtttcccttcaaaccatatgctattactagtctctgagtgccttcaaagcacatactcttcctttaaaatccaaggatccttgccttcaaaagacacaaatgcagtagttttcatttcttacattcacttaaaaatggattatgattccagcaggcaaatctgcatattaaatatagacaacccaaccacagtatctgaacgttaaaagaaatctatcacgacagacattttacctagttataaataacgtaacaatagatcacactcagatttcttaaacagctcactcaggagtttcctcttttaaaaattaaataacttatggccaacttttttgtacaaagt

SEQ ID NO: 241453 - DNA, 1762 bp, Homo Sapiens
  misc_feature (1684)..(1692): n is a, c, g, or t
ccattgaatttcaaaaattaatgtaaatacccatcatatttcagttatttcttaacagtgttaagttcgagcataaaaatgatggccaagtgtccctttaaggcaaagaagacagtaggtggataaatatcctgaaagacaaaaccatctattatcattatagaggcagaacattttgacatgatcttttacaaacagaatagatacactgcataccatcgaagaattttttctttataatggcatactaggggacaagcttcataatagatttatgttacgtttgaagaagtagagacttttcccagatgagagcaatacaagaaataaagccattaatggctgttatggttacaatttaaaataaaggacacatcggatgctgtaacagaagtactgcacgctaagtgatgctctcttgtaattgaaagagaatgggtttcccttcaaaccatatgctattactagtctctgagtgccttcaaagcacatactcttcctttaaaatccaaggatccttgccttcaaaagacacaaatgcagtagttttcatttcttacattcacttaaaaatggattatgattccagcaggcaaatctgcatattaaatatagacaacccaaccacagtatctgaacgttaaaagaaatctatcacgacagacattttacctagttataaataacgtaacaatagatcacactcagatttcttaaacagctcactcaggagtttcctcttttaaaaattaaataacttatggtacctcacacttatagcacatacacagttcatagctgaaacagcttcttaaaagcagaatgcacaatcacattgactttttcagcttctaaaagcttctttgtagatattaaactgccctcactacaaggcagtatgaacaagaactggattctgattctggtggcaacacaataactataaggcagtaagaacaagaactggattctgattctggcagcaacacaataactaaaacaccattcaccacatgacaaaacaaacaaatccaatgacaaaaaggaatcggaaaaaaagcagcaacagaaacagtatgtggcaatcattcacataaggcccctcttccaccataccttatgatatacatcccttatagcatgacaatgtaccccaaggcacctgaggcctcataataccactcgagacactgacagctccatggacgcttttgtacacagtggtttgtgtgtaaataactattcattcatttgtagatgctccacacatctggtcaaggcaggaatttcttctccttgataacaccacctagaaatatcaacaatattttatatattccttagggcaacaggtttgaggagaaatatatcaactgtggtagcaaagtcataagaacctgtgatgactaatccaagcatcctgtaagtccgtttacattctcagcactaaaatcaatgctcacttcacacaccccaacagcaaagaagcaataagagtaatgaaagcaactacgtatttcttcccctctgtgagaaatggcataagcggctcaaacaggaaagggaaacaaaataatgtacttgaagctgatgcagaaaaataaaaatttaatataattaaaagcaatttatatatcatcatgaaataaagagagatttgaaactatgtagtcaacagaggacnnnnnnnnntctctcaagcaagagaatttctgatcaaatctgtcatatcactgctgcggaaaaggaccattaaagccaa

SEQ ID NO: 241454 - DNA, 2587 bp, Homo Sapiens
  misc_feature (2231)..(2248): n is a, c, g, or t
ttgggtggatcatttaagtagagatgaggatgaagagaaactggtagcctcactatggggagcagagagatgtttacgagttttagaaagtgtaactgtgcataatcccgaaaatcaaagctacttgatagcatataaagattcccaacttattgtttcatcagctaaagcattacagcattgtgaagaactgattcagcagtacaaccgtgctgaggacagcatatgcttagctgacagtaagcctctgcctcaccagaatgtaactaaccatgtaggcaaagcagtggaggactgcatgagggccatcatcggggtgttgcttaatttaactaatgataatgagtggggcagcaccaaaacaggagagcaggacggtctcataggcacagcgctgaactgtgtgcttcaggttccaaagtacctacctcaggagcagagatttgatattcgagtgctgggcttaggtctgctgataaatctagtggagtatagtgctcggaatcggcactgtcttgtcaacatggaaacatcgtgctcttttgattcttccatctgtagtggagaaggggatgatagtttaaggataggtggacaagttcatgctgtccaggctttagtgcagctattccttgagcgagagcgggcagcccagctagcagaaagtaaaacagatgagttgatcaaagatgctcccaccactcagcatgataagagtggagagtggcaagaaacaagtggagaaatacagtgggtgtcaactgaaaagactgatggtacagaagagaaacataagaaggaggaggaggatgaagaacttgacctcaataaagcccttcagcatgccggcaaacacatggaggattgcattgtggcctcctacacggcactacttcttgggtgtctctgccaggaaagtccaatcaatgtaaccactgtgcgggaatatctgccagaaggagacttttcaataatgacagagatgctcaaaaaatttttgagttttatgaatctcacttgtgctgttggaacaactggccagaaatctatctctagagtgattgaatatttggaacattgctagctgctttacctttgcttcaggtgctcggtaatgctggagctatccttagacaaagaaaagtcaagtcatgaaagaagtccttgaagatataccaagaacattcatcagtatcattcgtgtttggatttttaaggccacctgatttcttcgtcatgcattcggcatttgctaaatgacagttactacatcaatctgcaactatcaaaaatgaggggaaaaggttcaggctgttaacaattccatgcagtatttaaatacatttactttggcagagtttataccctccccttgttttcttgctttattctgggcaagtttgaaggggaaaatttgtgctgctgttagtgcaactgctgtgtatgttgagccactgttgtcatgccagccaggtgcaaaggcagcttagctactgaggtagcgaatgttctgaggacattctagacaacagcttagttcctttttcaggctcatttgcttttgcttttttgttgaatgattccaatcgtaaataaagcttttaataattttgtgaattttttggttgttgttccctgaactactgtctatatttaaaattagatggaatccaaagatacacgggattaatagtatatttttttattcttgattaggtttgggttattgaactattttttacttttgagaccacaaccatattcaatatcataccataatgtgtcatagctataggcacaagaaaaacaacagtttgagagaatattatataagatgatgtgccctgttaaaaggaggaggcaaaatagtcaaacccagggtagtttacacttaatgctagggaggctcttaaaacattattagattttgaggaaagactctctagatatattttctaatgttcagtacaataaatataaggaagctaaaacaccaatgtggaattcctgtttccagataacatgtatattcttctatagagtgacaggatcaattgcataagcgcaaagccttaaattgctggtttagagaagacccttttttcattcagattctttgttcgtagagcagttatttgaaaaacagttatggaacacaaaacattttatagatttaatatcataacattgcaaatttttcttgtattattgttcacaccactggttatacnnnnnnnnnnnnnnnnnnattgattgggcctgaatacaggctttctagagatctttttcattaatacttttaaatacctttcaggtagttacatcatgtttcttcattggatttgtaaaacttgaagccataaaaatattagtttggtgtgtattggggaaaatagctaaaagtctaatttttacccatttagactttgttatttccttgtataaagtgacaaatcggggctcttgtatcagtgccagctgtaatgtttttaaatgcagtggctgccttctattgtcttcctatttttgaaatgcagattgttgggaaatctgtaaggaagtaactgattccaggcaaattgttttc

SEQ ID NO: 241455 - DNA, 1650 bp, Homo Sapiens
  misc_feature (127)..(157): n is a, c, g, or t
  misc_feature (847)..(1105): n is a, c, g, or t
ttggctctgcgccccacgctggaaaaaactgtttcatagaggggctgggctgagacccccccacccctgagtgcctctttcagctcccccatccccatcgcaggccgatgacctggagctgagaccnnnnnnnnnnnnnnnnnnnnnnnnnnnnnnncagaagccctgacctaaggatttatatatgtggattgtcctcaatacccctgtgatatgattatgttttatcccccagagtttggcctactggacttaaggccttgcctgtctgactgacagcctctatctccttatataagacaagtggcaggggacgagtgaagcagagtgagccaccttgggagttctccaacgctctgtgctctggttctaagaaattccctggggaactgcccctggccctcctgtcccactattgctggaggctggacatggtacatactcatgcacatgactctcccccatttcccaggtctctgggtaccccagcctgggctgggggagaatctcttcccccttttctaatgtgctctgtgatgcacacaccaagtggtaggtcaaaggtcagtatatcccggtggtgtattgtcttgctagaccctgctattttcctgaccccctaaatcctctttagggacccagtcactataccctgtctatgccctgtgggctcccagacccctgagctttgagtcagtggcatcacagtttgtagcctcagggggtctggctgggggctggtccatgcttgtggttagtggacagcagccaccctttgacagctacctctggacatctcaagggcttgcagccccactgctccttctaacattttgtttgtttttgnnnnnnnnnnnnnnnnnnnnnnnnnnnnnnnnnnnnnnnnnnnnnnnnnnnnnnnnnnnnnnnnnnnnnnnnnnnnnnnnnnnnnnnnnnnnnnnnnnnnnnnnnnnnnnnnnnnnnnnnnnnnnnnnnnnnnnnnnnnnnnnnnnnnnnnnnnnnnnnnnnnnnnnnnnnnnnnnnnnnnnnnnnnnnnnnnnnnnnnnnnnnnnnnnnnnnnnnnnnnnnnnnnnnnnnnnnnnnnnnnnnnnnnnnnnnnnnnnnnatgagccaccgcacctggcccttctaacgttttttcatcatagtcccaaaaaccaatactttacaagtggtttttgaaaggcaccacttttgtggcatgttctggttgggagagggagtcacagttcctactccccccaccagctatgcttctgctctgagaaggtggttatttatacaaacatggacatactcactcccaagggctgatgagatgctgaattttctttgggggcattcattaattgtcccagctgcagcgactggagcaagtctggaagctgcctgtgctaagaccacccagctgtccctgggttctcatcctagggccttctttgcttccaggtcaggggatctgcttcaatgagaaagcaactgaattgaggctaggagaggtagggagagctgagttctgacttcacctgtgcagaactctctgcccccatgttacctggactggaacagactgtgaatatagcagaaagttctcaagaactctggtgtctgacctagaagaggcacagttctctctactggaaagaaaac

SEQ ID NO: 241456 - DNA, 1565 bp, Homo Sapiens
aagcagagaaaattcctatcaaccccaaggaggactcaaagtgaggctggaagaggacttagaagagtatgaaagtactctaagattttatctaagttgccttttctgggtgggaaagtttaaccttagtgactaaggacatcacatatgaagaatgtttaagttggaggtggcaacgtgaattgcaaacagggcctgcttcagtgactgtgtgcctgtagtcccagctactcgggagtctgtgtgaggccaggggtgccagcgcaccagctagatgctctgtaacttctaggccccattttcccctctgaaaataagagggttggatcaaacgatctctggggccttagcatctcaaatcctgtggatcctcctacttaccccttagagagccttactgggaagtcagtcattaatgatgtggccagttatttgcaagtggtaagagcctatttaccataaataatactaagaaccaactcaagtcaaaccttaatgccattgttattgtgaattaggattaagtagtaattttcaaaattcacattaacttgattttaaaatcagttttgtgagtcatttaccacaagctaaatgtgtacactatgataaaaacaaccattgtattcctgtttttctaaacagtcctaatttctaacactgtatatatccttcgacatcaatgaactttgttttcttttactccagtaataaagtaggcacagatctgtccacaacaaacttgccctctcatgccttgcctctcaccatgctctgctccaggtcagcccccttttggcctgtttgttttgtcaaaaacctaatctgcttcttgcttttcttggtaatatatatttagggaagatgttgctttgcccacacacgaagcaaagtaaataaagaccacaaatgttcaaattctaagccacttaatagcgttttgtacattaaaaatgacaagggttattatacaagtagccttttaaaaaattctcacacagaacagctttgtatttagacttaaagctgttgctactttgctagtgacgtttgtgttaacagtcagtgctctaggccattgattgattgattgtcagaatcagaagtgactacacaagagcattagccagacttttcagtgagaacaggtaacaggctggcaccagcacttggtacagcacgtggacaggacgacggaacccagagttctctgtctctccttcacagcagatggactcttctataggtggctgttaatttacacaaagttatattccagaatcaggaagccccgctgtcgccaacacttgaaggagaactatgttccagttttggtgttgaacttctcacgaaatacctactaccaaaaattgtgacaccttattagacacttccaaagtaccccccaaaagctgtttaaaagaccattccattttttcctacacaaagtgcatactaaaatttcacaataatcatcttcagatgtacattttatttagtacatttcacagttttcagtattcagtccctcatgaacattttatagccaacttttttgtacaaag

SEQ ID NO: 241457 - DNA, 1822 bp, Homo Sapiens
ccaactttgtacaaaaaagttggcacaggtgcaccgctgccctgtcagtgagccaggaaaatccagagatggagggccctgagcgagaccagcttgtcatccccgacggacaggaggaggagcaggaagctgccggggaagggagaaaccagcagaaactgagaggagaagatgactacaacatggatgaaaatgaagcagaatctgagacagacaagcaagcagccctggcagggaatgacagaaacatagatgtttttaatgttgaagatcagaaaagagacaccataaatttacttgatcagcgtgaaaagcggaatcatacactctgaattgaactggaatggcacatatttcacaacagggccgaagagatgactataaaatgttcatgagggactgaatactgaaaactgtgaaatgtactaaataaaatgtacatctgaagatgattattgtgaaattttagtatgcactttgtgtaggaaaaaatggaatggtcttttaaacagcttttggggggtactttggaagtgtctaataaggtgtcacaatttttggtagtaggtatttcgtgagaagttcaacaccaaaactggaacatagttctccttcaagtgttggcgacagcggggcttcctgattctggaatataactttgtgtaaattaacagccacctatagaagagtccatctgctgtgaaggagagacagagaactctgggttccgtcgtcctgtccacgtgctgtaccaagtgctggtgccagcctgttacctgttctcactgaaaagtctggctaatgctcttgtgtagtcacttctgattctgacaatcaatcaatcaatggcctagagcactgactgttaacacaaacgtcactagcaaagtagcaacagctttaagtctaaatacaaagctgttctgtgtgagaattttttaaaaggctacttgtataataacccttgtcatttttaatgtacaaaacgctattaagtggcttagaatttgaacatttgtggtctttatttactttgcttcgtgtgtgggcaaagcaacatcttccctaaatatatattaccaagaaaagcaagaagcagattaggtttttgacaaaacaaacaggccaaaagggggctgacctggagcagagcatggtgagaggcaaggcatgagagggcaagtttgttgtggacagatctgtgcctactttattactggagtaaaagaaaacaaagttcattgatgtcgaaggatatatacagtgttagaaattaggactgtttagaaaaacaggaatacaatggttgtttttatcatagtgtacacatttagcttgtggtaaatgactcacaaaactgattttaaaatcaagttaatgtgaattttgaaaattactacttaatcctaattcacaataacaatggcattaaggtttgacttgagttggttcttagtattatttatggtaaataggctcttaccacttgcaaataactggccacatcattaatgactgacttcccagtaaggctctctaaggggtaagtaggaggatccacaggatttgagatgctaaggccccagagatcgtttgatccaaccctcttattttcagaggggaaaatggggcctagaagttacagagcatctagctgggactacaggcacacagtcactgaagcagccctgtttgcaattcacgttgcccacctccaacttaaacatttcttcatatgtgatgtccttagtcactaaggttaaactttccccacccagaaaagggcacttagataaaatcttagagtactttcatactcttc

SEQ ID NO: 241458 - DNA, 2106 bp, Homo Sapiens
caattgttcgttggttgcttgtaaagagtctaatggtgtataggctgctgcctcctggcatacaagtgtagtcataaagagcagtcaacagagtaactgtttaaaatagttgttgtttctataattaaccatatactaagtacaagtctcagactaagtttttagccacttgtcaaattcagttttaaatgcttagaaaacactgaggacacctattgaggagggaggggggaaggtcacctgtaaaggagtccaaagtatgtgctggagcagatgatgacaaagacagaacatctaagaagatagacatggaggaaagggagtagtatttccacacactatgacattgaaaattcaatcatttatgataggattttgatccactgcccattactaccttgtgggaaaaatcctccacaatgaaaaggttgaaaaattcattctccaaaaattgacacagttttaaagagaaaatattagagcagcaccataaaccatgcaggaaactctgctttaacaaaatatcagtgtgaccccaaaaatgctcctgctgcctttcaggacatacaagagactagaacacaagaactcagaggtatcccactggctgttgttgctgaaagtctgaaagcccagaggatactttttccatttctaagacatcactgcaaattaaggaatccaagtcagaaaaatcagagaaggacaagacataacatgtatttgattaacaaccattatttcttactaaataactatcatgatcattgagaagttgtcctcttatggaaaactgttcctagaacacactaagattaagttagaaagatatcagaggcaatttctccaagagaaacaggttaaattcaacataatttgtacatctcaatcttcaatgacatctaaaaacaatctgaggtacaaaacagttaagaagctctataaatatgaggccacagggacaatgaaagttcactaacttcaaaaataagtgtaaaaaagtctcaaacacaaaggattcactgcactactggacttgaaacttttctatcccttctttcccctttcctatttcaagccttagcaatcatctacaaatagtaggataatctttttttctgactgaatggattcatttttggaatggggagagggacaaactatttttcaaagcagcattacccaactggttagactaagtcatgtaccaaagcaatagcttttctgaaagaactaatctttatatgaccctaaagaaagatttaaaatgaaagaattgaacattattattgtagaagaccaatcatgtatggacgatctggtcctagtgtaaaacttcatttgtaaacaatccatagagtcttcatttaaaggtaagatttaaggcacaccaaacatgataggggcatgaaaaataaagtatagagggtacatttcttatcttagacttctatatgcaccttgtagcaaaaggtactttgatatacaactcttacagagccagcttctttaagctctacccctggctcccctccctgtcccaagagctcacactgaatcaagttaggtacacttttctagtgtgaaattttctgattccatcagaaacatacatcattgaagagggccttcataatgcaaaaggagtaaacagaagataggtttaaaaaggagaaattcatcatctctacatcaggcattagaactgtaagctgtatagcaaaagcacacaccgaagctccagcctatttctgtatcagtcattgcatgctcatatcagagcatcacaatccagtatgagggggaaaaatctgaaaaataactctaactatcaaagataatcaattaaagacacacaggtggcaatcctcaggagttggatcatccttttttccacagtaacttattctgtttcgattaagtgtcaaatgattagcaacaaaaaataacatatggttttaataaaatccgtaacgttcaggattgtccttttatgaaacccttcaacatgaaatgcttcttctagaaagtttgtcctccctcttttgtaatgcattaaatgcaagctatagtcactgtgtgattgctgtagtgttattaacccaa

SEQ ID NO: 241459 - DNA, 949 bp, Homo Sapiens
ttgggggatgatgatgtgcctgcagatatggttgcagaagaatcaggtcctggtgcacaaaatagtccataccaacttcgtagaaaaactcttttgccgaaaagaacagcgtgtcccacaaagaacagtatggagggcgcctcaacttcaactacagaaaactttggtcatcgtgaaaaacgtgcaagagtgtctggaaaatcacaagatctatcagcagcacctgctgaacagtatcttcaggagaaactgccagatgaagtggttctaaaaatcttctcttacttgctggaacaggatctttgtagagcagcttgtgtatgtaaacgcttcagtgaacttgctaatgatccaattttgtggaaacgtttatatatggaagtatttgaatatactcgccctatgatgcatcctgaacctggaaaattctaccagattaatccagaagagtatgaacatccaaatccctggaaagagagtttccagcagttgtataaaggtgcacatgtaaagccaggatttgctgaacatttctacagtaaccctgcaagatataaaggaagagaaaatatgttgtattatgatactattgaagatgcccttggtggggtacaagaggctcattttgatggacttatctttgttcattctggaatatatactgatgaatggatatatattgaatctccaatcaccatgattggtgcagcacctgggaaagtggcagacaaagttataattgaaaacactagagattcaaccttcgtttttatggaaggctctgaagatgcttatgttggatatatgacaataaggtttaaccctgatgacaaatctgcacaacaccacaatgcacaccactgcttagagattacagtaaattgtagccctattattgatcactgtatcatccgaagtacatgtacagttggttctgcagtatgtgtta

SEQ ID NO: 241460 - DNA, 981 bp, Homo Sapiens
cccgaaagtttcagctgcattgctgcggaacgttttttagccagaaggcgaaagaagaaatcggaagtgacgtcgcggccaaaacaagcccgggcttggaggcctgtactgaagctggcctcagatgggaaggcccgactcgctgtctgctgtcgtcggtggtcgcgagaccttgcactctcaccgggtcggcctccagcccctgtgcccgggatccgctcgccgcggatgagcgagagtttcttcctgggacttttcgggcacagctggccggtggcgacagaacggactttctttcctgcaagagtctcccctccagcgggagacagcgggctcctgtctcgggacgctgggacacctgtcgcctatttttaaatatccagattccaagaacacactggatactgctcttacaaaaccaagaggaaatcatgaagaaatgttttagttattgaaactacagttgaaatcatggatacatcaacaaatctggatattggagcccagcttatcgtggaagagtgtcccagcacttatagcctaactggcatgccagacattaaaatagaacatccactggacccaaattcagaagaagggtcagctcagggtgttgccatgggaatgaaattcatattgcctaaccgatttgatatgaatgtgtgttctcgatttgtgaagtccttaaatgaagaagatagtaaaaatattcaagatcaggttaactctgacctggaggtggcatctgtcctatttaaagctgaatgcaatatccatacatctccttctccgggaattcaagtaaggcatgtctacaccccctctacaacaaagcatttctcacccataaaacagtcaaccactttaaccaacaaacacagaggaaatgaggtctctaccacacctctgttagcaaattctttgtctgttcaccagttggctgctcagggagagatgctctatctggctactcgtatcgaa

SEQ ID NO: 241461 - DNA, 1320 bp, Homo Sapiens
  misc_feature (151)..(166): n is a, c, g, or t
  misc_feature (403)..(415): n is a, c, g, or t
  misc_feature (441)..(496): n is a, c, g, or t
  misc_feature (558)..(704): n is a, c, g, or t
  misc_feature (881)..(935): n is a, c, g, or t
ttgggttgatctttccttttatggattgtgcttgcaagtctaagaacttgtcactttggtgctagatcccaaatattttcttctatatttttagattttatagttttatgttttacattgaagttaatgtttcattttgaggttttacaannnnnnnnnnnnnnnnatttgtggatttccagttgttgcaacacagtcagttaggcatattttggtggatctgtttctgggttctctgttctcttccattgatgtttgtgtctgttccttcaccagtaccacactatatcaaatactgtacctatgtggtaagccttgatatcaggtaaagtgattgctttcacttgtttcttctttgtcaagataattctggctattctaggacctacgcctctctctctcnnnnnnnnnnnnncttgaaacagggtctcactttgtcannnnnnnnnnnnnnnnnnnnnnnnnnnnnnnnnnnnnnnnnnnnnnnnnnnnnnnntcaagcgattcttgtacctcagccttccgagtagctgggattacaggcatgtaccactatgnnnnnnnnnnnnnnnnnnnnnnnnnnnnnnnnnnnnnnnnnnnnnnnnnnnnnnnnnnnnnnnnnnnnnnnnnnnnnnnnnnnnnnnnnnnnnnnnnnnnnnnnnnnnnnnnnnnnnnnnnnnnnnnnnnnnnnnnnnnnnnnnnnncaaagatgcaaattcttgtttggatttatgctctgcctcttcccagcattttcttatctgtagccctgcttgcttgagagtatacttggataagaagtattgctgttgagggagctataagaaaaggattcttcttccagaagtaaagaactcatctttagagtacctttaaatgannnnnnnnnnnnnnnnnnnnnnnnnnnnnnnnnnnnnnnnnnnnnnnnnnnnnnnccagctcactgggactctcagaccttacctttccagctcaaacaccattagttaaattccttcattctcattagaatgcagcctgctgagtatgtgggtttcactgccggagtccatcatttagccagtatacatagaggaactgcttcgaatcaaggcaactggtgaagggcttagcatgttggcagcaatatcccagagattgaatctgtttgcattttcctcatctagcataacagctgcttgaagccagggctcttagccctttgcattccccttgagcgaggaagccacactgcctttctgtgtctggttcagagctcttccttcttggcatgttttctggactacatgcacatgggcagctatagattaatctgcaaaa

SEQ ID NO: 241462 - DNA, 1457 bp, Homo Sapiens
  misc_feature (130)..(146): n is a, c, g, or t
tcagcaatgtagatacaggcaccaggtaggagcaggatggcttacccagcaacctgcctcttagctccctgctagtgttcttccctcctccccagtttccagttaaaaagtacccttggcctgggctttnnnnnnnnnnnnnnnnngattaagctggagagaaaggggatacacttgggcaagaatggatattttgtgctagattcatggaattttctaagtgtccaggagttttggttttaagcaccggcaagagctccctttggaaatttcagtgtggccaaatgattatcaagcattgcagcatctctgccagcctcccacccttagaaaggtggcagagtgagagtttaaatacccttggaaatgtgtttcatctcagtaatatttccactgggtatccatgacatacagtatggtctgccagggctgcaggcagagagccataagcaaagagaatccacagacccgctgaacagggactcaagccttctcctaaatctaagctttgccaaaaggttatcaacttccaggaccagcctagagaaataaatttaaattccagagagtaggctaggtgatgtaagtgactgactgaaaaaacaagtatcaataactcttaaagttttcagttagaaatttctgtaagttagcctcaagaaactccactactaaactggaaaaccatgactaggaacaggaagcggccctggggtagaagcattctaaagaattgtgacccaactgcatcaatatctgatttcatcttttattaaaagctgagagttaaagaactgtagggataactaagtccacctcaaagtccagacagaaactgccctcccaaagaaacaatgtttctttaaaacaaataccacaccttcccagatattatgggtaggtaagtgactaggttttgcagattaatctatagctgcccatgtgcatgtagtccagaaaacatgccaagaaggaagagctctgaaccagacacagaaaggcagtgtggcttcctcgctcaaggggaatgcaaagggctaagagccctggcttcaagcagctgttatgctagatgaggaaaatgcaaacagattcaatctctgggatattgctgccaacatgctaagcccttcaccagttgccttgattcgaagcagttcctctatgtatactggctaaatgatggactccggcagtgaaacccacatactcagcaggctgcattctaatgagaatgaaggaatttaactaatggtgtttgagctggaaaggtaaggtctgagagtcccagtgagctggaaacccaaaaaaagagaagaccaatccacctcaaaataagaaagaaaaacaaaattcatttaaaggtactctaaagatgagttctttacttctggaagaagaatccttttcttatagctccctcaacagcaatacttcttatccaagtatactcccaa

SEQ ID NO: 241463 - DNA, 773 bp, Homo Sapiens
  misc_feature (293)..(313): n is a, c, g, or t
tttttaagatgcataaaagggacaccttagcacgtgagtgtcctttgggcttttcaagacacattttttaaggtttacccctggagtagcagagggtctcctcacccaggtgaaaagagatgggctccatctgcagatgaaggaaaggcactggcgcacagcattcagcaatgtagatacaggcaccaggtaggagcaggatggcttacccagcaacctgccttttagctccctgttagtgttcttccctcctccccagtttccagttaaaagtacccttggcctgggctttnnnnnnnnnnnnnnnnnnnnngattaagctggagagaaaggggatacacttgggcaagaatggatattttgtgctagattcatggaattttttaagtgtccaggagttttggttttaagcaccggcaagagctccctttggaaatttcagtgtggccaaatgattatcaagcattgcagcatctctgccagcctcccacccttagaaaggtggcagagtgagagtttaaatacccttggaaatgtgtttcatctcagtaatatttccactgggtatccatgacatacagtatggtctgccagggctgcaggcagagagccataagcaaagagaatccacagacccgctgaacagggactcaagccttctcctaaatctaagctttgccaaaaggttatcaacttccaggaccagcctagagaaataaatttaaattccagagagtttttataggtgatgtaagtgccaacttttttgtaca

SEQ ID NO: 241464 - DNA, 1129 bp, Homo Sapiens
  misc_feature (187)..(230): n is a, c, g, or t
  misc_feature (675)..(688): n is a, c, g, or t
aagggcttttctttaaagtgttgagatgtttgaaatggatgtcatgcctattaattacatcggcagttctcattcaactctatgttggttgtatgactattaatgaattttaatagaagtctaatggccaaaggccaaaactacattcaaactctgctaatatatccaggcagataggaaattccannnnnnnnnnnnnnnnnnnnnnnnnnnnnnnnnnnnnnnnnnnngctaaaactcaaactaaaaacctcccaaaggaactgctttgtttgtagacttcaatttgaagtagatactaagggcaagaatagaccagttaaaattcacctgaaaatctcttcccagtcttcaaatgtgctaaaatatcactgtcagcttagcatctcttcatgtatgttatatatagatgtattttttttcaaaatgatatttcagatatttaaacatcaagtggccagaagacaagagttatactattggcaaagtttacagtccacccaggccttaagaaagaccacattcatttcactaataactctccatcagacacaatatatttgaggccaccttattaccactgcataaagcttatttaaaaaaatttgttgctagcacagtctggttggcaaagcttcattatacattttactgtacaaatgcttttcagatgannnnnnnnnnnnnnaaacaagaaactctgctataacaaaaatttaggttaattatgatggtactttcactgtctcttctttattaagtgtggttatctccaatagtaaacaagttcatttcacaaaggctgttactaaatgacttatgtatgatgttatctacaattctcaaactgtaacagtacagacttgaacttttaaattgtctgtaaatcatcatctatgccatgaatgtttaaatataatatatatttaatatgaaaaagctaaagcacaagtgctttcacccacccctaaattctgttttgggccctcacagattcggaatgcattttcatccaccctttttcacaaagtcaggagagctcaggaaatataaagtcaaaaatatacaaatctttgttgttattataataagatttttttccatgaatgaaatcctaacttttttgtac

SEQ ID NO: 241465 - DNA, 1037 bp, Homo Sapiens
gcagcagtacattagtatttacatttatttaacgtatgcagtttacacactcattattaaacaaaattggaatgcaaacaaatatacaaataccataagcattatcaaataaaataactggcactagtgttataagcatattaatggacctggtagggaaaagtgatggaagaagactgcagcccatggcatttttctttttaccaaaagaaaacgctcagtagcaccataatggtaatacttaaaagaaatacataagatagaacattttaactgctatcattgaggttaacctgcttttatttaagtgaattatacaggaaattaacagtacaggcagtattttggccaacttctgcttatgtcagctgaacattgtccataaacaaaagcaaaagaaaataatgctaatcatacatggaccttttgtacttggtacaagttctgcaccgtgctttgatttcatggttggagaagatatgcatgtgttaaaaactgaggttatgtaaagttattcactaaagcctgagtgtgtctttggtaggctaatactttttcagcattattaatcacattcatgtttatctatttcctgtatttttatatataatccaaggtgaccagagaagacatggaaaacaacacagcaaaatcctcaaataactaggccattaaaacccagtcgatcccaaaggcaccaagaatcaatggggtacaaacttccccttagagaaaggtggattttttgtaatacttataacctaatgggactttattttgtagttttatgtatcttatttgttgctgtcatatgcttaattacttacctttacattttttcctctaagatggcatcaacaataaacaagatagagtaccaggtatttctatttcaaagttgtgcaaaaactgccacaatcttgctcaaagtgtctaagtatccaaatggtagcaaatgagctgcattaagctttatataaccacattgcatatgaagaaaaaaaatgaaatttatgccgatgtaaatagaaatccaa

SEQ ID NO: 241466 - DNA, 1726 bp, Homo Sapiens
  misc_feature (1126)..(1134): n is a, c, g, or t
ggcaagatgggcttgagcgattcaagaggcaactaaaaataaaattaggacccagcaccttgtttgacacacagtttgaccttcgattttcctcccttaacttccctcttcccttaatatctgtatacaagtgttgcttcaaagtaccaaggtcagaaattgattcagtacggtttactaaagtcatgtggaataaagccattggaaacaaatggaaagcctgtcgggacttctgggctcagaaccagctggctcacgcactccacttgtcagctggacttctgccttgtgaaatggaagcagcctttgttcctttctggctgagcaagctcctgaggctgggagagactaggaaggcttggtaggaggggaaaaaagtcaggaaaagatatcaaatcagaaacatggaagaagaagggaaccgatttgagttggtgggcaaaactctaaaaatctaaatctgatgcttatgtaagggttgagcgaattagggagattgctagtggaaattggagggaatttgttttgcatcatttgtctaggatctatgcaaatatagctccactaaaggaccatagggaagagccagccttgccttttcttatatgattttgtttacaaaattttactgggacttttaaatctagctatagagttgggaaaaaatatttccacttagatattttacatggttttgtttaaaattaccattacttgttttttaaaaacacatgaccacatatgtatatgtatatctacctaaacattgtatcatggtttcagtatgttattcatgtattactgggagatgctaccaagaaaccaacccaaagaaaattctgaaaaatacatttctatttatagaataaatgtttcatttatataaaagcaaaagaacttagagttctaataaatgggatgtctaataaattatgaagttactgatttgaatatattatatttttataacttccttgccaaagtcctgatttagtacattagagaacctgtgtttcctctctcctctaccattcatctctcttccatacagtcatttgggctttttactcaaagagaatcaagaaataataaggtataacaagcttggcaaagtgttggctttttnnnnnnnnntttttttaatctctagcagtttggtaatttagcagcatcatttatttgggattcttttatctgatttcaacagtgaaaaacatccctatgataaagcctaatgacccatttcacaaaagatggaatttgcccttcctagaaaatatgacggagaaaagtctgactcagagaaagtgagtctgaattttataaggggtagtaagaattggacaattcctttgcatatctgaacttggcaggtaccgttctaaatctgaaacagggtgatagctcaaagttgccattcatccagaatagattgttttagaatgtagtgtttaagtgactgtttcattaatacacctacaccctttctttgaaagtttgcaacctaattgcatctaaaactatgaataagttctgtggtaaaatcttaaactatggaaaattacaaaaatgaatttttcttccctgaaatcagagcttacatgtgtgtttttttataacattttcagataaatgtattcaacatgtaatacagtattttaacattcactcttattttatattgaaatgtattacagtattaaaactcagtgttcagtatttattt

SEQ ID NO: 241467 - DNA, 1456 bp, Homo Sapiens
tttattctctgtttttccacagctctgtttgaaatcatacacattttctggcactctgattttttgcagaaatcaggcaggagacagatgggtagtctgggagatgactcactttctaatgaattgtggcagacattgagtttgaaaggtaaccagtcatatatcctaattttctagagaatttctaaacatttttacgattatccataactaaacaaactctaaaaaatcaatttctaacccccaaatactccgaatgtcttaaccctattatgaaaaaacaactacatcttcccaccagttaactgacattcttaatcttctctctctcctccctactccacaatcctactcccctctgtgtttcctccttgttagtcttaaaatttggcagtattatatttattgagtaaatctctttcagcagtatttcatactggtgtttgcagcagtggataacttttagggggaatctgaagaaaaatccttttgctgccttcaaaatgagaggttatcatagtaaactcatctactgtaaaaatccattctgtgtcttttaccagtcttggataagatgtcttccgcatcttttttctttgaaagctagttcttaatcatttggcttccaggagttggctactgtttttctattttacaaagttaaaatgtactggcagaatattttctttgaggattaaaaactctggtctattctaaatgtcgtctcttagcttacaaaatatttttgcaaatcagattacattttttcaggtatcttattcaactgtcagtttccatgtggtttgtctattttctctgccatatttatattcaccatagtgggcgaaatcttattgttggctcctacacgtcctatctccctactcttctcacagggcctcgatttcctgttcaggaattatctatacttccttatactactcagtcttcacgggatatgaatccaaactttgaggaagacttctagcatatcctttttcattctccaagatccccaaagaggctgcatgtaactgaaactctgacaattagcctctttcttcagggactttgtgtcttgagtagagtaacagaagggtggaagaaatagtccatgttactaattgcagggtgtcccaaggtgatagtacagctatagagatcccctatgccaacttgacactttttgttccaagttgctcttcagccctctctctgattctgtaacatttctatgtcctattacattcactttctgctcaatatagctattggtttctgttgtaaaacaaataatgttacatggtatagtcacataaattcttttctacatgtgtcatcttctcttgcaatgtcatattttacacgttttgcacttgtcaatttcaatatcatctttgctttactcttattctgtagtagtatagccaaaatttgccaacttttttgtacaaag

SEQ ID NO: 241468 - DNA, 1088 bp, Homo Sapiens
ggctgctaaaaaaggagactaccatgtaaattagtgcagttcttctgcgttaagtttgctcatttcacctctgtagaatgtttaggctaggatttgctgccttggctgatggattattctccacttatgatgagtctaaggaagctatggcaaaattaatgctaagtggcaggagaaacacacacgttatgttaaaaaactttcaatatttctaccaaatcagcagagaatatgtggaaaaaacaggtactctcagaaacacgtactccaccaaaagggtgttttgtttagaaagttcactgcttatctcaggatttatttatccaatgtatcatgtacaagtgctatatatgcatcaatcaattttctttcctttttttatggctaggcttccttgaatcacatctatcaattttcaactgaacactaaaataactttttctcccctttgacaactgaggaaaaacctacttcttaggggacagaagaaagagaaccatgaggaagagaataaaatatgaccaagatatgtttaaatctggtgatgtctaagcatcttctgctatatcttgcatctcctgctatattttgggctctatctactgaaagccctgtgggagagttgtactggcataacagaagctaaactgtgcttagcccacagtgaatgttcactagtctttatctgtttttcaaactgaccatctattaatccatccagcatccatacaacctcaataagcactatcatcttctccacagatgcaagctacctattcttttcccttaaatcaagccatttgtaaggagacacagacccatgatttgggatgatctctaaggctcagtacaatggtgtatttccataatcctgtttcagtctaaaaatgggcctgagtttaaaatggagatatagtaaatagcttaccttaattgtaccctgactgttagcagcaatcagcacattggactcctagaaaagaacaagagcttttaaagtatagagaaggatttcctggagagcaatccaagagataatttcctcttcatccttctttcttcacttcaattcctaagacaattgccaa

SEQ ID NO: 241469 - DNA, 1397 bp, Homo Sapiens
gtatttcagcaggatcaagtacaatttgacttgagttaacccttcataccaattctagcacttaattggggggaaaaaaggatccatttaataaaatcatttaagatataaaaggaatttaatgactctttactatatttaccaatagaaaagcaaatttaaaaaacgtttcccatctgggaaaatgccaaagaatttgaatggattggacattaatcctttttgacctgcagcttaacagctgcatgaactctttcagatgagctatctccacagttaacttgggagccttcaaggtaaactacataaaacacatggaaaaataaattggctaatgcatagcacaaatacatttttggaatatatgttggaatctttccacattcttatgaaagttttaagtatccttgtttaggattttaatctgttttcttctttcatcaataaacactgtttataatgatcaaggttacaggacctaaagtcttgctctttcctgctgcttcatccatttctagccaatcatctagcgtccagatactttgtatttttagaattaaagtagtatactgtcataaaaaagtaagttgtgatattgctaaaactaagaggaagcaaatggctaagaaagatcacggaacaggaggatagttatgagacactgtcaaaaagaattacattagatggacactacaacactcactaagtagcaaatatttaaacgtgcaacctttcccctgctgctcagctaaggcttgactaatatatgtgcttccataatgcttttgtctttatattaggtaactaggctacttaacataagaagtcaatgatgctgaacaaaatcttagatttgtcagtgggatcctatgagaacctatgtagttttgagctcttgtaggtatgctggcaatcccaattggtgtaaaggataaactttttgaagagtaaggtgtagcttttcaattcatgacttgacatgagagtaagagagagactgagagagtatagaaagccacttaaatcagatattccaagaccttctaccatcttgctagaggcttccagaacataacaaacactgatcagttaaaaaacctcgttttcatttaagctctcagtggttctctaaagaggcttttcaaacagagaaactggctgcctaaaaaaggagactaccatgtaaattagtgcagttcttctgcgttaagtttgctcatttcacctctgtagaatgtttaggctaggatttgctgccttggctgatggattattctccacttatgatgagtctaaggaagctatggcaaaattaatgctaagtggcaggagaaacacacacgttatgttaaagggactttcaatccaacttttttgtacaaagtgggcattttaag

SEQ ID NO: 241470 - DNA, 1309 bp, Homo Sapiens
caattcaagcagtttaattaaagggtaatcattgggttttctgaaaccaggaaaagtcacgagtctctctcttttttcactttcacatctccagcaaggatggttgcaatttccccttgcataaaggccccaggggacattggagcccacaagagggcatttttccccactgggacaatagacctctccactagctccctgctgtttgatgctttgtctggagcaagggaagcagaacttgtgcgaagggacggacgggcactgcacaaaatgggtgtcctccagccgctcgtggcagagggtgcagcacagcggggcactggttgccagagaggagtccgggaggctggcagggtgcactggctccagtcctcctgtgttgcctgctccctggccccccacctctctgggacccagccttctttggttcatagaggacggagagggcggactgttgctattcctcctggtagtggagtgaacctggttggcatcttttgaggcatgactgccccctgcattgtctgctactaagatcagggctgccatgggggactggccattctgggccgcttcaggcggtgtggtccggttggaatgaggtgaggcagtgggtggtggcggagacacaaaagaggatgtaggagtcatggggatcttgagcccctctgtggatgtggacagccacggctgggcctctccgttgatcttagggggcccgacttcaccttctggttctggagagggcttccttttccttgctgttcttgcaactggaaacacaaagaaataaaaggaaaaaggtaacataagtggcggtgcactgaaagagatcattctcttcctaacccgaaacaaaagtcgttacagaattcctcctctctaaaagcacagacagaaaatactcatatacgagtttcaggtgcacatgcaacttaaaaccttcaggcgtacgggattctgaggcagcagactgatttaaaatggagccactgaaaatgacacgcttgtaactgcctgtttgtacacatgcacaaaagtaccctcgtttgcactcaacatgtgactgctaatgtcccccaataggttaaaaggtgactggtgccctcatgctcccatccaagaatgtgctgggaaaggaaaaccccgtgtcagagcgtatcagcccagtctgactcatctctgttatgctgcttcagcacatgaacacgttgccaccaagcactggttccgcctcaggcagatcaggaagtggggtgtttgttgtttctgggctggggtaaaatggtgaatccaaagaaccacccaa

SEQ ID NO: 241471 - DNA, 1459 bp, Homo Sapiens
  misc_feature (1188)..(1247): n is a, c, g, or t
cctataaaagccaactttgtacaaaaaagttggggaatcttactgaggtcattagcatcccgcgcttctgacgggagggatgaggtcggcgcacacctcgcttgggctggtttgtcttccctggatccccgtgtccactttgcttcgcacagagccacaggcccaaggccgtgggcaggagggccagaggtgcatccctgagcttctgcctcctgagcacaaagggaacggcaggagcagctgatgggatatcggaagagagggccgaagcccaaaccgctagtggtgcaggtgcctacctttgcccgtcgttccaatgtcctgaccggcctccaggactcctccactgacaaccgtgccaagctggatttgggcgcgcaggggaagggccaggggcatcagtacgagctcaacagcaagaagcaccaccagtaccagccgcacagcaaggagcgggcgggcaagcccccgccgccgggcaagagcggcaagtactactaccagctcaacagcaagaagcaccatccctaccagcccgaccccaaaatgtacgacctgcagtaccagggcggccacaaggaggcgcccagccccacctgcccggacctgggggccaagagccacccgcccgacaagtgggcgcaaggtgcgggggccaaaggctacctgggggcggtgaagcccctggccggtgcggcgggtgctccaggcaaaggctccgagaagggcccccccaacggaatgatgccggcccccaagaggctgtgacgggcaacgggattgggggcaagatgaagatagtcaagaacaagaacaagaacggacgcatcgtgatcgtgatgagcaaatacatggagaacggcatgcaggcggtgaagatcaagtccggcgaggtggcagagggggaggctcgctcccccagccacaagaagcgggcagccgacgagcgccaccctcctgccgacaggacttttaaaaaggcggcgggcgcagaggagaagaaggtggaggcgccgcccaagaggagggaggaggaggtgtccggggttagcgatccgcagccccaggatgccggctcccgcaagctgtccccgaccaaggaggcctttggagagcagcccctgcagctcaccaccaagcccgacctgcttgcctgggacccggcccggaacacgcacccgccctcannnnnnnnnnnnnnnnnnnnnnnnnnnnnnnnnnnnnnnnnnnnnnnnnnnnnnnnnnnngccgtcggcctgaatctctcccacgtgcgcaagcgctgcctctccgagacccacggcgagcgcgagccctgcaagaagcggctgactgcgcgcagcatcagcacccccacctgcctggggggcagcccagccgctgagcgcccggccgacctgccaccagccgccgccctcccgcagcccgaggtcatcctgctagactcagacctggatga

SEQ ID NO: 241472 - DNA, 1166 bp, Homo Sapiens
ccaggcttgcaaggagagggcaaagcgcatgcagggtgggcatgccagcagccatcccactgcgagtcttgctggggcagggagatctgggcccaggatgaacacgcaggagacatacatgggcgtgtcctggagtctggaggggaccgaaacatactcggcaccaaagggaagaacgcgcagggcagagagctgtgggagggggcaacacggtctctcaccaggtaactcgaatgcctcttccgcatgagagacaaggcaagcagcctgcaggagagaagactgcagcctcaggtccagctggtcccacagggtgatcgggaaaaaagtactgagaaaagttctgctcagaatgtgggaaggcaggtgtggatggagcctctggaaatgggagaaccctacagctacctttcctctttctctgttgccatcccccagattgcactaaataaagagacctaaacatctcctacctgtgaatcctgacaagtggccctggccgtatgcaaagctttcccagcaccgggctgggctctggatacacctgtgggtgtccaacccagccaagcccttggtggctcagacttcaggctagggttttcaaagccccatgtctttgggactgaaccccctatggaaggccggataattggctgctggggtcaccccaagtacaaaaggacgggctctgcactaaggaccaaggtctggccaggcacttggaaagcttttctcatgaaaaatgaaaacctggggccttgggccctgccaatctgtcacctcacaggccactatacaagcatcctgatctcagaaatgagaaaccgagctctggattcctgggttatggtcagctgtgtctgtgccatgtgtgtctggccagcagaatacaggggctcagggctgctcttctctgggcttggggaagaaattctgcacttctttcctgaatatgatttgcagtcagatactgcataaactacaacgtactcctttccatgaaactatgccaagtgcaaagccatcctctgaggtcgtacctatgctgcaggctggaacctcctaaaactgctttctagtgctgacattagacacatgcgaggaacatgcaagtctcaactcaggttctgccccttttgggtgctgagggagcaggaccaggccaa

SEQ ID NO: 241473 - DNA, 683 bp, Homo Sapiens
acaaaaaagttggccaggccagactcctttcagctaaaggggagatctggatggcatctacttcgtatgactattgcagagtgcccatggaagacggggataagcgctgtaagcttctgctggggataggaattctggtgctcctgatcatcgtgattctgggggtgcccttgattatcttcaccatcaaggccaacagcgaggcctgccgggacggccttcgggcagtgatggagtgtcgcaatgtcacccatctcctgcaacaagagctgaccgaggcccagaagggctttcaggatgtggaggcccaggccgccacctgcaaccacactgtgatggccctaatggcttccctggatgcagagaaggcccaaggacaaaagaaagtggaggagcttgagggagagatcactacattaaaccataagcttcaggacgcgtctgcagaggtggagcgactgagaagagaaaaccaggtcttaagcgtgagaatcgcggacaagaagtactaccccagctcccaggactccagctccgctgcggcgccccagctgctgattgtgctgctgggcctcagcgctctgctgcagtgagatcccaggaagctggcacatcttggaaggtccgtcctgctcggcttttcgcttgaacattcccttgatctcatcagttctgagcgggtc

SEQ ID NO: 241474 - DNA, 980 bp, Homo Sapiens
  misc_feature (329)..(339): n is a, c, g, or t
ttggggattatttgatgacatgtttgaagatatggagaaaatgttttcttttagtggttttgactctaccaatcagcatacagtacagactgaaaatagatttcatggatctagcaagcactgcaggactgtcactcaacgaagaggaaatatggttactacatacactgactgttcaggacagtagttcttattctattctcactaaatccaactggttgactcttcctcattatctttgatgctaaacaattttctgtgaactattttgacaagtgcatgatttcactttaaacaatttgatatagctattaaatatatttaagggnnnnnnnnnnngacaaattcaacattcaacgagtagacaaaatgctaattatttccctgattaggaaagtttctttaaaaaacacgtaattttgcctagtgctttttctctacctgcccttgggctcactaatatcaccagtattattaccaagaaaatattgagtttacctgattaaactttaaaagttaattgtagatttaaattgtgtgaacctaatgatttttgcagtgaaacctttactaattcaaagttgcatgttctatgacatctgtgacttgcgttgcagagtgtacatgaaactgtataattgagtcattcagtaaaggagaacagtatcttggttaattgctactgaaaggttgagaaaggaatggtttgatatttaccacagcgctgtgcctttctacagtagaactggggtaaaggaaatggttttattgcccatagtcatttaggctggaaaaaagttgaaaacttaacgaaatattgccaagagattgttatgtgtttggttccagcctaaaaatgattttgtagtgttgaaatcatagctacttacatagctttttcatatttctttcttagttgttggcactcttaggtcttaatatggatttatgtgtttgtgtgtgtgtagtttatcctctct

SEQ ID NO: 241475 - DNA, 1085 bp, Homo Sapiens
aagttagtggtttcatgccaatctgactccacagtaccaggaaggggaatgggaaggagctcacagtctccagatgttagtagccaagggatatggttttctatttagaagaggactgcaaattaaccttataatagtaactttccatttaaaaagaaacaagagtaataaaactgtcaatgcttttttataaatgaaaactgactaatcagtgttatccggtaacagtcacatttctgtgtcccgtcaatgctgtgtggaccttcagacggcagctctgagcacgcaagtgaaaagcgcgtatttcagggcaagaatagagatgtgggtctgttttccgaggatgagccagctatccttcctcagccacaggagtggtgagcgtgagcaccctgggctgggtggtgaggactgcgtactgtggggcggcccttcccaactcttggctgtgcccagcagcacctctggggcacaagggcaggccctctttagagagaaccagggaatccaacctgagatgtcggggcttctttgttagggtttgacagaatatttgagacctaagattgtgaataaaggaacatgacagcatcgattctctgccgagcagaggtaaaaaggaccctacagaagtacctttctaactcatcttatgtaaatccaagtgctgggccagtgcctgggcggcaaagtgaggcctgtgagcatttctgtgttcagcacaacctgaacctgactgtccattcagacacgctgatccagaggaaagcaacactgaatcttaacatgaatgtgaagatagaagatgtacatttattttcatgaattacaaatgcatttctgttcatattagcaggcagtctttatataacccattctccattgctgtcaaaaatcaaacaagaaaaaaggacagctgagaaatgaaaagctaaaaatagaattatttttcctaaatgatctgctggatagcattttccgtggaacacaactcagaggtaacaatagagttttcatttcaatcgtaggcatgtggcacttggacagtcatctctgcacagaaagctgtaacagtcatgcgccaa

SEQ ID NO: 241476 - DNA, 1374 bp, Homo Sapiens
  misc_feature (549)..(669): n is a, c, g, or t
  misc_feature (678)..(722): n is a, c, g, or t
  misc_feature (1083)..(1125): n is a, c, g, or t
tatactggaaaaattttgcagacttgacaatttgaaaaaactcacagaacaactgcatagcctagaaataacgaaaacattaagaaaaagttaggtatgtcatgaatgcataaaacatacctagatatgaggttattttatcacttactatcataaaacatacaaatctattatatgaagttagagagaaatgtaaacaaagatggagtattaattcataactgcataaaattaactacagtagtgtactagtgttaacttcatagccacttcctgttatctcagtgtactcaaatgttacaagtatctgcttaaaacaccttgtgtaaaacaccatgtgatgctaatcatctctgctgagcagttcatgtctccaacaaattgcgtattgcagtaaaaagtgatctctcacggttttcacattatttttcatcatgattactgcaataccataaactttaaataacaccatgagtcctatacaaagtgcccctagtgatgctgaaagtgctcccaagaagcagagagaaggcatgacatcacaagaannnnnnnnnnnnnnnnnnnnnnnnnnnnnnnnnnnnnnnnnnnnnnnnnnnnnnnnnnnnnnnnnnnnnnnnnnnnnnnnnnnnnnnnnnnnnnnnnnnnnnnnnnnnnnnnnnnnnnnnnttaattttnnnnnnnnnnnnnnnnnnnnnnnnnnnnnnnnnnnnnnnnnnnnngttgaattgcttgatatgtaccacggactgaaatctgcagctgtggttgcctacaatttctaacagatgacatattttattaacagatgacatatcttataaacagacaacgtaaactaatgttattgataaacaccatacagtacagtaaaatgtaatttttctcccttatgattttcttagtaatattttcttttctctagcttactttattgtaagaatacagtatataatacatataacatacaaatatatgttaactgtttatgttactgttaaggctaccagtcaacagtaggctatacttagcagttttgacaaagtcaaaagttataaccagattttcaactgcacaggggtnnnnnnnnnnnnnnnnnnnnnnnnnnnnnnnnnnnnnnnnnnntactactctcagtatcaaaactgcaaccaaaggaaattgctgtttaaactatcatatgatccagcaatcctacttctgaatatatatcccaaaaaattgaaagcacagactccaagagacatctgcacacccatgttcatagcagcattattcacaagagccaagaagtggaaacaacacaaatatccacccagagatgaactgataaacaaaatgggagagggggggtggaatagccaacttttttgt

SEQ ID NO: 241477 - DNA, 1257 bp, Homo Sapiens
  misc_feature (195)..(214): n is a, c, g, or t
tgagtccacgggggtatatcccacatcgagcgttgtcacattggttgggcaagtgagatgggaacgggtgtgtgagtctctgggaacttcagatacatcagaaatttccgacatcattggggtaagccttagaaaaatctataaagacacactgtctgcacttgggaggcgctcacttccccctaatgtagactnnnnnnnnnnnnnnnnnnnngaaagaaaacccataaacccacattaaccaaacacacacacacatgacaaactctaagtctccagacagacaccctcaaataggcacttggtgttttcagctctggggctggagagatctggggctttggcctccaaaggcaggagctgctgtccccagagaggagacagcagcttctggaggctctggggactcattggatgggtactggctaggtagatgggaagggggcctgtttaaagaagaccccccacccccactgcccatttcaccacaacagtgacttgctggaagttttgtgccctgcggatttctgaatatagtggactggcatttctaaagagcgcatcactgaaggggcagaggctggcctttaaatgtgggctttgcatgttggggagtgatgggttccatgccagtagggaccaggtccagactgctactaaccactgtgtttgcagagcccaacgccgtgcctggcgcttagtggcatacaacaaatgtttgttgaatggttgaaggaaataatcccaaatgaaaatcttgttcctccaagaatataaattacattataaccttttcattggttataaatcggttcttcaaaatgggattataattcatttattcttctggccctaaaggaacttttaacgattgaaactgagtcttttcagttggagccagggaatgaatctgggtatgtccaaatgagagggtctttggcaaaggcactggtgaatttcaatgggataatcaaaccacccctaagttggcagctgacccagaactggctgttgggctggagggtaggccagggtccttatgtgttggatctgatgtccggagaggaggggctcgtcacttattatgcccctgggaaggcctgaatccggctgctggtgaacaagttcttgtctagctgcctggacagatggcaccaggaataaaaaggaagaaagtcaaggcagtggaaggaggaaggtcagggagcggccagagaatcaaggaccaggcttttttgtaaggatggatatggccca

SEQ ID NO: 241478 - DNA, 1083 bp, Homo Sapiens
aactttgtacaaaaaagttggcaacttcgtgcgtccaggtcagcgtcttcattggggtcctcatcgacctctggaagatcaccaaggtcatggacgtccggctggaccgagagcacagggtggcaggaatcttcccccgcctatccttcaaggacaagtccacgtatatcgagtcctcgaccaaagtgtatgatgatatggcattccggtacctgtcctggatcctcttcccgctcctgggctgctatgccgtctacagtcttctgtacctggagcacaagggctggtactcctgggtgctcagcatgctctacggcttcctgctgaccttcggcttcatcaccatgacgccccagctcttcatcaactacaagctcaagtctgtggcccaccttccctggcgcatgctcacctacaaggccctcaacacattcatcgacgacctgttcgcctttgtcatcaagatgcccgttatgtaccggatcggctgcctgcgggacgatgtggttttcttcatctacctctaccaacggtggatctaccgcgtcgaccccacccgagtcaacgagtttggcatgagtggagaagaccccacagctgccgcccccgtggccgaggttcccacagcagcaggggccctcacgcccacacctgcacccaccacgaccaccgccaccagggaggaggcctccacgtccctgcccaccaagcccacccagggggccagctctgccagcgagccccaggaagcccctccaaagccagcagaggacaagaaaaaggattagtcgagactggtcctcacctgctccggctcctggcgaccactacccctgcgtcccggccccctcgcctcccctccctgtcgccctttccctggacagatcaggccggggcggtgggaggcccgcctcaggtcagggcccagcgtgtgacgtaggggccggggcaggccagggtttgtttgtggaggcgctgtctgtccctctgtccctctgtgtttccagccatctcgccctgccagcccagcaccactgggaatcatggtgaagctgatgcagcgttgccgagggggtgggttgg

SEQ ID NO: 241479 - DNA, 1046 bp, Homo Sapiens
aaaacaatacttttaaaaaatcatcttagtgactccagcgtctcattctatagctcaagaggcatgtattcacacttctctccttggtctgaaacaggccataaaccaagcaggacggcaatgataacaactgaatcttcttctctgaattgctgccttcaactagactcatttctgaatcttcctttcttgtctcataatcatattgctgaggaatcctaaagcttcagataactaattccaagtgaaaacgccatcttttgttcaatgcaatgctcacctcctcactgtaaatggaagtctgcttgcagagctgtggtcagacttccctgctctcactgtgcctttagtgggcacgtttctcatcagactttgggtgggaggcctttgtacaagaagctagcccactgtccgaacactgaaatttcttttcagcactgagaaaatgccatactcaaaacacttacaaactttcagatactacttcctgttacaacttacctgttaatacaacttttccagaaacaaaaataaggagaacaattctgggtttgatcattctgtagattaaaccaggaaataactctggctcataactagaaggaaaattgcaaaaagtttagaaatcaagagctttgtgtgcttttagataaaatgaggacctgtacaaggaaaaatactgaataaacaaactagtcaagaggtaaaacacagttcttcaagcagcatcaaaggatagaatagaataattaaagcaagtgaggccgacttgtagtcgtcagttgataaccactggatggaaggctatttgtcctcctatcactttaccctatttctattgaatctggattttctgatttaagaaaaagagccctgtagttatgtctgcagtctctatatcattagatataatgatatctaatgcagataataatcctttacttttacagtcctaataattactattacagtcctaataatcatttacttctaagatccaatactgacagtttagggttttaatcatccaacttttttgtacaaag

SEQ ID NO: 241480 - DNA, 1545 bp, Homo Sapiens
ttggagacaggcttcctccagggtctggagaacccagaggcagctcctcctgagtgctgggaaggactctgggcatcttcagcccttcttactctctgaggctcaagccagaaattcaggctgcttgcagagtgggtgacagagccacggagctggtgtccctgggaccctctgcccgtcttctctccactccccagcatggaggaaggtggtgattttgacaactactatggggcagacaaccagtctgagtgtgagtacacagactggaaatcctcgggggccctcatccctgccatctacatgttggtcttcctcctgggcaccacgggaaacggtctggtgctctggaccgtgtttcggagcagccgggagaagaggcgctcagctgatatcttcattgctagcctggcggtggctgacctgaccttcgtggtgacgctgcccctgtgggctacctacacgtaccgggactatgactggccctttgggaccttcttctgcaagctcagcagctacctcatcttcgtcaacatgtacgccagcgtcttctgcctcaccggcctcagcttcgaccgctacctggccatcgtgaggccagtggccaatgctcggctgaggctgcgggtcagcggggccgtggccacggcagttctttgggtgctggccgccctcctggccatgcctgtcatggtgttacgcaccaccggggacttggagaacaccactaaggtgcagtgctacatggactactccatggtggccactgtgagctcagagtgggcctgggaggtgggccttggggtctcgtccaccaccgtgggctttgtggtgcccttcaccatcatgctgacctgttacttcttcatcgcccaaaccatcgctggccacttccgcaaggaacgcatcgagggcctgcggaagcggcgccggctgctcagcatcatcgtggtgctggtggtgacctttgccctgtgctggatgccctaccacctggtgaagacgctgtacatgctgggcagcctgctgcactggccctgtgactttgacctcttcctcatgaacatcttcccctactgcacctgcatcagctacgtcaacagctgcctcaaccccttcctctatgcctttttcgacccccgcttccgccaggcctgcacctccatgctctgctgtggccagagcaggtgcgcaggcacctcccacagcagcagtggggagaagtcagccagctactcttcggggcacagccaggggcccggccccaacatgggcaagggtggagaacagatgcacgagaaatccatcccctacagccaggagacccttgtggttgactagggctgggagcagagagaagcctggcgccctcggccctccccggcctttgcccttgctttctgaaaatcacgtagtgtggctactccttgtcctatgcacatcctttaactgtcccctgattctgccccgccctgtcctcctctactgctttattctttctcagaggtttgtggtttaggggaaagagactgggctctacagacc

SEQ ID NO: 241481 - DNA, 556 bp, Homo Sapiens
  misc_feature (365)..(374): n is a, c, g, or t
gcccactttgtacaaaaaagttggagttacttggccttaaaacactttcagccacccagattaattaaagtggagcagtggagcccctggctgggagatggcctccagaggagcagctgcagggcatgttctgggcttagcgacagaggcaagcaagggactggtgtctctggtgagaggtgggtttgatgtatctctgtcctatgctggtctctcttctcctttataaaatcctctgtggtcaactgactactgcgtatcgcagtggaataagactgcacagttgctggtaggtgagtttaaagtcttaatctatgcattcagagaaatatttttatatgctttgtgtaatttataacaaggannnnnnnnnnagctttgttaactgtgaattcccccctcctcctccactgcatatttaaagcatgtgttcacactgtgtgtaaacattcactgaagattttttctttgtgcattgctgactgttcaaacataacaagtattattaaaattaaatattaactgaccacatcattatataaagagaagaaaaaaa

SEQ ID NO: 241482 - DNA, 1286 bp, Homo Sapiens
  misc_feature (494)..(508): n is a, c, g, or t
  misc_feature (670)..(706): n is a, c, g, or t
  misc_feature (790)..(1025): n is a, c, g, or t
  misc_feature (1042)..(1063): n is a, c, g, or t
taagcatcatctggatgtggcaggggagtttgtggatgggctcatctgcccatgagttctgtaagtcaggtggtacattatgggtgccttttccctggatgtgctcaataaccagggaatctacatctatacccttaagttcagcataactctgcacttgtaagcaaatttcagtaccttttcggggccactgatggtgagtccagccccaatgtctgtcttgcgtacagcgaccaactccactttctaagactgaaatggtacacataatttctgtaaaagaaaatatttcagatacttggtggcttttcatataggcatacctgtgatggcctgagcaccttcacagtttacagtgaacatgagggtttcatccttttaacatgcacgacttcgtgggattttttgggtcatagtgaataatgttcatagatcaactcaggccacacaagaggacaggttttctttggtctttaaaaggaactgattaaagnnnnnnnnnnnnnnnggtggaagccaggcacagcagctggtacctgtagtgacagctacttggcaggctgaggtagaaggattgtgagcccaggaatatgaagctctcatgcactaagatcacacttgtgaatatcactgcactccagccgggtccaaacagcaagaccaactctcnnnnnnnnnnnnnnnnnnnnnnnnnnnnnnnnnnnnngtttgtggttagaaaaaagtttttatttaagacattcattaaagaaaaaagtactttgagaagagattagggccaggcgtggtnnnnnnnnnnnnnnnnnnnnnnnnnnnnnnnnnnnnnnnnnnnnnnnnnnnnnnnnnnnnnnnnnnnnnnnnnnnnnnnnnnnnnnnnnnnnnnnnnnnnnnnnnnnnnnnnnnnnnnnnnnnnnnnnnnnnnnnnnnnnnnnnnnnnnnnnnnnnnnnnnnnnnnnnnnnnnnnnnnnnnnnnnnnnnnnnnnnnnnnnnnnnnnnnnnnnnnnnnnnnnnnnnnnnnnnnnnnnagcaagactccgtatcnnnnnnnnnnnnnnnnnnnnnntttgaaggctggaaaaagattagaaggccgggtgcagtggctcacacccgtaatcccagcactttgggagacactggtgcgggtcacttgaggtcaggagtttaagaccagtctgaccaacatggtgaaatcctgtctctactaaaaatataaaaaattagcctagcgtggtggtgggtgcccgtaatcccagctacccgggaagccaggaggtagaagccaa

SEQ ID NO: 241483 - DNA, 939 bp, Homo Sapiens
actttgtacaaaaaagttggctcagggctggagcctggggtgtcctacagtgactccctgggagccgcctgcttcttctctccacatggaagcccaactggggttgcgtctgaggcctgccccctgggctggggcctcagaccccctcagccttgggaccgtgcccacgagggtctcccctcctgcacacagggcagtccttactcccccaccactcaggccacagtggggctgcaggcaggcggctcctcctcacccacctctgggtccttggctcccgggggccccacctcggcacacactgtgccccacaaaacttcagtgtggtacaaggtggagaaagcatatcccaccaacctccagtgtcagggtccaggagagcctgggggtggggggactgccttgtctctagtagtgtggcctgtgccagcaccacagccggtcagaggagcgcaggcagcgcagggctggcacgtgacaggctcgtcagccacctgggaacacagttctgggcaaagaggatccgaggttgagaggaaggagggtcccggtgtatcctggccctgggggtctgggcgtccagctcagccctggcctggctgggtggtattctggtagggatatggcaggactcctggcagggccacctgcaggaccctgtcctgcagtcccacactgtgcagacccagtcccacactgtggccaggccttacatctggctggaaagcagagcctcctgggaacacatctggctgcacaggctgaaatatccacccagcaggcagagtggcgtggcctccccatgggcacagtggtgacccccttgattcccaccgtacaaccccctccaccccccactcagtgcctccacatgctgcctggcacagaccaggcctttgacaaataaatgttcaatggatgcagttccaggacctgctt

SEQ ID NO: 241484 - DNA, 1637 bp, Homo Sapiens
  misc_feature (550)..(559): n is a, c, g, or t
  misc_feature (593)..(617): n is a, c, g, or t
ttggctgcggttcaaatatgagggtcccggagctggactctacgtgaggaaccaatgctgcctctgatgtcttaggttgtggagctggaaactcgcggaggagctggtattggtgtttctagttgagggttgtggtatttccagggtttcacaaaggccagattttatttcagttactcagaagagaaagaaaatgtcttctgaaagaggtgaattcaatcattaccaatagaaaaagtatccactgtatttatctcttataccaacagaaaaatataacattttcccccttagaataatatatacatatatataaaacttaaggttctattgtatgtagccgaacaatacactctggaaaccagcatgaaactctattattcacatgttaaaatgttgaaactatgaccaaaatatgaaaactgctagagctatcagaaagacacaagacaaaaagcttcttgcatatgtataaactaaatgtgataatctcaaaaaactgttcaaaattataattactttccagtttaaagacttcagtcctaaattnnnnnnnnnncttctatatacaaaccactgatttgcccagaccnnnnnnnnnnnnnnnnnnnnnnnnntcagcggtaaggtaagcaggacccagaggagctgatattcacagttcttacatggacaactctttcaggaattatccataaagtactttattttacaacctgcttttcttgtaaaactaaaggtgcacttttttacataaaagttttatacagtgttaaaaccagaactgtgtgtaaaatactgcatgtaaatgtttctaaatagtcttgttccagtggttcatcggtgacttctgtggcttcgtcatcattatccatggatgattctgaaagaatctctccagttttactggaattggatcctactaattcttctgtttcacggcagtcagaagaaccactactttcagggccttcgttttcactaccttcagaatgtagtaaatctttctcagcttgagacacatcagattcctccatttcattattttcctcagaagtctcttcattcacagttgaggcatcatcagattctttttcttggttttttctttctgggaccatttctcttgatgtcataaaagactctaaaaataagcaaatgttgttgtacttaaattttatattcaaaatacctccacagttaagtttcgtgaattctgatgttctgtagttcaaatcacatcccctgaaattcagcagcaactgcatacaggtgggagaaaagcccagcgtcgacattacaaggagttccatgatgtacaattctttcacaaaaacaatgaatgcaagaatttgaggatctccttactcctcccttttacagatggtctctcaatcccttcttcttcctcttcatcttcatcttcttctgaacgcgctgccgggtaccatggctttttttgtctttatcatgagatgaagtgatgcttctgtttcttctaccataactgaagaaatttcgctgcaagtcgcttgactggctatttctccgacttcgccttttttgtcaacctgagtctttttacctcatgcccctcagcttccacagcatcttcatctggatgtttatttctcaaa

SEQ ID NO: 241485 - DNA, 1628 bp, Homo Sapiens
ttggctgattgattgatgagacttctttgcacaggagagctgctaaaaattattgcggtgaacagtcttgttccagtggttcatcggtgacttctgtggcttcgtcatcattatccatggatgattctgaaagaatctctccagttttactggaattggatcctactaattcttctgtttcacggcagtcagaagaaccactactttcagggccttcgttttcactaccttcagaatgtagtaaatctttctcagcttgagacacatcagattcctccatttcattattttcctcagaagtctcttcattcacagttgaggcatcatcagattctttttcttggttttttctttctgggaccatttctcttgatgtcataaaagactctaaaaataagcaaatgttgttgtacttaaattttatattcaaaatacctccacagttaagttttgtgaattctgatgttctgtagttcaaatcacatcccctgaaattcagcagcaactgcatacaggtgggagaaaagcccagcgtcgacattacaaggagttccatgatgtacaattctttcacgaaaacaatgaatgcaagaatttgaggatctccttactcctcccttttacagatggtctctcaatcccttcttcttcctcttcatcttcatcttcttctgaacgcgctgccgggtaccacggctttctttgtctttatcgtgagatgaaggtgatgcttctgtttcttctaccataactgaagaaatttcgctgcaagtctcttgactggctgtttctccgacttcgcctttttgtcaaacgtgagtctttttacctcatgcccctcagcttccacagcatcttcatctggatgtttatttctcaaagggctcactgaggaaacttctgattcagatgtcgaagagtcactgtgagttttctcttcattttgctgcaaatttgcctctttgctgtctgtgctctcaggccacccatttgttgtcatgggggctgacagagaaacctttggtcgattacgtggcctgggtgtcccaggcccatttatattagacctctcagtatagcttggtgcatttccaggaaacatcacaccattcattcgatttaaactattggaattgtttttctctgaagaaggataaacacagctaacaaccatcacgttcttttctactcctctgagaaatttgtctgttcctgtatagtttctccttggatctgttaacaattcacatagtcgctgaatagtaaaagggatacggttaaatccagtgacagttttcagtattcttccctttgtttcatcaaagggaatatattcgactttagggttgggaggacctcttggcgcaggagctgaagttctgaaatcatctatcactttctccagtttgaaaataaaatagcctttaaattgggaccactgaatctgtttctccagtcttggctacatgacaaaggaactgatccaggacaggacagactttcttttttgcctcttctcaaaatcttccagcgcctcctggagcctgtcgacgtccatggcttcccagagtccctcacagcctccgtctccctccgcgggtctcttggggaccggaacgcctcccccc

SEQ ID NO: 241486 - DNA, 673 bp, Homo Sapiens
ttggtgcattttgggtaaaagccataaaaataagaaactcagcctgtggcctttctttcttccaaggctgggcttctttttttaagtgacttcatgcagtttgttgcttttaaaaatttgtccagaatcgttttctgcagaagcatggtctgttaggagcttactggccgtagcagaagcaattgtttcctgaattcttgacatttatctttgctgtattcatttagggcttgggagagtccgaagataattcagtcactgtcagattaataattttgtcaggacaaagaataccgttatgattatttaatcctttaaaattgtggtctccagagcttgttctcagaatggcccagaccaagccttaattgtgatagtgaatattaatggtcactttaaggagaaattataggccaagatgaaatgaacataaacctgtttgccctggctttcagtggaagatgatattagagaccaaaatctggttctgaaggtgtgtatcagccctaaggtgaaccagacttgggaaagattgtctttaaaaatcaatgagtttatgttttaacttctcagcttagttctatgcattgctctataacacacctagttaagttttatgttattcttgaactgtgattttttttctatttactttcatggtttggtgggccat

SEQ ID NO: 241487 - DNA, 1820 bp, Homo Sapiens
  misc_feature (503)..(536): n is a, c, g, or t
taaaacagggtcaaactgaccagcagtcaagcgtcaagggtaccacttgactatgctaatttcatgggaaacaatgaagaaatcaaccatgaaccattagcaaaagatggaacacactaatgtcttcacttggctaacacatcacaaaatttccaggtatgttaaattttagcttctgaaatcactttattcaggagtgaatcttcatagtactacacctgacctttaatccaaagaaaagtaagagaaaggaagaagggtggggtgggaaagtgaggtctttattcactttgccactaatataaactgtcattttaatttttaaaaaaattcctctatggcaggcaaaaactcaatgaataggaaagatttcattctgctctagtacaaaacttaagacatttaatcctcctgaaagttgtaagtccatagattttcaaaattcccaagatgagaatttactccctttaataactaattccaagagtttaataagcacagtnnnnnnnnnnnnnnnnnnnnnnnnnnnnnnnnnnccctgtaaattctgtgaggcttaaaagcttgagtttagaatgagcaaaggtttaggtttttaatcctcaataattaaatcagatggtccacaaataaagcttcaccttgaattttccaggatcagaacactaaagtactagtgctaaatttcagcagactaaagagtcatttttgaaaggaatttgacagagtatcagtgtccaaccggtaaatggacaacctagataacagataaaatacaatgaaataagatcccctgaataaatacttgacacttaatatgtaaacaaagcccttacaatgaaggggtttaattctgtaaaatatcagtgttctattcctttccatttgttaaatttacccactgtagaaaatatatactgaatataaagtgacagaaacttatgttggaacatatcaaaacatatgacagaaacatatcaaaacatgcctggcacagtataaattactcaataaatatttgttgcacgaataaacttctagatctaaagctgtagtaagcaaatatcaactctgtgtcctgaagtagcaaagaaaggaaggcaagctttctgagtaatgatgcataaagctcaatttgataattgttatctagtggtatattcttaatttacagttttaaatttagtattttctgggagaagtaaaaaagatacaaaaccaaaaccatccagatcagatgagagtcaggtgtggagagattttcaatcccattaatttgaacacattatgattgccaaacattaagtatcataagctcatcagtgctatttttaaggctcagtaaaatagaaaactaaacacttttaagttatgctgaccataacagcttatattgtctaaaataactatgcacacaaaaggtactcaagaaatgtcatctgacaatttcaaacaaactttgtgaattgttccttaaaagttcttttctcttatattgttcaaatgttccttaattttatatggccaccttcaccaagtgaaagtgctaaaaataaatgtcaattttaaaacatttgctaggaagatatgctgaaaaagatccaagtgctttaaagtataccactgaatttctaagtgagatacttaataaaaaagagaccaaaataacaaaacttcacattaagcctcttcacattatgtgagataatacataacaaattataatttagcatccctgatcagaataattaagaaaagaggtagaaaacttttatctggaagatcttgtggtgaagctaagccaacttttttgtacaaag

SEQ ID NO: 241488 - DNA, 870 bp, Homo Sapiens
ttgcatttcagattgttaactctgtttttctttaattgatgcatttgctgacctgtctactgtatcctttgcccaaaggagatgcagaaactaccagaggccgttcagctaattgagaaggccagcatgatgtatctagaaaacggcaccccagacacagcagccatggctttggagcgagctggaaagcttatagaaaatgttgatccagagaaggctgtacagttatatcaacagacagctaatgtgtttgaaaatgaagaacgcttacgacaggcagttgaattactaggaaaagcctccagactactagtacgaggacgtaggtttgatgaggcggcactctctattcagaaagaaaaaaatatttataaggaaattgagaattatccaacttgttataagaaaacaattgctcaagtcttagttcatctacacagaaatgactatgtagctgcagaaagatgtgtccgggagagctatagcatccctgggttcaatggcagtgaagactgtgctgccctggaacagcttcttgaaggttatgaccagcaagaccaagatcaggtgtcagatgtctgcaactcaccgcttttcaagtacatggacaatgattatgctaagctgggcctgagtttggtggttccaggagggggaatcaagaagaaatcacctgcaacaccacaggccaagcctgatggtgtcactgccacggctgctgatgaagaggaagatgaatactcaagaggactatgctagtattttgcttgctgaaaagaaaagggaaacaaaggtaaatcctgacatgccatttcaaggacttgggatagattagggatatccgtacttcattacagtcatgattttgga

SEQ ID NO: 241489 - DNA, 2147 bp, Homo Sapiens
  misc_feature (410)..(418): n is a, c, g, or t
ttttaaaatgtgagatggtgatcctcctagaggggaggagacagaagttctaccaaagaaaagatcttagccaaaaagagttggctttagtcttcaaacacctcccactccctcaagtagataacatggtgtgagctctgtggagcttcagcttagctttggctctttccaccccatggccttgcccagacagaaaatgaacgtggcaacaatgctatcccttcatatttgctcatcctcacatggagaatgtttttggagaattttcctccgactgaaaagccaagatcccagcagaaatgcagggactgagttctatgatttaacctttcattcctatcccaactagcttcattccaataagaaaggcaatatatttaagtgtcaattcctgcaaatcataagggggnnnnnnnnngtcagaatccatcttcacctctttgaagaaaaatgaatctgctaaactttcaggacagatcaaatctacgacaaaggagactcccaggaaagcccaaaaacaggccacatggagacatctttttctagggaagccccagggattagtaaaatcccagtgaatctgcttcctgtccaagagggtgcctcgttaggtaccaaaaacatggagggagcaccctctagtggtaaaacaaggtaacagaatttcccaccaaaactgatgtgctttcttctgcaaactgtaaagaaatacaggtgcagctgcccacagagtgataggttgaggaatcattaccttccgcagggttcatggctgcatcatgaagtaatgttgccacacacccggccgcacctgcaaacaagaaaacaactgccacatgtaaggccaagagagctgaccaactcactgaggtcccccagtgaaggggagtggctgtgctacactacagcggggaaaagtaacgttaagagctagccaaaagatggggacccactgctcctaaactcctgtttaagaaggtaaagtatctgttcccaccaactttgtaaggtcactaatgtattccacatccatgataggaaggccagctcaagtcttatcaataaagatcattctgagaataaatgcagctcacaccccagacaggaagcagatacactgctgcctagggatgccagcacatcacctgccaccagtggagggagatacgggggccaggtggtcagatctcacagaacctcaccacagaatcccacctcagtcctgccgcagaacccatttgcagagcctaacatttgtctacaaagatctttcgttcaggtcctgaactactctacccctcatcctctccacactcaacttggtttccagccggtcctaaagccctaggctgctatcctttctcttacttccacacaaccttctggtttcttcatgcagttccttggccccacccccattcattttgtcatgaggctttgtcatgttctcaacacaaactgcctctggtgagttgggatcctgaaaaggtgaggcaaaaagcaggggcttcattagtatcttccttgggtggctggctgggtcgcctccaatcctgccctaaggagcaggacaccacccaactgtcaaacatagactgggggtagttcagtgtgtctccacattaccagggcattagaagttgatgccagggagatgagaggaacaagtcaagctggtaggtaagggaggatactgtaaccctttgttgaggtgccccaaaggaaaaggcagggttgaagcggcccgttgtctgagaacatcaggtttggaagtccctcccttataatctggcctatcccagcccaaagcttcagctccaaaccatgctgagactggaaagcactgacagcagcaaagcccaaagagttgggaaagtgggggaaccagcacaggaaggctcaataccattggcaatatggctattgcccccagggtggattacatcactcaatgtcttttttaacttttcgtagcaggcaaaataaagggcgtgggcaggccctgcgcctgttgctgtgacgttcagccccctcatgggcctccatagcccctccgttcttataatcctccagagggcctccaacacggtgcgatagcgggcagctgggtcaggctgtagactctgcatccgggtctgaaattacag

SEQ ID NO: 241490 - DNA, 900 bp, Homo Sapiens
  misc_feature (354)..(375): n is a, c, g, or t
ttggcccgtttctgggccctagcccaccagatcgctgtgctggcttcctggagccaacctggttggcagcacccccacgcctggcaaggccaccccgcttctatgaggcgggtgaggagctaactggacccggggccgtggccgctgcccgcctctacggtctggaacctgctcaccccttgctctacagccgcttggctcctccaccaccacctgctgcggccccgggaacccctcaccttctcagcaagaccccaccgggagcccttttgggggcaccacctccgcttgtgcccgccccccggcccagttccccacctaggggccctggcccagctcgggctgacaggtgannnnnnnnnnnnnnnnnnnnnncaaagctccatctccccttcctttaaccaggtcctagggctgaggttttaagccagggctggagggcaaaggtcataacctcaccagccacctctgaggtcatggaacctgggaacagaagcctcaacccccacaagaccaagcatcacatggagtgtagggtcactgggagagcagaggtcacagcctctagagaagggagaggggcgtgtgcatgggagtgtggctcatctcgggggccatggggcctcctgaggtacacctttgcccctgtaagggcctctaggccctgggcctgcctccccaagggctcactaagccagaggccaaagtgccccctcccgttcacctaccacccaagtcctcatgccctccgagggctgggggaggaggggctaaaggaaggggggttccatgtacatatttatcacccctttcacatagccccaagaccttttgtacatttttacaggggtgcccctctcaacagttcccttcctggttaattaaaccctcagactggtg

SEQ ID NO: 241491 - DNA, 1363 bp, Homo Sapiens
ttgggaccgcactgcgggcgtcgcggcaggtgaagcggtggtggcagaggcgcctgcggttactggccgggccgacgggtcctgagtctccagagctcggttcttacatccccgcgtccccaggtttagcctgagcagggttgtggaaggccgggacccattgacagcacgatggtgacggagcaggaggtggatgccatcgggcagacgctggtggaccccaagcagcccctgcaggcccgcttccgggcgctgttcacgctgcgtgggctcggcggcccaggcgccattgcatggatcagccaggccttcgatgacgattccgccctgctcaagcacgagctggcctactgcctgggccagatgcaggatgcccgcgccatccccatgctggtggacgtgctgcaagacacccgtcaggagcccatggtgcgccatgaggcaggggaggccctgggggccatcggggacccggaagttctggagatcctgaagcagtattcctcggaccccgtcatcgaggtggccgagacctgccagctggccgtgcgcaggctggagtggctgcagcagcacggcggggagccggcggcgggaccctacctctccgtggaccctgccccgccggctgaggagcgtgacgtggggcgcctgcgggaggcgctgctggatgagtcccggccgctcttcgagcgataccgcgccatgttcgccctgcgcaacgcgggaggcgaggaggccgccctggcgctggccgagggtctgcactgtgggagcgccctcttccgccacgaggtcggctacgtcctgggacagctgcagcacgaggcggcggtgccccagctggcggccgccctggcccgatgcaccgagaaccccatggtgcggcacgagtgcgcggaggccctgggcgccattgcccggcccgcctgcctggccgcgctgcaggctcacgcggacgacccagagcgcgtggtgcgtgagagctgcgaggtggctctggacatgtatgagcacgagaccgggcgggccttccagtacgcggacggcctggagcagctgcgcggggccccctcctagggccccaccctcacccggagctcccggaggactcttgagggccgctcctctccccgcagagctttggcgtctaaaccgggtgtgtgtaaatcggtgtcatcgcttgtgtcttgctgggcgcatggttgctgtccccctcctccgtctgggaccgaggagctgccgttgtgctgtgactccctgagtcccctgactgctcctcggggcctggcgcagggctgtagcgtgaaagtttccaggcttggggtgggactctgcgggaggctctgggatgcctcggctc

SEQ ID NO: 241492 - DNA, 963 bp, Homo Sapiens
  misc_feature (260)..(303): n is a, c, g, or t
gaagaagggagggacagacaccacaagggaggccccaggagtggctggcactttcagggcccccagcgtgcaggggcatctcacaactaaacacaaccagcgccccagacgccatcccgactggggaaaaagttgtagtgggcactattgagacagcaggcaaaatgtgaataacagtcttgcaccaatgttaaatgtcctgattttcatcgttgtggatattaaaaagtcaacacgggggccgggcacagtggctcaannnnnnnnnnnnnnnnnnnnnnnnnnnnnnnnnnnnnnnnnnnnaggcatgagtcactgcgccaggcctgggagcccttcttggaagaggtccttgtttgttgcagcaaccttagtttgttctctagtcagactcctgcctgggtcaacagcagcaattccccaacagcttggaccaggtacaaagtcaggaccctgtggatctatttcactaaggtctgctcactcctagagggccaaagagccactgaccctggccactgcaacgctgaggccgggacctggaactcgggtcccccaaaggcagggcccaggaccctggaactcgggtcccctgaaggcagggcccagaaccctggaactggggtccccccaaggcagggcccagaaccagccctgtgactgacaccttcttccttttaggccactgaggggctgactgaactcctgcattcaaatcacacgtctagttccagccaaccacgatggcttgctgcaggccactgccacgaccacacagacaggatcacggcaggctggctgtcctgagggactgcatatgctggcgctaacacgccggctcctccctagtcacccagtccacagaagtatattcacccggtccacagaagtatattcacccggtccacagaagtatattcactctctgtgtccgacagaagtacccaactttttgtacaaagt

SEQ ID NO: 241493 - DNA, 957 bp, Homo Sapiens
  misc_feature (98)..(143): n is a, c, g, or t
ttggcagagctctgcccaaacactgccaagtcctgaagacgcattcctttcctgccaacctctttccagataagcccttgaggtctcgggctgacctnnnnnnnnnnnnnnnnnnnnnnnnnnnnnnnnnnnnnnnnnnnnnngacagagaacatgccataaacatccttgaacccatgcaggaaagcccatcccatattctgaaaaaatgccaaattaggtttttctttctttttggaaatcagtcattacagtaaccgaaaccattgggttcagcgaaaatggaaagatttagctgaatgtagtcagtccaattaagttggatgcaactgagtgatttagttgcttgggtaacccagtgcttgcttgctttcttcattctctgggtggaaactaagatcaagacacatgtttggggataagttaaatgtctgagctattttgctcggtttatcctaagagaactttattatgggatgaggaggtgacccaagatgagaagtggagggggacagcgatgttttctaaacatcgtccagtgttgactggcttccttactttgcacagtgaacacaactaaccacattaattcagctttgtgaagtccctgctctctgtgggtctatgagtcagcagcaacattggcctaacctccgtcccagcctcctggctcaccacatgtgtacagtgctgtttgcagttgtactcattatccatccatctctctgccatccccaagcatcgctgggtgtaaaacgcaaactctccaccgacactgccatgcgtggtcatgtcttgatgccttcaggggctcagtagctatcaaagaggcctggagggcctgggcaggcttgacgatgcctgaccgagttcaagacccacaccctgtaccaatacaagtgctattacataatcaatggacgatttatacttttattttttatgattatttgtttc

SEQ ID NO: 241494 - DNA, 1946 bp, Homo Sapiens
ggggtgtttaacaaacataacttttaaatttattaaaccagtgaagcaatcccttccttaataagtgtgtcaagagagtgaaactggggtttgttccattaataccctaacaatttcatcgtaatactttttactgctatgacagttttaaataaattttgctgtacttaaaataggttttgaaagtggaaaagtgtacaaagtttcagataaaaagattaataaatgcaatttaaataaaatttcccctcttctctcatatcaacaataatcaattttagcagataacagattgagctttaaaaccctactcccaaaatgaaaccttcagttttaaatcttaatcagacataactggaaaagatactatgtatttggacaccttttacaagattttgtttttgtattaaagcagaaaccagttcctaaactcttttattcaattgtatgtcctgtttggacaaatatcaaaaatagaagactgtcgcttttgtaactgtgattttcactgcagtcttctataacttttacagagttcatggtccctaatatctccccaccctccattttttctaggtggggaaatggctaccacagtaaacttttcactgatagagtttctggaaacatgtattgtttgttattatttaagagtgactcaatttgggcactctgagtggatggtctacaggttttcttgtgatgcataccacagtctccagcatgaaagatcctaggaatttgaggaaccagcactttccagaattttggaagacaagatacagtcaagtattgaagagtccagtcccagttataatcatcataagtacagaaagtgtctgtgcactcgatcagcttctgataggcattccgggtcaaggctagacccatattgtgctctgtggatttccaagttttcacatctaccttgtcagccatgccatagaaactgcgactggcactataggtccccagggagagaacatcacattcagggcactcttgctgcttcagtttccacatctttttgaagacatggtaaaagtctggggctaagtagtgatcctcttctaggaaaagtataaggccagcataatctcgaagaattttcactctttcccacacaaaatgcagcttccaccaccagtgatgtttggtctgggagaatttggcctctctataatggccgaaggagtcgggatactcagcattgatgcaccccaatttcaaagcggcattcttcggcaggtctctgggacaatctctagggtcactacctggaaactcgttagggtacaactgaatgctgaaaggaaagaacacctgcagaaccggacagaaattcaccccggcgatcagctgattgatctcggtcgaccagaagtcatggctaaagatgacgaggacgttgtcaattccctgggcttttcgaagtgagtccagcagcagtctgaggtattcgggccggttatgcacctggaccaccagcaccagctcccggggggcccaggtgccagccttatctacattcctcagggtctgatcaaagttcagctggtacaccagggaccggtaccgcagcgtcaggttgtccgcctcgggctgggggaccgccgggaccagggaagccgccgacacgttggagaccctgcggatgcccacagccacagaggggtggtccccaccgcggccgccggcaccccgcgcgggttcggcgtccagcaacggtggggcgagggcctcgttcttcctttgtcgcccattgctgctccagaggacgaagccgcaggcggccaccacgagcgtcaggattagcaccttccgtttgtagatgcggaacctcatggtctccagggccgggagcgcaggcgggcgggcgcggaaaggagcagctgcttctgcacggaaggggcgggcgggcggcggccgtcgccttggcctgccaa

SEQ ID NO: 241495 - DNA, 1016 bp, Homo Sapiens
  misc_feature (772)..(863): n is a, c, g, or t
  misc_feature (923)..(933): n is a, c, g, or t
aacaggttgatctatggcacgttcttggagcttgatttctgaactaccaggctttgttacagagaacttagcaagatgaccgtaaggggaaatgttagaaattctagaactgctccaatctccaagatctacctctgtggaggtctggtctcttgtctctaaaaagaggcattcccctacaggtacaattgatgactagtaaataatgagcccttaaagcaatgaaatgacaatatattgccaatgagatgtcaaggaaagttcaatacactttgagaattaggaaaagttggttcaatcacatccctcatatgaggatcgtcccacaaccctcctgatgtgcccacggactctgggaggaagcaagtggcttacattttttcttggccatctctgcctttgaatttcactttttgaggtttctggatcacctggatagcataaggctgtatgtgttctgtcccatgtgagtctaaagaagggtttacatgcacaattctgttcacacaaggtatttttgtgtctactgactttattagtttcaggagacagagacaggcaaattaaaactgaatattaaacgcttctgttcttaaaatgcccgtcagccacttttcctctagactcccaccactgggttagcactctctgcctctttccctttgcttttctccagttcccaaattcacattttctcttttatgcagagtggtttagctatctctctcacttcctctcctcttgccaaccattttcatagggtcacattttnnnnnnnnnnnnnnnnnnnnnnnnnnnnnnnnnnnnnnnnnnnnnnnnnnnnnnnnnnnnnnnnnnnnnnnnnnnnnnnnnnnnnnnnnnnntgtataagaattcaccgttcatacctaaatgacttatcaagatattccccaccaccaccnnnnnnnnnnngacattaaggatatttcccttactaagagaagttctggtgacagctgcatcaagcagcttcttatccttttggagaaagccaa

SEQ ID NO: 241496 - DNA, 2024 bp, Homo Sapiens
  misc_feature (292)..(336): n is a, c, g, or t
  misc_feature (341)..(367): n is a, c, g, or t
  misc_feature (590)..(604): n is a, c, g, or t
  misc_feature (939)..(999): n is a, c, g, or t
  misc_feature (1872)..(1890): n is a, c, g, or t
  misc_feature (1951)..(1963): n is a, c, g, or t
ggaattcggagtctacaaatacaccatgaacggcagattggctagcccacgctacttaagaggacactccacagattccacatgggatggtacatatgtacagaatacagtagtagagaaccctcgagagaggctctggaacttttgtctctcagcctccggccccctcccccatcatgcccctgcctcccggaactgaaatcctgtctgagacaatacattctgattatttgatagccaggtgtttggattaaggttgcccccctgcaggtccccgacaagagggatggannnnnnnnnnnnnnnnnnnnnnnnnnnnnnnnnnnnnnnnnnnnngtagnnnnnnnnnnnnnnnnnnnnnnnnnnncatattacagtattaaagtattgcttaacttccagcgtctccttgtgtagtgtctgtgcccaggacggggctgagctgacgtctgctagttttctgctttggggtgagggtggggaaacccgccagtgtctttcttcaatgtgcttgcctgcagtcagtccctctgctctcccactgtctgccttccttggaagatagcctggcttgcgaagcacattcaagnnnnnnnnnnnnnnntctcccctcccccaccagccccccactctccctctgttcctgcgtgccacttgcaaccaataaagagaagtatgagttagtgtttcttttgtaaacaatttcatatgcaatataatacagaaagcatggctgaccttcaataaaaaatgtagtaaacgatattgctttattcttgaatatgctgcagtgagtgaatggcagaatgaagcagtgtggaggtggtggaggaggctaagtccctagccctcgtttgcactaaagatcaaaataggttttgtttttctatttggaaccaaaaataaattttttccccaaaaacccccaaatgaaaaggnnnnnnnnnnnnnnnnnnnnnnnnnnnnnnnnnnnnnnnnnnnnnnnnnnnnnnnnnnnnngaacacctttcaggtcattagaaccaacaattacccaatgatttttatactagtctagcaagatgtgtgtaacattcactggctgtgattgctgtgcagtgaaacagtaaattgacagcaatagagccatgctaccttaaagtccaagctacaagttcaaattaagatgaaggttatgaaggataaaaacgcaaaggcctgctggggctttgtttgaatcaagctaatgggcgactgggatagagcgcgaggctgtttggtatagagcgcgaggctgtttgttcccagtggatataaggaaggccacgagccaagtctgtggaagctgctagagagcagaccaaggcttggtcatctccgtcagccccatgcccagctaggaccgggaatgggtccgggagctaatgccactcactcgcctctgcttgggaggagaggagttcgggggtctcaggcagatggatctggaagccagaaagtcacccggtggctgtttgataattccggggaaaagccatcagccaagagggtttctcccccagggaaggcgaaaggtggttcccatgttcgccattgagcttaactgaaacaaagacgaggctgaaacatcagtgttaaaagaatttacaaaaatctttcaaaatggacttctagatggaatggggggactaacgtgaaccttaaacctaggtagccacattaaaacatatcggatttccacaagatttgtgctatgggctactgggtctcttcaaaaggtatataaacatctaaaacatattcacacagattatcaatttcttctgagcattcttaaaaaaatattttttctcttagtaaaatcattttaatataccatgcctccctcttttnnnnnnnnnnnnnnnnnnntccagttttgcatatctagcattagcatttaaggtagtatggcaccccttcacagtgggtnnnnnnnnnnnnnatctacaaaacgccgtagagtccgccggcattttaacatggtgagaccttgggttagccaa

SEQ ID NO: 241497 - DNA, 1120 bp, Homo Sapiens
  misc_feature (190)..(236): n is a, c, g, or t
  misc_feature (663)..(707): n is a, c, g, or t
  misc_feature (712)..(734): n is a, c, g, or t
  misc_feature (961)..(975): n is a, c, g, or t
gtcagacaaacacattgatttctggaccacagtagaggatggaaacctttcacaaacttatttatttgaaaatacaaatataaaattatactttccacatctgtgatgtgagagactgccatccacatagtaattttttacaacagggctttaagaaagccacacacaaagacctgaaagatgcttgagnnnnnnnnnnnnnnnnnnnnnnnnnnnnnnnnnnnnnnnnnnnnnnnctcactaccaaagttctcatcagtttcatactaaagtataaaagtaagggtgaggtcagccacagtgctagggaaagttttatttagatacatttatgtccacatgaaacgcttagacttgcatcctattacatatggaattcggagtttacaatacaccatgaacggcagattggctagcccacgctacttaagaggacactcacagattccacatgggatggtacattatgtacagaatacagtagtagagaaccttcgagggaggctctggaacttttgtctctcagcctccggccccctcccccatcatgcccctgcctcccggaactgaaatcctgtctgagacaatacattctgattatttgatagccaggtgtttggattaaggttgcccccctgcaggtccccgacaagagggatggannnnnnnnnnnnnnnnnnnnnnnnnnnnnnnnnnnnnnnnnnnnngtagnnnnnnnnnnnnnnnnnnnnnnncaaacatattacagtattaaagtattgcttaacttccagcgtctccttgtgtagtgtctgtgcccaggacggggctgagctgacgtctgctagttttctgctttggggtgagggtggggaaacccgccagtgtctttcttcaatgtgcttgcctgcagtcagtccctctgctctcccactgtctgccttccttggaagatagcctggcttgcgaagcacattcaagnnnnnnnnnnnnnnntctcccctcccccaccagccccccactctccctctgttcctgcgtgccacttgcaaccaataaagagaagtatgagttagtgtttcttttgtaaacaatttcatatgcaatataatacagaaagcatggctgaccttcaatccaa

SEQ ID NO: 241498 - DNA, 865 bp, Homo Sapiens
gctgcttttatctctaatgggaggggcaccacgatgaacacgaccaatccaaaagtcttgaacaccaatttgttctaaactttgaaggtactcaatcagatttggcatgtgaataaatatgtcatcatcagcagtcataagaaatttggcatgtggacaataggtatttgcccaactgaactgcataagtaatttcagagtaagattgtagaaagaatcaacaaagtcttgctgaattatatcattgtacctttgatcttcccaagccagttttctttgtagttcttctccctccagtggattaggagttcctaaggcaaacagagttttgatgttggcattcagctgagaccgaacataattttcattgccccacgtccttctaattccggaacgtcgatcatagttttcaggagcagtttttacaaacagtaaaaggaggacgtcttgagcttgacacttttccttgtggttaatcaagtattggtagcgaggccccgctgaggtgtgcttaagagacagggtatcattcacaaagtcatagctatttatgaggtatctgtaagaatatgacttcatatggctcacaatgtgattatcgattggttcccaaaaaaacatgaggctcgctaaaaaacaagtagcaaataactgaataattaactgccattttttgactcttctgccactaaccaacattctcatatccactcaagtctgtttttagttaggatcagttttaaacaggcacgggcttcttcgagaccatagaacttcgtgtttcgtagagtaggtgtccatcttaatacatgttggtcattaaaaatggaagtcttcttattttacaaaatagtttcttttccaa

SEQ ID NO: 241499 - DNA, 1919 bp, Homo Sapiens
  misc_feature (686)..(747): n is a, c, g, or t
  misc_feature (1591)..(1599): n is a, c, g, or t
ttttaacaataacactgtgtataacctatcttctattcaagtgaccatccaagctgatagtttattttccttttgttgacattttttaaaaagatagccctacactggagcaccaaaaagttttttccttcttttttaaaaggttggaacccttttatttacagatactcttctcagtactttaagtaagtgtgatgaaggaatcatctagcaacttccttcttagaaaaaaaggaagtgccttcatatttccttgaaatttaaacttgttccattctattctaagcaaaaattaaaaggacacagttcagaagagctctttcagcaaataaataattgtttcacaaaagcactgctgtaaacaagatcactttgatggccagagacacttatgttttcaaccaatggcaaccttaaacacttccaagtatagatacacagggtatatatgggcaaaaggcaatacatcattaatcaatcaactaataaaaattaattataagcttgttgcttggtcaaatatgcttttgttctctatgtttttttaattggtcagaaaacttaaactgtaatgatctaaaaccctgtatctactctgaaagtaactacaacctagaatgtttgacactgtagttttgacattagttaaaaattctaaattatctaagcaatgtaaacaagcctcnnnnnnnnnnnnnnnnnnnnnnnnnnnnnnnnnnnnnnnnnnnnnnnnnnnnnnnnnnnnnntgtaagtatcatcattcagttgtgtatactgagaaatcttttttcgttttgttttgcgtgtttccgacatcaccttattatatgagacatctgattttccctaacaggtgcctctgcagtcaaaggccttagagtgagttcagtcactcttgctgaagtcattattttggccttcatataatctccctagcagtagacaccacctagttctttctgtagtgaagggaggtagtgtgtattatagccacatttttatcctgctttgtaaaataaatgtaacttactctattagatctcagacacatctctttgattacaaggaacatgcagctttaaaaatgctttaaccccaaactggcaacttttctatcacttttttactctgttttcaagtttgaaatatttagaaaataaagatcacctctgacagttattgatgaaaaataaattgttttagatattataactttgatgtttaatgctctcaatttaaaactctgaacttggaacaaagtgctgtggtttataagaccttgttggggaggagtgggttaattttagtaatcagtacaaggatttagacactaagatttcattttataaaattatggagacattaggcttgtaatgttctgtctttccatttgaagtctctccattattatattcctctatgtaaattacattcaaataacaaacttaaacacagaccaatattgaatatttaaaaaccagttgaaaacgtcattaaaatcagcttatttgaattaacaatggtttctccctagagaaggaccctatgagcaaccagctgcccgtgttatgtgtcattttctaatacttnnnnnnnnntccattaaaaacatataaagtattagggcaacattaatcacttttctaaaagttcacattaaactttgaaaaaagatgcaaaaaaaggtattttaatgactctaacaccagtagctacatggatgtggtaagacgtgatttgtctgtttataataacattgtacacatttttctacatctcctcttaagaacaagagactgttttaccagattcatgaactttctctcctatgctgacctttccctgcccctactacctccaccaagtgctctttaacaaaaataaacttgcttacctggtctaacaatatattcaccaa

SEQ ID NO: 241500 - DNA, 1615 bp, Homo Sapiens
  misc_feature (373)..(418): n is a, c, g, or t
  misc_feature (1278)..(1286): n is a, c, g, or t
gagctctttcagcaaataaataattgtttcacaaaagcactgctgtaaacaagatcactttgatggccagagacacttatgttttcaaccaatggcaaccttaaacacttccaagtatagatacacagggtatatatgggcaaaaggcaatacatcattaatcaatcaactaataaaaattaattataagcttgttgcttggtcaaatatgcttttgttctctatgtttttttaattggtcagaaaacttaaactgtaatgatctaaaaccctgtatctactctgaaagtaactacaacctagaatgtttgacactgtagttttgacattagttaaaaattctaaattatctaagcaatgtaaacaagcctcnnnnnnnnnnnnnnnnnnnnnnnnnnnnnnnnnnnnnnnnnnnnnngctacctgctaaaaattgtaagtatcatcattcagttgtgtatactgagaaatcttttttcgttttgttttgcgtgtttccgacatcaccttattatatgagacatctgattttccctaacaggtgcctctgcagtcaaaggccttagagtgagttcagtcactcttgctgaagtcattattttggccttcatataatctccctagcagtagacaccacctagttctttctgtagtgaagggaggtagtgtgtattatagccacatttttatcctgctttgtaaaataaatgtaacttactctattagatctcagacacatctctttgattacaaggaacatgcagctttaaaaatgctttaaccccaaactggcaacttttctatcacttttttactctgttttcaagtttgaaatatttagaaaataaagatcacctctgacagttattgatgaaaaataaattgttttagatattataactttgatgtttaatgctctcaatttaaaactctgaacttggaacaaagtgctgtggtttataagaccttgttggggaggagtgggttaattttagtaatcagtacaaggatttagacactaagatttcattttataaaattatggagacattaggcttgtaatgttctgtctttccatttgaagtctctccattattatattcctctatgtaaattacattcaaataacaaacttaaacacagaccaatattgaatatttaaaaaccagttgaaaacgtcattaaaatcagcttatttgaattaacaatggtttctccctagagaaggaccctatgagcaaccagctgcccgtgttatgtgtcattttctaatacttnnnnnnnnntccattaaaaacatataaagtattagggcaacattaatcacttttctaaaagttcacattaaactttgaaaaaagatgcaaaaaaaggtattttaatgactctaacaccagtagctacatggatgtggtaagacgtgatttgtctgtttataataacattgtacacatttttctacatctcctcttaagaacaagagactgttttaccagattcatgaactttctctcctatgctgacctttccctgcccctactacctccaccaagtgctctttaacaaaaataaacttgcttacctggtctaacaatatattcaccaacttttttgt

SEQ ID NO: 241501 - DNA, 480 bp, Homo Sapiens
  misc_feature (205)..(274): n is a, c, g, or t
cagccccgttctcctcctcctccaccaattctttctttcgctctttccggcttgccttctcatccacattctccttattctccttcaggtccttggcgctcaactcggccgctgcctccacgcttttctccgacatggtgccggggccgggaccggggctggcggggagccggggtcccggggccgagacggaggggccctggannnnnnnnnnnnnnnnnnnnnnnnnnnnnnnnnnnnnnnnnnnnnnnnnnnnnnnnnnnnnnnnnnnnnngctcggcaagctgggtctctggaagaggcggcagaggcgcgcggggtggggcgggggtgggtctggagcggagacccgcagggctgcggccgtccggagggcgggcggaagggcggtgcaggcggtggccggcgcgctcggccgcggtagctcgatcccgggctcgccgcccccgcaccagcagagctgccccaacttttttgtac

SEQ ID NO: 241502 - DNA, 920 bp, Homo Sapiens
ttggggcttccagatgctggcggatccccgctccttcgactccaacgccttcacgcttctcctccgggcggcattccagagtctgctggacgcccaggcggacgaggccgtgttagatcatccagacttgaaacatatcgacccagtggttttaaaacattgtcatgcagcagctgcaacttacatactagaggcaggaaagcaccgagctgacaagtcaactctaagcacttatctagaagactgtaaatttgacagagagcgaatagaactgttttgcacggaatatcagaataataagaattccctagaaatcctactgggaaggtaggtactgtataaggtgtcaagctgaggcacttttcacttgcaggtatgaatggagagtgttggtgtgaaacaagatcttcgggatcttgacccaaagaaaaggagccaaagggcatgtcaagcaattgaagttaagctcatgtttttaaagatcgtttattgagatgattttgaaatgctcctttaccattcataatttaaaaataaagtttaacaatggtttaaattcagaatggattaaaatggagttgggggtggaaagtagagccattcttagtaaatataaataactgaaaagttcttctgaggagactatgtacgaagttatcattgcatctttcagtataggcagatctctccctcatataacggatgtttcttggcgcttggaatatcagataaagaccaatcaacttcataggatgtacagacctgcatatttggtgaccttaagtgtacagaacactgattccccatcctatccagagattagttttagttgcagcatggaacaattacaggacttggtggggaaactttaaagatgcttcgaaaagcctgcaaagagcactcagttgtaacttggggaa

SEQ ID NO: 241503 - DNA, 2591 bp, Homo Sapiens
  misc_feature (1087)..(1110): n is a, c, g, or t
  misc_feature (1721)..(1798): n is a, c, g, or t
  misc_feature (2456)..(2497): n is a, c, g, or t
ccccatgcttgaatccctttcttctgggtggatctggcagggacccctatcatcttcccaaagaagggggagaggagaacgccacaagatcaaactccaccaacccacccacctgttccacagctaggattccttcagcaccccgctccctgcctcttgctctctgagcgccactggtattccctccattgtccccaatgagccctggcatccatcttggtaatattgcacttttcctgtctctcagattgtttccatttttgattgagaatgcaaggtatttggaggggtaggggaagtgagtaaccttaaagaaataatatattagttaaatacaataacaggaaaaataggggttattttatctttttccccttattaaaaacaagaactaccaaaccaaggtctaaacttaaatagtcctacacctattctgcaaacactagtaataggaaaataatgcctgactggaattcccttgtcttttttccttagatgataaaagtagtaacatgccttgctgaggaaagcaatggatataaatgcctgtaaaatacgctgctctaacatctgaaagtgattaaaatgattctatataatgccttcgtcaagatggaaaatcaaggaggaagaaagagaaacctttggggccaggcttagggtagacggggctgaggcctggcaagacagcccatctacagtcactggacataggggaaacccacagggcatggggcacacctgctgctcagggttgcccctttccagctctctctcactgcccccaaagtcccatggcctggtgagaatagtgaggaggagaggggcaacacagccaggtctgctgtcacaaagagggatgaggtaggaggagatgacatttttttccccttgcaataaaagaaaaaggtcttgaaacggaaaggaaaacaaagcaccaaatgctgcatcttcgagcattatatgaacctcaataatgacctcagaagggctcattatggttaaagttgcagtatacagcaatacagtgtcgtttcacattttcagtcgcaactcatgggaaactaggtttggacactgcagagannnnnnnnnnnnnnnnnnnnnnnnagtccgatctggttttcctccagatgggtcagagccctaggccccctccctcctctgcctgctgccggcagtatccttcagcatcacaaagcagctcagtagctcaagggaaaggccctctcgccctggctagggctaggaggccaggcgcacaaggcctggtaccccctggccatgtcggagaaggactggcatgcacccttcttgcttcaagtattaatattctctttgggtttgcagggtttgtgctgtgagttagggggtgagggggcgaggtgcgaagactggggcatggcaatccctgttcactgcccaaatctacatgctgtcaccagatggcagcattccccacttttcctggatgcctgagcaactcccagccatccttggggctggatgtcacaatgtaaacatgaccacacaataaactataatggcagtgaggaggagcacgggattaatgtagtggggagatctgtcattaactagctgtgggattttggaaaagttgtttcctgtccttgggccgcagtaacaggaagggatgggatagagacctctgaggtctctttcagtcctgcattttaatgactctattacttacagcactnnnnnnnnnnnnnnnnnnnnnnnnnnnnnnnnnnnnnnnnnnnnnnnnnnnnnnnnnnnnnnnnnnnnnnnnnnnnnnaggcaggctctcgggagcactgtggtccagtccaactgagatgctctgtgcttggcagacatgctctgcactccctcctggcctggctggcgcactagtgactgaactggctcagtgcagacatctgaggagcgaggctgcagggccctccccctggaagatagctacattgaaggttctttacctgacagtcactctacttttaaattttattttaaatagtcataaattactttttttctcttaataaatatgtgctgtttaaaaatgagaaaagtatatactgcatctttaagtaatgcactttgctctctgggttttttccattctaccttatttaaagtgcattaattaaaaaataatgaaccacttctttatcattattgttcaaataagtacaaataatattaacatgaagacactaaaccactaccattagtactgcaatctagcagattaactcaacatcctgctctatttaatactgtccagcagaagaaaataactaatttcaattttaaacaaactcacaaaacaaaaggaaacaaaacaatctcaccacaggccttcgacaaagaacacgagccatttgctctagctgccaggcatcagtgtatggcgagggacaggggcttagggttgcccaggcaaggcctcnnnnnnnnnnnnnnnnnnnnnnnnnnnnnnnnnnnnnnnnnntttgaaggcactgagacactgggtcccatgctgccctgcctgggtggggagcagggtgagggagggcctttcctcctctatagaaaacacccaa

SEQ ID NO: 241504 - DNA, 2406 bp, Homo Sapiens
ttggcgcttggcgaaactgaggtctcatggagaagccccggagtattgaggagaccccatcttcagaaccaatggaggaagaggaagatgacgacttggagctgtttggtggctatgatagtttccggagttataacagcagtgtgggcagtgagagcagctcctatctggaggagtcaagtgaagcagaaaatgaggatcgggaagcaggggaactgccgacctccccgctgcatttgctcagccctgggactcctcgctccttggatggcagtggttctgagccagctgtctgtgagatgtgtggtatcgtgggtacaagggaagccttcttctccaagaccaagaggttctgcagcgtctcctgctccaggagctactcctccaactccaagaaagccagtatcttggctaggttacagggaaaaccaccgaccaaaaaagccaaagtcctgcacaaggctgcctggtctgccaaaattggagccttcctccactctcaagggacaggacagctggcagatgggacaccaacaggacaagacgctctggtcttgggcttcgactgggggaagttcctgaaggatcacagttacaaggctgctcctgtcagctgtttcaagcacgtcccactctatgaccagtgggaggatgtgatgaaagggatgaaggtggaggtgctcaacagtgatgctgtgctccccagccgggtgtactggatcgcctctgtcatccagacagcagggtatcgggtgctgcttcggtatgaaggctttgaaaatgacgccagccatgacttctggtgcaacctgggaacagtggatgtccaccccattggctggtgtgccatcaacagcaagatcctagtgcccccacggaccatccatgccaagttcaccgactggaagggctacctcatgaaacggctggtgggctccaggacgcttcccgtggatttccacatcaagatggtggagagcatgaagtacccctttaggcagggcatgcggctggaagtggtggacaagtcccaggtgtcacgcactcgcatggctgtggtggacacagtaatcgggggtcgcctacggctcctctacgaggatggtgacagtgacgacgacttctggtgccacatgtggagccccctgatccacccagtgggttggtcacgacgtgtgggccacggcatcaagatgtcagagaggcgaagtgacatggcccatcaccccaccttccggaagatctactgtgatgccgttccttacctcttcaagaaggtacgagcagtctacacagaaggcggttggtttgaggaagggatgaagctggaggccattgaccccctgaatctgggcaacatctgcgtggcaactgtctgtaaggttctcctggatggatacctgatgatctgtgtggacggggggccctccacagatggcttggactggttctgctaccatgcctcttcccacgccatcttcccggccaccttctgtcagaagaatgacattgagctcacaccgccaaaaggttatgaggcacagactttcaactgggagaactacttggagaagaccaagtcgaaagccgctccatcgagactctttaacatggattgcccaaaccatggcttcaaggtgggcatgaagctggaggccgtggacctgatggagccccggctcatctgtgtggccacggtgaaacgagtggtgcatcggctcctcagcatccactttgacggctgggacagcgagtacgaccagtgggtggactgcgagtccccagacatctaccccgtcggctggtgtgagctcaccggctaccagctccagcctcctgtggccgcagaaccggccacaccgctgaaggccaaagaggccacaaagaagaaaaagaaacagtttgggaagaaaaggaaaagaatcccgcccactaagacgcgacccctcagacaggggtccaagaagcccctgctggaggacgaccctcagggtgccaggaagatctcgtcggagcctgttcctggcgagatcattgctgtgcgtgtgaaggaagagcatctagacgtggcctcgcccgacaaggcttcaagtccagagctgcctgtctccgtcgagaacatcaagcaggaaacagacgactgagccttcctgcctccagcctggcttctagctggaagccagcccagcgtttctctaccaccaccaccatgcctccacctgactttggcttgagactgatcctctctgtgtaaattctgcccggtgctgtgaaggctggacggtggaggacctgctggggtctcctgggacccgcctgttgcttctgccctcccctgtggaaaggtctatatgacgggccgcctgagccccagaactcgtctgtgaaccaccttttccagccaga

SEQ ID NO: 241505 - DNA, 1094 bp, Homo Sapiens
gggcgacacggacataaccactctgacagcccagagctgagaggcgccgggacgtgccggggaagttgtggacgtccagccagaggacgctggcgggcgggtggatggacaggacggacggccattgctgggcccagccccgccctctgcctccccaggggcagccgcccctccctgtagccctgggacctgctgcttgattcctcctggataatccccaccgcccaattcctctgaggtcaattctcaccacccgagagctgagtccacctcttgttttttctggggtcacccctgctgatcaatttctctgaagtcatgccgtggactgatttttctgagctcctccccggtgaccaatttctctaaggtctcaccgcccgatttctctgatgtcagtgccccggtccccagtggcctctttcggggcctctcctacctactggtcaggttcgtcagctctgggaagaggttttccacgggctgttcctcaaactgatgcagcccctcgttctccttgtagagatgaatggccgggtcgttcccactcaagagaaacacagtctcaagttgatccccgacctggaccctgaaagcagagaaatctagaacccaaggtagtggaatccacatggtctgagaaccagaactctcctcttgcaaaaacccctgcctgttgagaaccttaacattctgggatccagacactagacccagggttagaatctcagggctcaagctcctgagtactgtatctccttgaaatacataactgtagaaacgagccctcatagaatctcaaaatcaaggaatgtacctcccaatctcagaattgcgggaacatggcttgctagaacctcccgctcttagagcccgcatctactcctaccttcactctgtggattcaggaatcgaatgtggaactctagaatgaactgcagaaccttagaaagctaggacctcttcattctgaaaccctggtattctagaagtgctgttttctgtctccttaaaaatacaagaacttctagaatttgccatcatagatttcagattcattgttaatggtggaatatccccaacttttttgtaca

SEQ ID NO: 241506 - DNA, 1067 bp, Homo Sapiens
  misc_feature (122)..(139): n is a, c, g, or t
actgagactgtacagtatgtatcatgatttttcacacatcatgaatatttaccaattcaaaatcccaaagctatatgagtattctgataaccaagaatacactacaccaactcaaactgctnnnnnnnnnnnnnnnnnngatgtaatcctgcctttcttgggacagaaatttcatataagacaaaaatggcaacacgcctttagataaaagcattggcagagttctgatttaaatgctgcattcccttaatgctcaatttaaaatgaaacacacagcaacagaatacagtatgtttttaagagaattcattagcagatctataccattaaaatattagcaaagtgtatttccattgaattaatgtgttcttatagtacagccaagagatgcatacatcaatggctatcaaaatgtaaatatggacatatatggacacatctgcatacatctctacctgtataattccttctgcccctctgctgccaacctaatgaacaagtcctgacatacactgctcagaggtggcttaacaattccatgtccaagatgtatcctatcaattataacaaaggtatttacaaataggctaattcactagctctagtttttatcataagttgtcaccccattcgtaaagcttagatgttgcaaaataataactttgtccacaatgaacacaggcactttactaaaaacgctcttgtagacctgtggttatcatctaaaaccatcgtctagatatggagatactagcaaagagcccttcccttcacccttcctcttctccctcttccaccatccccgtgactaagtacaggatgtctagctccaaggggtggactaataaaggtcactcccagaggacaggccttcctaaaaactaacaaaaggacattcacaaagggactgatttactacatctatttttaacatactttgagcattaagacttatcctttaatacacaatattaactaaaatgcacatatagaacaatggttagaccatctgaactaatctcaggagcacagaacccctctccctgcccaacttttttgtacaaagt

SEQ ID NO: 241507 - DNA, 1027 bp, Homo Sapiens
ttggctcaaagtccacctccccagaacactgctcgacatggacaccggtgtgattgaaggtggattaaatgtcactctcaccatccggctacttatgcatggaaaggaagttggcagtatcatcggaaaggtaagacaatttcacttcaacttcaattaccatttagtaattctggattgaagtagcagttggagctcatgcttgacttttcctttacagaaaggagaatcagttaagaagatgcgcgaggagagtggtgcacgtatcaacatctcagaagggaattgtcctgagagaattatcactttggctggacccactaatgccatcttcaaagcctttgctatgatcattgacaaactggaagaggacataagcagctctatgaccaatagcacagctgccagtagacccccggtcaccctgaggctggtggtccctgctagtcagtgtggctctctcattggaaaaggtggatgcaagatcaaggaaatacgagagagtacaggggctcaggtccaggtggcaggggatatgctacccaactcaactgagcgggccatcactattgctggcattccacaatccatcattgagtgtgtcaaacagatctgcgtggtcatgttggagactctctcccagtcccccccgaagggcgtgaccatcccgtaccggcccaagccgtccagctctccggtcatctttgcaggtggtcaggacaggtacagcacaggcagcgacagtgcgagctttccccacaccaccccgtccatgtgcctcaaccctgacctggagggaccacctctagaggcctataccattcaaggacagtatgccattccacagccagatttgaccaagctgcaccagttggcaatgcaacagtctcattttcccatgacgcatggcaacaccggattcagtggcattgaatccagctctccagaggtgaaaggctattgggcaggtttggatgcatctgctcagactacttctcatgaactcaccattccaacgatttgattg

SEQ ID NO: 241508 - DNA, 1641 bp, Homo Sapiens
  misc_feature (836)..(866): n is a, c, g, or t
tgaaatataacattccatgcaggcccagctgttgagggttttcttgaagaatgaatggggtaccatacatggttaagataaagccttgggctccggactttatctgaggtgtctggagaagttctcctgcccctccacttttttgcatctactctcaataaatgagtataatgtcaagccccaactttctaaaattataggaataaatggtagcagatacatccttttaacttgttatggaggactataaatgaagttactaaaaacaatagactgaaatttttagtttaaaatatgcaagcctgaacaaggggaccaacattcccaagaaactggaacccagtcagacatatgatcaactgcttaatgtgtatgccatgtatgtcatgtgtcattcctttcccccaccccctccctagtggaagtgcttgcctactcccctaggacaggtaagtcctcggaaagtttaatcctcaatcttttgggcacaagttttataagggccaaccaagcatggagtcagggaaaaataggatcgagggccacaaaaaaagatggaagtggtaaaatagaagaaaacatcttaaccggaataaaggcttccattcaaaacccaagaagggtcctttgagggataaaaggtacaaaaataacagcaagacaagaggaataaaacccacatgaatcactgtggcatccagtttctattcacaaagaaaaagctccagtccatcttttaatttttttgaaaaattcctgacattacagaattaaactgaaatgtattaatattccactcttacatttccatgacaaacagaaaaattcatgagccnnnnnnnnnnnnnnnnnnnnnnnnnnnnnnnccagggagaagcttataaaactaaatatggatctcagcatcaacagctgaacagagaaaggaattaaaacgctttaattaaaaaatcacgagtggatgataaagtgtgtagaaactgaaaatttacaaactatttaaaacctggaatcgctgactgttcagaaactacacagatggatcatgggtggtggtgaacagcagaaagggattatggatgaatctgcattgttctagctgctccccatgccacccgtctccgaggaaagcctgacattgattagatattgagccaggctaatgctggcagcagatccagtgatggtaacctgcctatcagtagatccttccactgggttcgcaattttgatctgcgccccagacatctgacggatctcattgattttggcgccttgacgcccgattatgcagccaatcaaatcgtttggaatggtgagttcatgagaagtagtctgagcagatgcatccaaacctgcactgaatccggtgttgccatgcgtcatgggaaaatgagactgttgcattgccaactggtgcagcttggtcaaatctggctgtggaatggcatactgtccttgaatggtataggcctgaccacctgcaaagatgaccggagagctggacggcttgggccggtacgggatggtcacgcccttcgggggggactccaacatgaccacgcagatctgtttgacacactcaatgatggattgtggaatgccagcaatagtgatggccccaacttttttgtacaaagt

SEQ ID NO: 241509 - DNA, 1619 bp, Homo Sapiens
ttggctaggttttaaataagaatgtaaattaatcttctgcttgactcttttgagcatcttactaaccagtaagatgctgttggtaaagataagacagcaatcaaatatatataaggaagagttttttgtttcttcaaataaacaatgtatatcataaccacttagatttttaatattcagtattagctcagcattcttttcattcaagtggttgagcagagtgtgttaacattacatcaataagtaattgatccgctgatactgaagtgtgaaaaatttttaatacaattcatttatgcaattaagatttttaaagccatctaagtaaataaatatgtgccttatagtgttgtcgtggttttatattttatgcaaatctaccagtaagttaatttttattaagatattttatttaaaattgatatcaaaaggacacgtgtattttgtgctttgaatttcacaggttttttgaaaatggaaaacaaaatgcatttgaaatagaaattaataatcatgttcatcatgctacattgatgattagctgtctagcagagaatcgagaactcctaggtattaggatatatcagaattattcaaaataaactaattggttcataaatcaaactttcatgattaaaataaattttaaattctgtcacgaaaagtagttgttaattcctttaaaatttctaaaatgtctatcatcttttacctgatcccttcatttattcacagatataaaaccagctaatgtgttcattacagccactggggtggtaaaacttggagatcttgggcttggccggtttttcagctcaaaaaccacagctgcacattctttagttggtacgccttattacatgtctccagagagaatacatgaaaatggatacaacttcaaatctgacatctggtctcttggctgtctactatatgagatggctgcattacaaagtcctttctatggtgacaaaatgaatttatactcactgtgtaagaagatagaacagtgtgactacccacctcttccttcagatcactattcagaagaactccgacagttagttaatatgtgcatcaacccagatccagagaagcgaccagacgtcacctatgtttatgacgtagcaaagaggatgcatgcatgcactgcaagcagctaaacatgcaagatcatgaagagtgtaaccaaagtaattgaaagtattttgtgcaagtcatacctccccatttatgtctggtgttaagattaatatttcagagctagtgtgctttgaatccttaaccagttttcatataagcttcattttgtaccagtcacctaaatcacctccttgcaacccccaaatgactttggaataactgaattgcatgttagagagaaaatgaaacatgatggttttgaatggctaaaggtttatagaatttcttacagttttctgctgataaattgtgtttagatagactgtcagtgccaaatattgaaagtgcagcttggcacacatcagaatagactcatacctgagaaaagtatctgaacatgtgacttgtttcttttttagtaatttatggacattgagatgaacacaattgtgaacctttgtggagattttattttt

SEQ ID NO: 241510 - DNA, 858 bp, Homo Sapiens
ctttgtacaaaaaagttggcctcgctggagtttcataaggccaatgagtgccaggagcgccctgttgagtgtaagttctgcaaactggacatgcagctcagcaagctggagctccacgagtcctactgtggcagccggacagagctctgccaaggctgtggccagttcatcatgcaccgcatgctcgcccagcacagagatgtctgtcgcagtgaacaggcccagctcgggaaaggggaaagaatttcagctcctgaaagggaaatctactgtcattattgcaaccaaatgattccagaaaataagtatttccaccatatgggtaaatgttgtccagactcagagtttaagaaacactttcctgttggaaatccagaaattcttccttcatctcttccaagtcaagctgctgaaaatcaaacttccacgatggagaaagatgttcgtccaaagacaagaagtataaacagatttcctcttcattctgaaagttcatcaaagaaagcaccaagaagcaaaaacaaaaccttggatccacttttgatgtcagagcccaagcccaggaccagctcccctagaggagataaagcagcctatgacattctgaggagatgttctcagtgtggcatcctgcttcccctgccgatcctaaatcaacatcaggagaaatgccggtggttagcttcatcaaaaggaaaacaagtgagaaatttcagctagatttggaaaaggaaaggtactacaaattcaaaagatttcacttttaacactggcattcctgcctacttgctgtggtggtcttgtgaaaggtgatgggttttattcgttgggctttaaaagaaaaggtttggcagaact

SEQ ID NO: 241511 - DNA, 961 bp, Homo Sapiens
  misc_feature (203)..(215): n is a, c, g, or t
gttgcagcactaaagatattttatctgcatctgtatttaatgagatgataactgcatttaactggccacatctggcccaaaggacaggcaacagaagacacaaaacaacacaacatataagtttcataatcacagaatatactgatacacttcattgtgctgtttcaaggcagaaccataacatggcaatttgtgtctttttnnnnnnnnnnnnnaccacatattaattgtatgttacattccctccagcatctttttgccaaagacactggaccataaaatttttggtttaaaagtttaaattgaataacatacaaaaggctcttgtgccagtgaaaatgactgctaaatattccagagcttgttagtaaaacaaaatagcattaccacatagtatcggtagagctacatcaaaatagtgctattataatcccaatttcagagacgtgaaacactgtatgacacagtttcaattttaaaaatgacaaacaaaaaacccctacaccttcccaagagttttaacactgtttatgacttaactgaaactcagtattaaaataaatatttttatattgtagaattactctccatatttgtgtgaacatcttaagacagcaggttaatgacatttttatcattcaaatgatatctgcttatacacagtaaaaatcttcaactcaacaccagttaacatacgaaatacttcacattaggttccataggtcttttccctcaaaactgtcaaaaattcaaaattaacttaaggatgttaataagacacaaacggttaacacagccttctacctactgtgattttccaaggtgcatttgatggacatttttcctattcaagttacataccttagttattcaacatactgttctctaaaatgttaaaacacatacagcaaagtttttgaggattctgttttttaggttttagccaacttttttgtacaaa

SEQ ID NO: 241512 - DNA, 2011 bp, Homo Sapiens
  misc_feature (231)..(244): n is a, c, g, or t
  misc_feature (1919)..(1927): n is a, c, g, or t
aaaacttacaaaaagttaggttaaaatgttgcagcactaaaggatatttatctgcatctgtatttaatgagatggataaatgcatttaattgggccacatctgcccaaaggacaggcaacagaagacacaaaacaccacaacatataagtttcataatcacagaatattactgatacacttcattgtgctgtttcaaggcagaaccataacatggcaatttgtgtcttttnnnnnnnnnnnnnnaccacatattaattgtatgttacattccctccagcatctttttgccaaagacactggaccataaaatttttggtttaaaagtttaaattgaataacatacaaaaggctcttgtgccagtgaaaatgactgctaaatattccagagcttgttagtaaaacaaaatagcattaccacatagtatcggtagagctacatcaaaatagtgctattataatcccaatttcagagacgtgaaacactgtatgacacagtttcaattttaaaaatgacaaacaaaaaacccctacaccttcccaagagttttaacactgtttatgacttaactgaaactcagtattaaaataaatatttttatattgtagaattactctccatatttgtgtgaacatcttaagacagcaggttaatgacatttttatcattcaaatgatatctgcttatacacagtaaaaatcttcaactcaacaccagttaacatacgaaatacttcacattaggttccataggtcttttccctcaaaactgtcaaaaattcaaaattaacttaaggatgttaataagacacaaacggttaacacagccttctacctactgtgattttccaaggtgcatttgatggacatttttcctattcaagttacataccttagttattcaacatactgttctctaaaatgttaaaacacatacagcaaagtttttgaggattctgttttttaggttttagtccatagttttacaatgcagacatccttcagaaaaaactaagcaatcataaaagctaaaaggtgacaatggagaattaaatctctcatcactaaggctgcatttggcttggaaaaatttcttggttttaattcaggcacatgcagcacctccttttcactaaactgagacaacagacaagtttctaaacacatattctacactgatcttgctcaaatataaaagagccagcaggagagatgcaactcctaaaactgatgcagtgttataaaatagcatatttaaatattgggtttaagtctcctaataattcagagtatttccctcattttctttcagaaaggaataagctattttgagaaagacacttaaatcctacaatatttaaatacaaaagcatgtcttttttaaaagataatgctaatatagctacaatgggttagaaagtgcattgtaaagaaataaataattctctgctaaaactcaaaaggtgagtcagtgcccactgtttctgccgacagtcatttgaaaaaagaaaatcctatggtaccaccattatatataagctacttaaaaattatgaaaagtgaaataactcaaacctaaaggctgttatcttcaaagcacttttgaaaaacaaacaaacatagcccttgtcctatgcttatataccattttttaaaatcctcattcagttgatgtcttgtacttaggtgtcatgccatctttaagacacagacctcaagtagagcatttgtaaagaaaacctcattgaatgtaatatattttatcagttatctttgtatcattgctgaaatgtttatgtaacaaattgatatctgaataaaatgttctgtaaagtattaaatcaggaatgtacatgatacagtacaattcacagctttctcttcttgttcgcccagatgagatccctcaatttcatgtttnnnnnnnnnccacccaaaccttttcgcaaaattcaaggtaactatcagtttaggaattgaattacacaatatcagataagaatattaaaccaa

SEQ ID NO: 241513 - DNA, 1748 bp, Homo Sapiens
  misc_feature (1066)..(1101): n is a, c, g, or t
taatacagtaacgttacatgaccacaaaatcacaaaaagtgaaggaagctttgagatcttccagttagcagattcacacctggctggtcacgagattcccctggggattccctcacagatttcctaggcctcttctgaacagtcggattcagcaggcatggctaggacccaggaatttgtatttttttcccatacaattcagtagtctaaccctctcattatgcagaggaggaaactaaagctcaagaggtcaagctgttgtctaagtgtacagagcaagtgacagaaacagggctagaatgcaggtctctcgtccctactctgccactttttctgtcacagcacaccacctcccaaagcttcccctagacctgtcacccttacccttcagctaagtagcctttaatagatattctgtcgttaaaactaggtagggcagggacacatttcatattccctctgatacaatcctaggcacctagtaagtgtccgataaatacttcttggttggcagttactcagcaaaagtctaatactttatcctccactcacatctcagtctacaatcatccaagcagatgcaaaattatctggccagataattttcaagatccagctatagagggtagtgaatcctgaatctatgaagatgccatgttcaaacaagcaggaatttgggtgacaacacagttctataagattaatggaatcttaatcttccatactatctctcccccttgttctcaaaatctgtgaaaaaaaataataaaggaatcctagggataggaagaatctggccatttatctacagcatttggcaaacagaaatttttaaaaatcctaaattattctaaggagaaaatccttagcaacagtaacaacatatttagttgatttttgttgctgtttatccctagttttcaacgtgttttcctagtcttataaaacattcttctgtggatgggagtcaaactcctttataaagctgacagtgagggatgggacacatttagcctctctatgtatgataacactgctctccttccccactctctccctctccgcnnnnnnnnnnnnnnnnnnnnnnnnnnnnnnnnnnnntttatttggaggtgaggaacatgacatattttctacttgtaatcatgaatcatgaatcacgaaccgtgttataaataagataattcaattacattgtcatcttgattgtagataaggaataaaagataaccaaaacctttaaatagccaacaggaaaatattaaagaaaacttaaggctgaaaattaaataaccagcaggcacataagcccctgtgccatgcagcccagccccaactatgtgcctcttgacaaaccaggctgtgctgaagcacagaacagtagggggctacccagagggagccaggacagacaggtgcaggggaaaccttcctgctgcctcatgacatgcagaagcagggaaggacgcagcctccccaggaaccaccagagctggccctggcatcccttaatgagcactccctccccaagtaacattaaaaagacgtcaagctccacctgaagaagacgttgccagaaatcatttatggatgaggccctcccatttaacagtctccacacctgacttttgaaaccaggtgtccatccaaacaggtcttcttcaagttctctaccatgacagcctgggtagcagagcttcctcaatttgtattttgttttaatttctacaggaaaggaactgtcccaa

SEQ ID NO: 241514 - DNA, 1688 bp, Homo Sapiens
aaaatttaatttattggtccaaaatatacttaaataaaatatgcatttcaataaaaatgtctacagtgaaagacttatgcatttctgggaaacttcacaacatgtagatagggccaacattcacagaggataagggcatttgtatccaatcacaatttgtagcaggtttcttatcccaatctgcaagttacactgaacacatcatgagcatcacttcgggagaaaaccaattttgttggggaaaagaataagaaagctccagcctcaattttgagttcattacaacttctcaagagtatcaccaacagcctaaacagtacgagttcaaaaaagtaaacatgttaaggtgatatagtttagatgtctcttccaaatatcatgttgagatgtaatccccagtgttggaggtgaggcctggtgggaggtatttgggtcatcggggtggatccctcacgacgtggtgctttcaacacaacagtaagttctcgtgagatctggctgtcccccttgcgctctcgtttccactctcgccatatgatgtgcctgctcctgcttcaccttccaccatgagtaaaagctccctgaggcctccccagaagccaagtagatgccagtgccatgcttctacagcctgccaaaccataagccaattaaacctcttttctttataaatcacccagtcttgggcatttatagcaatgcaagaacagcctaaaacataagacaagcagataactctttagaaacctaaatacgttttcttgctgtctttatgttgaattctccatctacaacgggcagtcatgaagatggtcttcgtcaggacaacatggtcacaggactgggacaatccaggggaatgagagggagagtcaggggacaggggagagaaggcaatgcctcttgctgctttttcacattagagacaaactgtaacacacagtccatgggctgcaatcttctccttttatcatctggcattaacacttgatgtagtcatcgactttattcaagaagtcctccttgtcctacaaatgatgttctgcagcttcaacattcagtggatcgtcaaaattcagaagattagtaaacaaataatttaatctccaaataacatcctttaatgatctcgtgggagcccagccagtgctgtcaatcgaatgtcctcagtaaactttagacatatttcccctatctctgatgttagggtaccagatcctggtcaggcatttcactttggaaggcaccacattgtatgcatcaggaagtccagtttcgagctgaaattttccaccctagtagtaaccctcgtctggggttacagtcagcagaaagcaatgaagctttttagatcaggaaatactcttgacatgtacaaggtaaataagctcaagctctgcaacctctttaacaatcaacttgtctctcacagaaccctctgactggggccggatgctatggctgacgtcccagacccttcgagactgtcatcgcacttcagtttgcttacaggtgtcagcgctactcctgcctttaccctgggcaccccaagacaggtgaggcaggcctggcgcccaacaccatgcctggcctgggcagtggtggtgagacacggcccctcatagctacatcgactccaggtggcaggttcagaagttattagaacttttaatacatgaacaagccaa

SEQ ID NO: 241515 - DNA, 833 bp, Homo Sapiens
tttgctaccagcccagagcccctgtcaatagaatccgcatggatccctggggttcacccatgtcagttgcacctgtaatgtcaaacagtgggaggctgaggtcatcacgctctcatcctttgaagccccactcttctgtggcaactggcacagagtgaggccctcagagtggggcatagtccactggcaaccagaaagacccagctggaccgaggcactccctcgtcgcagccctgttcccctgggagctctcagcctacagcgccgcaggggtcctgagctaccacccagcccagagcagctggtcccaacccacgactccccactaggccgagaaaaggtacattctactcccctctgactgacaagaggggaggcagacaaccttgggacgggggctcctggcacaggtcgttaacacggttcgcagctaaagcccgcatgctagggacaggcacgagacggcgcctgtgtgcagcccacgcccactcgaggctggctggtcctggagagccctggcgagccagattcctccagggcaggacaggcctcggggcgcagccaccctcaaggatcccatcctgggagccggaaacctgctcgggctcccccggcagggccccagggccagcccttaggggagggggccctgcgcaggcgtcgcgcggctcccaagcacgcggggagacctcaccgcagccagaccctctaccacagccccaggctgcccccatgcccctcgatcccagacccccacagcgctccctgactctcacggaacatccagggcccagggcgcggctgagtccggtgccacctcacctgcgtcccaa

SEQ ID NO: 241516 - DNA, 1536 bp, Homo Sapiens
gtgacttgtctactaagttcaacatcagggcttattcaggggaagttcctattgatgaccttttttcccatgtcagagccaaggaaataacatactctttctttgtggtctcatatatatgtattttttgaagactggacactttaataatgtgctgtgcaactctggaaatcagataccctctccacgagtttattgttgttctgttgctgttaccttttgtttagtgtgtgttctggactaatttgaagtgtccacctcatcagcttcatgttcagccagtgactggacagaggacccctttaagtgctttgcaccagtaactctcacggttctgccgacacgcagttgatgcgtggtgagtgtgccttcagcgctccatcgcggttctgctgacacgcagttgatatgtggtcagtgctccagcaggcagctgccaactgtgcctttgccttcacttcttacttgcacacagccacaaagccagccagaggtgagggccagggcagctcaggttcctctcgggcacacacacagctctgtgcctgtgtgggcacagccttccatgcctccaggagtgtggcagagcttctcagcggccactgtgggcatctcgttcctcagatcttcctttcatgagttatgtagttgaattatcaatctttcttggcttctaagttttgtgttctagttagaatgctcttcccccttaaagattatatttgaaatgttttccatgttttcttctagtacttttatgggtttcattttcatattgaaatcattgatctacttctagtttttgatacaaaatgtgagccaggaaacccagtttttaaatttcaaatagctgtccaggtgtccctgcacctcttatgcatgagccctcgctttgtgccaatgtggagtgcccgcctgctcacacgtgcccatgtggagtgcccgcctgctcatgtgcccatgtggagtgcccgcctgctcacacatgtcgatgcggagtgcccgcctgctcacacatgcccatgtggagtgcccgcctgctcacacgtgcccatgtggagtgcccgcctgctcacacacgtgtccatgtggagtgcccacctgctcatgtgcccatgtggagtgcccacctgctcacatgtgccgatgtggagtgccgcctgctcacacacgtgcccatgtggagtgcccgcctgctcacgtgcccatgtggagtgcccgcctgctcacacgtgccgatgcggagtgcccgcctgctcacacgtgcccatgcggagtgcccgcctgctcacacgtgcccatgcggagtgcccgcctgctcacacgtgccgacgtggagtgcccgcctgctcacacgtgccgacgtggagtgcccgcctgctcacacgtgcccatgtggagtgcccgcctgctcacacgtgccaacgtggagtgcccgcctgatcacacgtgcccatgtggagtgctcgcctgctcacacgtgccgatgtgggagtgcctgcctgctcacacgtgcccatgtggagtgttcgcctg

SEQ ID NO: 241517 - DNA, 1864 bp, Homo Sapiens
ttggggttgccatgtttgctctgcccctggggtggaggccagaggagatgcttaccaggcctgagaccttgagagttcacccagggtttgaacgctgccacccagggttcccaaggtttctcccatctggtcagatgtcgaacacaaaatgtgggcattctgcacggaaggaaagatcaggcttctcttgctgagtgtgtgaagacagggagagccaggccccagcagatgcggcctagcacactctgatttggttttgtggggagggcccaggaacttgggggtggtcttggcattcagagctggtgctaaaaacccagagcagaagcagggagaagggagtgaggatgggacagagaagagcgaccactggggatcagaacagcttttcaggggccaccttgcagcctaaaataatgccgtttcagggcctgggcctgctgtgagagccagaatgaagcatgtgcaagattggaatgtgagaagaactgtggggggaaaccagttttaattaagtggaagtgctttgtgcttgtgctgaagttgcctgggcctcctgcagctctggacctcactggagcggccccgccctgcccttgcctgcctttcttttatgctgatgctggtgggctttttcctgcttcaggatccatgtaagggactgaccaggttcatccagccttaactggttcctgcaacccacttttaggtctcccaccaggggcctattgtgctgtcttcctgtgaccagcagatcctgtaagggggtgatcctaattctggggctctttgcagcaagaggagaacgttctttttcttgaacaaggtggccggttccctgggagaaggctgggaatggcacgtccggccagggcaggcggtgcggcatcctcctcctgggattcctgtggcctcccctgttctattcattgtttggcttcccacccataagctctgggatacccagggcttgcttcccagctcttctcatctccaagcctctgctccccttcccaccaccactgccatataaaatggccatgctaactcctacacaactaggagcctcagcaggattgctaggatgtgggttccttcctgcatgcttgcttctgcagctgtgtggccttgccatggccctcccaccactttcccttctaccttgccttccattgtcttccttctcccagaaagccaggtttcaccacgtgctcaccacaaactgtctcccctccctcgtaggagtcactgcagtagggcacctgcaggccctggtagagtgagcagggcttacgtgtacattctttctcactctaaggatgtgatatctgaccctgatgtcagagaggaggtctcaggactagcattcggggtcctttgagtgttcccagaatggtttggggtatcacacaaaacaccagagctgaggatagggatagagtccccaaacacacatcctgggagcaagccacttcatctgagcttcccataccaggagcatggtttgtgctttgatgggaaacctagcaagcccctgcactctggggcttctcctctcctggagcccagggcggctctggcccgatgatatggcagccataggtacaggtattgcaggtgcagcctttcttaagtaccctgcctccactctatagcccagctgctgctggagtccaggaccttagacccaggatgagcaaaaggatcccaccagttgtccaggaccattgccagggtgaccccagagttcttcagacctgtgtctgatactgaatacagtgccatgggaccctgctccaatctaactgcctacaacctgcccgtccccctgctgcagggatgttgctgctacctcgggaggctc

SEQ ID NO: 241518 - DNA, 898 bp, Homo Sapiens
  misc_feature (119)..(128): n is a, c, g, or t
  misc_feature (749)..(757): n is a, c, g, or t
tccactggtaaaagtgagagtcgtgaggaattttttattttgtgcaggactgaaagttaatgcccttgcctttataagtccttttgccatttaatcgtgctaatacattttcactaagnnnnnnnnnncttcacttaagctattaatttaatactgtctgtattgattcctgaattcttgctaatggggcacagtcatttgtgcctcattaatacttcagcatttgctcttgttcaatgacaaattttatataggaaactatcaagaaaggaagcgcaaaattcaagtaaacatttcttctggagcctcttgcttaatctagctgactggaactctgaagcaaattgcaccttgaaaagaaatacagtagataccacggtgtcagggtagtaagggatttagctaccaattcacaaaatagaattttacgaatgtagacagcagtcaaacagcaaaagcaaccttaaagaagtattttgtttcaagaacaaaacaatttccagtcccaagctttgcaaccccttaagtatactgtcttgctcgcctgcttgaactttaattctgatgatctgcactgataaaccttgccttatttacagaagtcttctaaaataaggaccactgtgttaggatgtgcactgacttaataagctttctccaagtatcaagtattcagtaaaaacgatacaacattgtcacacattgtatcgtttgacaatatcgtattggttttaagattaaactatatnnnnnnnnngtgaacataaaaaggtacaaaaggagtctttatcactatttaccacttccaaatgagaaacgttttaatgaaattcagccatacttcatttaacatctggcgttttagatcagcaacttttaatattgtgcaacatgccaa

SEQ ID NO: 241519 - DNA, 1287 bp, Homo Sapiens
ttggcatggctgcgcccgcactagggctggtgtgtggacgttgccctgagctgggtctcgtcctcttgctgctgctgctctcgctgctgtgtggagcggcagggagccaggaggccgggaccggtgcgggcgcggggtcccttgcgggttcttgcggctgcggcacgccccagcggcctggcgcccatggcagttcggcagccgctcaccgatactcgcgggaggctaacgctccgggccccgtacccggagagcggcaactcgcgcactcaaagatggtccccatccctgctggagtatttacaatgggcacagatgatcctcagataaagcaggatggggaagcacctgcgaggagagttactattgatgccttttacatggatgcctatgaagtcagtaatactgaatttgagaagtttgtgaactcaactggctatttgacagaggctgagaagtttggcgactcctttgtctttgaaggcatgttgagtgagcaagtgaagaccaatattcaacaggcagttgcagctgctccctggtggttacctgtgaaaggcgctaactggagacacccagaagggcctgactctactattctgcacaggccggatcatccagttctccatgtgtcctggaatgatgcggttgcctactgcacttgggcagggaagcggctgcccacggaagctgagtgggaatacagctgtcgaggaggcctgcataatagacttttcccctggggcaacaaactgcagcccaaaggccagcattatgccaacatttggcagggcgagtttccggtgaccaacactggtgaggatggcttccaaggaactgcgcctgttgatgccttccctcccaatggttatggcttatacaacatagtggggaacgcatgggaatggacttcagactggtggactgttcatcattctgttgaagaaacgcttaacccaaaaggtcccccttctgggaaagaccgagtgaagaaaggtggatcctacatgtgccataggtcttattgttacaggtatcgctgtgctgctcggagccagaacacacctgatagctctgcttcgaatctgggattccgctgtgcagccgaccgcctgcccaccatggactgacaaccaaggatagtcttctccagtccaaggagcagtcgtgtctgacctacattgggctttcctcagaactttgaacgatcccatgcaaagaattcccaccctgagtggatacatacctgcccaatggccaaaggaaccgccttgtgagaccaaattg

SEQ ID NO: 241520 - DNA, 1998 bp, Homo Sapiens
acctgagattacaggggcctggcttctgtggttgcttaataagtccatgttgaatgaatgaagagaaccagttcagtaaattcagtcaggtgatgtctgtcattaggtgaaccatcatagtaggttaggtatagaaaaggctgatgagaaattctgtagatgtggctttttggaaccacctgtgaatatcttcctataattatgtaggaatctaccctgtaaatattttcctagaaataaatatgtagattttttcctagaaatactttcttagctgcaagtgcatgcatattttaactatatgcatgcagttatattcagtgactttatttttcctcacgttcctgttattagatttctgacttacacaagagcctagaacagaaagaaagtaaaatccagcagctagcagaaactataaagaaacttgaaaaggagttcaagcagtttgcacagttgtttggcaaaaatggaagcttcctcccaaacatccaggtttttgccagtcacattgacaagtcagcttggctagaagctcaagtgcatcaattattacaaatggttaaccagcaacaaaataaatttgacctgagacctttgatggaagcagttgatacagtgaaacagaaaattaccctgctagaaaacaatgatcaaagattagccgttttagaagaggaaactaacaaacatgatacccacattaatattcataaagcacagctgagtaaaaatgaagagcgatttaaactgctggagggtacttgctataatggaaagctcatttggaaggtgacagattacaagatgaagaagagagaggcggtggatgggcacacagtgtccatcttcagccagtccttctacaccagccgctgtggctaccggctctgtgctagagcatacctgaatggggatgggtcagggagggggtcacacctgtccctatactttgtggtcatgcgaggagagtttgactcactgttgcagtggccattcacgcagagggtgaccctgatgcttctggaccagagtggcaaaaagaacattatggagaccttcaaacctgaccccaatagcagcagctttaaaagacctgatggggagatgaacattgcatctggctgtccccgctttgtggctcattctgttttggagaatgccaagaacgcctacattaaagatgacactctgttcttgaaagtggccgtggacttaactgacctggaggatctctagtcactgttatggggtgataagaggacttcttggggccagaactgtggaggagagcacatttgattatcatattgacctggatttagactcaaagcacatttgtatttgcctttttccttaacgtttgaagtcagtttaaaacttctgaagtgctgtctttttacattttactctgtcccagtttgaaacttaaaactcttagaatattctcttattatttatatttttatatttcttgaaagatggtaagtttcttgaagtttttggggcgtttctcttttactggtgcttagcgcagtgtctcgggcactctaaatattgagtgttatggaggacacagaggtagcagaatcccagttgaaaatgttttgatattttattgtttggcctattgattctagacctggccttaagtctgcaaaagccatctttataaggtaggctgttccagttaagtagtgggtgatgtagttacaaagataatatgctcagtttggacctttttttcagttaaatgctaaatatatgaaaattactatacctctaagtattttcatgaaattcaccagcagtttgcaagcacagttttgcaaggctgcataagaactggtgaatggggtaagcattttcattcttcctgctgaagtaaagcagaaagtactgcatagtatatgagatatagccagctagctaagttcagattttgttaggttcaaccctatgaaaaaactattttcatacgtcaaaaatggtaaaaat

SEQ ID NO: 241521 - DNA, 1219 bp, Homo Sapiens
ttgggcctctttgaataaagccctatcctcaagtgctgatgatgcgtctttggttaatgcctcaatttccagctctgtgaaagctacttctccagtgaaatctactacatctatcactgatgctaaaagttgtgagggacaaaatcctgagctacttccaaaaactcctattagtcctctgaaaacgggggtatcgaaaccaattgtgaagtcaactttatcccagacagttccatccaagggagaattaagtagagaaatttgtctgcaatctcaatctaaagacaaatctacgacaccaggaggaacaggaattaagcctttcctggaacgctttggagagcgttgtcaagaacatagcaaagaaagtccagctcgtagcacaccccacagaacccccattattactccaaatacaaaggccatccaagaaagattattcaagcaagacacatcttcatctactacccatttagcacaacagctcaagcaggaacgtcaaaaagaactagcatgtcttcgtggccgatttgacaagggcaatatatggagtgcagaaaaaggcggaaactcaaaaagcaaacaactagaaaccaaacaggaaactcactgtcagagcactcccctcaaaaaacaccaaggtgtttcaaaaactcagtcacttccagtaacagaaaaggtgaccgaaaaccagataccagccaaaaattctagtacagaacccaaaggtttcactgaatgcgaaatgacgaaatctagccctttgaaaataacattgtttttagaagaggacaaatccttaaaagtaacatcagacccaaaggttgagcagaaaattgaagtgatacgtgaaattgagatgagtgtggatgatgatgatatcaatagttcgaaagtaattaatgacctcttcagtgatgtcctagaggaaggtgaactagatatggagaagagccaagaggagatggatcaagcattagcagaaagcagcgaagaacaggaagatgcactgaatatctcctcaatgtctttacttgcaccattggcacaaacagttggtgtagtaagtccagagagtttagtgtccacacctagactggaattgaaagacaccagcagaagtgatgaaagtccaaaaccaggaaaattccaaagaactcgtgtccctcgagctgaatctggtgatagccttggttctgaagatcgtgatcttctttac

SEQ ID NO: 241522 - DNA, 1392 bp, Homo Sapiens
tttgtacaaaaaagttgggggacccctcctctcagtcctggctccttcctacatcctgggctcctgaagaagctgtcttcccattttccatgcactgtgcttatgtgtggtggactgcagagctgcttccacttacaggagagctgataatttgttagctggaacctattcacttccgagattcagacatagccatgctggtggccttctgaatcactgcatggatgtcccaggaggcagctctccccacacagcagcacagccatcacaggattccttgtgtagaaatgattcccagtctagttaccaacagctagtctaggagtaattgaatggccctatggcacagttccacccacagagtggtgaatctctcagccaaggagggaaagaaaaggaagaactcttgactatttagattctagttaaatatctggaatcctagcagtcactacattatctcagcagagagactttaattaaactgatttgtttccaatgtcgggttcacttaaaggatttgacttaccaccagagcatagaatagcatgcaaggaagaccagatgggcttagcattgggaagacagagggcaaggaggcgatagatggatatagaagcatttctctgcaggataccagttcaggccccaccattcctgccaaggccattacatcccacaaacccaaatacaaagcagctgacttccctggatcttccccccactcctcacacctcacatgtccgaggagctgccttcattcaggcgggtagctgcactgggcatggggtggtggtgggagcttaccgccacctattcaagctctcagctactcctgaaacgggcagagatgatgaacagaagtgtatgtaaatacagcagctagtgggagagcaccagttgggcctaatcctgcctcatcattcttggcaggaatctgcaaatggaaacattgtgagtatcagcaatctgggaagtgacagggttaataactccttcccagaagctgtatcatgagattttgaggggaccgagccctgttacatggatgtgaacagtgaggatcagaggttttatcagaacacattctttttttctaccaactctccagagcgtgagtataggagtgccatgagctttttactcagcagttttgtaaactctgtatataaaatcattaaccacacattgtgggtgatgggaagacgatttcagctgacagagttaatggcaaccaataatggtggcctgtagctgctaagagcttcacgcaatttggcctgagctttcactgttggtgaatttagagtgtccttttaggtggggcggctattctaaaagtgtctttctatcactgttaacgggggcggaagtgaggttcgaggatgacgt

SEQ ID NO: 241523 - DNA, 798 bp, Homo Sapiens
acaggtaaccctatgcacaaaaaactgacttcagagtgtagtgttcaccagtcttagatactatcgtgcaaaatttctgaataaagggaaagagaaagccgagtctgatcttaacacaagttaaagcacaggacaggggacccgaatttggaggtaaagtctgccttatggtcactgcaggattagagagggctttgtttcaacatggaaacggatgtcttaaaccttgcggcgattttgaggccttccaggagcattcccgcaaatctctggcatttgagacgacgtcttggattttaacacgtgtttgaaaggcgtgcgcgcctgtcaccccctgggatcgggagcggggacggcgtgtgagatctgggtaagaatgaggaccattctccaattccgagccaagggctggctcgagaggctgtagggggcaaagcgcttctcaggccctgcgggtaatcccggacttgagagccgggtgcggggacccggccccagccgcccagcagccccagccaggagcgcagagccggaaggaagccgccgacccagtcctacctcggccgcgtctctcccgcgcgggggccgcccccttcctgaggccccgcggggacccggccggcgcctggcggcggcgcccgaagaagacgtggtaggcagcgtagagggagaataggcagtacagggcgataagaaacgagcagagccgcttccgcgtcagccgcatcccactcgggcttccagtcaggcatccaccgtctcatggagcgggcggaaagccaacttttttgtacaaag

SEQ ID NO: 241524 - DNA, 1454 bp, Homo Sapiens
caaagcgggaacagaggtgcctgcactgagggtgcgcccaggggggcaggagacacaggcttccttatggagctagctggggagtggtgggggaggttacagtggagccctgccccgcgtggtctgcaaagccttggtactgcttgggacacaggccttggcctgtaggtggcaccccgcacttgcagaattactggcatcccttgccctccggcccaagctgcacgggggcgtcactctggcctgtcctgccctctctcccctctgcccagcctgtcccaggtgtcaggcagtgggaggggctaaccagccctgcccgtctttccagggagaggttccctgaggtcttttcctacattgtgggggtgctgtgggggtgcagcccccaagtcatgggcacagaaaaccccaaagacccttccttactgaaagggtccaagcatgcgctccacaaaacccaagcccaccagctcggtgcagagcagcggcctgggctggcgggcggctttagagaaagtctacaggggccgagaggagtgcatccttgtgcacagggccggcccctgctgccacttgccgtggtgtggccagcagccaccgtgcagctaggagcacatgaccacagggccttccggggccaggacagaggggtggccagacagaggggcctgccccactgggacccctcccaagcgctccgggcctcactggcatgaggctcatcattggtgtgtaggaggaagacggtgggaggctgagctagaaatcacaccgctacgctttttgtggctcccaaactgcagagtcaatccccctggggtccctgcccctgccagcaagggtgggggtgggtgggggtcaagggccagctcgagcttggtaggcatggcccctgccgggacccagtggggcaggttggagcagaaaaggatgggagaggaatctgtggtcaggccccagattcctggagcccttggaaagtgggaggtggaggaagacccccagtggggaggccctgccccagcaaccaaggccctggcagaaggggcccctcgatgggccagacccctttcccctctccccctacaccaagtggggattctcagcagaggagaggctggccctgcccgccccaaggacccaaccaggccttggcctggccttgactttgggaaccttggaaatctttgggccttgactttgggaatcttggctgtggctgggagaaagctgggtggtcttggaggatgagcagaggtgacaggcttgggtgggaccgtttgaacatccttcctaaccagtgccttccccggcacagactggacttcgacattgtccggcgaagcagtgggtggtgtctggcagcgacttgggagatcatttcccgatgacatcacagtgtggtgttttctcttggatgcaaaccacactcttcacttggcttcaaaacccaa

SEQ ID NO: 241525 - DNA, 1159 bp, Homo Sapiens
ttggggccgcagtcgccactggctgcctgaggtgctcttacagcctgttccaagtgtggcttaatccgtctccaccaccagatctttctccgtggattcctctgctaagaccgctgccatgccagtgacggtaacccgcaccaccatcacaaccaccacgacgtcatcttcgggcctggggtcccccatgatcgtggggtcccctcgggccctgacacagcccctgggtctccttcgcctgctgcagctggtgtctacctgcgtggccttctcgctggtggctagcgtgggcgcctggacggggtccatgggcaactggtccatgttcacctggtgcttctgcttctccgtgaccctgatcatcctcatcgtggagctgtgcgggctccaggcccgcttccccctgtcttggcgcaacttccccatcaccttcgcctgctatgcggccctcttctgcctctcggcctccatcatctaccccaccacctatgtccagttcctgtcccacggccgttcgcgggaccacgccatcgccgccaccttcttctcctgcatcgcgtgtgtggcttacgccaccgaagtggcctggacccgggcccggcccggcgagatcactggctatatggccaccgtacccgggctgctgaaggtgctggagaccttcgttgcctgcatcatcttcgcgttcatcagcgaccccaacctgtaccagcaccagccggccctggagtggtgcgtggcggtgtacgccatctgcttcatcctagcggccatcgccatcctgctgaacctgggggagtgcaccaacgtgctacccatccccttccccagcttcctgtcggggctggccttgctgtctgtcctcctctatgccaccgcccttgttctctggcccctctaccagttcgatgagaagtatggcggccagcctcggcgctcgagagatgtaagctgcagccgcagccatgcctactacgtgtgtgcctgggaccgccgactggctgtggccatcctgacggccatcaacctactggcgtatgtggctgacctggtgcactctgcccacctggtttttgtcaaggtctaagactctcccaagaggctcccgttccctctccaacctctttgttcttcttgcccgagttttctttatggagta

SEQ ID NO: 241526 - DNA, 1978 bp, Homo Sapiens
  misc_feature (1723)..(1733): n is a, c, g, or t
gacattcagacggacctcacctctgaacatgatgggcctgttgctaaggactttctgaacaggctcagaatcatcaaacacaacaaaaccaaaattgggtaatttcccaccactgttaatgcgcaactccaccacgtttccataactttgaaagaaatctttaagctctgatttgtccacttcatgaggcaggttgccaatgaagagttggtgactgtcagggtgtctcaccattcttcggggttcaatgtcaccttgctcaccagcctcacggattggtctgggtcccctttggggaggaatatttattcgttgttctcgcactctttgatcccgctgaggtctttgtggtggaatctgagattcaggcttagactctggacggggctgtgaagctggtactttaacaacatgaggtggtatcccagtaactggaacagctccactgggtggaagattcttactggtcacagatgcccaagaaaatgtcctcaagtcttcctgtactgtctgagctatgtctgcaggtgctggagaagaactcttctgagcatcctcaggggcagtttcttctaatactggctcaggcttttcctcttggatttcagatacaggttcttgttctggttctggttcaggatcaggctctggttcagcaacaggctcctctaaatgttcttccatgtcattactgacaactgcctgatcatagaaagttccagaatcatcaggtaccacctcaggtgtttgctgtctttcttcaggttcctctacttcttcttcagactcctcctgaggctcagtgacaaacccaccaaagacctcatcttggtatctgaagatatcattgtgaacatagaatttatttgcaacagacccctcaggagcaaggacaaacgtttgcatgaatctcctcaaagcctggttgttgttagagagaagccccatcacctggactaccacaccatcatttagcgtggcatgagcatcaacatggcgaatcttggtgtggcagttggtgaagttttgtgacatcactttcctgtggatttctttctgtccgtagactgcatctgctggctttccatttgaatccaatcccccatggacataagaagagttctttccataaaatctatgcagcatgtctggggcctggttcagcagtgtgtaatactgtctcacaaattcccgcccgaccagcaggggactaggcttctccatcaccattgctttggtcaattcaacctggggggaaaagagtcaaatatgtccaaacctacgcggctgagctggagaggaactagctctgcaccacagcaccgaggatagcacaaacccctcacgcaactgtgtccgcaccagcaatacataatttttaataccatgttattaaaatcaaaatgacaatattggctagggaaatttagtgaaagcaaaatctagtagaacttattttctaagcaatttgcttggtatggtacgcaacacttgaaaaaaagaaagaaggaaatactttctatctttttaggtcaagatagtgtttttgtactcaattgagaacaaggcaaattcaactggaattcactgactcatttaagtaaatagtagaactgtactgaggagaatcagatattgttaaaatacactacctagagacttatttcagaaacaacaagtaaatggcgggtcaggacaactatataaactttggggagataannnnnnnnnnnaattaagaatgtattggatgaaatttactgcagaataaagaattagtaaattagaaaagatattaaatgtaaatggactaaaaacaaatgaaaagattcctatattaaattaaaatatatataaatttacatgttgcttttaaaagacatacccttaaataggaggattcataaacactgaaagtaaaagaattaaaaaagacatattatacatgccaaagtatagctagtattgctttacccaa

SEQ ID NO: 241527 - DNA, 2692 bp, Homo Sapiens
  misc_feature (215)..(224): n is a, c, g, or t
gaaaaatccagtaagagggaaaaggaaaaatactctatttaatacattgactttaagaacaatcacatatgcattattcttactatctgaacttagcctctggtaaattcaatcctgcttagttaggccaattgataccctctacaataagccctacatgatcaaaaagcttcatgctttctacttacagcagcatagcaaatctgaagttcttnnnnnnnnnntcgccattctattaacaattataaacgattttccatgctctggtacaagaatatttaatgttagccaagaaagatagccatctattccactgaggattgtaatagaggcagccttttgatttttatatttgtttaaagtacacaacttgaatagtaaaatagaaactgagctgaaatttctaattcactttctaaccatagtaagaatgatatttccccccagggatcaccaaatatttataaaaatttgtactaacattctgtaagaatccacacacatcagtaagaagctgaccttcctgttggccatgctccaaatgtctttaagactagacaaattacatatattataaaaaatttcaggatgaatattgagtgcctgggtattatcacagtaatagtaaaggttaatgaaataatttttatttctgaaaaacaccatgtttataccccaaaataggtatcaatgttactggtgataaactcagaagtgatcattatatatatgcttactgtggaaatgaagtagtagagctctgcaaatgggacgggaaaatacccaggcacttcatcaatgaacatttatttgctaaaaagaaactattaaagtgattgcagccttgacatagttgcattaacatcaaatagccacatttatgtccacttacagggactactataaagaagcaatcccaagtttaataaaatgtgtcgatacagaaaacatatttttcacaattagaaaaatttaacatctttaattcaaacacttagatgagaaacagcctaaagcaaagactgacatacactacctatttcaaccacaaagcaagatgctctcactgtgactgaagaaaaatcatttaatattcattattagttagtataactccaaggaatgattatgctcataagtaaacaagagtttccaaagacttgtaactaagatgtataagacgtaaagtcaaactgcaaaactagttcaaagcaattagagtccaatagttctcttatgttttctttcattatctttattttaaatttgatattttagaataggaaattatctttcacagcaatgcctcctggtctgataatacagtatctcatttctgaatgtaaagatttaaaataaatcaaaatgaacattaaggcgtacaaagctactttaagtctgctcttaagatcagtttttgctcatattcaaaatacatggaatgttggcacaaaactgaagctgctgtagaaagatcacagatgttctgtgggttactcaaacttccatttctctaaaaacatacccttacatggtcttaattttatgaatttaagtgttgagaaatatctaaataataagtaacaattaaaataaaatgttttatttgtaaattatgtacagaatacactttacgttacgccaatgaaatggggagggaggagggagagccatcaccttccaacaaatgctgttcactttctctgctggagacgaccatctttctctcagtcagacgtacaaatcagtgtggatttcctacattggaaaaataatttagctaaaccagaagtgttgctgcattgttactagttggcttgtttccacaaaatagttttgaactctgctaactcagaatcttaaaagaaatctcctggtataattttataatgaaaaataaaaactatcaaggacaatgagtttacacatcttaaagaaactgtgaaatggctacataactatgcataatgtgaaatgttggagtttctttgttccttttaaagttatttttgattagtctaacagtaaaaagccataaaactatcaaaaattgccattaatgtaaatttaactgtggaaagtacatctttgataactgtcaaaatgaatgagacctacttactgtaaaattatcaaatggataaaacatattaatggctttaaactgtaccaataatagtgccaatattctataaaatgaaggaccgaatataactgcttgaatgtcaaatacatttcagtagatagatttaaagaatgctacaaatgccatgtgttcaatatggtaatcagccaacatagaaaatccaacctcttgtacttattcattcagtcccaaaattagtcagattatgatttttcatgtgaagatttaggtgtttctccatcattttcctcttcctcatcctcttcacaatccccatctgtttgctgttccagttcctcttttgttatcatttcaaaatcatttccatttccactactgtgctgggatcgatcatcttccctcctgtcactgtccgtgtctgaatgccgttctccccccgagccttctgttccatgatttcctggtcctactttcccctcctcatcttcctttttctcactgtctgacttttcctcactgtcggacttctgttgctttttggtttcagacttctcatctttctttaagccaacttttttgtacaaa

SEQ ID NO: 241528 - DNA, 1213 bp, Homo Sapiens
ttggctcttctacccggaggatgaggctgccaagagggctctgaaccagtaccaggcccagctgggagagccgagacctggcctcggacccagagaggacatccagcgcttcatcctccgatccctgggggagaagaggcagctctactatgccatggagcacctggggaccagcttcaaggatccttttgatccactgcccagggctcctgacattgagtcccgggcttttcctacctccgtcttcctctctggaaacagaagaaccttaatgagatatttcagctctaatgtcagggattccaggggctgaccttggtgggtgatgatgcttttctggactgtcgcaggacccctggacccctgcagctctcatccctgaggcacttagagaaaagctcagagaggatcaagagaagaggccttgggaccatgagcccgtgaagccaaagcccttgacctactggaaggatgtccttctcctggagggtgtgaccttgacccaggattccaggcagctgaatgggtcggagcgggcggtgttggatgggctgctcaccccagccgagtgtggggtgctgctgcagctggctaaggatgcagctggggctggagccaggtctggctatcgtggtcgccgctcccctcacaccccccatgaacgcttcgaggggctcacggtgcttaaggctgctcagctggcccgggctgggacagtgggcagtcagggtgctaagctgcttctggaggtgagcgagcgggtgcggaccttgacccaggcctacttctccccggaacggcccctgcatctgtccttcacccacctggtgtgccgcagcgccatagaaggagagcaagagcagcgcatggacctgagtcacccagtgcacgcagacaactgcgtcctggaccctgacacgggagagtgctggcgggagcccccagcctacacctatcgggactacagcggactcctctacctcaacgatgacttccagggtggggacctgttcttcacggagcccaacgccctcactgtcacggctcgggtgcgtcctcgctgtgggcgccttgtggccttcagctccggtgtcgagaatccccatggggtgtgggccgtgactcggggacggcgctgtgccctgggcactgtggcacacgtgggcacctgagcacagggagcacgagtggatagaagcccaagaactgctgc

SEQ ID NO: 241529 - DNA, 975 bp, Homo Sapiens
  misc_feature (753)..(797): n is a, c, g, or t
  misc_feature (816)..(837): n is a, c, g, or t
ttgggggctgctcccgtgctgggaggccggcgctccgggggagaccctgggggagctgggctgaggccagcctacctccgccgcagtctgcttggacttcttgtcccgggtcggtagtccgaggtgaccagcctgggggtaggagaggcttccggaaccggcgggcccgttctccaggaaagagactgcccaagtcttctttgatgtgaggattggagacaaagatgttggcagaattgtgattggcctctttggaaaagttgtgcccaagacagtggaaaattttgttgctctagcaacaggagagaaaggatatggatataaaggaagcaagtttcatcgtgtcatcaaggatttcatgattcaaggaggtgacatcaccactggagatggcactgggggtgtgagcatctatggtgagacatttccagatgagaacttcaagctgaagcactatggcattgggtgggtcagcatggccaacgctgggcctgacaccaatggctctcagttctttatcaccttgaccaagcccacctggttggacggcaaacatgtggtgtttggaaaagtcattgatgggatgacagtggtgcactccatagagctccaagcaactgatgggcatgaccgtccactcaccagctgctcgatcatcaacagtggcaagatagacgtgaaaacgccttttgtggttgagatcgctgattggtgacacaactggcagaaaacaaggatatgctttggcagggnnnnnnnnnnnnnnnnnnnnnnnnnnnnnnnnnnnnnnnnnnnnntgtctttcaattatttgcnnnnnnnnnnnnnnnnnnnnnngtattctatcccagatcacaggaaagttataaaaatcaaaccgtcaccctttagtttgcttgaactttagtaaaccacctgcttagggactttgaacttaaatatatccccttcctcaagtggtgctattttaaaact

SEQ ID NO: 241530 - DNA, 1425 bp, Homo Sapiens
  misc_feature (959)..(1033): n is a, c, g, or t
ttggcgctaaactgcatcgtcgctgtgtcccagaacatgggcatcggcaagaacggggacctgccctggccaccgctcaggaatgaattcagatatttccagagaatgaccacaacctcttcagtagaaggtaaacagaatctggtgattatgggtaagaagacctggttctccattcctgagaagaatcgacctttaaagggtagaattaatttagttctcagcagagaactcaaggaacctccacaaggagctcattttctttccagaagtctagatgatgccttaaaacttactgaacaaccagaattagcaaataaagtagacatggtctggatagttggtggcagttctgtttataaggaagccatgaatcacccaggccatcttaaactatttgtgacaaggatcatgcaagactttgaaagtgacacgttttttccagaaattgatttggagaaatataaacttctgccagaatacccaggtgttctctctgatgtccaggaggagaaaggcattaagtacaaatttgaagtatatgagaagaatgattaatatgaaggtgttttctagtttaagttgttccccctccctctgaaaaaagtatgtatttttacattagaaaaggttttttgttgactttagatctataattatttctaagcaactagtttttattccccactactcttgtctctatcagataccatttatgagacattcttgctataactaagtgcttctccaagaccccaactgagtccccagcacctgctacagtgagctgccattccacacccatcacatgtggcactcttgccagtccttgacattgtcgggcttttcacatgttggtaatatttattaaagatgaagatccacatacccttcaactgagcagtttcactagtggaaataccaaaagcttcctacgtgtatatccagaggtttgtagnnnnnnnnnnnnnnnnnnnnnnnnnnnnnnnnnnnnnnnnnnnnnnnnnnnnnnnnnnnnnnnnnnnnnnnnnnntgtttctgtcttagattggggaacccaaagcagattgcaagactgaaatttcagtgaaagcagtgtatttgctaggtcataccagaaatcatcaattgaggtacggagaaactgaactgagaaggtaagaaaagcaatttaaagtcagcgagcaggttctcattgataacaagctccatactgctgagatacagggaaatggaggggggaaagctggagtattgatcccgcccccctccttggttgtcagctccctgtcctgtgtgtgggcggaacatagtccagctgctctatagcaagtctcaggtgtttgcagtaagaagctgctggcatgcacgggaacagtgaatgccaaacacttaaagcaattcgatgtttaagtatgtaagttc

SEQ ID NO: 241531 - DNA, 472 bp, Homo Sapiens
ctttgtacaaaaaagttggctccagcctgggcaagaagagcgaaactgggtctcaagttaaaaaaagaaagcaaggaaagagtaatttacaacgaaggaaaaaaacccacagcacacccttcgcggctgtcagcgctctcctgatgtcacagtggctgcgtgtccttggggtgggtgaggtgtggggagcccagcccctggccctgcctcccgcgccccgctccccttctctctcttactcggttaagccatagcgaggcctccgctcgtttcaaatatgaatttgttttatagattataaatatgcatatacagtgtatgtataaagcataatgcctgcctttcctggttattttttgtaccatattgtaaactatattatttattctttaccaattttgggaataaaaggtgttttggctaattactataataagagctgtttaacttcctgttaaatttccagttcaac

SEQ ID NO: 241532 - DNA, 855 bp, Homo Sapiens
  misc_feature (236)..(255): n is a, c, g, or t
  misc_feature (682)..(732): n is a, c, g, or t
ttggggtggatttggggcgcaccacctccgccctaaccccaaccccaacgtgtccccaggccggatcacctcaacagtcacgtcagacaagtgcactcaacagaacggcccttcaaatgtgaggcctcatcatgtcactcccatttcctacagatcaaagatccccaaggctctgattcctttaatctcttgctcccccctccccagcccaccaagctttaactctcctgtgacannnnnnnnnnnnnnnnnnnntcctcagaaatgtgaggcagctttcgccacgaaggatcggctgcgggcgcacacagtacgacacgaggagaaagtgccatgtcacgtgtgtggcaagatgctgagctcggcttatatttcggaccacatgaaggtgcacagccagggtcctcaccatgtctgtgagctctgcaacaaaggcttcaccacggcagcatacctgcgcatccacgcggtgaaggaccacgggctccaggccccgcgggctgaccgcatcctgtgcaagctgtgcagcgtgcactgcaagacccctgcccagctggccggccacatgcagacccatctggggggggccgccccccctgtcccgggagacgccccccagccacagcccacctgctgagggggacccccgcacccaccaggtactggtgaggtttgtccaatnnnnnnnnnnnnnnnnnnnnnnnnnnnnnnnnnnnnnnnnnnnnnnnnnnnccctcccacagctgtgggctccctctcgggggcggagggggtgcctgtgagctctctgccacttccctcccaaccctggtgagctccaagttggttgcaggggagaggggagaatggagtaaa

SEQ ID NO: 241533 - DNA, 856 bp, Homo Sapiens
  misc_feature (479)..(492): n is a, c, g, or t
ctttgtacaaaaaagttggtcagccacttccctcccaaccctggtgagctccaagttggttgcgggggagaggggagaatggagtagagtcccttggtacaagctcctctcccccctcttttcccaccaactcctatttccctaccaaccaaggagcctccagaaggaaaggaggaagaaatgttttcttaggggaattcgctaggttttaacgatttgtttctcctgctcctcttctatcagacctgaccccacacaaacctgtcccctcggttgtgttgaagtcccctggacagtgggcaggggtggcagaggacacgagcagccactgcccgtaccccctctcctctctgtaagcccatgccctgtcttcccagggacttgtgagcctcttccctcgacggtcctcttctctccttccagtcctctccccctgctgtctgcagcccctccccggggagttggtgctttcttttccnnnnnnnnnnnnnnccagggggagggaggagaggaaggagggggatcaaagctgtcccaaagagggaaagcggtgaggtttgaggaggggcaaaagcagggccggcaaaggttgtaccttcataaggtggtatggggggttggggtcaggccctgaacatcgtcctacttgagaatctgtcaggggaaaaagtcaaggggaacaggaggaagagccaggagggccagaggcagagaagagatggagtcttacgggccagggtgagcgaggggtccagggcctagaggtgcttcctgggggcgggggaatgcagccagtgtccccctcccctcttccaccccagctccagccctggtcttgtcttttcatccctccttc

SEQ ID NO: 241534 - DNA, 937 bp, Homo Sapiens
ttggcgatgagtttcgagtggccgtggcagtatcgcttcccacccttctttacgttacaaccgaatgtggacactcggcagaagcagctggccgcctggtgctcgctggtcctgtccttctgccgcctgcacaaacagtccagcatgacggtgatggaagctcaggagagcccgctcttcaacaacgtcaagctacagcgaaagcttcctgtggagtcgatccagattgtattagaggaactgaggaagaaagggaacctcgagtggttggataagagcaagtccagcttcctgatcatgtggcggaggccagaagaatgggggaaactcatctatcagtgggtttccaggagtggccagaacaactccgtctttaccctgtatgaactgactaatggggaagacacagaggatgaggagttccacgggctggatgaagccactctactgcgggctctgcaggccctacagcaggagcacaaggccgagatcatcactgtcagcgatggccgaggcgtcaagttcttctagcagggacctgtctccctttacttcttacctcccacctttccagggctttcaaaaggagacagacccagtgtcccccaaagactggatctgtgactccaccagactcaaaaggactccagtcctgaaggctgggacctggggatgggtttctcacaccccatatgtctgtcccttggatagggtgaggctgaagcaccagggagaaaatatgtgcttcttctcgccctacctcctttcccatcctagactgtccttgagccagggtctgtaaacctgacactttatatgtgttcacacatgtaagtacatacacacatgcgcctgcagcacatgcttctgtctcctcctcctcccacccctttagctgctgttgcctcccttctcaagctggtgcttggatcctttc

SEQ ID NO: 241535 - DNA, 800 bp, Homo Sapiens
ttggcacagaaggctggcgtagcaggtaaagatggcagctaccatgttccgggctacgctgcggggatggagaaccggtgtccagcggggctgcgggctacggctgttgagccagacccagggccctccagattaccccaggtttgtggagtctgtggatgaatatcagtttgtggagcgcctgttaccggctaccaggatcccagatcccccaaagcatgaacattatcctacccctagtggctggcagcctcccagagaccccccacccaacctgccttactttgtacgacgctctcggatgcacaacatccccgtctacaaggacatcacgcatggcaaccggcagatgactgtgatccggaaagtggaaggggacatctgggccctgcagaaagacgtggaagattttctgagcccgctgctggggaagacacctgtcacccaggtcaatgaggtgacaggtaccctacggatcaagggctactttgaccaggagcttaaagcctggctcttggagaaaggcttctgaggcccagccgagcagcctgcttgtcagcatgccctgtggatcaagtctagggggcctcaggaggagggaggtgggtgttggagcccctgagacaggggatacagaaactagggctaaaggactttggggtcaggccttgcttgcataaaggagaaaacaactctatgtacatgctgggggagagtgcctaatgtgggagaccaaatagggatcaccaggctaatggggggcgtcagcagctttctctccctcctatcttggcctgttc

SEQ ID NO: 241536 - DNA, 1944 bp, Homo Sapiens
  misc_feature (1101)..(1111): n is a, c, g, or t
gtcatgttttaatcatctactaacattgttcataaggtcaggaagagataggacagaaagtgagcaggaaggttctgtctgtattgtaggcagtgactgtctgctctccccagcaactaaactgctcagaagccacactccccatgacctccttcttcatcctttcttctgtctccttttctctttatgatctgcttcccctctgtcatgagtcttcaaaatggagccagcactgggaaggcataggagaggagcaaaggagcaggactagaaacaaacatatatggctaatcgagttactataaagaaatggtaaccgtattggacaaaggtctgcagatgaaggaaactaattctttttcaggagttttccaaaagtgcccaattcacaccaaaattttggaaaatctcatacaatgtgggaaaagtatacagaacccttgcagaagactccatttcctaaactattttgcattaatatcaacgttacaaacgcaataccataggatttcagagcctatcttcacacaaataagatctgaccaaaattgcattgcttagcttaaaaaatactacacaatgtataatttcaagtcttaggttctcagctactaccaaaatatgtcaatatatgaataaactgccttgtgaaaaacatgcagtaaaaggtagatgcaaataagccatccctttagggtagacactatattaaaatttcttgtcatattataaaaccattctacaaaagtaacaccttcttgaaatttcattttgtaatgaagaaaataaatctgtatcattttatttaacattcattctttaagttacagttaacacaatctgcttctaatccaagaaatcctagtataatctgaaatacatgcatatacatttagtaagacctacatttctaaataaattacatgcatgatatacaataaagaatactaatatgaaaattcaggacatttatttttctgcatggaaatttaactactgtataacacacgcacatacaaaacaaacccacaaagcaacagtgtgtaataggtagtgagagacacacaaaataagcatatttaaaacgcctacaaacagccnnnnnnnnnnnaggcaacaaaatacgtccagtccttgacatcttctcatactcacctagcaccacagatgcaaggacctaacagtaaacatgtacaatctcatgcttaacacctaaagcatgcactgaattgaatttgtatgttgtgatctattctactaagtatgcaatacatactttttcttactaatattttatacattaaattaccctgcagcattttgaaattttaacattgatgtaaaacaacttttgaaagatttatgaaacaagtttcgaggttcaccttcaggctggtttggttaagtggaaaaatggcagcagcctcaaggttcatactgaatgaaaatggtgttgtgtgcatgtcaacccatgtaaaaaatacctatatacaagatggcacaaagatttgtgcagttggaatcaccagtgcaaatgcatgcatttgaggtacttatttttttcatggtcaggtataattatgcatagtcattttccttaagtgctaaagatttcagacctgatcaaatgaaaagctgtaagtgtaaatatgagctatttatatagttaatttcaaagtgctatgcttttaatgaacatatgtttaacattatagatttatatatttagtttaaaatatttatattactaaccaataaattttctcactataaagagactgactggcaattatacctggccaagtaatttaaatagcatacttgcaagaactgtagtgaaagagttaaatacttcattattgcttcattgaactgagaagcccaaaaggcatagatcaacaatgctcagtgatgaaaaatgaatacccagaacagcggtgccaa

SEQ ID NO: 241537 - DNA, 1599 bp, Homo Sapiens
  misc_feature (597)..(619): n is a, c, g, or t
  misc_feature (1089)..(1097): n is a, c, g, or t
ttgggtaattaagctatgtctctttcttcttagtttagaggctctgctactttatccattgatttttaacatggttcccaccatgtaagactggtgctttagcatctatgccacatgcgttgatggaaggtcatagcacccactcacttagatgctaaaggtgattctagttaatctgggattagggtcaggaaaatgatagcaagacacattgaaagctctctttatactcaaaagagatatccattgaaaagggatgtctagagggatttaaacagctcctttggcacgtgcctctctgaatccagcctgccattccatcaaatggagcaggagaggtgggaggagcttctaaagaggtgactggtattttgtagcattccttgtcaagttctcctttgcagaatacctgtctccacattcctagagaggagccaagttctagtagtttcagttctaggctttccttcaagaacagtcagatcacaaagtgtctttggaaattaagggatattaaattttaagtgatttttggatggttattgatatctttgtagtagctttttttaaaagactaccaaaatgtatggttgtccnnnnnnnnnnnnnnnnnnnnnnnaattatttctcttagcagatcagcaatccctctagggacctaaatactaggtcagctttggcgacactgtgtcttctcacataaccacctgtagcaagatggatcataaatgagaagtgtttgcctattgatttaaagcttattggaatcatgtctcttgtctcttcgtcttttctttgcttttcttctaacttttccctctagcctctcctcgccacaatttgctgcttactgctggtgttaatatttgtgtgggatgaattcttatcaggacaaccacttctcgaactgtaataatgaagataataatatctttattctttatcccccttcaaagaaattacctttgtgtcaaatgccgctttgttgagcccttaaaataccacctcctcatgtgtaaattgacacaatcactaatctggtaatttaaacaattgagatagcaaaagtgtttaacagactaggataannnnnnnnncatatttgccaaaatttttgtaaaccctgtcttgtcaaataagtgtataatattgtattattaatttatttttactttctataccatttcaaaacacattacactaagggggaaccaagactagtttcttcagggcagtggacgtagtagtttgtaaaaacgttttctatgacgcataagctagcatgcctatgatttatttccttcatgaatttgtcactggatcagcagctgtggaaataaagcttgtgagccctctgctggccacagtgaggaaagtagcacaaataggatacagttgtatgtagtcattggcaacaattgcatacaattttactaccaagagaagtatagtatggaaagtccaaatgacttccttgattggatgttaacagctgactggtgtgagacttgaggtttcatctagtccttcaaaactatatggttgcctagattctctctggaaactgactttgtcaaataaatagcagattgtagtgtc

SEQ ID NO: 241538 - DNA, 1378 bp, Homo Sapiens
  misc_feature (154)..(162): n is a, c, g, or t
ttttctctaatgatcaaaataccagaacagggctcacttggctgttttgaattgggaaagaaagagtgaaagcggggagaaagagaaaacacataacctctaggtaggtagtactgtttccaactgtctacgttccagtgcagaatctttgctnnnnnnnnntttggcaatagtgtgcacaggaaaactgaatcaaacctggaacatcactgctttcttgaaatggaactgacaagcaattaactggagaataagtgaggggaatggagcagtagtattctttaacttaatttgccatttaagagagcacttggaatctgaagaaagtctatccctaccaaggaaacggagtcaaattgcaattaagattaactttggttatatggaagcaagaatcatgcttctcatcatcaattgcgtctctttggtagccaataattccatctgtaatcatggcagcaacttaagtattgccaatgttttcaaatgtgttacagcattaaggcatccacatctaaagaggcagttttaaacaagaggaaaacggaactgaaatgtgccaagaagtgaacacggacatggcctctcctggaatactgcccaccatgccagcaagctcttcctccagtcaagaaggcctgtgccacgctgcttggttccctgctgcctgaagatgcatttgagccctatgagattagtatggctatttctgtctgctgaccaggagagaaatgagtagttctcgaggcagcagctttaaaatctgggaaagcccatacatagcttctgagagctaagagggccctgaaaggtttgcttgttaatagtgaggtccagaggggaaggcaaatttggaagtcagatggttcaatccttgccggagttcaaggctccatccagcaagatatactagccaaacttttaagcatgatggcaaggcactgctgaaagaggctttggccagtagaacaaattaccattgcacacaacaatatgatagaaagcactactgtccaaaccaaaccagacactacaatctgctatttatttgacaaagtcagtttccagagagaatctaggcaaccatatagttttgaaggactagatgaaacctcaagtctcacaccagtcagctgttaacatccaatcaaggaagtcatttggactttccatactataccttctcttggtagtaaaattgtatgcaattgttgccaatgactacatacaactgtatcctatttgtgctactttcctcactgtggccagcagagggctcacaagctttatttccacagctgctgatccagtgacaaattcatgaaggaaataaatcataggcatgggtagcttatgcgccaacttttttgtacaaagt

SEQ ID NO: 241539 - DNA, 1497 bp, Homo Sapiens
actttgtacaaaaaagttggacattgcagtgcttagcgaatgccacagacggcgtgcggctagcagcccgcatcgtggacacaccctgcaatgagatgaacaccgacaccttcctcgaggagattaacaaagttggaaaggagctggggatcatcccaaccatcatccgggatgaggaactgaagacgagaggatttggaggaatctatggggttggcaaagccgccctgcatcccccagccctggccgtcctcagccacaccccagatggagccacgcagaccatcgcctgggtgggcaaaggcatcgtctatgacactggaggcctcagcatcaaagggaagactaccatgccggggatgaagcgagactgcgggggtgctgcggccgtcctgggggccttcagagccgcaatcaagcagggtttcaaagacaacctccacgctgtgttctgcttggctgagaactcggtggggcccaatgcgacaaggccagatgacatccacctgctgtactcagggaagacggtggaaatcaacaacacggatgccgagggcaggctggtgctggcagatggcgtgtcctatgcttgcaaggacctgggggccgacatcatcctggacatggccaccctgaccggggctcagggcattgccacagggaagtaccacgccgcggtgctcaccaacagcgctgagtgggaggccgcctgtgtgaaggcgggcaggaagtgtggggacctggtgcacccgctggtctactgccccgagctgcacttcagcgagttcacctcagctgtggcggacatgaagaactcagtggcggaccgagacaacagccccagctcctgtgctggcctcttcatcgcctcacacatcggcttcgactggccggagtctgggtccacctggacattgctgcaccggtgcatgctggtgagcgagccacaggcttcggtgtggccctcctgctggcgctcttcggccgtgcctctgaggaccctctgctgaacctggtgtccccactgggctgtgaggtggatgtcgaggagggggacctggggagggactccaagagacgcaggcttgtgtgagcctcctgcctcggccctgacaaacggggatcttttacctcactttgcactgattaattttaagcaattgaaagattgcccttcatatgggttttggtttgtctttctggtcgtcagcgtggtggtggaaacagctgaagttttaggagacagcttagggtttggtgcgggccacggggaggggaccgggaagcgctggggcttgtttctgtttgttacttacaggactgagacatcttctgtaaactgctacccctggggccttctgcaccccggggtgaggcctcctgcctgcctggtgccctgtcccagccccaggtcctgtgcagggcacctgcgtggctgacagccaggctcttactccatccggggctgccagcgcatcccagccagcccagccctgt

SEQ ID NO: 241540 - DNA, 626 bp, Homo Sapiens
tccaagggctggaactttattattgtcacagagcacaggagagaccgcttgggtctcaatgaaggtttgcttttcctcttctccaggggaagctactgcaagaaggcccaccagccaggttaggtcaaatggggttggggccacaacatgatagttaaacccataaacacagacttgattcgatcccagcttcacgacttcttagctgtgtgaccttaggtaagtctgttaacctctctcagccttggctttgtggagtggagtgaagagcagggcctgcttcactggggtgttatcaggatggagggggacaaggcctatgaaagtgtttagcacagcgcctggcagatcgtgaccagtcacggagtggaagctatcatgatcaaatctgatttctccacggtcaggccagccctgtcactacggatgaggaagagggggtctcatttcataaatgccttcaatgcggcctgtgagaaagacagcttgggacacctgtgtgagctgcctagtctctggcaatgtgggagtcggacccaaacatgagggttctggggccttggcacttactaccatttctacatctccatgaaaagccctagcaagccaacttttttgtacaaagt

SEQ ID NO: 241541 - DNA, 621 bp, Homo Sapiens
caagggctggaactttattattgtcacagagcacaggagagaccgcttgggtctcaatgaaggtttgcttttcctcttctccaggggaagctactgcaagaaggcccaccagccaggctaggtcaaatggggttggggccacaacatgatagttaaacccataaacacagacttgattcgatcccagcttcacgacttttagctgtgtgaccttaggtaagtctgttaacctctttcagccttggctttgtggagtggagtgagagcagggcctgcttcactggggtgttatcaggatggagggggacaaggcctatgaaagtgtttagcacagcgcctggcagatcgtgaccagtcacggagtggaagctatcatgatcaaatctgatttctccacggtcaggccagccctgtcactacggatgaggaagagggggtctcatttcataaatgccttcaatgcggcctgtgagaaagacagcttgggacacctgtgtgagctgcctagtctctggcaatgtgggagtcggacccaaacatgagggttctggggccttggcacttactaccatttctacatctccatgaaaagccctagcaagagtacggggaaagttctaa

SEQ ID NO: 241542 - DNA, 529 bp, Homo Sapiens
ttggcacatctgccagagcctggagtctgcgaaggccgggacccggttccccggcccacagtgggggtgtgcaaacccgagagaactggtcgctgaaacctctacaacttagttgaccgtaactgccagagccctgccctgaattcctgtccttactccctctttaagattgcgtacccactgcagagtgctgaagacggggtagccacgaggttgcaaattcgtgaagaatcagcatcatgtttggcagctgagtattggagccaggagcctgccatgaggttttgagaacagagtgctgttttagagctggcagcagcatctcagcccaagagaaggttatattcccagaggatgtcagtcccaaggaccagtagctgccatcagtttggattctgaaaactaactggcatcaacactgggtgtagaaacatgcttgccttatgtatcagaggacatgctcagcagatccaagagatatatttggcaactttttctagaaaaggcacattgggtatcattcattaca

SEQ ID NO: 241543 - DNA, 170 bp, Homo Sapiens
tgcattttacatcatgacccaatctccaccatacataaaagtatcaaaaataatatctcaccatgtctgttatttcactgtgagctttcttaacagtggtttagtccagtaaactgattttatggctgcatgcggtggctcacacctgtaccaacttttttgtacaaagt

SEQ ID NO: 241544 - DNA, 1433 bp, Homo Sapiens
  misc_feature (243)..(252): n is a, c, g, or t
  misc_feature (360)..(382): n is a, c, g, or t
  misc_feature (898)..(908): n is a, c, g, or t
  misc_feature (1186)..(1194): n is a, c, g, or t
ttggctaccaagacactttgtcacaatgctttagatgtgcagagtttaagtgccctagggtttgtttacaagctggaaggagaaaagaggcaagctgctgagtactatgagaaggcacaaaagatagatccagaaaatgcagaattcctgactgctctctgtgagctccgactttccatttaaatacatactctaggaaattagctctaagtttttcccttcattttgggttctcctgtttgnnnnnnnnnnattattttaatcccttgtttattatagagctaatatttattgaatagttattgtgtaccaagcattgtgctaaatactttatatgcattatgatgaatcttgtgcggnnnnnnnnnnnnnnnnnnnnnnnaattaaaatactataatccattgagaaatagcaatattctagctattgtaacttctaaaaatggtatggccattagatctgtgctttttatctctgctctttgaatttctcatattatatagtaaatatattcctacgtaaacctttgatacctagatcaggaatactcttccaggagtacaaaattacattattgatagttaagctcttaattgtgtagcttgcaaaagacagcactttttagttacagatgttttgactttgatgaggatatttagctatcaatctaatagtcacctaaaatatcttttttgttggaaaaaagtttataataaaaaagtttgtcatctctagtgacttcaataaagaaaaaactagaagaggagaaaaaggatttcctcaaattttaaatatgtaacttcagggattcaatccccaaatgtttattaagtagctagaaataattatgtggaaaaaaatgaataatggaaaatagtgagtctcaaattgttctcnnnnnnnnnnnaactaaaacaaatctgcaatgaatctagatgcaattaattttattccttccaactaaaattacaatatttttaggttaaaattattgagatataaagcagccattgggaaattgggagaaatgataaacaaatggaaaaagaagatgtccctaacctacacccatagattaccaaggtttcagtgtactagttttgaatctgttctgaatggagtttttataccctcaatttctggcctttggctattttagcatttcaaagtgacttctatgaagcnnnnnnnnnaatgtgaaattttcagaatgttgtttttttcatgtagatactccaggaaagagttaaagcactgctttcagttttaatatccaccttgaggggtcgctgcttgagggctcttatcccaagggactttttaaatcggatgttacttaatgtggcttctctaatgtagtttctttgattaccgactacacaattatgtaccatcacagtattagtggaaaagtaccatgtgaatttatttc

SEQ ID NO: 241545 - DNA, 716 bp, Homo Sapiens
acaagggccattcaaggctttttaaaacctgatgtgtgttgttatactttataacagtcagtggcttttaattccaaaaggtaatactttatactctgcctacatgagatgagcccctaacagtgtgtacaaataaaattatgatttgggtattctaaggagacataccatttacagaaatttcttttgataaaattaaggtttcacttttcacatttgcttaaatcacagtaagcctgtaaactagctccttgacccaccatttaaaaacaaaaaacctccttaacaatgcaaaggattgtattcactgtatttatgattccatcaaaggctaaatagcttatctaaaatacatctgagtgatctattcccttaccctctccccgacctaccccacagttatactaatatgcaccaacaataaaaacaagttatctactattaacactagtaatcatttgatttagttccagttacagaaacaaaaaaaatctttgaattttgattatattttctgggaaccacatctactattaatttatctccattgcccttaataatatatttcagagaaaatgtttctttagatttacgcttcaactaaagttcctgatcaggaggtcaaaaatagctagttattgagttttttcccctgtcaaaagctatttttcctgatttttctctaatggagataaaagccaacttttttgtacaaa

SEQ ID NO: 241546 - DNA, 1068 bp, Homo Sapiens
ttgggagcccagggcctcaagttctaaggagtcaccgagtccatctgtgcgggagcagctggcactgctggaggcacggaaactgcagtatcagcgggcagccctgcaggccaagcgcagccaggacctggagcaggccaaagcctatctgcgggtagccaaatggcttgaggctcagatcatccaggcccgatctggcagacctgttgatctgtccaaggtgccttcgcccttgacggatgaggagggtgacttcatcctcatccaccatgaggacctgcgactctcccagaaggcggaggaggtgtatgcccagctgcaaaaaatgcttctggagcaacaagagaagtgcctgctgttctccaagcagttcatgcaccagggcaacgtggctgagaccacccgatttgagaagcttgctcaggaccgcaagaaacagctggagatcctgcagctggcccaggctcagggcctcgaccctcccacccaccactttgagttgaagacattccagactgtgaggatcttctcagaactcaacagcacagaaatgcatctgatcattgtccggggaatgaacctcccagcccctccaggggtgactcccgatgacctggatgcttttgtgcggtttgagtttcactaccctaactcggaccaggctcaaaaaagcaaaacagctgtggtgaagaacacaaactctccagaatttgatcaactcttcaaactaaacatcaaccgaaaccaccggggcctcaagagggtgatccagagcaaaggcatcaagtttgagatcttccacaaagggtccttcttcagaagcgacaagctggttggcacagcacacctgaaactggagcggctggagaatgagtgtgagatcagagaaattgtggaggtccctggatggaaggaagcccaccggggggaagctggaggtgaaggtgaggctgcgggagcctctgagtggccaggatgtgcagatggtcactgagaactggctggttctggagcccaggggcttgtgagccgatggccagccaccagggagaggagtcaggccgcgac

SEQ ID NO: 241547 - DNA, 950 bp, Homo Sapiens
ctttgtacaaaaaagttgggtatctcaaatctttgaaaagctgctaataatggagtccagatgatgacttttgatagtgaagttgagttgatgaaagttgccagagcacatcccaaagcaaagttggttttgcggattgccactgatgattccaaagcagtctgtcgtctcagtgtgaaattcggtgccacgctcagaaccagcaggctccttttggaacgggcgaaagagctaaatatcgatgttgttggtgtcagcttccatgtaggaagcggctgtaccgatcctgagaccttcgtgcaggcaatctctgatgcccgctgtgtttttgacatgggggctgaggttggtttcagcatgtatctgcttgatattggcggtggctttcctggatctgaggatgtgaaacttaaatttgaagagatcaccggcgtaatcaacccagcgttggacaaatactttccgtcagactctggagtgagaatcatagctgagcccggcagatactatgttgcatcagctttcacgcttgcagttaatatcattgccaagaaaattgtattaaaggaacagacgggctctgatgacgaagatgagtcgagtgagcagacctttatgtattatgtgaatgatggcgtctatggatcatttaattgcatactctatgaccacgcacatgtaaagccccttctgcaaaagagacctaaaccagatgagaagtattattcatccagcatatggggaccaacatgtgatggcctcgatcggattgttgagcgctgtgacctgcctgaaatgcatgtgggtgattggatgctctttgaaaacatgggcgcttacactgttgctgctgcctctacgttcaatggcttccagaggccgacgatctactatgtgatgtcagggcctgcgtggcaactcatgcagcaattccagaaccccgacttccc

SEQ ID NO: 241548 - DNA, 1165 bp, Homo Sapiens
acaaaaaagttggctgacttagaccttggtgtcatctcagcaacctactaccaactgccagtcatcatgtactgaaggcgaagttacaacctgaggaaaattaggaaaaaagagctcaactaaatgaaattcatcaatctctgttattttgtcattaattatcttcttagacttaaaattgaacttgagataaataaggaagaattgagtagatttgatttgcctggagtcttttggaggcatgagaattttctaatcttgacattttgtttgcctgttctagacaggccctgtggggtcttgacccttcagtaagttaagataaatttttaaaagaaccgtagcaaagatggaacctttgtaatttatgttgattttaataaaatcataatttaaaaaatgaaatgggaagattgtcaggaaattaggatagctactctagtataatttagaaaaactaagcaagagattctccagttgctagtgagtaagcactctgatttgagaaatgtgtggggacaatggagaaaagttttcagaaaactgctatgtagatttctgaatgtgttgtattttgctgaggaattcggtaacaactgaaagggaaaagtgcttcagccatcttttgaaaacaagttaaaattctggaacttgtatctgtaatacatcctaactcttgtaaaagaaaataatttatcatagctggtgtcctttcattgaaagttgtaatactgtctctaaggagggaggaaaagattattatataattttataactggcaacatttgagttagtattgactttgtctaaaagaggcttgacttcaactgggataaaaatgtcagtgaattttgttaaagtagtaaaaatgcagttgacttagtaggaacataaaattatttcctaataagataatattgcactcctaccaaataaacaggattttagtaatatctgaaggattgttgatggtgagttagactgtatttggcatagaatttggaaatgtaacttgaatgtaaatatgctgcaaaatgttgaatgtatacatagaaagactttttctgtcgacgccaaatgcccgttgtaaatgaaccttaatattacattcctcctttgcacaataatatttctttataacacttatgattttttccccaggaca

SEQ ID NO: 241549 - DNA, 1591 bp, Homo Sapiens
ctttgtacaaaaaagttggggtgactcgtccacactgctcgcttcggatactccaggcgtctcccgttgcggccgctccctgccttagaggccagccttggacacttgctgcccctttccagcccggattctgggatccttccctctgagccaacatctgggtcctgccttcgacaccaccccaaggcttcctaccttgcgtgcctggagtctgccccaggggcccttgtcctgggccatggcccagaagggggtcctggggcctgggcagctgggggctgtggccattctgctctatcttggattactccggtcggggacaggagcggaaggggcagaagctccctgcggtgtggccccccaagcacgcatcacaggtggcagcagtgcagtcgccggtcagtggccctggcaggtcagcatcacctatgaaggcgtccatgtgtgtggtggctctctcgtgtctgagcagtgggtgctgtcagctgctcactgcttccccagcgagcaccacaaggaagcctatgaggtcaagctgggggcccaccagctagactcctactccgaggacgccaaggtcagcaccctgaaggacatcatcccccaccccagctacctccaggagggctcccagggcgacattgcactcctccaactcagcagacccatcaccttctcccgctacatccggcccatctgcctccctgcagccaacgcctccttccccaacggcctccactgcactgtcactggctggggtcatgtggccccctcagtgagcctcctgacgcccaagccactgcagcaactcgaggtgcctctgatcagtcgtgagacgtgtaactgcctgtacaacatcgacgccaagcctgaggagccgcactttgtccaagaggacatggtgtgtgctggctatgtggaggggggcaaggacgcctgccagggtgactctgggggcccactctcctgccctgtggagggtctctggtacctgacgggcattgtgagctggggagatgcctgtggggcccgcaacaggcctggtgtgtacactctggcctccagctatgcctcctggatccaaagcaaggtgacagaactccagcctcgtgtggtgccccaaacccaggagtcccagcccgacagcaacctctgtggcagccacctggccttcagctctgccccagcccagggcttgctgaggcccatccttttcctgcctctgggcctggctctgggcctcctctccccatggctcagcgagcactgagctggccctacttccaggatggatgcatcacactcaaggacaggagcctggtccttccctgatggcctttggacccagggcctgacttgagccactccttccttcaggactctgcgggaggctggggccccatcttgatctttgagcccattcttctgggtgtgctttttgggaccatcactgagagtcaggagttttactgcctgtagcaatgggccagagcctctggcccctcacccaccatgggaccagcccatttggccgagctcctgggggagctcctggggaccccttggctatgaaaatgagccctggctccca

SEQ ID NO: 241550 - DNA, 1836 bp, Homo Sapiens
  misc_feature (358)..(367): n is a, c, g, or t
  misc_feature (1693)..(1703): n is a, c, g, or t
gccacctagagatgataatttattgtttttaccatgactcagaagagaaacaacataaagagaatatttcaaatccccacaatttccttcctcaacctcactactcttaacatttctttatcagacgccactggcttcctcaaatggaccactgactatgtatgtgtacacatttcattatgctgccttttctcttatgattaaaactttagccctcattcgaggtttccaatggttacttttagtggaggagttccctagcttttaaaaaaccacttttcctctaagattccattatttattgaaagaagtctttctagaaatgttaaggaggattttaaatgaacacattcaattnnnnnnnnnntcacgtattgaacatctaccaagcatctggactcttcggaacctagtaaaatgaaaaaatccagttttaacaacagtaacttcattctgcgggtatacagagacaagcacgtttcttcttttggtctaatttattctaaacgaagaagctgggaactgacaaaacaggacaggttgtttttaatccagtctacaaataaacaagacaatgcctgagttagccctctatatagatttaggcttatgctgacctcgttgtaaaatctgtatttaactaaaagttaataaaaatacatatgttcattttaaaataattactgattttgcttggctatcccaccccttacccccaaactcatatatttttaggacaagattttcctgcataaccacaacctgtctcctcccaccccacccccatcatagatgttttcaaataagaacccctgcgatcagcagaagcatctctaatctaacatgctttgtccttgctagggcaggctaaaagctttaaaaagcaaccggatgctcttctctggttgaggtgaggggaaggcgctcgggtaccaaccccagcacaccccaacagcctttcctcggcccctcctcaggcctcctaattactctttctcagcctggagtgtggggccgttaccgtcctcttcccccttctccttccatactgcacttaaccttgctggaagacttaatgatggagatttagggcaactgtggctgcttggacccttccctggaccaaaggaacttaaaacccaaacctgacactggaatgaaatccaagtttttaaatatcacctttcaatcactcacagatctcactctatcttaaaatactcagcctcactccttaatgagtgcttgctgaagggagaaaattccattttaaaaacgtattcactttactgattactgtgcaatttgaattaagtcacgattctttagtaaatggaggtgagaatctcagattcaaattgtcagagaccatgatttagaagtctaccaaacacccagtttccttccactgttttagggtaacaggaaaacatgagattggggtggtgtccgctattaaatggaaccacacatcatgaaattcaattctcatgttaagacattctgtattgtgggatgtcaaaagtatttcccaaactttcgtttgacctgcagagttggagatggcttacctccctataacttcaagtttgtttcacaaagctttgaaaagtaaaacagataatttcattttcagataataaaaaatctgaatagcaaaataattgcttttaaatgtagtgtgtccactctnnnnnnnnnnnccctaaatctatgttagaaaaacttttcaaataatgccttttattaaattctccagtagtagttgaaataaaaatctaccctaatttctatgaaatgatctatttatatcactgacttttctttttctcccaa

SEQ ID NO: 241551 - DNA, 720 bp, Homo Sapiens
  misc_feature (67)..(78): n is a, c, g, or t
attttcagataataaaaaatctgaatagcaaaataaattgctttttaaatgtagtgtgtccactctnnnnnnnnnnnnccctaaatctatgttagaaaaacttttcaaataatgccttttattaaattctccagtagtagttgaaataaaaatctaccctaatttctatgaaatgatctatttatatcactgacttttctttttctctgattctatatttcatttaacaatctgcagactttcaccccatttcccagatgggaaaaccctagccccctcgtatctctgagaagttgctcagagtaggacacagagaaatatggcccccaccctgggaagtactgctgtcactgtttaagtgtatttcagttctgttactccaattcatacacacagtcttccatgaggatggtaggatgaacctggttagctggctttggataagtagatcagcatgactacctggaataaaagtgactgactctaggataaaaattaaaaaaagattctttcacagcaacgagtctttgcaaaacctctctcctaataatcacaaaccaggggaagaaaagtgggagcagggaacacaggaacacagccaaagggaatattgcaaaatgcttcccgagcttcatcagacagacttcttgcaatgccacgactggatgcatctgcacacaattccgggaaatgcccaccttgctgttctcctatccccaa

SEQ ID NO: 241552 - DNA, 882 bp, Homo Sapiens
ttggctttgctcagccagcctattcttttggaattggaagcaccgctgaaaatttgtggagatattcatggacagtatacagatttactgagattatttgaatatggaggtttcccaccagaagccaactatcttttcttaggagattatgtggacagaggaaagcagtctttggaaaccatttgtttgctattggcttataaaatcaaatatccagagaacttctttctcttaagaggaaaccatgagtgtgctagcatcaatcgcatttatggattctatgatgaatgcaaacgaagatttaatattaaattgtggaagaccttcactgattgttttaactgtctgcctatagcagccattgtggatgagaagatcttctgttgtcatggaggattgtcaccagacctgcaatctatggagcagattcggagaattatgagacctactgatgtccctgatacaggtttgctctgtgatttgctatggtctgatccagataaggatgtgcaaggctggggagaaaatgatcgtggtgtttcctttacttttggagctgatgtagtcagtaaatttctgaatcgtcatgatttagatttgatttgtcgagctcatcaggtggtggaagatggatatgaattttttgctaaacgacagttggtaaccttattttcagccccaaattactgtggcgagtttgataatgctggtggaatgatgagtgtggatgaaactttgatgtgttcatttcagatattgaaaccatctgaaaagaaagctaaataccagtatggtggactgaattctggacgtcctgtcactccacctcgaacagctaatccgccgaagaaaacgtgaagaaaggaattctgtaaagaaacc

SEQ ID NO: 241553 - DNA, 847 bp, Homo Sapiens
ggtacatttcaaatatattttattactttccatcttagaaagaatatgaaacctgcatgcaatgctaatggtttctgacatgtacatagcatataacacagcagtacaatgcggcatatactggggggcagtgtgtggagggggcgttcttaagggtatatgtacagaggaaagggcgcatggtcatcttagctttcgaaagaggactgcactgtttaacattgaagaattacatggggaatcacaaatatattgctttagtactgcatgttctgttgtggtgagggaaagaaacatgctttgaaggttttcccttgtcaacagaatgtgtgtctgtagctgtgtattgcgcatgtattcatatatttttaagttttctcctaaggtttttgctgacagtgttgggaacctcacatgcttctgaagcattaaatattgaacctgtgaacctttcagaaatcctcaggttgggaaagaccccacaccttctttaaggatcatttgtctcgccatcacaggatcttggaaatgtttcctagggtgtgtaaaaattaaccaggggggaatgaagcacatttttctggcaaccaaacttgagttcctcagagaacagatgcagagagacctgctcctgcttgcccggctacaggggccactgtggagtcacactgaggctgtgaccggccataagcccaggagagcccgtggcagctgtgccgaggcgccaggacctctaagcggaagcttcccaagctaggaatggagcaacactgcaatgaaatgtgtccaccaagctcattgttcctcccgggcgggtataaagctcaccaacttttttgtacaaagt

SEQ ID NO: 241554 - DNA, 1926 bp, Homo Sapiens
  misc_feature (1099)..(1108): n is a, c, g, or t
  misc_feature (1690)..(1698): n is a, c, g, or t
ttggcctactatgattcacaagatgatgtttgcaaagggagcaaaggaagcataaagatggcagtttgtgaaattaaaggtgacaactttggaggggaccacccttgattggatgcataaattctgttcattcagcagacaacacaagaatggaattaatcattcctggagagcagcatttctacatgaaggcagtgaatgcagctgaaagacagaggtggctggtcgctctggggagctccaaagcatgtttgactgatacaaggactaaaaaagaaaaagaaataagtgaaaccagtgaatcgctgaaaaccaaaatgtctgaacttcgcctctactgtgacctcttaatgcagcaagttcatacgatacaggaatttgttcaccatgatgagaatcattcatctcctagtgcagagaacatgaatgaagcctcttctctgcttagtgccacgtgtaacacattcatcacaacgcttgaggaatgtgtgaagatagccaatgccaagtttaaacctgagatgtttcaactgcaccatccggatcccttagtttctcctgtgtcaccttctcctgttcaaatgatgaagcgttctgtcagccaccctggttcttgcagttcagagaggagtagccactctataaaagaaccagtatctacacttcaccgactctcccagcgacgccgaagaacctactcagatacagattcttgtagtgatattcctcttgaagacccagatagacctgttcactgttcaaaaaatacacttaatggagatttggcatcagcaaccattcctgaagaaagcagacttatggccaaaaaacaatctgaatcagaagatactcttccatccttctcttcctgaagaaactgaagtgtccaacttcctctaagtattgctatgcaaaagctgctgtaattaaactattgttatagggagtagttttttcccttaggactctgcactttatagaatgttgtaaaacagacaaacaagaaaacaaaccacatacttttgaagtgtattttatctttatatagtttgtttgcaagagtattttcctaataacttcacagtatgaatgtgcatcnnnnnnnnnngaacaaatgatggtgtaacattttgacatccataaggacaaatgtagatatttttcttaaaaactctgacgggactgacagcatggtcacggtgtattgtagcttataaacatgaaatcttataacgtttccgtttgacagaagtgtgatatatgtaacttgtgccatggaccaaatggtcactttaccacagctaaaaatgagttacgatagcagcttgatggtgattgtattgtattcctttaatcaaaaaggaaacacaatattctaagtatctttagcccaaataccatgacatattgagcatctttaaataaccagactgtattgtccttcatatgtgaagttgacactactgatttgtcaataccaaattttgggttaaagtgtttaatttttatgtatttattttcttgttgcctcaaaagatgattgcattctaacttttgtgacctaccaaatttaagatgtgtatacgttgttctttacgttgttctagaaaagagattttaatgctgtagtgactttgctcacttacactagagaaataaacaactttcaatggaagagaattttagtgcnnnnnnnnncctaaaatagatattaagctgctgttgtaaagtattgtttgcagctctttccaatatctagagacatttttatttatgaatatttatacaaaaaggaattctgtcaagatgactgctctatatcacttgagaatggcattatttaattaaagaacaaatagcattttttggtactgcctgtccatacctattgtcattgtttgccttgtaatctgtttttttgaattc

SEQ ID NO: 241555 - DNA, 602 bp, Homo Sapiens
  misc_feature (227)..(237): n is a, c, g, or t
cacatggttctctatatagtgatgctcagtggaaaacatctgtaaaccagcttactgtagtggtgacagctgcaacacatgctaaggcacttttattatataaaaaagggggtagaaaaaggagtttcactcactcctttgtgacagcaactggaacaagaattcagagctttgtaggcatatgcagcttttatatcacttcatgatttgagagtttgtttcctttnnnnnnnnnnntgccttcttgccgtaagtctcaatgcagcatatacaaaacagttaggaatacaagtaaattcggcaaccagtgtagaccagtgaggacgagctactctcttctaaacaaaggcagtgagaaagactcggaattttatcatttattacaagaaaggggaaaaaagaaaaccttattttgctttcaaaaatacctgtgcaggtggcagatttttaaactatactgagtcaacggtgcaggtaaaccaccctcgggcccagtcctagagtagacacaagatcgcctgggagggccgctggcccctctaacgctctggctgtcagacttgggacaagtccgttaaccattaaatccaacttttttgtac

SEQ ID NO: 241556 - DNA, 659 bp, Homo Sapiens
  misc_feature (217)..(229): n is a, c, g, or t
ctctttattgtgatgctcagtggaaaacatctgtaaaccagcttactgtagtggtgacagctgcaacacatgctaaggcacttttattatataaaaaagggggtagggtgggagtttcactcactcctttgtgacagcaactgggacctgaattcagagctttgtaggcatatgcagcttttatatcacttcatgatttgagagtttgtttcctttnnnnnnnnnnnnntgccttcttgccgtaagtctcaatgcagcatatacaaaacagttaggaatacaagtaaattcggcaaccagtgtagaccagtgaggacgagctactctcttctaaacaaaggcagtgagaaagactcggaattttatcatttattacaagaaaggggaaaaaagaaaaccttattttgctttcaaaaatacctgtgcaggtggcagatttttaaactatactgagtcaacggtgcaggtaaaccaccctcgggcccagtcctagagtagacacaagatcgcctgggagggccgctggcccctctaacgctctggctgtcagacttgggacaagtcccttaaccattaagtatatttggtccccaagagtgttgggagaagccactggaaggctgtttgcgtttccagcttgccaacttttttgtacaaag

SEQ ID NO: 241557 - DNA, 816 bp, Homo Sapiens
aaagaaagagagaagagtgtgttagagtcagaggcaacactttctaaatgagacgatgcatcccatccatcccactctctctcggggtcgagacagactcaatctccttaaagtcactcagcctctaatggttccaccactaaagtggcccagcaaatgaggcgtgcagcagcagtggtgggggaaagcacagaggagacaaggctgggacgtgctttaggggctgctggctttaccaacaaacagctgtcagagaacacagctcaaggggaggagaaaagggtgatgtgcttacagaactgaaaaatggaagagccacactgttccttgctctcctgaagtgaagttagtgctcaccctagccctacgtgcattctccagcatggagcccctggggcttggtaggaaggctcgtgtcagtgcacacagacataccagctaccttcaggacattgattgtctctgcagaggtagcactgggcagccaactgcaaacacagcagcctccctgctttcagcttctctccttccagtacatcctggagactactcctggattaatcttcctaagaactcagcattcattatgtcacttttctgttcgaaaacccaaaatggctccctgccacctagaggcagaccaagtcatcactgtatccccaaccgctagcacagtctgcatctggtacatagtacaggctccataaatatttgttcaattaatgctttattacaccatcaagtccaaatcccttagcaatgaaataaaagctgcccaacctaactgaccaacttacctcacaatattttttaaca

SEQ ID NO: 241558 - DNA, 425 bp, Homo Sapiens
ctttgtacaaaaaagttggcgttgcctccgctggcgctgctgctgcttctcgcggcgcttgtggccccagccacagccgccactgcctaccggccggactggaaccgtctgagcggcctaacccgcgcccgggtagagacctgcgggggatgacagctgaaccgcctaaaggaggtgaaggctttcgtcacgcaggacattccattctatcacaacctggtgatgaaacacctccctggggccgaccctgagctcgtgctgctgggccgccgctacgaggaactagagcgcatcccactcagtgaaatgacccgcgaagagatcaatgttctattgcaggagctcggcttctaccgcaaggcggcgccccacgcgcaggtgccccccgagtacgtgtgggcgcccgcgaagcccccagaggaaac

SEQ ID NO: 241559 - DNA, 1563 bp, Homo Sapiens
  misc_feature (438)..(740): n is a, c, g, or t
ccaactttgtacaaaaaagttgggccctcctccagggccggtgcctcccaaaacccccctctgagagagagccacagccccaggcttagccccaggccctgtcactgctgttgggggagggaggatgaaccatccgggagggctcacaccattccagagcagaaatcctgacacaaaaggaatctcccatgggggttcagctgggtccagagcccggaaagtgacataaacacgcaccttgcatctaaggagaatgcacgtggcggtaccgggcctgaggcccctggggagtatgtaccctccagagctacccagaggctgttggctaaaagttctatgtggccccctccttgggcagcctggtaagcaggtgaccttctagctgggtcccatgggccacgggcaaggcaggaatggaacgaagagtcagtcctcagnnnnnnnnnnnnnnnnnnnnnnnnnnnnnnnnnnnnnnnnnnnnnnnnnnnnnnnnnnnnnnnnnnnnnnnnnnnnnnnnnnnnnnnnnnnnnnnnnnnnnnnnnnnnnnnnnnnnnnnnnnnnnnnnnnnnnnnnnnnnnnnnnnnnnnnnnnnnnnnnnnnnnnnnnnnnnnnnnnnnnnnnnnnnnnnnnnnnnnnnnnnnnnnnnnnnnnnnnnnnnnnnnnnnnnnnnnnnnnnnnnnnnnnnnnnnnnnnnnnnnnnnnnnnnnnnnnnnnnnnnnnnnnnnnnnnnnnnnnnnnnngtcctcaggcagggtgggccaccctcttgaggccttgcccaaacagccagggggtcccttgtcctcttttcggcccacctttgcaggtgggaccagttcagtccaaagccccggtgcctcagtttccctgtgggttgaacaaggagaatgaggtgtatagggcctggctcagacggaggggtttcctgagcatggggagcctgtttcctcagacctgtgaagggaaggagggtggatcggcctgactggccctgggaagcacagaggagcctactgggaccagggaagagactgacaagagaagggaggcctgtccctgcctgcttctgtctcaagaagattgttatcacttcctctggtgaaatcctgccttcctgtccccacggcccctcagctgatgccaccttactctggagaggatgggcagagcctcctatggagggagccctgtgggtcaccaaagctccagtgaccacccccgggcaaagacctgcagatcccctgttagagacgggcccaggactttgtgcggggtgcccactgttgctctgagccttcacttcctcagggaggcttcctcaggatctcaaacctgcggaaggaggaccagtctgtgtacttctgccaagtccagctggacatacagatcaagtaggctgtcgtggcagtccatcaaggggacccacctcaccatcacccagggtgagtccagctgccctggcaccaagaaccttcctggttcagccatatgctcaagtgtgtggagggaatgacctgaggggctgtatgagggaacaacctcctggggctcccctatgcctga

SEQ ID NO: 241560 - DNA, 1436 bp, Homo Sapiens
  misc_feature (214)..(222): n is a, c, g, or t
ttggcaacaaaggaatatgatacagctcccaaagtacatgaattgttactgagagattggtgaacattactggagcactgagaactgcctcttaaggtcaggaaaactgttttccattcaacccaacctgcaggaggaaccaagccagagcagcagctgagagctgaaagagtgagacaagaggatgaaccaaaaagacaatgataatattacnnnnnnnnncatttcatgcatatttcccatgcagctgctgccttcctttgagattggtgcatggacggaagacgatgtgtattgttgggttcagcagctcgtcagaaaaggtgactcttcagcagagatgagtgtatatgcaagcttgtttaaagaaaacaacattacagggaagcggctgctgctgctggaggaagaagacctgaaagacatgggcattgtctccaaggggcatatcattcacttcaagtcagccattgagaaattaacccatgattacataaatttgtttcacttcccaccactaattaagggctcaggaggtgaacctgaagaaaatgaggaaaaaatagtgaacctggaactggtttttggttttcacttgaaaccaggaactggcccacaggattgtaagtggaaaatgtatatggagatggatggggatgaaattgcaataacctacataaaagatgtgacattcaacactaacctacctgatgcggagattttaaagatgacaaagccaccatttgtaatggagaagtggattgtaggaatagcaaaaagtcagactgtggagtgcactgtcacatatgagagtgatgttagaactccaaaaagcactaaacatgtccatttgattcagtggagtagaacaaaacctcaggatgaagtgaaagcagtccaacttgccattcagacattattcaccaattcagatggcaaccctggaagcaggtccgactcaagtgctgattgccagtggttagatactctgaggatgcggcagattgcatccaacacttctttacagcgttcccagagcaatcctattctggggtcaccgttcttctcacactttgatggccaggattcctacgctgctgctgtgagacggccccaggtgcccattaagtatcaacagattacacctgtgaaccagtccagaagctcgtctcctactcagtatggactgaccaaaaacttctcttccctacatctcaactctagggacagtggcttttccagtggcaatactgacacctcttcagagaggggtcgatactcagacagaagcaggaacaaatatggacgtggtagtatatcactcaattcttctcctagaggaagatacagtggaaagagtcagcattccactcctttcaagaggaagataccctggaaaagttctacagggtttctcagtcagcactcaattcctc

SEQ ID NO: 241561 - DNA, 1326 bp, Homo Sapiens
  misc_feature (129)..(159): n is a, c, g, or t
  misc_feature (166)..(214): n is a, c, g, or t
ctttgtacaaaaaagttggcgactgaagaaaacattaaagagaggcaaaaatattgttaaaaactagactctaaacaccccttcctgctgtgaggatagtgggtgtgacaatggaaggtccacagaggnnnnnnnnnnnnnnnnnnnnnnnnnnnnnnnaagaaannnnnnnnnnnnnnnnnnnnnnnnnnnnnnnnnnnnnnnnnnnnnnnnncacactgttattttggggcagtggggacacaggccccgtggacctgtcctgcctggcccccaaggccatacttaccccccaaaaggcgggccatggggtaactggaagctgggggccagcagtttgcacaggaggcctgtctgagccccacccgccaaacctgttgtgagcagctcctgtcactgaggctggctgaggtgtccggggtggggccaaagtagccccttggcttcgctgctttgggggacagttgcacaaattggacgagcggccccagctctctggctgccatcttgtgctggccgagtagacgggaggggccaagccgtgccaacctctctggctggcagggtggggcagcaggactctggctctggtgaggggcgtctcccactgctgccattttgggggacaccctgggtttgaacctgaaagccccagctctctgccttgccacgtgaatgtattctttgggccacaagcccccgcctcacccctgcctgagctgcctcacccctgtgagcggcgggggtggatgattgctccagaggctgcagagagaaggctgagctgtttctccagtgaagggggcaggaggaggggcctcaaaggcaaggagtgggtggctttgggcttagggttggagtagaggggctgccgcccggggccccaacctgtagccagctcgtaagatgtggaccacccagctctgcacctgacccttccgctgaccaaatgggagaggagcaggtggccttccgggtctgatatgatgcgctttttaccgttgggtaaggttggggtgaagagaagtgtgcggctcctgggtcagaggaggctgccccttctattgctcacccacttcttattcccggtcccctacttgggttcgtctccgcccattttgggttttgtaacagttttgtcttttgggtttctcatccagctcctcccattgacctcattgctcagagtgcagtattagggcaaggcttcgccactgcctccctccatgaatgtatttctccctcctgccctggggacatggggagtggcccgtttctttccccatctagtcccagaaagatggtgtttggttttctgttgttgga

SEQ ID NO: 241562 - DNA, 1334 bp, Homo Sapiens
actttgtacaaaaaagttggctcaggtcatgcgcggtccgcggggcccgcgcccggagctggcgccaggcccaggttagatctgcaatttctccagcggttcctgcagatactgaaggttttgtttccttcttggtcatcacaaaatgccttgatgttcctgacccttttgtgcctgaccctactggctgaagagctttgatcagttcacctgcaacctgctgtatgtgagctggaggaaggacctcactgagcaccttcaccgcctctacttccggggccgtgcgtactacaccctcaacgtgctgcgggatgacatcgataacccggaccagcgcatcagccaggacgtggagcgattctgccggcagctcagcagcatggccagcaagctcatcatctccccgttcaccctcgtctactacacttaccagtgcttccaaagcacaggctggctcgggcctgtgagcatcttcgggtatttcatcctggggaccgtggtgaacaaaactttgatgggccccattgtgatgaagctggtgcatcaggagaagctggagggagattttaggttcaagcacatgcagattcgggtgaatgcggagcctgctgctttctacagagctgggcatgtggagcacatgaggacagaccgcaggctgcagagactccttcagacccagagggagctgatgtccaaggagctctggctgtacatcggcatcaacacctttgactatctgggcagcatcctgagttacgttgtcatcgcaatccccattttcagcggggtctatggagacctgagtcccgcagagcttagcaccctggtcagcaagaatgcctttgtgtgcatctacctcatcagctgcttcacccagctcatcgacctgtccacgacgctctcagatgtggctggctacacgcacagaattgggcagcttcgggagacgcttctggacatgtccctgaagtcacaggactgcgagatcctgggcgagagcgagtggggcttggacacacccccagggtggccagcggcagagccagcagacacagcatttctccttgagcgggtctccatctctgccccctcctctgacaaacccctaatcaaggatctgagcctaaagatctccgagggacagagcctgctcatcacaggcaacacgggcactggctcagtgcagatgctgacggactttgggccccatggggtgctattcctgccacaaaagccattcttcactgacgggacccttcgggagcaggtgatatatcccctgaaggaggtctaccccgactcagttctgccgatgatgagaggatcttgag

SEQ ID NO: 241563 - DNA, 870 bp, Homo Sapiens
ttggctgggagcgagatgcgtgtagctagcacgatgcgtcgcgcggtgacgctctggcccgacgccgacggcctctcagtggctcccggaggacccggcgggcccagtgttggagagctgaaggtcaggccaggacagtgagacctgactccttgctcctaccagcctactatggcttaagacccagggccagggtcccgttgatgtaacagagcagaggaccagcagatgaatggacaccttgaagcagaggagcagcaggaccagaggccagaccaggagctgaccgggagctggggccacgggcctaggagcaccctggtcagggctaaggccatggccccgcccccaccgccactggctgccagcaccccgctcctccatggcgagtttggctcctacccagcccgaggcccacgctttgccctcacccttacatcgcaggccctgcacatacagcggctgcgccccaaacctgaagccaggccccggggtggcctggtcccgttggccgaggtctcaggctgctgcaccctgcgaagccgcagcccctcagactcagcggcctacttctgcatctacacctaccctcggggccggcgcggggcccggcgcagagccactcgcaccttccgggcagatggggccgccacctacgaagagaaccgtgccgaggcccagcgctgggccactgccctcacctgtctgctccgaggactgccactgcccggggatggggagatcacccctgacctgctacctcggccgccccggttgcttctattgggtcaatccctttgggggtcggggcctggcctgggcagtggtgtaagaaccacgtgcttcccatgatctctgaaggctgggctg

SEQ ID NO: 241564 - DNA, 1149 bp, Homo Sapiens
ttggggaaggctgtagtgtcggggccgaagcggacagggaattggaggagcttctggaaagatgccctcttcgcttcccaagagaagtttttccaggaactattcgacagtgaactggcttcccaagccactgcggagttcgagaaggcaatgaaggagttggctgaggaagaaccccacctggtggagcagttccaaaagctctcagaggctgcagggagagtgggcagtgatatgacctcccaacaagaattcacttcttgcctaaaggaaacactaagtggattagccaaaaatgccactgaccttcagaactccagcatgtcggaagaagagctgaccaaggccatggaggggctaggcatggacgaaggggatggggaagggaacatcctccccatcatgcagagtattatgcagaacctactctccaaggatgtgctgtacccatcactgaaggagatcacagaaaagtatccagaatggttgcagagtcatcgggaatctctacctccagagcagtttgaaaaatatcaggagcagcacagcgtcatgtgcaaaatatgtgagcagtttgaggcagagacccccacagacagtgaaaccactcaaaaggctcgttttgagatggtgctggatcttatgcagcagctacaagatttaggccatcctccaaaagagctggctggagagatgcctcctggcctcaactttgacctggatgccctcaatctttcgggcccaccaggtgccagtggtgaacagtgtctgatcatgtgaaacacaacacgttttcctctctgagtcccagctatggggaacatctggagtcagcagaaccattgggacctgaaggcaggagtgtcacctgcgggagaagtctgcccgctgccctctgtcatcccattcaagattgtgccataccagctgaggtttttcctctgtctctctaggaatagggtctgtttcacaggccatttctgtgaaccctactccattgtggtttctgccactatcaaagttccagctacctgcaaggtgaaggaaagcatcccttttggggcatgcactttctttcctttctcaaaataatgttatatgtggccacactgatgttcacctttacgtccaggggtctttgtgccttgt

SEQ ID NO: 241565 - DNA, 1325 bp, Homo Sapiens
ttggcacagtgaaggccctgactcgggaacaagagaagctccttgggcaactgaaagaagtacaagcagacaaggagcaaagtgaggctgagctccaagtggcacaacaggagaaccatcacttaaatttggacctgaaggaggcgaagagctggcaagaggagcagagtgctcaggctcagcgactgaaagacaaggtggcccagatgaaggacaccctaggccaggcccagcagcgggtggccgagctggagcccttgaaggagcagcttcgaggggcccaggagcttgcagcctcaagccagcagaaagccacccttcttggggaggagttggccagtgcagcagcagccagggaccgcaccatagccgaactacaccgcagccgcctggaagtggctgaagttaacggcaggctggctgagctcggtttgcacttgaaggaagaaaaatgccaatggagcaaggagcgggcagggctgctgcagagtgtggaggcagagaaggacaagatcctgaagctgagtgcagagatacttcgattggagaaggcagttcaggaggagaggacccaaaaccaagtgttcaagactgagctggcccgggagaaggattctagcctggtacagttgtcagaaagtaagcgggagctgacagagctgcggtcagccctgcgtgtgctccagaaggaaaaggagcagttacaggaggagaaacaggaattgctagagtacatgagaaagctagaggcccgcctggagaaggtggcagatgagaagtggaatgaggatgccaccacagaggatgaggaggccgctgtggggctgagctgcccggcagctctgacagactcagaggacgagtccccagaagacatgaggctcccaccctatggcctttgtgagcgtggagacccaggctcctctcctgctgggcctcgagaggcttctccccttgttgtcatcagccagccggctcccatttctcctcacctctctgggccagctgaggacagtagctctgactcggaggctgaagatgagaagtcagtcctgatggcagctgtgcagagtgggggtgaggaggccaacttactgcttcctgaactgggcagtgccttctatgacatggccagtggctttacagtgggtaccctgtcagaaaccagcactgggggccctgccacccccacatggaaggagtgtcctatctgtaaggagcgctttcctgctgagagtgacaaggatgccctggaggaccacatggatggacacttctttttcagcacccaggaccccttcacctttgagtgatcttactccctc

SEQ ID NO: 241566 - DNA, 820 bp, Homo Sapiens
ctttgtacaaaaaagttggataatcggggcggccggggctgaagggagaggcgcaggagccctggggagagtggtccctgcccttccgcgcctcgagccatcgctaccgcccttcggaaccagtgcagcggccgatcagtaaacacagagactggggatcgatcatggggctttgtaagtgccccaagagaaaggtgaccaacctgttctgcttcgaacatcgggtcaacgtctgcgagcactgcctggtagccaatcacgccaagtgcatcgtccagtcctacctgcaatggctccaagatagcgactacaaccccaattgccgcctgtgcaacatacccctggccagccgagagacgacccgccttgtctgctatgatctctttcactgggcctgcctcaatgaacgtgctgcccagctaccccgaaacacggcacctgccggctatcagtgccccagctgcaatggccccatcttccccccaaccaacctggctggccccgtggcctccgcactgagagagaagctggccacagtcaactgggcccgggcaggactgggcctccctctgatcgatgaggtggtgagcccagagcccgagcccctcaacacgtctgacttctctgactggtctagttttaatgccagcagtacccctggaccagaggaggtagacagcgcctctgctgccccagccttctacagccaggccccccggcccccagcttccccaggccggcccgagcagcacacagtgatccacatgggcaatcctgagcccttgactcacgcccctacgaaggtgtatgatacacggga

SEQ ID NO: 241567 - DNA, 561 bp, Homo Sapiens
  misc_feature (231)..(258): n is a, c, g, or t
atttgttggtttccttcctgtgaagacatgaggaagtgggcatttacataccaggaagagagctctcgccagaagttgaccatgctggcactctgatctcagacttccagcctcgagaaatgtgagaatataaatttgtttttaacctcatttatttaaaattaacaaatttgtaagccatttggtctgtggtattttgtgatagtggcctgagctcattaaggcagattnnnnnnnnnnnnnnnnnnnnnnnnnnnntgtgaagcagatttgaaactgacaaatgaggctggaaaaattctgatgtgcaagctggaagtaaggttggtaagggtgatcctggtgaggtgtcattggggaatgaggaacatgctattgggaaataaagaaaatacaacccttgatacgaagtagtgaagaacttggcagaactgtattctagcactttgcggaaggtagagcttgagagagataaaactggttatgtatcactaagatctgtacttaaagtgttaaaggacacaggaagcttcattcttcctgagtgcttacaggaaaatg

SEQ ID NO: 241568 - DNA, 667 bp, Homo Sapiens
gtatttcagagaattcagcatagtataaagacaaatacaaaagatgctggggatacaaccgctagcttctcccctcccacacacagtggattttactgtaactgactagagttactctggtgccaactaagttccgagccaagtctaccgccaccactggaagctgtggctatttctgtggactgacgttacactgggcttcattgttctttcatttaacaaatgtgacagggaccgggctggggacacacggggaacgacagtgggtctctgcccatgggaactcacaatctaacagcgagacgaggcacaaacggctagcacaggatagcataacaagtgccacccaaggtacaggctcagggtgctacggggacctgcaagaaggccacctgagcttcgggtagctgggaaggcttcctggaggaggtgaggcccaaggtgggggtgagcctgggccaggcaaaaggcaggcctctcggcgcccatctgtggttcctcaacaccctgtgtgtgcaggcccctcagctgacctgtcttctgtgaaattcttgatcccgctctgttctattcacactgtgctgctttgccttggtggttagcatggttagctttcacaagcacaagctcacactcgaaaactaggctgctgtctcctgggagtttc

SEQ ID NO: 241569 - DNA, 1615 bp, Homo Sapiens
  misc_feature (465)..(480): n is a, c, g, or t
tttttataatttaactaaagattttaagagggcttagtctctaaatcagtaacaattagtcataacaccatacaaacacatttaaatattcaggaaagaggttgttaagattattgcttagtcttataaaatggtgaattttaaccaaattgatacctctgtaatcttatttatgtttcctataacatcatactgcttggcaagtaatgtaagttttgacataatttaaaaattcaagtagttgtaaacaaattctaatttgttaaacaattcatatattcccctttagttactatactacctcagaattaatcctccttaaaaaagtaatcatcccacatagaaaaaactgcagagcttcatctcttccttaaatattttcaagtactgtaagaacacaaatccatgaaaaaactgattaaaatttgacatttcatcttgctttactaattatggaataatacnnnnnnnnnnnnnnnntgttccttaatatttctttgcttaacagagaaatacaaagaaatactgcaattatggttatgggctactttccagcctcttcaagtataggacacaactatggttcctaccagtagggagaaatgaataatcaatcttacataacacaaaagaaagatgagaggcacaaaaagacaaactgactttggcttttaagaacctaatgttaaccctgaaatgccacattcagtaacacaacaacaaaacaaaagattacagcagcaagccaccacttcacacagtattaaaaattcggaaataatgtaatagccttccttccatctcccactcaatctgttgtgtcatctttttgtttttcctgctttttagctgcaggcagttcaaggcttgcccactgcatcggttcagcttttctcatagtgatttcaatctttgttgcagtcatagttacataacttcgctttacatcaatcacctgtaacatatcaaagagaattacaggaaacctcagtagttttattagtctcagaggaaaacatcagacttgcttatgccaataatcccaaatccaagcttctaaaggcctcttttatatctagtcttaaactttttggtaggatacactgttaagttatacatctatactttgcatcaatgtttactgaagaattgtcttttattctacaaatgatctaagttatcagaaaaaaaattcttataaatttgtaatacttacaccccataatttcacattttgatcaaattccttctctccttcaaatacaatatgcacatttaactgaaaaagatatacacagttaattgatctaattcaaactgaagatttatgctatcaaacactgattataaaaataagactgacaaaaatgaattaagctattttaagaaactgccaatactgtattgtttcatatgagaaaagccactgacaaaaaagaataactggcttcaagtttcatattgagaactaagtactatattacttgataaatctactacagtatctccagaatggttcagcagtaagtctactatacagaaattttcatttaaaatagtttcatagaagtaatttaattttttttaatgggagtcattataaaatcttacccaa

SEQ ID NO: 241570 - DNA, 986 bp, Homo Sapiens
ctttgtacaaaaaagttggcaaatttctcttatatgggagctcgcctgtgtaattacctgtcccatcatctgacaattagcccacagagtggcaacttccgccaattgctacttcaaagatgtcggactgaatatgaagttaaagatcaagctgcaaaaggggatgaagttactcgaaaacgatttcatgcatttgtactctttctgggagaactttatcttaacctggagatcaagggaacaaatggacaggttacaagagcagatattcttcaggttggtcttcgagaattgctgaatgccctgttttctaatcctatggatgacaatttaatttgtgcagtaaaattgttaaagttgacaggatcagttttggaagatgcttggaaggaaaaaggaaagatggatatggaagaaattattcagagaattgaaaacgttgtcctagatgcaaactgcagtagagatgtaaaacagatgctcttgaagcttgtagaactccggtcaagtaactggggcagagtccatgcaacttcaacatatagagaagcaacaccagaaaatgatcctaactactttatgaatgaaccaacattttatacatctgatggtgttcctttcactgcagctgatccagattaccaagagaaataccaagaattacttgaaagagaggacttttttccagattatgaagaaaatggaacagatttatccggggctggtgatccatacttggatgatattgatgatgagatggacccagagatagaagaagcttatgaaaagttttgtttggaatcagagcgtaagcgaaaacagtaaagttaaatttcagcatatcagttttataaagcagtttagtatggtgatttagcagaacacaagagagcaagaaaatgtgtcacatctataccaaattaaggatgttgagttatgttactaatgtatgcaactttaattttgtttaacactatctgccaaaa

SEQ ID NO: 241571 - DNA, 830 bp, Homo Sapiens
  misc_feature (425)..(436): n is a, c, g, or t
aatattttatttcgaacccaatatttttaatgaaaatttccctgttttcggattttacatatgttgaatgccaataagaaatacataaagaactttgagcatttatatagagctttcggtttctgtctgtttaatttgatgctctgcttattcagttatactagatgtgtttctcagagttatccagtccatacgtatttgaagagacaatttggtgtagaattgttagtgtccaggctcttccaagcaaggtcttccaaagggatatctcaaaaatattccttagagttgaagtggcaatgttatatagcctaacaattttcatgctattaaaagcttataatagcggatcattaaaatgcgagttacagattttatgaaacactacacgtttttacagagatttttaaatcaggtaataattnnnnnnnnnnnngcatatgctatagccccaaaccagctcttatgagtagcatttatcaagttggtaatgaacatttactgaaggctttattttaagaaattagttttaaacataaagacgggctctaagacatgataaggtaatttcaataagattatatcaaatcatactttaagatgattaaaaatattacagtactacccaagttactaaagaataagaatagtgtaatgcactcttcacattactgtctttgttaattctgtttttctaacagcaaatgaaagagcacaaattttgctaagtcaagcattccatttacagtacagttctttttaaaatgtgcttgataacaaagtgttaaataccgaatatcttacttttttgttatgaagaaaggaaccaa

SEQ ID NO: 241572 - DNA, 1069 bp, Homo Sapiens
ttgggttccggtttgatctttccaagatcccagaaggggaagctgtcacggcagccgaattccggatctacaaggactacatccgggaacgcttcgacaatgagacgttccggatcagcgtttatcaggtgctccaggagcacttgggcagggaatcggatctcttcctgctcgacagccgtaccctctgggcctcggaggagggctggctggtgtttgacatcacagccaccagcaaccactgggtggtcaatccgcggcacaacctgggcctgcagctctcggtggagacgctggatgggcagagcatcaaccccaagttggcgggcctgattgggcggcacgggccccagaacaagcagcccttcatggtggctttcttcaaggccacggaggtccacttccgcagcatccggtccacggggagcaaacagcgcagccagaaccgctccaagacgcccaagaaccaggaagccctgcggatggccaacgtggcagagaacagcagcagcgaccagaggcaggcctgtaagaagcacgagctgtatgtcagcttccgagacctgggctggcaggactggatcatcgcgcctgaaggctacgccgcctactactgtgagggggagtgtgccttccctctgaactcctacatgaacgccaccaaccacgccatcgtgcagacgctggtccacttcatcaacccggaaacggtgcccaagccctgctgtgcgcccacgcagctcaatgccatctccgtcctctacttcgatgacagctccaacgtcatcctgaaaaaatacaaaacatggtggtccgggcctgtggctgccactagctcctccgagaattcagaccctttggggccaagtttttctggatcctccattgctcgccttggccaggaaccagcagaccaactgccttttgtgagaccttcccctccctatccccaactttaaaggtgtgagagtattaagaaacatgaacagcatatggcttttgatcagtttttcagtggcagcatccaatgaacaagatcctacaagctgtgcaggcaaaacctaacagg

SEQ ID NO: 241573 - DNA, 1463 bp, Homo Sapiens
  misc_feature (287)..(302): n is a, c, g, or t
  misc_feature (649)..(666): n is a, c, g, or t
  misc_feature (1131)..(1143): n is a, c, g, or t
taattccagtagtaaggatcatacaaatgtaccgctaggaagaggtaacgtatatgatcatcaatgggagaacagtaaaggtgttactgtggaattcccgacaggctttcacttggagggggaatatttgaacacaagtttaaacaacccagggtaagcacacaatgcactatgcactgaaaggtatacgtttccgctgggtgtttatacatttcaaagttaaaagcatacaccttacccaaagtttcagaaacctggtttgcaaatctgagttcatgtgtgtgtgnnnnnnnnnnnnnnnnaaagccatgatcattttttccatttttatttgatgtttccaaatataaaaaagtcaggattcttacatcaattatctcaaatgagaccatgcaaagcaattcagtgtatacaacaatcatttttccccttcagttctgctgctttatacaacagtgtgattgacagaaaattggatggcatgtgcctggtcagaaaatgtcatctgtttacaaaataacatcatgcagcacagtttttactttgtctgcaagtcaattcacaaaaactacttattttctgttttttatttgggaggcacatggaactgaaaaatttagctgcccaattttattcaactaccccaccnnnnnnnnnnnnnnnnnntcacaaatgacagtcccaacactctgcaaattttggagggttgagatagtagacactatttgtcatactcagcagagttaactatttaacagaaataaatctccctagggcctttcctctcattttgctagactgggttccaggagaatcgtgaagaacccctcatgtaaaatttgaagtgtgaaaactgtgttgttgcattatgcagatttttgctagttgcatagactaaagacgttttgctaaatggcactgaaaatccttaccgagtgtcactattcagtccaagtgtttctgaccaaagaaaattatacaacaatatttataggctaactttaaagagatggttgacgttaatactgtacatattttacatgtcaaatacatagtccaagagtttataaaataaattcatgcatcattaccttattacctctaagaatatcatgtacaagatgggcactnnnnnnnnnnnnnagtacttatgacagcatttcaggtggaagcagtcttatatacaaaaacaatccagtttctctgctatgttaagtatataatttaaggaaatttcagagattactgaccaaaaaaatcttagtccattgaagatagaaagtgtcaatttgtgggatttaaaatgtttcctttataaaagaacacccagaatatgtaacctctgtacaaagaaaaaaatataaaaattctggatgatcatgtttgatcacactacgtacttgaaatgttgctggttaaaagtttttctgctttactcattcctttgacagcattaattccaa

SEQ ID NO: 241574 - DNA, 1611 bp, Homo Sapiens
  misc_feature (387)..(440): n is a, c, g, or t
  misc_feature (906)..(951): n is a, c, g, or t
cccaagatgcttgcttcactttcagtatctgtgtgtgtcttgctcgtcttgcttttggggagcatcccaaagcatactcgaaggctccagcccaggcacatgccacaagcaactcccaacagccaagccgagtgtactgggatgagccaaatattccataaccaaggatttggagggcatcattaatttacacagctgaaagcacagtggtcctgaaaaatgtttgaagcactgaaatagaattaattgctggatgatggggatgcaacagggtcctcaatttctctctcttctgatgaacatcgagaataggtggtagaaggcattgggacatcaacactagttgatggtttagcaagcatagtgttgttcttcaggaagataccnnnnnnnnnnnnnnnnnnnnnnnnnnnnnnnnnnnnnnnnnnnnnnnnnnnnnnagcaagagcatcctgtatctgcctgtcaactgtggcgaatctctcgtaattgacgtccatttcttctaacgtgtaggccactgctgatagcagcaaatgcctcggccagtttctttgctgtgaactttctaggtgccgtgggtgtaacttcttccactgcctcaacgcctttacctctttcttcctccagtgcaatcagctccttattgcaaagatctttagccataattatcctatgcagctgttccttaaaagctatggcaccttcattaccagcacgtgctgcctcaccagtgatctttacattgtgaaaattatgacgccttttgaagcgctggaaccatccatgacttgctttaaacatttgtgtatatgtaggatcactggcacggtcttttagcatattaaaaagacttcttgccttagcctggatcatcagtaggctaagtggtatacgcttctgtannnnnnnnnnnnnnnnnnnnnnnnnnnnnnnnnnnnnnnnnnnnnntggtccagcccttttctttgtgatgacagtggatttaactgatgctgacgatttcgctgcatcactgatttgcttcttatcccttaagatggttgaaatcgtggattgccaaagtcctaactcacgtgcaatggccattactggcttgccaccttcatgctgggcaattatcttgagtttcatttcaagagtaattgccttcctcttcttcatctcaccagaaacaggagacactgatggacattttgtagacatgatggaatgtgaaaacacaaaacacaatatccaaaaaagctgacaacacagtacacggtagaggatgggttgttgattcccgtgataaaatgggtgactgggagctgtggctcgctgccgctgcccagcatcacaagagtgtactgtaccacattatcactaggccaggaaaagatcaaaatgcaaaactcgaagtacagtttctactgaatgggtgtctctttcacaccatcctaaagttgaaaaatcctaagtcggagactgtccatactgaattttccagaagtgtagctatcataaaacaaaggaagggtcatcctttattattttagaaaatcttgctacttcggcaaagctgttcataatatttgagtcaccattttttaaaagggttatatcagccaa

SEQ ID NO: 241575 - DNA, 1188 bp, Homo Sapiens
  misc_feature (113)..(158): n is a, c, g, or t
gctttaaacatttgtgtatatgtaggatcactggcacggtcttttagcatataaaaagacttcttgcccttagcctggatcatcagtaggctaagtggtatacgcttctgtannnnnnnnnnnnnnnnnnnnnnnnnnnnnnnnnnnnnnnnnnnnnntggtccagcccttttctttgtgatgacagtggatttaactgatgctgacgatttcgctgcatcactgatttgcttcttatcccttaagatggttgaaatcgtggattgccaaagtcctaactcacgtgcaatggccattactggcttgccaccttcatgctgggcaattatcttgagtttcatttcaagagtaattgccttcctcttcttcatctcaccagaaacaggagacactgatggacattttgtagacatgatggaatgtgaaaacacaaaacacaatatccaaaaaagctgacaacacagtacacggtagaggatgggttgttgattcccgtgatcacatgggtgactgggagctgtggctcgctgccgctgcccagcatcacaagagtgtactgtaccacattatcactaggccaggaaaagatcaaaatgcaaaactcgaagtacagtttctactgaatgggtgtctctttcacaccatcctaaagttgaaaaatcctaagtcggagactgtccatactgaattttccagaagtgtagctatcataaaacaaaggaatgtcatcctttattattttagaaaatcttgctacttcggcaaagctgttcataatatttgagtcaccaataagacacttatatcagtctacaaatgaggctgctggattcacagtgcttctatgtggcaagcaactatcagtttctttttctagtggagtattatctaagcatttataaacatggggccactatatttgtaatgcactgtatttgtaatgtaaagtggtgcccttggaattgtgcactgcatgattggcacggcatagatgacagccctggaagtacttataaatttcctttatgttcttctttaaagttagggcattatattaacattctttccactaattttaacataaaaggggttactgtctttggtggggcagaaattcgtttgaggtggggtcaagagatagagcaaaaagaaaaagcaatggatataaggcgacacagaggaaagcaa

SEQ ID NO: 241576 - DNA, 863 bp, Homo Sapiens
  misc_feature (560)..(572): n is a, c, g, or t
cacccggacagcaccgcttaaaccaaagtgtcgtaaggctcaatcgggaggggaaggaggaaccctggggggagggggatctgacctaccttttatagataaggattctttaataacaacgatgatgatggaattacagcctgtttgacctttggcttttcaacttttaggtcagatttggctctctgctattctcctaaatgctttccctgtgtttaataaaatgtgataagtatagcagctgagtctgcttaaaaaatcatccaaagcagaccgactctcctacagctcggagctgtgtatcttattgccagtaccacaacagtcctgcccgaatatatcatcagcggcctactttctcccttccctccaagcctgttcctttcccaacaatacccgtctttgttccccggaatgaagaggggcttttcttcctgcacatcgctatttgataacagcgagtgcctccccatgcactggaatccactgtgtgtgctgtcgtgtctcctactggcctcttcgatctcagcaaaaccaaagtgctgtgctacctaattgcnnnnnnnnnnnnncctttccaactttctgtttcagaggcagcagcagtgagctgcaattgcagccagccctttccccagccccactcccttctatgaactcctagccttcttcgcagacagcctagcatctggctaaagggcaccttgttagcaaacacaatttctatgaacggattacccatggactgaagctgttgttgccagcggctggaggaggggactccagacatgagtgttccatgagtgatgcagatgtggagtggaggtctcaggtgaggtgctgcagagccctgggtaacccaa

SEQ ID NO: 241577 - DNA, 1001 bp, Homo Sapiens
catactcaagagtggaactaccggggtattctggaatgttttagaagttctttcctgccctaaggttttaaaaacatcttcttataaaactgttatattattaagtattgctttttgcattttagtctttagtactttaagaattcataagaaaaatattttatattatgatgggagatattatttttccatatgaagagtcaattaatttttaagtaatccatgatttccccaccaatctgggataccgcctctatcaattaccaattccccatatattcatgcacacatttctgaattcaatattctgtctcagtctcagttttatgactgcttcaacaacaaataattttgatgattctagttttacaattcatatatgtagcaaaacatcacaaaaatgataattttgtctcttaatttcaaatcctcatacatctcatatctatttcttaatgcatctgtaggccttccaggaacacattaagtagtgtccatgactagatcctaactttaatgagtatactcctagaagtacagcattgataatgcttgttgtgggagttttgggggtacgggttttctttacactataatacttattaaacatcatagtatttaagttttgaattgctgctgaaggacttcccacattcatgtcactttaatgtaaaatgaattttccaatacactattaagtgtaaaatctgctgaacgttttgctaaatccaaggcattcatagagaactttaatgagtatgaattctctggtgtctaatgtgatgtgacttttggctgaaagctttcccacattcactacactgataaggtttttcaccagtatggattctcatgtgcagagcaagggttgagaactgagaaaaggctttcccacattcattacaaccatagggtttctcacctgtatggcttctcatatgcacagtaagagatgagctttgacagaaggctttcccacagaccttacactcataagccaa

SEQ ID NO: 241578 - DNA, 956 bp, Homo Sapiens
aatgttctgatgttttatgaggtacttcttctggccaaaggctgttccacattcactacatttaaaaggcttctctccaatatggattttctcatgctcagtaaggttggatttgccactgaaggtttttccacactccttacatacaaagggcttctctcctgtgtgagttctctggtgtctgatgaggtttgacttctgaatgaaagctttcccgcaatctttacactcaaaaggtttttctccagtgtgaattttctggtgcgtaaggaggttttccttctggctaaatgattttccacattcattacattcgaaaagcttctcgccagtatgggtgttctgatgtttaatgacatactgcttttggctaaaggcttttccacactcgttacattcaaaaggtttctctctcgtgtgaaaatgctcatgctcagtgaggtttgatttgtggctgaagacttttccacataccttacaggcaaaggggttttccccactgtaaattctctgctggctgaggtgtgacatctgaatggaagctttcccacattcacaaggtttctctccagtaaaaatttcttgatgagtgaggatttacttttggctgaagatatttccacatctcttacatttataaggcttctctgtgtatgatctcccaaatgcagagtaagggataaggtttgagaggaaatgttatcatactcagtatattcaatgctttctctctagaaaaattttctaatattcaatgaagtattgctaccttcactagtttctctccagcatgaattttctgcttctcaatgagattgtcatctagctaagggcttgtcaatactccttagaagcacagggtttctcttcagcatgacttgcacgttcgacgaaatgcaacatatgagtaacagttcccccacattcagtaaattcatccaacttttttgtacaaa

SEQ ID NO: 241579 - DNA, 2281 bp, Homo Sapiens
  misc_feature (407)..(467): n is a, c, g, or t
atcagtatcttcttaatatttacttgaagtcttttgaaaagagaagtggatgtttatataaaaagctgaagtcccctttaaccaatacccatcccacctcccacactcattattttcccttctccactcttcacaggtgaccactatcaagagtttggtctgtatccttcccaatccgtttcaaaaacatgtacatacatatatgcatccattaccaatagatagtactgagttttatgaggaaacttttaattcaaatttacaaaaaagtcattgtactatctgtatcattctgcaacttgatcccccctcaacaattctgggatctttctgttaatacatgtggatttcatttgttgcattttacagatatatagtattacataagaatttcccatattgttcgnnnnnnnnnnnnnnnnnnnnnnnnnnnnnnnnnnnnnnnnnnnnnnnnnnnnnnnnnnnnncctagtgcgtatttcctgagcattcatactcataagtagaaccgctaagtatttctcaaattgttccaaggaatgtttccctattcccaaggtcatatgcattttagtacatagcttttccatatttctgtttttaatctctggattcacttttgtgtatagttcatggtctatttttcccccttggagaacaaactacctccacttaaaaaaaatagttccattatttcctcatttcctgatgccacttgtatcatattccaaattctaataaatgcataggtctttttttgaaatctcttctgctctgctcaatcaataccacaggagtcttaatattagttgtagatgaccatgtcatctatttttgtctgttcctttccaatatttacaacttaatttttcttgttactggcgaagatctccagatctatggtggtagcaataaaaaacaggcctccattttctgttcccacttttagtgaaaatgtgcctaaactttcaccattatctctgctgcaggtttctctgttggacacagggttttaatcatatgcatgtctttctcttcagtacaaattttctggtgtcccttaagtttttagtacttgttaaagttaacctcattcgtggtgctttgcttcagaaggattatttctggggcatgatgaggtgcaaatttctaatgaaagctttcccactttcaaggctttcatggggtttttagtgagtatgaattttctggtgtctaatgtggtgtgacttctggctgaaagctttcccacattcactgcactgataaggcttcttacctgtgtgtattctcaaatgcagagcaagggttgagaactgagagaaagctttcccacattcattacaaccatagggcttctcccctgtatggcttctcacatgcacagtgagagatgagctctgagagaaggcttttccacaaacattgcattcgtaaggtttatcacctgaatgaatcctcacatgtacaataagtgatgttcgctgagagaaggcttttccacattcgttacattcatagggtttctctccagtgtgaatgttctgatgttttatgaggtacttcttctggccaaaggctgttccacattcactacatttaaaaggcttctctccaatatggattttctcatgctcagtaaggttggatttgccactgaaggtttttccacactccttacatacaaagggcttctctcctgtgtgagttctctggtgtctgatgaggtttgacttctgaatgaaagctttcccgcaatctttacactcaaaaggtttttctccagtgtgaattttctggtgcgtaaggaggttttccttctggctaaatgattttccacattcattacattcgaaaagcttctcgccagtatgggtgttctgatgtttaatgacatactgcttttggctaaaggcttttccacactcgttacattcaaaaggtttctctctcgtgtgaaaatgctcatgctcagtgaggtttgatttgtggctgaagacttttccacataccttacaggcaaaggggttttccccactgtaaattctctgctggctgaggtgtgacatctgaatggaagctttcccacattcacaaggtttctctccagtaaaaatttcttgatgagtgaggatttacttttggctgaagatatttccacatctcttacatttataaggcttctctgtgtatgatctcccaaatgcagagtaagggataaggtttgagaggaaatgttatcatactcgagtatattcaatccaacttttttgtacaaagt

SEQ ID NO: 241580 - DNA, 1944 bp, Homo Sapiens
ttgggttggggcttctcagcgccgattccgcgggaagggccctgggacctcacacttctagtcgcgggagctgcaggtcttacccggagagacgctgcacgtggagccctcgccgctgccgttctcagccggctctggagtgcgggcgggggcgacagggccgattccggagtgggactgatcctttgaaatactccagccatgactaaaagagaagcagaggagctgatagaaattgagattgatggaacagagaaagcagagtgcacagaagaaagcattgtagaacaaacctacgcgccagctgaatgtgtaagccaggccatagacatcaatgaaccaataggcaatttaaagaaactgctagaaccaagactacagtgttctttggatgctcatgaaatttgtctgcaagatatccagctggatccagaacgaagtttatttgaccaaggagtaaaaacagatggaactgtacagcttagtgtacaggtaatttcttaccaaggaattgaaccaaagttaaacatccttgaaattgttaaacctgcggacactgttgaggttgttattgatccagatgcccaccatgctgaatcagaagcacatcttgttgaagaagctcaagtgataactcttgatggcacaaaacacatcacaaccatttcagatgaaacttcagaacaagtgacaagatgggctgctgcactggaaggctataggaaagaacaagaacgccttgggataccctatgatcccatacagtggtccacagaccaagtcctgcattgggtggtttgggtaatgaaggaattcagcatgaccgatatagacctcaccacactcaacatttcggggagagaattatgtagtctcaaccaagaagatttttttcagcgggttcctcggggagaaattctctggagtcatctggaacttctccgaaaatatgtattggcaagtcaagaacaacagatgaatgaaatagttacaattgatcaacctgtgcaaattattccagcatcagtgcaatctgctacacctactaccattaaagttataaatagtagtgcgaaagcagccaaagtacaaagagcgccgaggatttcaggagaagatagaagctcacctgggaacagaacaggaaacaatggccaaatccaactatggcagtttttgctagaacttcttactgataaggacgctcgagactgcatttcttgggttggtgatgaaggtgaatttaagctaaatcagcctgaactggttgcacagaaatggggacagcgtaaaaataagcctacgatgaactatgagaaactcagtcgtgcattaagatattattacgatggggacatgatttgtaaagttcaaggcaagagatttgtgtacaagtttgtctgtgacttgaagactcttattggatacagtgcagcggagttgaaccgtttggtcacagaatgtgaacagaagaaacttgcaaagatgcagctccatggaattgcccagccagtcacagcagtagctctggctactgcttctctgcaaacggaaaaggataattgagccccaggacattctgagactccaaagtctttcttaaaatgtttagagcaagtatagctcttacctttattactgaatttgaatcttcttttatttctaggctgtacagtctgatgcatgatttttttataaatatttcatactcttgtgaatttggatctttttactttgagcatatattttagaatatgtgtatgttaaaggatctccacaatgtctgcagtgtgaaggcaggttcattgtggaatagtttaacagtcaggaagctaaactggtcagtattaatgtgtagcccttaccaaaatagccagtagtatctgaaaatgaaaataaatgaagtatctctaggaaacagtctggcttaactattttgaaaat

SEQ ID NO: 241581 - DNA, 1423 bp, Homo Sapiens
ttgggtcagccttgaaggcgtcaggcacatgggccacccagacggcttccactgttctgcctgctttgcagatgtagatgtagttaggaaagcgcttgcggtttgtgttgtgtgactgtagcccttagaagcttggcagccttagtgggctgagttctaggtccctggaggccaaagcatcccgctgctgaacgcccgccctggctgcagtcagcgcctttcgctcggagccgccacttctgcatccttcagggtcagagaatccgcctgatcctgactcacacagccctttccaacacgtgtgaatgcagctcatcagggctcagctcagcctcgtgtccggagcgtggggtgcacccgccgcccgctgaccgtgcccacctcccctgcagggaccagtccaacgtcaggcggatgcacacggctgtgaagctcaatggcgtcgtcctcaacaagtcccaggatgcgcagctggtcctgctcaacatgccaggtcctcccaaaaaccggcagggagacgagaactacatggagtttcttgaagtcctgaccgaggggctgaacagagtcctcctggtcaggggtggcggccgggaggtgatcaccatctactcctaatgcccaacagcatcacggcactctgggacaggcacggaggacggcgtgggcagcctgggcctgggcttggcccagggaaacagacggcagacacacctgtcccccagtgatgccgcccaagctgcccatggggcttcctacggaagtttctaggcccgtcacctagggctctcctgttcagccttaacaggctcagcaaatcagggcgtggctggacgatttccttgcatctgagggcagacgctgctaccggagtgacctggacgtggccagatcttctcgcaggtcacaagaagccagtgagcccttgccttggtttctggaagttcttttccttggctggatttacccagtggttaggttgcatttctaccccatccagaacattcttggaagagcacccggagctgaagctgtccctgatgatgaaggtgaaacgtcagccctggccatggctccgctcagggccccggtcacctccgagtcactctgttccttgactgtctttgtgtttctgtacctcaaggcactgaagctggaggactctgtccatgcccgtgtcaccctcgtgtgggagcctctgggctcggcaggtccacatttcatgagctgaggcgtgggccagggccatctggaaagggaactcggcttttccagaacgtggtggatcatctgtcgggtgtgtggtgaacacgttcagttcatcagggcctacgctccgggaaggggcccccagctgtggctctgccatgccgggctgtgtttgcagctgtccgagtctccatccgcctttagaaaaccagcc

SEQ ID NO: 241582 - DNA, 1027 bp, Homo Sapiens
tttacataaactttcaaaaataaagttccactgctgcctccatggtgccttagtctactccctcccagtgattgaggcccttatggcctatggtcttggaagaatatcagcactgggaccctggacccagaccagctcctactcctcttgaaacactcgaggacttgaggcaactaaaggtacatatgttggctttgatcggttgaccaggaaacatcttaacacttgtttctatggtgaaataacttcaccttataaaaatttgaagcaatgtactaataagtgaatggctaataacgctgacaacaaaatttctttgcctgagagcagtgttacaaaggataatcttgtggaaaaaactctctcttagctcttatctaaaatgtcaatgggtacaaatagctaagaaatacgctaacagattgaaatggtagaaaagcaactgaatttatgccagatgctaaaacacagcttctccatttccagactcctatgagaaaagttttgtacagacacttattaaaagactagaaaaactacacagatatgcgagttggcaaaagaggttatcagttttataattaggccatcaacacatttcttaagctttcaaaatttaaaactcagctttaaaatacaatatatatgcataaagatgtccaattaagcaaattattccatttaatctaccaatatcattttgttgacattacctttctttttttgtggcaaactttcacaagcaggacttccagggtaacagaattttgttcattttctgagtttggtgatggcttatctaaatagaaaatcagtattttaaaatatattttaaaaatatatgaacacggtattcattttgctaacaagtcagggaacttcaaacagagatttcccataataagacttctcaaaagttcactcattcttttttcctcaaatcagttccaaacttacagcaaactctttaaaagcctttatatatagtgtaaataaaccactcacaaaacggaatataattacccaa

SEQ ID NO: 241583 - DNA, 894 bp, Homo Sapiens
  misc_feature (589)..(597): n is a, c, g, or t
  misc_feature (834)..(850): n is a, c, g, or t
agggaaaggtgtgtaatgatctgctgagtatttcttactgtcccagttataatggtagctacggtcacccaacgcagtttctccagtaaacttcggggtctccgtttagtcgcttctttatacctgcaaagattggtgacaaaagaggaattattcatgtaaaatggcagcaatagccgtttgtatggactctggagttaaaatttagtattacatggtataagccgttagccaagactcagtaggagaaattagaagagataaatgagtagaccacagatacattaacagagaaaaacatgttagcacttctaatttataatcctttgttctaaatcctctgctgaatggggtcaactttaaatcacaagcctccagcatccttggtaatgataaaataagaatgacaacaatgacaagagaaatgtctttacctgtccatgggaaatggtaccaagagcactatgggcaatcaaaaatttgacttacagaacattttcagtttggtttgctaaaagcagggtacagttaatcacaatgatttctatgtctataatgagggtggcttcccagaattgcaggttggggnnnnnnnnngtttagcaaaatatagtgtatagtacaataaaaaataactggtttaacatgacttctttaactctgtataacatagcttagataactgaggcttagctaacaattaaggcaccactgtaactgatttggtttctgacatacccttgttcaaaccacaggaggtttctgtacaaccgagacgtgctctttctgcaattacatctcatctgatcaaatctatgtgattaactactctcnnnnnnnnnnnnnnnnngagacagagtttcgctcttgttgcccaggctggagtggagccaa

SEQ ID NO: 241584 - DNA, 1529 bp, Homo Sapiens
actttgtacaaaaaagttggcgacctctctgggttccaacacctacaacaggcagaactgggaggatgcggacttccccattctgtgccagacatgtcttggagaaaacccatatatccgaatgaccaaagaaaagtatgggaaggaatgcaaaatctgtgccaggccattcacagtgtttcgctggtgccctggagtccgcatgcgtttcaagaagactgaagtgtgccaaacctgcagtaaattgaagaatgtctgtcagacctgcctcttagacctagagtatggcctgcccatccaggttcgtgacgcaggattgtcttttaaagatgacatgccaaagtcagatgtcaacaaagagtactatacacagaatatggagagagagatttctaactctgatggaacacggccagttggcatgctggggaaagccacatctaccagtgacatgctgctcaaactggcccggaccacaccctactacaaaaggaatcgaccccacatttgctccttctgggtgaaaggagagtgtaagagaggagaggaatgtccatacagacatgagaagcctacagatccagatgacccccttgctgatcagaatattaaagaccgttattacggaatcaatgatcctgtagctgacaagcttctaaagcgggcttcaacaatgcctcggctggacccaccagaggataaaactatcaccacactatatgttggtggtctaggtgataccattactgagacagatttaagaaatcatttctaccagttcggagagatccggacgatcactgttgtgcagagacagcagtgtgctttcatccagtttgccacacggcaggctgcagaagtggctgctgagaagtcctttaataagttgattgtaaatggccgcagactgaatgtgaaatggggaagatcccaggcagccagaggaaaagaaaaagagaaagatggaactacagactctgggatcaaactagaacctgttccaggattgccaggagctcttcctcctcctcctgcagcagaagaagaagcctctgccaactacttcaacttgcccccaagtggtcctccagctgtggtgaacattgctctgccaccgccccctggcattgctccacccccacccccaggttttgggccacacatgttccacccaatgggaccaccccctcctttcatgcgggctccaggaccaatccactatccttctcaggaccctcagaggatgggagctcatgctggaaaacacagcagcccctagcaccttgtcaccactctggggctctgtggaagaaagggcacttaaaactcccagtaaatcttggaataaatatatttttccttcccttgtagtttccatggtagctgaatgtgctcagatgtgagcagtcagagactgacagccatgctttcctatacttgttcaaaggatcgatggaccgtaaataagctgccattaacacatctggttactgctgtaacatgactaataaaaccgaacgcctgttccc

SEQ ID NO: 241585 - DNA, 1860 bp, Homo Sapiens
  misc_feature (231)..(292): n is a, c, g, or t
  misc_feature (588)..(643): n is a, c, g, or t
aagaacttggcgatgagctctttcaaacctgttacatctggacaatgaagctatgatgtttttaggtacctctaaacccaagtgctccatgccttctttccatagtatgctaaatttctgattttacacacatacacacacacgcagaggagaaaatgtaagctacctaacataaaacaaatgtcttcatatagaaaatgttttctttcatactagcagaacattttcacnnnnnnnnnnnnnnnnnnnnnnnnnnnnnnnnnnnnnnnnnnnnnnnnnnnnnnnnnnnnnngtaaatcaatattggactaaggctagagtgctatttctccatcatggccctgcagaaaaactaggccatcactaaacataaataaaaagggacaggtaaaataatttccaccctgggaaaagcttaaactcaagtgtcttattgagcagtgtatagacaacactaaaagttttatttaagaaatccaagttctgaagacaagtggggcttatcaacaggccactgtatctaacagttaaataacattttttaaaaaaacaatgtatatccaaccgagatacatatcaaattcagtnnnnnnnnnnnnnnnnnnnnnnnnnnnnnnnnnnnnnnnnnnnnnnnnnnnnnnnntaacctcctccctaacttctctggtcacaaagactcccaaataaaaatgaaaagaacaaagtcttttcaaaatgaacaataagtattctgggtacaggttaatccaccatcctgacttgatacttgactaaagattatcaattccaatttgtatagaacttttatgaggaaaaaaggtaactttaacaacttttctatttctctcaggacaaaaccacaaatgacacctttctaatgagtcaacttttagttgcttttgatgggctggcactggaaaggctgctctggatttttctttttgttgattgattcacatttttattcctcttttcaggcacaaaggaagtagaccaaggagactgaaggtggttatgaagactgtgcatctctgaggacatcttaaacaaagatgacccaaatctttgatcttcaaatagtcgatgtgaactgcttaacaaaatgccctgggaaaactctgtctgaaacaagcagcttgggggtttgatttcattagttactggacaagaactggaatggagtgaaaaatcttcattcatttcttggtcagatggagagaggagaaaaaaagaagtgggtttccattcacttccattttctaactgatcattagttagagaacctttggaaaggtttagctcagttttttcttccaacttatcaggttcctcaagaaattcactgccttgagatgactttgataacccatccaaatccagtgacttaaaaccgttattacaagggctcttgctgttgtctgactctgacatcattgaatccaactcagagattttgtcaaggtaagcagcatccatcgatgcttcactggatgttcttgtccggttcatttcaaaagagcgaatagaattcaaccttttggataaacataagcctgatttctcactcaattttgaagatatttctccaacagaatttgctatcgtgttcccctctgaactttcaaaatctaagttttgggcatagcttgtggaacaacagtcccaaaatcctgtctttggggaagaaaaacattctgatttcttttcattttcacttctacttatatcatcttctgaagaatctttattagaaacatttgaagaatcacaaaaatcatcaaacaccaattttctgagatggtttgagtgctttttggaacctcctgcttggaccacagagctctctctattttctgccaa

SEQ ID NO: 241586 - DNA, 1006 bp, Homo Sapiens
  misc_feature (864)..(876): n is a, c, g, or t
aaggtggctcttcagcggcagagctagaactagaactagaactcagatgtcttgattcgtggggtagtgtacccctcctatggaccagcaagataaataacccccataggacatcacacatactgaaaactaccaaatttgttacatatatatatatacaacgtgtactactgagaatgcaaagaaactactggatttttagaaatagacatgtctctccaggtaggagtcaatggtgatttatgcttacaaaccaataatgaccatatattgtggtggatgttgattttatgagttacaggccctaaagattttaattgaaaagatcaattaaaatcaatattttaatatcagccaattgattgttataaagatcttatcaattctgttgtgccactttgattgatattaaaccatacttttgattgcagttattttctgttctctttaaattacatggctacaaataaaatattgagggaaataatattttttggaagaactattcagcatattttccttttgcatcaaaaacgtcaagaataatcataaaatcttataatatttctctatattattttttgacatcctaagcttttattttattcaactgcaacctcaatgcaagatttgacaggtacttaattctttttaaatgtcaaaagataccatttaaatagctaagttaacctatatttgggagataccaacatataatcaaatcaaagtaaacataatttggaaaccaggaacaaaaatttttaaaaaatcacctctcactatatttgttttgaatgtcattcctaatatcctctaaatttattattttaagaaggtgaatccaccacaaatcaaagcaaaagnnnnnnnnnnnnncaaaaacagattctaacaagtacaaagaaataattaacaaaagctcatgtgtgcccaaaataaagatagagatgtaggcataaactctataccatggacaccttctatgagtcacgaaaatatcagccaa

SEQ ID NO: 241587 - DNA, 1636 bp, Homo Sapiens
  misc_feature (205)..(217): n is a, c, g, or t
  misc_feature (725)..(771): n is a, c, g, or t
aaaagataccatttaaatagctaagttaacctatatttgggagatacccaacatataatcaaatcaaagtaaacataatttggaaacccaggaacaaaaattttaaaaaatcacctctcactatatttgttttgaatgtcattcctaatatcctctaaatttattattttaagaaggtgaatccaccacaaatcaaagcaaaagnnnnnnnnnnnnncaaaaacagattctaacaagtacaaagaaataattaacaaaagctcatgtgtgcccaaaataaagatagagatgtaggcataaactctataccatggacaccttctatgagtcacgaaaatatcagtcatatatatactggcacttagtctggtacatgcaaatttcaaggcaattcctctccatctgagaacgaggaattgtgtcattttaaggccaaattgcagtccaattgccacaagtgcaaaaccaccccacataaccacctatttgtaatcatggaatgatagcctcaaccaaccaattgtgccatacatcattgttaagacttctttggctcattttagtatagacttaaaagtaaaaattgcaaaagatgataaacatctattattttgtaaaagttacaagctcccattccaggtgtcagccctgtagtggttctccagcctagctgcacataagaagcatcaccaggacagccaggatgattcaaccgaagattccgnnnnnnnnnnnnnnnnnnnnnnnnnnnnnnnnnnnnnnnnnnnnnnnacgtgtgagggaacagatgtcaactatcagctgaatgtagctcttcaatctgagaacctggaatgttttacaatgaaaacaggaaacccacatttgctctgtttcgcctcagagtacagttattgtgggtcagttttgataggacagtttggattttctcatttagtctgactgaaaggccgttgcgcagaggcattcgcacaactgctgcaaaaccctgcatcaaactaggtaccacctattacaaatttcagaatcttatgctaagggttgtgaagtactgcaggaggttggaattaaagtgcgacaattctctttgttttgtgataggctttaaattaaacaacccaaaaggatatatctcaggattctctataatacaatttcttttcctccaaggcatttgcatctttggtttagttcacctatgttgtatcactgaaacatgttttataaatactgttaacagattgaaagcatctgaatcatttaaaaaatcctgaatgaataattcataagattaaaataagctgctaaagccattcttgtggcttctacatcaaaggatacaaaaagaaatggacacttatcagggattttgaaggcaaggagaactgattctaggcacaaaaaaaaggagaggttagatggactggaaaaagaggggtgatatatacatgaggaactctaaatgtagctggaaaaaaatagcaaatctgttcagagtaacacaatcataaaatgaaactctgatcattggttcaaatgttcagccaggccaaagcaactcctgttttatcctcagccatccttcctacccaggacctgtttgggaacccagtgcaaaatgaaagtgtggacccaa

SEQ ID NO: 241588 - DNA, 1922 bp, Homo Sapiens
  misc_feature (1166)..(1218): n is a, c, g, or t
ctccacttactcatctgttcattctcagtaacataacccccaacaaaaatttgttgggaaaaaatgcagggaaaatgcacagttcaacgatgaagagatttttttaaggtttttcattcccaaataaaagtcttcagtttaccaagaatcccatttctgatttaatcattcaaccttcccttggctggctcagttactcacccaaatatattagaaggcaggcatcctgcctgccacctcaaatgtcaacattgcccagatgcgagtggcaggtcccgtcaggagatactgtaaccctcctcggagtccaattcctgcacggacactttcgtcaagactaaactcctatctgaaaacgctcccacgtcaaaatagttttactcacccacttgcttcactcttgccagtagcaagtctgcaactcatgcatttggcaaagggatttattatagagaaacccggactctgcatcaaatgatgacattaccactttcacatatttctattgaaccagatacaaaactaggaaactgccagaccatcttgttaggtggacactcttctgtaatcctgggtagcttcctcaagtccctttaaatgacccaaaactattaataggtattttaagcaataattattaaaaacagaagtgctacatcacctgtctttcgccctgactctccaaatgaacataaagacacaccaaaaggctggtaacagagctagctgggacaatcactgcatctatagaacagccaataccttgaaaaactaggcacaagtacatgaggaattcttatcaaagatcatgcacaatccatgccacttaaatgggttttagctgaggttttgctcatgttactctgaatttctaaggacagatcagtgaccctcttagcctgagcagaaagcatattcttcccactgcagtttcctacacaatttagtcctgattagatgaggcattatagcagcacctgaagtagagcctccagaatccactgcccttttcatcaaaggctatttggttccaccctcaggattggcatactcacgagacatttcacaatcctaatgcatactttaggttacttaattaaccaagcaatatgctctgtcaaagaacttatttcaagtcaaagcaaaaaaggccttaatgcagaacnnnnnnnnnnnnnnnnnnnnnnnnnnnnnnnnnnnnnnnnnnnnnnnnnnnnncccccaagattattctctcccttccccttcccccacttggtggaccccagtttggttgaatttattttgtggttacctcagaatacaattagtttaaattacaaatcacagccctacacagatgatctgaacacatcagttcttttcagcggtgtgttccaggaagtttaatataacaacagcctactacagagagtattccttaagggtagggcacaggacaggttaattaaggtcacttaaatcttcatcttttacagcagatcagaacccagatggctgactttttatgcaggatttctgataagaatccagtagagctggttgcaaggttcacatcgacacttaatagttgtaatcttcttatccagaagttgtgatccacatgaagtccacaatgagtgcagcaaatctgaggtagtcaacccttatgaaggctcagtatctgaacataaaaagattttgaaatgaccactggctgcaggttttggttttttgtatttgcagagtaaatatgaaagaacactgttgaaactagttcacacatttatgtaacaatgaaaattcccctaaatccaatatgcatagagcagtcgtgacactttaacttccatagtgcaatagggccggtcatgaaatcgagtggtctgcatcggtgtctgtagatccagcagagatcagatccaactttttttgtacaaagt

SEQ ID NO: 241589 - DNA, 876 bp, Homo Sapiens
ccatatattactttttattgaattgtaatgtacagaattcttgcactgccaaaccatgctgagaattcaaacaaatggtacaatggacagcttcatccacccatcatacagtatattaaaacttgattcatttatattttgatatttcacaatcttttaaaaaagttataacaagagttgtaatttaaatctgctgcaggtcttcagatttcgagtacaatatgcctttacataacacctccacttactcatctgttcattcttcagtaacataacccccaacaaaattttgttgggaaaaaatgcagggaaaatgcacagttcaacgatgaagagatttttttaaggtttttcattcccaaataaaagtcttcagtttaccaagaatcccatttctgatttaatcattcaaccttcccttggctggctcagttactcacccaaatatattagaaggcaggcatcctgcctgccacctcaaatgtcaacattgcccagatgcgagtggcaggtcccgtcaggagatactgtaaccctcctcggagtccaattcctgcacggacactttcgtcaagactaaactcctatctgaaaacgctcccacgtcaaaatagttttactcacccacttgcttcactcttgccagtagcaagtctgcaactcatgcatttggcaaagggatttattatagagaaacccggactctgcatcaaatgatgacattaccactttcacatatttctattgaaccagatacaaaactaggaaactgccagaccatcttgttaggtggacactcttctgtaatcctgggtagcttcctcaagtccctttaaatgacccaaaactattaatagccaacttttttgtacaaag

SEQ ID NO: 241590 - DNA, 641 bp, Homo Sapiens
tcacagccttggtggcggaccctgggcccgcagcccccgcgctggcggtcccgccgtcacccggccgggtccccgcgcccgccccgccgcccgccgcacccgcggctccactgcttccgccggcgctgcccgctgcgcccgcggcactcgccgcccggttgctccgctccttcttcttcttcttgtccctcttggcaaagaagttgtccaggctccgctcctccgtctcagccatggcctcggcctcctcgacccggatgggtggggccggcggcgggcgcggcccgcggggctccgagctcggggtcgagaccggctctgcgctcacgctgccgggcgcggcgacgcctcagccccgcggggtcgccgaggcgtgcgcggcgagacgggcggctccccctgcgtgctggcgagcggtggtacggtccgcccgggggctcgcgcgccgccgctgtcgcccgaggctgccggggctgccgctgctgctgcgacggcggagcaggattccgctctccccacaacctgaggggaaaaggcacgcgcgagccagaggttctggcgagagtgctcggctagcagcggcgcgtgccggaggaagaggcgcgttgtcagaacgatcctggagccaacttttttgtaca

SEQ ID NO: 241591 - DNA, 1597 bp, Homo Sapiens
ttggcagaaagaaaatgtgccacccaagaacctggccaaagctatgaagccaacagctcatcaaggaagtggatgccaaaactactcatggaattctacagaaaccagtggaggctgacaccgacctcctgggggatgcaagcccagcctttgggagtggcagctccagcgagtctggcccaggtgccctggctgacctggactgctcaagctcttcccagagcccaggaagttctgagaaccaaatggtgtctccaggaaaagtgtctggcagccctgagcaagccgtggaggaaaaccttagttcctattccttagacagaagagtgacacccgcctctgagaccctagaagacccttgcaggacagagtcccagcacaaagcggagactccgcacggagccgaggaagaatgcaaagcggagactccgcacggagccgaggaggaatgccggcacggtggggtctgtgctcccgcagcagtggccacttcgcctcctggtgcaatccctaaggaagcctgcggaggagcacccctgcagggtctgcctggcgaagccctgggctgccctgcgggtgtgggcacccccgtgccagcagatggcactcagacccttacctgtgcacacacctctgctcctgagagcacagccccaaccaaccacctggtggctggcagggccatgaccctgagtcctcaggaagaagtggctgcaggccaaatggccagctcctcgaggagcggacctgtaaaactagaatttgatgtatctgatggcgccaccagcaaaagggcacccccaccaaggagactgggagagaggtccgggctcaagcctcccttgaggaaagcagcagtgaggcagcaaaaggccccgcaggaggtggaggaggacgacggtaggagcggagcgggagaggacccccccatgccagcttctcggggctcttaccacctcgactgggacaaaatggatgacccaaacttcatcccgttcggaggtgacaccaagtctggttgcagtgaggcccagcccccagaaagccctgagaccaggctgggccagccagcggctgaacagttgcatgctgggcctgccacggaggagccaggtccctgtctgagccagcagctgcattcagcctcagcggaggacacgcctgtggtgcagttggcagccgagaccccaacagcagagagcaaggagagagccttgaactctgccagcacctcgcttcccacaagctgtccaggcagtgagccagtgcccacccatcagcaggggcagcctgccttggagctgaaagaggagagcttcagagaccccgctgaggttctaggcacgggcgcggaggtggattacctggagcagtttggaacttcctcgtttaaggagtcggccttgaggaagcagtccttatacctcaagttcgaccccctcctgagggacagtcctggtagaccagtgcccgtggccaccgagaccagcagcatgcacggtgcaaatgagactctctcagacgtccgcgggaagccaagcttgtggagttcgatttcttgggagcactggacattcctgtgccagggcccaccccc

SEQ ID NO: 241592 - DNA, 1278 bp, Homo Sapiens
gaaaggaaataaacagtctacactgatgctgaggaagaattcttcctgaggctcttgatcttcagtccctttccagtctctgctctctcaccctattcagacctcatcctcgttcaccaagacttctctgcagcctcaggacgggcccttgcccttccatcctcacccctgcctgcccacaaagtaaccatcaagggacagtggggccgagcgcagtggttcatgcctgtaatcctagcacttggattacactcctcccctcctcagacaccttcactggctccccagtgcctatgagcaaagcccagtcttcatgatctgatattgtgagcccagtccactttgcattttgccttccctgcctctagaccactgcccagttgttccctccgcctggaagttgccttactgtggaaggagaaggtgaagctggcggcactgggcaggctgatgttctgagggctccaccaggaggtgacagaagtggctaacagcggggggccctgagccaggctctcctcctggtgctggaagcagaggaggctagaggctttgtcactcagcaagaagtcacgcttgccatagagaagatgtaatctcccagcatgtcggttccagtagaggcagaagtggtagaggcccctggggtcagggaaggatcgggaagcagggtgggctgcagggaaaggggcatggactgtgagggcctcttcggagttctcgatggagatgcgcaggtctggtgtgggtttgtagtggaggctgctcctgtgtgtctggttccgctggctgcagaagcgaaagtcttccctgtggcccctgccgtgggcaccttggaccaggaagagcagactcagcaggaacagtgtcgtctgcagcagcgactggggagtcattttcctccgacggagtcactcttggaagtcaccacctcttcgtggacttcagcacctctctcctgggaagcagaggctgctggatgagcccaggggagtccttgggttctctgggtctcagcggccgcccaggctgttgggagatgctgccctccatccgtgatctgccaactctttgtgagtttcttcctgcctcctccctcagtccaggccccgcctggaatcctgggccagactcacctgcctgtaataaaaacaggccccagccagcagctggtggggtcaggaggcgggaagcgagggggatggggagtcctgctcattcttctctctgagtttccaggctcctgcaggacacctgacagagggagaactgagccaa

SEQ ID NO: 241593 - DNA, 1169 bp, Homo Sapiens
  misc_feature (1051)..(1065): n is a, c, g, or t
cataggatgagaatccaaaccaagagaaacagaatgaaaattacaaataaataacaatcttacatatattcaaaaaacctgaatactgacagtaaagagactaaaatttttaagtatttttattcttatagtttaatttcatatttacagataatgttttttgttatcaaaacgctatgctacgaagactcattctgatgaaatttttgttacataaactggcaggatttaggacattttgggaatgataataatagctgaaacttgctgagtgtcatctataacaggcagagagctggttactgtgttgctgcttttttccttataagaacccaatgatgggccttattatccctgctttacagataaatcagtgaaattcagagagattaacacagccaataggcaacaacacttggattacatggtctgactacaaaacatacagttttctactgtactagattaaatgcaaagtagaagaaatatttccatcaaaaattaactttagaaaacaatatttatatgtagttacttttaacccatttatacctgaggttgcaattttttgaatttttgtaatcagaccttggcaatgaccttgagcagtaggatataaatcactcccacatgcttagcgttccaataatggaacactaggcataaatgggttaatgcataagtaaatgctattattatcccagtatttggctaccagaactgctagagggctctagctcctccatcaaatggatattacacaaaatgccaccttttggatatatctgctgaagtttcctgactctcaaatatcattctttctaaaacattctaattcatttcaatatataaaatctgcaacttgcctgagagaaaagtccagattctaaacttggctcatccatttactaggttctgtgatctatggcaaactgcttaacatctctgtcttagtttcctaatttgtaacgttagggataacactacctatacctcaaagagtttatgtgaaagtaactgcctagtttctaagttcgagtatcttttggcnnnnnnnnnnnnnnngttttccatcacttcccacaaagactgaacaaagagagattaatgcacttctcagggaactatatcacatacattagttacattttcaccttttaaattcccaa

SEQ ID NO: 241594 - DNA, 286 bp, Homo Sapiens
ttggggaaatcatctaacttgaaccctagtgttccattattggaactctaagcatgtgggagttatttatatcctactgctcaaggtcatcgccaaggtctgattgcaaaaattcaaaaacctgcaacctcagacatgaatggattaattgccatttgttttgttttctaatggaaaataagaactgatttcctcgctctgttaggtagcaatctgatgtaccctttctctccacccaccacaccatatataagcaaaactggtctctgtttttccaccaacccaa

SEQ ID NO: 241595 - DNA, 1107 bp, Homo Sapiens
ggacatatgtctactgaataaatgactcagatgttttcgacagccagaagcttgcctgccatttacaaaatactgattattttattggcaatttctgttttacttggcagaaatctgaaaataaaaagtgtttgtcttcaatactaaatattgctttattaaaatcaaagtcttccctgaacgccacctacaactttctatgcatagtacaatatatcagtgtgatttatctgaatttaggcttatgcttttcaaaaacttgaatgtctgtgcttaagttttatttccaggctttctaaccttggcatttgataaagctagcttctatcattcagggtgagaaaattgagacattggcacttattgtttagaagtgtaggcaattgactgatattcaacccaggcacagtcttgacaaaaactctgagtagagcttttttcatctacagtttcaaaagctgtatatttgagagtaccccaggtagcactaattatttgtgaggtaatcatgggcaaattgattggttttttagaaaatatcccaatagtccattgtggtggtgggactgactgaggcaaaatatatacttttctctgccctattactattctctactgaagacaaccaacagtaaaatgcacaaaacagtcagtccttgggtaattaaaaaatgtattgtctatttctgaataatcaatatattactttacacaaaatagggctgagtcagagctgtaaatggtgtcttcaaaagcatgaaaagatgagaaagtggcaggatgggacagacaagccaaggtctttgaagtgctccacttgattcttgagaaccgggtgtgaatgacgacctaaggtctatgttttaatttttgtctttttggtttcaacatttcaaaacctaagcttccaactccaagaaacagcattcctgaacacctcaactatttccattagatttgaaaattcttcctctgaagcccaaatgtcagcatattctataatctgtatccccctcaagaccaaatatacttgctaacaagcagtcttttccataaatcagtttcagcctagcatgtcttgttttgaaagcaacattgttccctttt

SEQ ID NO: 241596 - DNA, 1529 bp, Homo Sapiens
  misc_feature (533)..(591): n is a, c, g, or t
  misc_feature (1459)..(1481): n is a, c, g, or t
caaatggggtacacggtgagatgccgttcccattttctgtaacaattattttccaatattttaccaaaaataaacatatgtgagtaattttttagtacagtcattttattgactgaactcacaggaagtctttatctgaagctgggtcctaaaatcatgtgatattttattagactccaaacacaattttggacattgattatggtgtcgggcaaaaatgactcaggttatttataagctgcttttgattcctcatttcaccagtccccatccatacacagctggcaaataacaattgggaaaagcaaaaggatattggctcttggtacaaagcacacactaaattacacctttagcattcccagctcaaattacgttcatataactgctagaatgtaaataaatatatagttatagaacaagacagatttttgtggctctataatgccctatttcagagtacatgaacaataaaataatctatctcaaggtgactataattattttctcatagctttcaaacaaacctactnnnnnnnnnnnnnnnnnnnnnnnnnnnnnnnnnnnnnnnnnnnnnnnnnnnnnnnnnnncatcacagtttaaatctttacaaaggggaaatcatgcatttaaaactactaattcaacctcaaattgtcaaaacaaaaaactaaaaacattgcttaattttctatttaaaaattatttctctttcacagaagtaattgctctgcaaatatgcagttcttcagcattcatatggttaatgacattattttgaaggaagggcgataatgtaaagttatgattcaattccaaaactccccactgataggagccaaattaaagctaagggaaattttatgtataagactaattactaggtggacaaatgttatacatccagaaacttgtgtgaattaagtcaaaagcaacttgactttagcatttaagatagaggaaaattgtttagcaagtttaaaaacaaaggattcatcctaatggtgagtgaagactttcggcaaaacgcacactcaaaattttgtttagaaataagctgagccacatacatgtaaagctaccactagatatgtgctttttttgaatgctacaaaaatactatcctgtgaatgcttttatcagtggtgaaaaacccactatagttttaaacaggcttgtaactgataaatctatttttagaaaattaaaagtttataagtatttttaaaatgtttcatgattatttaaaatcaaaatctgacaattaattgttattaacttgatgtcaagattactaaagaactgtaatcacattcttcttccttaaggattgtgtttattttaaaaatggtgacttttctattagaataaaacagtgtagtacaaaaagatgatatatttaaagtgcattatttaattttaaaatggtaattatcttattctgggcaacaataaccnnnnnnnnnnnnnnnnnnnnnnnttgtctctcagttataataaaaccacatttattggagtcgatcgccaa

SEQ ID NO: 241597 - DNA, 1442 bp, Homo Sapiens
ttggctaagaattgaccactggatttagcaatgcagaggtccttgtggcccttgatgtcggcagatgagggcagtgtggtccagagatgaggcttggggctgagatgcagccccgctgcctggtccagctcctccctcatccaggcagggctcccccgcccagcagccactcccctccctgcctgctcatggccccctgctctccctttcctccccatacccccagacctgtgcttgcccggggagagtcagggctctcctgtcagctgggtcccctcccagccccgggaggccgccactggagccctgcctcttcctggcagggagcatcgagtacagctgtccggcctccaacgagtgtgagatcaccaagcggagacgcaaggcctgccaggcctgccgcttcaccaagtgcctgcgggtgggcatgctcaaggagggagtgcgcctggaccgcgtccggggtgggcggcagaagtacaagcggcggccggaggtggacccactgcccttcccgggccccttccctgctgggcccctggcagtcgctggaggcccccggaagacagcagccccagtgaatgcactggtgtctcatctgctggtggttgagcctgagaagctctatgccatgcctgaccccgcaggccctgatgggcacctcccagccgtggctaccctctgtgacctctttgaccgagagattgtggtcaccatcagctgggccaagagcatcccaggcttctcatcgctgtcgctgtctgaccagatgtcagtactgcagagcgtgtggatggaggtgctggtgctgggtgtggcccagcgctcactgccactgcaggatgagctggccttcgctgaggacttagtcctggatgaagagggggcacgggcagctggcctgggggaactgggggctgccctgctgcaactagtgcggcggctgcaggccctgcggctggagcgagaggagtatgttctactaaaggccttggcccttgccaattcagactctgtgcacatcgaagatgccgaggctgtggagcagctgcgagaagctctgcacgaggccctgctggagtatgaagccggccgggctggccccggagggggtgctgagcggcggcgggcgggcaggctgctgctcacgctaccgctcctccgccagacagcgggcaaagtgctggcccatttctatggggtgaagctggagggcaaggtgcccatgcacaagctgttcttggagatgctcgaggccatgatggactgaggcaaggggtgggactggtgggggttctggcaggacctgcctagcatggggtcagccccaagggctggggcggagctggggtctgggcagtgccacaagcctgctggcagggcccagggcaatgccatcagcccctggggaacaggccccacgcccctcttcctccccctcc

SEQ ID NO: 241598 - DNA, 1351 bp, Homo Sapiens
  misc_feature (977)..(986): n is a, c, g, or t
gaagtgcaaccttagaatttaaataaactagaatacacacttcagggcagagacttatttttactcatatgtagcctgaactccaaaaccagctcaatttttaattacagtgctggcagttaaaaaccaaaatagcactttgaaattgatacataacccttttgctgtgatggctttgtttcagagctatttatgaagaaattgatgctcaccagcacaaaggagctcaaaatgatggtgactgagaagaaagtggatgatcagctcactaccacatcaaaggtgccaactctctaaaacgtagcctctgtgcagctttgaagcctggaagacaatacctaccaacatgtcaaagccatggtggcacatttctgctataatgaagattaaatagagtaacagttccaggataacactgattcctgacaacagcgtgagatttcaacagaacttgtttggaacaaatactcacttaaaacttcagcagaagaaaaattacttagtccttaggccaaccaatttaactgcagtgtcatgtttcacaggccttcctacatttagaaatcgtcacacagctgtgataagagtagattattttactatgaaataattctgaatagatgaaagcataaaatgtgagaaactgaatgtattattcaggaagaatactgagtgccttcatttaactaaagttgaatgtaaaagtcaatttgcacttctttataatcctctggtttagaattataaattgttaaaaccttgataattgtcatttaattatatttcaggtgtcctgaacaggtcactagactctacattgggcagcctttaaatatgattctttgtaatgctaaatagcctttttttctctttttactgcaacttaatatttctatttagaacacagaaaatgaaaatatttagaataagttgtacatttgatgacaaataaatcactattaaaataatttaatacnnnnnnnnnnaacaaaatttgtttccagaagaacttttgatgtcagtaaatcttcacaatcccacctgtacattttaacattcatggacttgtaatggtgatgctttggctaacagcctagtagatgtattttatttcaattttatgatactacaatttcaaagtaattattcagaactctgaatataaaatagccctaaaccttaaaggacaaatcaaatttgaaataagaatttaaatctttggacaagctgttagggcatagtgactcctcttttactttgagcttttaaaatactgactattcataatgaaggaaaatagcaaccaactcttttagacacaataaacatggttccaacttttttgtacaaa

SEQ ID NO: 241599 - DNA, 1550 bp, Homo Sapiens
ttgggtcaccgggatccctacgcgacctccgtgggccacctcataggctacatttgctggagttcagactgaagattggggccagttcatgcacatctgtgacataattaacactacccaggatgggccaaaagatgcagtgaaagctttgaagaaaaggatttccaaaaactacaatcataaagaaatccaacttaccttgtcaaactgtggtccaagtttccagtctctgattgtgaagaaggaatttgttaaagagaatttagttaagctactgaatcccagatacaacttgccattagacattcagaatagaatcttgaatttcattaagacttggtcacagggcttcccaggaggtgtggatgtaagcgaagtcaaagaagtatacctcgacctggttaagaaaggcgttcagtttcctccctcagaagcagaggctgaaacagcaagacaagagactgctcaaatctcatcaaatcctccaacatctgtccctactgcaccagctctttcttctgtaattgctccaaagaactcgactgttacattggtcccagaacagattggaaaactgcacagtgaattggatatggtgaaaatgaatgtgcgagtgatgtccgccatattgatggagaatactcctgggtctgaaaaccatgaagacatagagcttctgcagaaactctataaaacaggtcgggagatgcaggagaggatcatggacctgcttgtggtggtggagaacgaagatgtaactgttgagctaattcaggtgaatgaggatttgaataatgctatccttggatatgagaggtttactagaaaccaacaaaggattttggagcaaaataagaaccagaaggaagccaccaatactaccagtgagccttctgccccatctcaagatctcctcgacctaagtcccagtccccggatgcctagggccactctgggagaactcaacaccatgaataatcaactttcaggcttaagtttgcccaaaggaccagccaaaacctcacctcaagccacgcatatgataatagctatttatgaagaaattgatgctcaccagcacaaaggagctcaaaatgatggtgactgagaagaaagtggatgatcagctcactaccacatcaaaggtgccaactctctaaaacgtagcctctgtgcagctttgaagcctggaagacaatacctaccaacatgtcaaagccatggtggcacatttctgctataatgaagattaaatagagtaacagttccaggataacactgattcctgacaacagcgtgagatttcaacagaacttgtttggaacaaatactcacttaaaacttcagcagaagaaaaattacttagtccttaggccaaccaatttaaactgcagtgtcatgtttcacaggccttcctacatttagaaatcgtcacaacagctgtgatagagtagattattttactatggaattaattctgaatagatgagaagctaaaaatgtgagaactgaaatgtattattcagaaagaatactgagtgcccttcatt

SEQ ID NO: 241600 - DNA, 1343 bp, Homo Sapiens
  misc_feature (139)..(172): n is a, c, g, or t
ggtccaaacacaggaggtgggccaaatcatcagggaacagtcagtcacccgcttgtggctgagggcatgcggaggatgagaactacattaaggatctggggcatagcaataaatcattaccatgtacactatacagttnnnnnnnnnnnnnnnnnnnnnnnnnnnnnnnnnnaaggtacagattagtttatgttattccttataaacaagtacacttaagaatgtactggtgtgaagaaatgcatactgcaagttgtttcgaattaatgttctgactcttgttattataatgcaacctaaccaagaaatcaacatgctcctgctatttcaatgatgcttcatgagggcaaggcctgggctctgctagggcaggatggtgctcctagagctacctgagctggacaaacccatggcagacagaacagaaagtctggcacctgctgactccggccctccctgtcacttcatcacacagcaaatcttaaaactttggttttttcaaagaacatttaagtccatgttcattttcctgcttcagggaagatggtagcaaagttgaaagccgaatcccttcctattttagcacttccaagtatcctggatgaatataggggcgaggggctacactgacaatgagcaggatgcactctaggtcattgtggacaggcacggagctcttgagagcactgctcaaaggaaagagggaatctctatctggatggttggcctggaaactaaataatgactaatgccaggccagccccgttaccctggggtgggtatggatggccctgggctcccctccgtatcctggtatcgtgacgaaggccatgagaaccagctctggtttacagactcgatgcaggagctggaggtggccagcacattaccagcctgtcaaggatgaaagaccaccttgggcatggagaggcccagaggcaagcatcagagcaagagagaggaggtgggaagtccattcagaggcagacgtagattctacgttccagttacggctgatctatggactctcctgagcccgcccccagaactgccgcaactctccaaaggcttttattctttgaaatagagttgccattgaattaaaagcctacaggagagacgggcctggtctgtggtctcactaaagcccaatgcccaattaggtccagagaagaaagaagagtgagttccctacctggatttaagaactcggaccactttggactggtttgtccaatctctcttataatgctaaattccattgctgaagcctcctagaaaggatctcttctgcccaacttttttgtacaaagtcttttcttttaaatgaaaaaagcattgct

SEQ ID NO: 241601 - DNA, 1846 bp, Homo Sapiens
  misc_feature (383)..(416): n is a, c, g, or t
tatcccacctcacatgcaattttctgtcctaagggaatagaaaacttgggttttagggcacatgcagtaatgatcttaatactgctttacactttcgtgggaaggcagctgtcccacagcctggggaaggaccacatgctcagaaagggaacaagagagagggctgaacatcaggcacatggggaccctgagcatttctgtgcacgaggataaggagagtatgaccaaaaccctcctccctagaggtccaaacacaggaggtgggccaaatcatcagggaacagtcagtcacccgcttgtggctgagggcatgcggaggatgagaactacattaaggatctggggcatagcaataaatcattaccatgtacactatacagttnnnnnnnnnnnnnnnnnnnnnnnnnnnnnnnnnnaaggtacagattagtttatgttattccttataaacaagtacacttaagaatgtactggtgtgaagaaatgcatactgcaagttgtttcgaattaatgttctgactcttgttattataatgcaacctaaccaagaaatcaacatgctcctgctatttcaatgatgcttcatgagggcaaggcctgggctctgctagggcaggatggtgctcctagagctacctgagctggacaaacccatggcagacagaacagaaagtctggcacctgctgactccggccctccctgtcacttcatcacacagcaaatcttaaaactttggttttttcaaagaacatttaagtccatgttcattttcctgcttcagggaagatggtagcaaagttgaaagccgaatcccttcctattttagcacttccaagtatcctggatgaatataggggcgaggggctacactgacaatgagcaggatgcactctaggtcattgtggacaggcacggagctcttgagagcactgctcaaaggaaagagggaatctctatctggatggttggcctggaaactaaataatgactaatgccaggccagccccgttaccctggggtgggtatggatggccctgggctcccctccgtatcctggtatcgtgacgaaggccatgagaaccagctctggtttacagactcgatgcaggagctggaggtggccagcacattaccagcctgtcaaggatgaaagaccaccttgggcatggagaggcccagaggcaagcatcagagcaagagagaggaggtgggaagtccattcagaggcagacgtagattctacgttccagttacggctgatctatggactctcctgagcccgcccccagaactgccgcaactctccaaaggcttttattctttgaaatagagttgccattgaattaaaagcctacaggagagacgggcctggtctgtggtctcactaaagcccaatgcccaattaggtccagagaagaaagaagagtgagttccctacctggatttaagaactcggaccactttggactggtttgtccaatctctcttataatgctaaattccattgctgaagcctccagaaatgatctcttctgctacatcaagcctgggagtttacacaatgatacactatgttttaccttcaaagataatgctcctaacatgagtaggacaaattagaaatctatttttttagaagctgtaacagatttgggctttcttactctctggctgagggcacacatttgtgagtgagcaggttgataaagaaagctaactagccaataatgagaatgagccaggctggctgtcagtcttcaaaccaacagagctagccagcccggggtggaaaccaggatggggagggagacccatcagtggagagccaacttttttgtacaaagt

SEQ ID NO: 241602 - DNA, 886 bp, Homo Sapiens
ttggcctcgtgttcatgggagctcgttttcttttcctctaggcagagaagaggcgatggcggcgatggcatctctcggcgccctggcgctgctcctgctgtccagcctctcccgctgctcagggatctgcctcctgtggtccagacccagagccttctctgacgtcctctgctgaagccatcgttctgccagggcaccacatttggacagcgggtggctgagaacattcccactttggggagcctttgtttcacaccctctgatgtaggcggcagccttcctttcctttgggcctctggttatggagaaggctaaggcaaggtcctttctctcacagctaacaagttgtgcttctggaaccagagtctctcccgtttacttcttcaggaaacgctggggccagtcttcaccttctgtcaactggccgggggcagagaccctttctctcatcttgaaagccccagtgcattgcctgcctgcagcccccacccccgatgtctctgctgaggatgccttcagtaactcgtccaggccgtttgtggctctgaattgaggctggcctggcccccgggcctccgtgtcataggtccaagtgttggcatgtattgtccagtgaatccagcccccacctgtccccagttcgctcttcctgcacacctccagaaagccggccttgcccctccccagccttccttcacagccatcccgcctacgttgccattgcatttgtgaccgagcacttggatctgtctcgcatatcccacctggaaagggcaagaggagcgcatgggtccccagctgatccgtgctatgaggcagggccgggccatcctgccctcagaccgggatactcgagctggccatacccaggcatctctccctcttc

SEQ ID NO: 241603 - DNA, 1572 bp, Homo Sapiens
ttgggaatctgtttccctccatgaagttggcctcagcctagaacctgtggctgtctcctccatcacccaggaggttgctatggggacaggtcatgtagatgtatcttcagacagtctttcttttgtatcaccttcactgcaaatggaagactccaattcaaacaaggagaacatggcaaccttgtttacaatttggtgtactctgtgtgaccgcgcctatccctcggactgtcccgaacatggaccagtgacttttgttcctgacactccaatagagagcagagcaaggctttctctcccaaagcagcttgttctccgtcagtcaattgtgggagcagaagttggtgtatggactggagaaaccattcctgtgcggacttgctttggacctctaattggccagcagagtcactccatggaagtagcagaatggacagacaaggcagttaaccatatctggaagatataccacaatggtgtcctagaattctgcatcattacaactgatgaaaatgaatgtaattggatgatgtttgtgcgcaaagccaggaaccgggaagagcagaatttggtggcttatcctcatgatggaaaaatctttttctgcacctcacaagatatccctcctgaaaatgaactgcttttttattatagccgagattatgctcaacagattggtgttcctgaacacccagatgtgcatctctgtaactgtggcaaggagtgcaattcttacacagagttcaaagcccatctgaccagccacatccataaccatcttcctacccagggacatagcggcagccatgggccaagtcacagcaaagaaaggaagtggaagtgctcaatgtgcccccaagcttttatctctccttccaaacttcatgtccactttatgggtcacatgggtatgaagccccacaagtgtgatttctgtagcaaggcttttagtgatcccagcaacctgcggacccacctcaagatacatacaggtcagaagaactacaggtgtaccttgtgtgacaagtctttcacccagaaggctcacctggagtcccacatggttatccacactggggagaagaatcttaagtgtgattactgtgacaagttgtttatgcggaggcaggacctcaagcagcacgtgctcatccacactcaagaacgccagatcaagtgtcccaagtgtgataagctgttcttgagaacaaatcacttaaagaagcatctcaattctcatgaaggaaaacgggattatgtctgtgaaaaatgtacaaaggcttatctaaccaaataccatctcacccgccacctgaaaacctgcaaagggcccacctccagttcgtcagcaccagaggaggaagaagaggatgactcagaagaggaagatctagcagactctgtggggacagaagactgtagattaacagtgctgtgtattcagcggatgagtctctttctgcacataataaaggaaaagaaacaagcaattttggatgaaaatgcaatggaaaatacacataaccagttatctactatatggtttttatataaaatggttcctgattattt

SEQ ID NO: 241604 - DNA, 1110 bp, Homo Sapiens
aaaatgcaaataccttcatttgctgagaaatattaaatggtctataatcaaggccgagcctattttttccaaagacaaaattaaacattttgccaccattaagaccaaagcaataattcaaattaagatagctctatcacttgtgaattacaaataaatacttattatacagtgggaaattcactctaccaaatacaatagtaaatattaaaataaattcagtgacctttttaaaaaagattacaaaactgaatttattgagattcacacaagatgcacttataaaattagtactgaatgccattaaaacagaagaaatgaacataatcccgaactcccaacagcatctgcaaaggaatggaaatcttctgaaaatgacagcgcagtaacagaataattcaagcggaactgaagatctatccaaaccatgttcctgctctgaaatcagggttgtgtttggcaaagctttccccaaactattccattcacggtggcattgttccttttgttggtaaagggagacggaaaaaataattctaaaatggggctccattaaaacacacacaaagcaattaaaacctttttcatttttaacttaaaatacttcctggtttcacaaaggcatgtccatacaatttcctcaacattaatcttcagatttctttagttaatgcaaaacattaaaattcacttacttttttgtatttcaaatgaacaagtcagaacattaaagcttgctttatatttcatccaagaaacagacaaatcacctaaaaattgctttctgcctatgtatgtacgcctgaaacatttgcatgagagctaaacttcaaaatcaaaacatcaaaggaaataacagttaacagtaccatcttctggacagttctgacccagaagttgtagaagttttacagaaatgcaaacacggttgtcaagataaaatggggtgggaaataacttctatgatatagaccacaaactagtaattaagcggaaacacaatcttcatctcaaataaaaccaaaaagcaccttttggttgctgttcccaacagccatacacagatgcctccccacaccaacagccacccatacgcctcaaacaccccaa

SEQ ID NO: 241605 - DNA, 947 bp, Homo Sapiens
ttggcagaagcttcgcgagggcccagagaggcggtggggtgggcgaccctacgccagctccgggcgggagaaagcccaccctctcccgcgccccaggaaaccgccggcgttcggcgctgcgcagagccatggaattctcctggctggagacgcgctgggcgcggcccttttacctggcgttcgtgttctgcctggccctggggctgctgcaggccattaagctgtacctgcggaggcagcggctgctgcgggacctgcgccccttcccagcgccccccacccactggttccttgggcaccagaagtttattcaggatgataacatggagaagcttgaggaaattattgaaaaataccctcgtgccttccctttctggattgggccctttcaggcatttttctgtatctatgacccagactatgcaaagacacttctgagcagaacagatcccaagtcccagtacctgcagaaattctcacctccacttcttggaaaaggactagcggctctagacggacccaagtggttccagcatcgtcgcctactaactcctggattccattttaacatcctgaaagcatacattgaggtgatggctcattctgtgaaaatgatgctggataagtgggagaagatttgcagcactcaggacacaagcgtggaggtctatgagcacatcaactcgatgtctctggatataatcatgaaatgcgctttcagcaaggagaccaactgccagacaaacagcacccatgatccttatgcaaaagccatatttgaactcagcaaaatcatatttcaccgcttgtacagtttgttgtatcacagtgacataattttcaaactcagccctcaaggctaccgcttccagaagttaagccgagtgttgaatcagtacacagatacaataatccaggaaagaaagaaaatcccctccaggctgggg

SEQ ID NO: 241606 - DNA, 896 bp, Homo Sapiens
  misc_feature (808)..(818): n is a, c, g, or t
tcccttgaaagctgccgtggactgtggggtaagaggagcattcctgggagagccaatgaatgctaggtccagattagaaggctgctgcgcagcacggttaccttctagccatctcttcatctgacacatcaagctctactgtttcatcttcaacttcttctgctttgtgcttagcattcatctgaagcatcaatttctgaaaaatacaccagtgctgaccttcaggctagaaaacgcttgtgaaaggaactgatgtcaaacttacctgaaggcagagaaactgaagtcaaataatctagagaactagtcaaaattgataagggactctctgtaatacttgacaccacaatggtgtaagagaagtaagctctgagtcaaaaaaatagtaaggcaaagccccactgaattatacttagggtgaatttaaagtgtatttaagatcataaatcttagtattagttactcatatttaaagcaggcatactgctgacacattccggtgagtgggggaagaaataataaactttcagattttccctgaacttcccccacccatctttaagccatatggaagaaacactagtcgtcagcaataattttaaatgcatctcttggtggtggtggtggtgagtggaggaggtgggagaagtggaaggctggccctgtttaatggagggaatctgcacctcagccttaccctcctaaaactttagagtggataatgcatcccatgtaacatccatgcaccacagggtctctcctccaactctttcacataaacctttttgtgataattatcctctgaccnnnnnnnnnnnaaatgtgtaatctcttctttttagcaagaggagaaggaataaaagatgagaaatcagtcttaactagtttttctccaa

SEQ ID NO: 241607 - DNA, 1010 bp, Homo Sapiens
caatgcttttctataaaggcgcaactttgtacaaaaaagttggatattgatgtacctctaaagctagtaaacttccctaacgtttaattgccctacagatgcttctcttgctgtgggttttcttttgttagtggtctgaaataattattttcctgttctattaatacatagtgtattttgcacaaaaaaattaacctggtcaatagtgattaccaaaatatatattaataatcttggcaatttttgacattaattatgaaacattttagcccacgttagttctacattattcttcacttaaactcagctactgcaaattttgtctttctgtaaatgttattaaaatatccagtgagctctttagaaggactcagtattatttcaagactatttttgaggtaattctagccttttaaaatattctacagacctacggggcttaaaagaaccccagtaccgactaagcaaataggcaaaagacatgttggaaatgtagtatagtacttgaaacagtcactatcatagggataattggtgcatcctgtgtaaatggaagctgagcttgacacctggtgcttttaagtagggataaagtcatcctctcactgcaagcacagcatacctgtacctccaaaagtgacgttttagtgaacaggccgttttcaacacttgtgccttggggtgttcattgaagctttgtgaaaactactgatgttttctcagtctccttaaagttacgtccatgctttaaaatgtctgtgtaggagagaagtggggtttataatgttttctctaagatatctttgctgctttccagactttgaaactattaagcttcttaactgcctcttaccggaaatacttctggggaaacttcatggtcccaaatgtcattgccatacagcttcactagagttctttgaaccacagctgaaaaagctttgtattattttttaattccctccccagatatcatttagggagtattatataaggtggtggggcaaaac

SEQ ID NO: 241608 - DNA, 888 bp, Homo Sapiens
ggggatcgtcactcacgtgctcccgtttccccagtgtcccattacaggctctttcccaaagccctggggcagctgatctccaagtattctctacgggagctgcacctgtcattcacacaaggcttttggaggacccgatactgggggccacccttcctgcaggccccatcaggtgcagagctgtgggtctggttccaagacactgtcactgagtgagtgcacaccttgggccctgttgcaggccatggagggaatgtggctgggagagtgttgtcatcctgccactgctcttggggacagcacttccagtaggcagcgattccatgggggtagagctttattcccagagtatacacagggtagtatgcattgttttgcccagcccagcacattcaaggaagatcagtgagctcatttcagctctgatacatgaggcgctttccatggtgtcaggggaagtacatagatgacccagactggtccttgtcctcaagttgcttacagccactactttctgcgctatgctgtgctgccgcgggaggtggtctgcaccgaaaacctcaccccctggaagaagctcttgccctgtagttccaaggtgaggccgcagagcctggcagccgggggcggggggtgtatagagaacctgcgccccatgccaagtgctccatacagggcttctcttatctctttccatctcctccaggcaggcctctctgtgctgctgaaggcagatcgcttgttccacaccagctaccactcccaggcagtgcatatccgccctgtttgcagagtaagtcatggggagtagaggaagctgccatccaggggctcagagaaggtacatgtaaagcatgtggtcagtgtctggctcaggctgagtgccaa

SEQ ID NO: 241609 - DNA, 1378 bp, Homo Sapiens
  misc_feature (323)..(331): n is a, c, g, or t
  misc_feature (436)..(467): n is a, c, g, or t
aaaaaactgatttaagtgttagcatttctaaactgagactctaacagtaaaaataaagtaatctgaaacctgtttccatgggtaaaacactctgcctggtattcttgtacacaaaatttactaaatatgtgaatatcataaaatgaaaatatcactcccttcaatttctttggccttcacaaattcaatgtgactatgatccttttcaataatactttcaatgacattgtgcttctttagaaaaatcacttaagttgtagcatacaatagttaacattagttcttttattgctatggtatatgctaatttttttaaaaggggnnnnnnnnncccagagaacttattaaaatgtttgttaaagcaaacatttcagttggtttcctttctttgaagaataatagaaataaatgtcagaggagtattactaaggagccnnnnnnnnnnnnnnnnnnnnnnnnnnnnnnnntcctttattactcccatcctcagaactaactcaagacaagagatctgtattcaaaaagataaaacaatctcatctcagtaactacctcctatgaaacctaagagagaaaacctgtaatagctctcttaaccaacagccccatctgcacatcaccaagcaccagttccctttgggtagcagtaatgcttgtttttcatctttgcatattaaggactgttgttaacagatttatgggtcatttgtagcttactttgcaaatacctttcacttcttatgaaacacaatatgcccccaaacatggaccattattcaagtagacaaaatcactcactgacagcactttaacaacccgcctccacttcatcttcccattctctcaccctatgccttccaatgaacctagtctttgctagtgatgagtccatctggggacaaatactgctttaaagatgatgtaattttcaatgccaaccacagtgactttcccataataggtattaataaacacttgttgacatagttataataagctaaaaatagttaacattaatttttctctttatcttttattcttatggcacagaatttattttaaaagactgaaaaactgattccaatgtaataatcacttactgggccacacgctagatgacagacatgcctccctgcctaaaaagggctcaaaggaactctcagttatacatgagtgaattaaaactttaaatgtactacaagaaagaactttttatatgaaggattctttatgtagagtatcttttttgaaaaatcagattttcttatcctatattacactggttttaattgggcatgctcactttagtggtgtgcctcattacaatgtctcttttgtgttaagaattaacttacaaaagcatttaaaaatcacccaa

SEQ ID NO: 241610 - DNA, 797 bp, Homo Sapiens
ccattttcaaggtcagagagccccttgagaatctaacgaaagctgtggatcctcacacgcacatgcacacgcgtgtgaacacacacacatctgcacattttgggaaagctgttaacataccccccagcatcatctatggactccaaatatacaagctcctctccagggactagctgccccccacctcctacttcccaccccctccttcctctggagtccatgagctcagacaagacccctgatgccccctccagcccactgcctacttcttcccagcctgaatcctccctcgccctaaccccgggccctccctggagtgccatccctgacaatctactcacaggggggcttcctgaggctctgggggctcggcagggtgcccgcggctctccggtagcttagtcgtctgcagggacacaaggggatgggcgggcccgtgagctgggccagataaccacttgaaaggaaccttctggaaaacttgggaagccaaggcctggatcccacaggtgggcacacactggacactctgagggcctcctgcttagcactaagttccaacgaagggaacactttcacagggctcactggctcaccaggaggaagaaactgagtctcttgctccagaaatagctcatccagctcaagatggccacacaggatccagcccggtgtacaatcctcagctggtcattactctcctatggccaatttctaaggagaggcagccccttctctactccccagcctccccatctctgagggagctgagaaatagcagaatgactcccagccaa

SEQ ID NO: 241611 - DNA, 1110 bp, Homo Sapiens
  misc_feature (805)..(813): n is a, c, g, or t
tggctctctctctctccttctactagtctctggaccacaggaatttcagggaagagccaggtcctgtttgctgtggtgttcactgcccgatatctggacctcttcaccaactacatctcactctacaacacgtgtatgaaggtggtctacatagcctgctccttcaccacggtctggttgatttatagcaagttcaaagctacttacgatgggaaccatgacacgttcagagtggagttcctggtcgttcccacagccattctggcgttcctggtcaatcaggacttcacccctctggagatcctctggaccttctccatctacctggagtcagtggccatcttgccgcagctgttcatggtgagcaagaccggcgaggcggagaccatcaccagccactacttgtttgcgctaggcgtttaccgcacgctctatctcttcaactggatctggcgctaccatttcgagggcttcttcgacctcatcgccattgtggcaggcctggtccagacagtcctctactgcgatttcttctacctctatatcaccaaagtcctaaaggggaagaagttgagtttgccggcatagccccggtcctctccatctctctcctcggcagcagcgggaggcagaggaaggcggcagaagatgaagagctttcccatccaggggtgacttttttaagaacccacctcttgtgctccccatcccgcctcctgccgggtttcagggggacagtggaggatccaggtcttggggagctcaggacttgggctgtttgtagttttttgccttttagacaagnnnnnnnnntctttccactctttagtttttgattctgatgactcgtttttcttctactctgtggccccaatttttataaagtgtttttgagtgtcctatgggccggggcagggtccaagatcttttcccttccccaggcccctcggctccctcccagatcccacccccagccccactggttgccaaacactaaatctgccgacacccatctgccccacctcctgccatggccatgaaccgcgacccccactaaatttctagattggggatagggagaaagggagggcccaggaaggtctccccctg

SEQ ID NO: 241612 - DNA, 1103 bp, Homo Sapiens
  misc_feature (388)..(404): n is a, c, g, or t
  misc_feature (451)..(521): n is a, c, g, or t
  misc_feature (535)..(543): n is a, c, g, or t
  misc_feature (888)..(950): n is a, c, g, or t
taataatggctatctctggatagggaatcaggagggatttgtaattttcccgataaatttcccgtcctccaaacagcatccgcttcatactattatttgtggttgtattagtttgatataattctcttcagaaaggctctgtttcactatatatacctcaaagcatacttttgatgcagcttctgcaattcccatctaaaaagtagataacacttgctcttatattctggcatatgaagactatttgtaattaacacactataaaatatgtcaaagcaggccaggcatggtggctcacacctgtaattccaaaaccttggcaggaagatcgattgaggccaggagctcaagacgagcctgggcaacatagaaagaccctatctttacnnnnnnnnnnnnnnnnnttagccaggtgtaatagcacatgcctgtctgtaatcccagctacttnnnnnnnnnnnnnnnnnnnnnnnnnnnnnnnnnnnnnnnnnnnnnnnnnnnnnnnnnnnnnnnnnnnnnnnagaactcatctctnnnnnnnnntttttaaataaagcaaaatatgccacagcatagatctgattgtagaaaattattatatggagaactgaaaaatctcctaatcaagacaaaaattttaaatagaggaaaaaaatactatctatcattagttcaagtttccattaagagtagagtgtgaagtagctccaagttcagagctggagaattttgcatctctccctcttaccagccaattgactttaggtaaagaatactagagttttttagttagtaaaatatagttaataattctgtataaaggagcaaaagtaagtttctcattgtttcctatctcccttcataggtttgacatgttgaaattgtgannnnnnnnnnnnnnnnnnnnnnnnnnnnnnnnnnnnnnnnnnnnnnnnnnnnnnnnnnnnnnnttttaacagttaaaacacaaagcatacttttcatggaaccaagtgttccaaacacaaaaaggtcattctctgatggctcctgataacatacaatataaaatatagttataacaaatataatttagaatttatatttcagaatccatcctccaa

SEQ ID NO: 241613 - DNA, 2555 bp, Homo Sapiens
  misc_feature (2486)..(2503): n is a, c, g, or t
tacaaacatcaatgcaggtgaacaaagtgatgttcagagtcaactccattttgaaaataaatcacaacctgaaacactgtaagctttctcctgaagaaccatagttaatatattgcttaattttacccttgtataatcttttcatatacacacatctcagatgcaacttcatgaggaactgtacaaataaaactcacaaatgacaaaggaaaaaaatgacagttaaatgtctgaagaaatgtatcatcatcactattcaaacaacataaaggttaagtgatgatgcacttattcaaaaattgtacacaattcactatacaaatataatacatcggacagctatgtaggaatatacaagacttaaaaacagatctaaggcattatgctagattttagcattttgaggttcttgcacatagcttttacctgtagtaagaaacttaaaagattttgctttagtctataaagaaacaccagggagaaaattctaattaaaatcgaagccactacagtaattttcttttgtgcagaggatgctttgctcttaggcagcataccaccatacaaacactagaaaattttaaattcacaccaacaattaatggcttaagttgcatttcaaaactgattgtgtatctttgggttctgcaagtggatctgtgccacccatttcatgtgttaagcccatatgaactccatttttgaacacagattaaaaattgcattatataaactgcaaaaacattgctttcaattattacaggccataagagatacacatagggggaggggcattttaatctttgagtcaaacgaattcattgtagtaaaacagctcacttcactttttaaacttaccacattacatgaacacttaaaatgagttttacaaccaagttaatgtatgtatacttttcacattatgtttttcacatttagtaatataagtgaaacactgattatttgttctattaaacaaaaaccaagtactcagtctaacaaatttattgtgtacagcatgagaaatactgataatgaagggaactgatttggcttttgcttctatagtgatcaatatgatcagaggattccttcacttacttttcttctcctaactagatgtaaaacaaaatccattacctgattgaaaccgtaagagaatttatcatctcttttccttcaaaacagcaatgatcacgaattattataaattaccagtatcatgaagttgcggatttgtctgaattaggattgacattaaaatacagcgggcagatggataaaaaagaagagataggtagatagttttggacggtgttgtagtgaaaagggacttgaaactcaaaacaaaacaaatccagtttaaactccatttctcttttgtgctgtgtgaagttaaaagtcattctaattcacatatttctgaacattaaaactggtcacactgaattgtatgccacatgagcctcagcccacggggaggtcctggagttctgggccaacatctgcttgttttttccatcacagttgggcaacccaatggtttggtggagaaaagtagagccttttgaggggatatatgaactggtggccactgagaagtgttgttccttggccacctccctgtattgagacccctctcaagtggaaaaaagtagcgaaatgcaaatttccagaaaggttctttagtatggagcaacattttcagactgtctacttaccatctatctttgggctatatctcttcctatatttccataatgcgtacatatagagagagatataagtataaataggggtagtttgtacatttttcaccctgccacaaataaacaaacaatcaaatttcaaggaaaaacttctctgttcctaaaaagcctggctaatgagatattataaaatgctttgctttttagacatcaaaaagatatcattctgaaatttaggtaagaaaggtattaggggttaaggagaaatagctcaaaaaaggtcatcagtttcttggtattggagttgtctgaaactgacacctattaataaaagatttttcccctaccagagtgggcaagaaaaacaaccataaaagtggcctgcttagtaacatgtagtctttctaaggttcattaagaaagaatataaacatataaaaatcaagaattggttcctacagcggctgcatatcatatagattagataaatgacttataagcagaatcacaaggtttagaaaataaaaagtcttaagtctacaaattaggtctaatcaaggcattgatatcctttacaaaacacctttaggagacattgctatgaagatatctaatttaatactgaagtacctcatttttgagtcaattccacaatatgtatacctcacaaaaattatacaattaaaacacataagttctcaacttaaattattgcttgtttacatataaattggattttatgtaccttacaaaacttcggcttagtcagcactgctnnnnnnnnnnnnnnnnnncacatggcagaggttaaatctgtcgtgatatctgctatcaatttaaacccaa

SEQ ID NO: 241614 - DNA, 782 bp, Homo Sapiens
  misc_feature (370)..(381): n is a, c, g, or t
  misc_feature (689)..(697): n is a, c, g, or t
tttttgctgcaccaaatttaagaacgccctttcaggcaagcagtggtctctagctgttaaaacatttccttagtggatcacaatagcttctaaaactgcctttctagtaaaggccatcagagaggtaatactaaactgtgcatttgccaaataagaatatgaattgtataaaagctcatattccaatcctagatcaaatggcaaaagttctacaaagttggtttccatgtttgtataaaagctccgactgattttatgtattttgctatgaaattacctttgggtcttataatcagtatacctctactcaggaatgtgcaaatgattttatacagcacgacgctagtaccgctctgtatgacagtaaggnnnnnnnnnnnncttcttttctaaatggaaagaaaatatccctagtcagaaataaactgacaaatttacattctcctctcttaaaaaagtaaataaaataacattattcaaaacgtgaattagctatagacatacaatacaattacatagatacatatcaatacagcacattcaatctgccaaaaaattaatgattacaaagccagtatggatgctgcaatatcaagagagatgtatgtacaatgattagagcatttgtaattgcactatacctacaggcagtctgtttgttaaattacaggtactttctgagcaagggnnnnnnnnngtaagctgtgttgtttgaggctgggagaatcaaggatgagaacatctcattactgttgggcggctttggtactcatttaacccaa

SEQ ID NO: 241615 - DNA, 1889 bp, Homo Sapiens
  misc_feature (307)..(315): n is a, c, g, or t
  misc_feature (1247)..(1288): n is a, c, g, or t
ttctttctaaatggaaagaaaaatatccctagtcagaaataaactgacaaatttacattctcctctcttaaaaaagtaaataaaataacattattcaaaacgtgaattagctatagacatacaatacaattacatagatacatatcaatacagcacattcaatctgccaaaaaattaatgattacaaagccagtatggatgctgcaatatcaagagagatgtatgtacaatgattagagcatttgtaattgcactatacctacaggcagtctgtttgttaaattacaggtactttctgagcaagggnnnnnnnnngtaagctgtgttgtttgaggctgggagaatcaaggatgagaacatctcattactgttgggcggctttggtactcatttaacaggccgtgatttttctccctccccctttgttgttccaaaagagtgatttatatggaagtttacactagtgccaaataccactgtagttaaaatgagaccagtatcatggcctaattctaacgtcccagcagctttgaacaatcatgatttattttcttaaatcaaatttcaactcaagctgcttgacagaagcttgtcaatacatgtgctgtattttttttgcatttgttgaaaaattgcacatatagaattccaaacatttctcctggtaggttcagttacacaaatacatgttctatagaacactgagaggttacttttgagttaagtccacaaatcttccataagttcaacctaatcagttaccagttcaagaagatcatgaaggtggtaaactagcaggaacttcagattttggaaattaaaggtgtcggaataatactaccaaccaatgttcctggcagacttcattgaacttaaagaaccactgagagtaaaactggtttcaaataaagagacataaacagatttcctgttaagccacacaggatactttttacattgccggtttggacactgaacatgggacgtgaacactaacaatgtcatcttaaggacaaagaaaagaatggactgtgagaatcaaatttctagttacaactgtttggcaaatggcatttctggttcattctcagccagtcattttaggcttcacagtcttactctcttacattttaagataccagcttttattttttaagttcgtattcattttatttgacaaaaagccagctttggcaacacatacccataataaaagtcattttaaaatcgtggcccaaacactaagnnnnnnnnnnnnnnnnnnnnnnnnnnnnnnnnnnnnnnnnnnttaagaacaacctataaaaaggttctgggtagcagccattagggtaatgtagtgtctgttggcatcttttttggcatctgcaattgaaagagagggtaagaaaaagaagcaaagaagggaggaaagacaatggcacgtggcatttcaaaagaaaggactcctgtgtgtctttgatcctgccttctgcatatttctctgagcaatcaagctatggctgaaggtaaacatctaaaagaaatgacacttaacttttagatgggcatccactgtcccagtccaaagtgagacaagacagtatattctattaaaaaagaaactatgtgtgtatccaaagcaacacatttaaaaccgtaagtattaatacatataatccttcagcaaaaactacaaacttaaattaagctgatgatggcttaaatcgaacgatgtgtcctgactgtatcatttgagagaaaaacttgaccaagaatggaactaggataaaggccattgtaacctgggaaaaacatcaggagggaggtatgaattagcgggggaagaaaaaaggggaatcagctttgttttgctccatagaaaagaaaaagagagccaacttttttgt

SEQ ID NO: 241616 - DNA, 755 bp, Homo Sapiens
aaccatgtctgtcccttgctttctgtaaccccagcaactagcataatgcatggcacacataacttaaattcacctagatagatgaatgcagtatcagtcataaacaaagaatcctctcccacccatccgccccccaccctacacccacgcacccacacacgtgcacgaactctcccaaactgacattgcccccagccctcctgggcacaagaatacatataccaccctgcccaacatcctgggtgcccatatcatcttgaacagtcatgctgatgcccccggtaaaaatcactcttgcccagagcaacaggattctcgaggaagagggacagacagataggaatagtggttagtgccctgcacccccctgcccaaactggccagtcccctcctaaaccaggtgccatgtgtcctcaagtcaagtccattcccaggacctggccttccatccaccctggagggccagcgtggtggctggcctggtgggaccctgagggttctttctctggccggtcagggcctgaccagccttgcccgcactgttgggagaagtcggagaggaagtggagagagaaaaatatacccgaaaggaccaagagatgagagcgagcccagagcatgggcaggcatgttctggcctacctctgtaagcagagggcgggaggtggctgctcaggaagggaaagccccgacctcaggagggaagggggagaaacaaaaaggggagttattggggcccctccttcccaccccaa

SEQ ID NO: 241617 - DNA, 2081 bp, Homo Sapiens
  misc_feature (1628)..(1770): n is a, c, g, or t
ttgggtctgagttgtcagccgttgttttttcgtgctcgctagtcgccgccgccgctccgccatggggaagcgacagcaccaaaaggacaaaatgtacattacctgtgctgaatacactcacttttatggtggcaagaagccagatctcccacaaacaaattttcgtcgtttaccttttgaccactgcagtctctctctgcagccctttgtctacccagtctgcactcccgatggcatcgtctttgacttactgaacattgttccatggcttaagaagtacgggaccaaccccagcaatggagagaagctggacgggaggtccctgatcaagctgaacttttccaagaacagtgaggggaagtaccactgcccagtgctgtttaccgtgttcaccaacaacacccacatcgtggctgtgaggacgaccggcaacgtctacgcctatgaggcagtggaacagctaaatatcaaggccaagaacttccgggacctgctgaccgacgagcccttctcccggcaggacatcatcaccctccaggaccccaccaatttggacaagttcaatgtctctaacttctatcatgtgaagaataacatgaaaataatagacccagatgaagagaaggccaaacaggacccgtcttattatctgaaaaatacaaatgccgagacccgagagaccctgcaggagctctacaaggagttcaaaggggacgagattctggcagccaccatgaaggccccggagaagaagaaagtggacaagctgaacgctgcccactattccacagggaaggtcagcgcttccttcacctccaccgcgatggtcccggagaccacacatgaagcagctgccatcgacgaggatgtgctgcgctaccagtttgtgaagaagaagggctacgtgcggctgcacaccaacaagggcgacctcaacctggagctgcactgcgacctgacaccaaaaacctgcgaaaacttcatcaggctttgcaagaagcattattacgatggcaccatcttccacagatccatccggaactttgtgatccaagggggcgaccccacaggcacaggcacgggtggggagtcatactgggggaagtccttcaaagacgagttccggcccaacctctcgcacacgggccgcggcatcctcagcatggccaactccgggcccaacagcaacaggtctcaattcttcatcacgtttcgctcctgtgcctacctggacaagaagcataccatctttggacgggttgttgggggctttgacgtactgacagccatggagaatgtggagagtgaccccaaaactgaccgccctaaggaggagatccgcattgatgccactacagtgttcgtggacccctatgaggaggccgatgcccagattgcgcaggagcggaagacacagctcaaggtagccccggagaccaaagtgaagagcagccagccccaggcagggagccagggcccccagaccttccgccagggcgtgggcaagtacatcaacccagcagccacgaagcgagcagcagaggaagagccctcaaccagtgccactgtccccatgtccaagaagaagcccagtcggggttttggggacttcagctcctggtagcagnnnnnnnnnnnnnnnnnnnnnnnnnnnnnnnnnnnnnnnnnnnnnnnnnnnnnnnnnnnnnnnnnnnnnnnnnnnnnnnnnnnnnnnnnnnnnnnnnnnnnnnnnnnnnnnnnnnnnnnnnnnnnnnnnnnnnnnnnnnnnnncccctacttctgtcatcttctcagggacagcctatttatacaaccagtgtggtcccctgaccaacgccattacctgggacaagttttcagaccccagacttactgagcctaagcctctgcagggtgggcttctcggtctgttttgacaaaacttcaggggcttctgaaggctggtgttggacggcagcattgagtttcctgccgtgccctgcctgagctctcagggccctgctcacctgctctggctgtgaaccacctgggcttcatctcagcctgcctggcgtctctgtgcccctgtgaaatcttgaggg

SEQ ID NO: 241618 - DNA, 1593 bp, Homo Sapiens
  misc_feature (113)..(130): n is a, c, g, or t
ttggcttttaattttagcaaaatgttttatgcaaggcacaataggaagtcagttctcctgcacttcctcctcatgtagtctggagtactttctaaagggcttagttggatttnnnnnnnnnnnnnnnnnngattgtctgcttttcaaagaagtaaccatttgccaggggaaaacattctgcttttaggtagtttcaaaattcaggggagggagcctgaaatttttgccatgattggtttgttagaaagagcaggcatcagactacttctgataaaattgtttggaaggtcacgacctcgcaaaaacttttcaagagcaacaaggaagaattctgctgtgaagaacacagtgtacggatcctccgcatattatctcaacagaggacagtagctcaggaggcagcttcaaacggtgacctgtggcctgggccatctcttcgtcatgtgcttcacttttccctgtttccctgtgaactggcttccatggttctgtagggtagtgagtcggggttgtggctgcagcagagcaggagatgcttgcccgagtgggagcaacccacccccgtgtccccaatgcctcactcctggcttctagtgcagccctttgtagactcacctcgcaagaaggaagatctgcctggagacctgatcccagtccagctttttgaccataggtcatctttgtccccttgctcctttgcatcatgtcataaaatttgaggatatcagctgattattttttcttccaagaatgaaaatcaagcagaattgattcctacacgaaaaaaaagcacacgaatgccaaacctttcctttggtggactggacactaaccagatgagagtaaatttcttatccgtggacgtatgtaagctactgctgctgtgtgctctccacagccatatttattgtattaaacaatcagcactaaaccttcaaaaattgcccagtgttcctagttaaatgttcagaggggagaaatagatatattttaaataatgttttgctaatgaaaagagtaaatatttttgtttaaatcagcaaaaactttccattattttatatttccgtctactatacctaaaacaaaagattgccgttatacctgggttccgctgatgcagtcagccagcacctcctcacatgcacacatgattagacataggtgcactcggtaccaagagtccattttatggtccagcatatactccattgattcatcatcactgcatgtgttcagccagtgtatctcacactatccatacaaatctaaaattgatactggaaatgttattataggaggcagtgatcgcatttaaaatcaggccacctacaagtttaattttcaacatctcatgtttttatttgtcccattacagcctcaaatgttggtcataaaaaaaatttaggctaccaaagtttaaagaataaaatgaaaattttataagaacttacattaaaaactcagtagtttgcatgagtaagaactccttgagatacacagatccccccacatttgtatttaaaataattggtgaggcattgaaatccaggaattataagaaaagcattactgaatatgtgtgttataaaa

SEQ ID NO: 241619 - DNA, 663 bp, Homo Sapiens
ctctttagaacgaatatttctcctcattcctctactcttaataatggattttctgaaaaacatctattaattttatgcactattcaattcaaacaactttttaaaagttgccaaatctgtcacaaaatattaaacaacaagaaaaatatctaaaggtaaacttgagaggggtgtaaaacaaaagactctgagagcgcacttagctgtaaaacaatcattcctattcctaaattgagtgtttttggttacatgttctaagtgccttacaataaaccaggcaatgtgctttatctggagaaagggagccctaacttcaaagtttgagttcctccaacttttttaatagttaaatttcaagtacgttagactgaaaataatttgggtttccaagtcaaagattagaacaaataatcattaaagatcataaaagaagttcaggtctttaaattctattttcatttgttaaccaatatttcagttttcatgttttaattgctaaaattcagtaggagttgagcacgtaaatgaaacacttgatttacaggttctgtgtttccatccacactcaactctagtacttacagtactttgttctgtcacagtactttttaaatactccatcctttacccttcaatccacaggtttttttgtctgtttgtttt

SEQ ID NO: 241620 - DNA, 819 bp, Homo Sapiens
tgacttagtctttttgtacatgtgatattttattcatagaatccataaatggaagggaaatttctgagttcagagcaatacatatgatacaaaacttgatatatagactagagtttcttagccgaactggaggggctggcttaggtaatccatggattccctgaaactggggacaccattggaaatatgtgtgagctcaggggcagtttcctatgatttttaggcctcaaaatgtctcttggactcaaaattgccttagggcagaggacgtgtgtacccccagtatagaatctcggacagtgaatgtgagtaaacattcggcagaaaagctctgccaaactgagtgctctgatgtgactttttcatcaagtcagtattcctgggatctcttgtacgtgataatctcactcttgtacatgataatctcactcttgtacatgatactctcactcttataaggtttcatcgtttctgcttaccctagttttctttcccactctgttccctctcccaccagactggactctgaaatgggcatgtacagagacgaagagaccccaacatgcttcaggctttgagtggagaggacacagcctctgctgggacagggaatagagggatgtggagtccctgaagatgcttttggacaatggtctgaggttgggacagtggcaggagataccattcacccaggatctccaggacaagagatcagcctggcagttacatgtgttttttttcaaactggttgccaggttggcatgaacgatgacatcagagattccgaccttcctgattggagggaccggactccgccaa

SEQ ID NO: 241621 - DNA, 1879 bp, Homo Sapiens
acaaaaaagttggctcaacttcaccatcactaacctgcggtatgaggagaacatgtggcctggctccaggaagttcaacactacagagagggtccttcagggcctgctaaggcccttgttcaagaacaccagtgttggccctctgtactctggctgcaggctgaccttgctcaggccagagaaagatggggaagccaccggagtggatgccatctgcacccaccgccctgaccccacaggccctgggctggacagagagcagctgtatttggagctgagccagctgacccacagcatcactgagctgggcccctacacactggacagggacagtctctatgtcaatggtttcacccatcggagctctgtacccaccaccagcaccggggtggtcagcgaggagccattcacactgaacttcaccatcaacaacctgcgctacatggcggacatgggccaacccggctccctcaagttcaacatcacagacaacgtcatgcagcacctgctcagtcctttgttccagaggagcagcctgggtgcacggtacacaggctgcagggtcatcgcactaaggtctgtgaagaacggtgctgagacacgggtggacctcctctgcacctacctgcagcccctcagcggcccaggtctgcctatcaagcaggtgttccatgagctgagccagcagacccatggcatcacccggctgggcccctactctctggacaaagacagcctctaccttaacggttacaatgaacctggtccagatgagcctcctacaactcccaagccagccaccacattcctgcctcctctgtcagaagccacaacagccatggggtaccacctgaagaccctcacactcaacttcaccatctccaatctccagtattcaccagatatgggcaagggctcagctacattcaactccaccgagggggtccttcagcacctgctcagacccttgttccagaagagcagcatgggccccttctacttgggttgccaactgatctccctcaggcctgagaaggatggggcagccactggtgtggacaccacctgcacctaccaccctgaccctgtgggccccgggctggacatacagcagctttactgggagctgagtcagctgacccatggtgtcacccaactgggcttctatgtcctggacagggatagcctcttcatcaatggctatgcaccccagaatttatcaatccggggcgagtaccagataaatttccacattgtcaactggaacctcagtaatccagaccccacatcctcagagtacatcaccctgctgagggacatccaggacaaggtcaccacactctacaaaggcagtcaactacatgacacattccgcttctgcctggtcaccaacttgacgatggactccgtgttggtcactgtcaaggcattgttctcctccaatttggaccccagcctggtggagcaagtctttctagataagaccctgaatgcctcattccattggctgggctccacctaccagttggtggacatccatgtgacagaaatggagtcatcagtttatcaaccaacaagcagctccagcacccagcacttctacctgaatttcaccatcaccaacctaccatattcccaggacaaagcccagccaggcaccaccaattaccagaggaacaaaaggaatattgaggatgcgctcaaccaactcttccgaaacagcagcatcaagagttatttttctgactgtcaagtttcaacattcagtctgtccccaacaggcaccacaccggggtggactccctgtgtaacttctcgccactggctcggagagtagacagagttgccatctatgagaatttctgcggatgacccggaa

SEQ ID NO: 241622 - DNA, 1669 bp, Homo Sapiens
gctttcctctcctcacgcctctgctttcactctgatcgtgccgcccacgtttctgttctcaaccctgggttctgtctatactccatacccactgggtcctcaaagaagctgttgtactgttaagacaagctggtgggattcctagacacccagagcgataggggaaaagcctctaagtaccatcttccctggcctccgagagcaaaaggactgtctcagcagagatgctcacccttggctgggcacagaactgaggatgctgtgcccgcccagctcccagaggagacgctgtctcactggcagccgcatgtgcccgccatgagccatgcgtcttcttgtccttcatgtcaaagtggatgctcacctgctctgatctttgcagagctcaagacatcttcaattaaaaagaattctgagaggcagagaagcccttattctccatcctggatgggtgctcatggcagacaactgctcttgtcctggagacctggagcttgggcagttgcacgctggctggctcccttggccaggtctcccctccattgtggaatcgtgactttgtgctttgactaactccatgtgacatctgcttggccaccttggaattatgctaacagatttgcagaaataaagaaagctaagcaaagctgggcacgatcccatccaaactcccagcactgccaggaacctcatggccaaagagccatggatgcaaaccacaggaggagatggggaaaagaatctgtgtaggaaaaagtttctctgcctttcaggcccatgatggggcactggacaaatgcatctgggagcatctcactgcaagccaagtgcaggagaaagaggggcaggtgagcatcaggtgtcctctgagaggccacaggactgaggaaaggcctcatgccggggcctggggtggtgagagctgcccggaaagcagaggacggaggtctcaggaggtatctagagtgcactggtgtctgcctacaagagctaggatcccgtgcaaaattgacggggagcctctcggacccggcaaagcgaggccacctgcatgctgggcggcaggctgggaatctttttccatgttagaaaaactccctccccttgtcccatgtgtgatagaaactgcccaagacacccacatggtgagccaggggtctgaagacccagccatgttgtggacacaactcagtatttctttgggtaccaggagacaaacccatggagtggggttgatgctcacagacttcgcttggcattcagatgtttcagcacgagcccatctctacttataacaagagcagtctgcgaggtggagagcagccgtccttatctgtccagcagctgtttcaaagccctttctatgttcattctgtgcccgactcgagttaccccaagatcgatgaggtcctccttctgcaggtttggtaagtgactgccatcgatctcattgtccatgaaggcctctttatgttcacccaagtttagactttccagccaatcggccacatctggtttagtccacaggtggacaggtttagttgtaaaaggcttatttgagattggctgttgcagtatcgagggggatggcgacctactgcgtcccgctgggttcaagccaaatagatccccagaagggggctggcttggaaggctaaagacatcccaa

SEQ ID NO: 241623 - DNA, 1620 bp, Homo Sapiens
  misc_feature (808)..(857): n is a, c, g, or t
ccactgcttcctcttcgtgctgtctcaggcctccagtcccagcgtcctctggtggagagagaggagagcacagagcagcagttctgcagagctctcagaggcctgccctgagcccccgcctcctccttctcagcctccccttctccagcctccacaccgggagattccagaagcttctctgctgactctggaggttctggtttctgagtttgagcctctatgtccctgggtgtccattctcgagccttcccggagttcagggtccatttccacccttctgttggcttcatgcccctctcgccatcttccacaggcctctgctctgctgcctccactcctgcggaactgttgccttgggcctcccttgtcagggtctcggacagctctgcagtctcttttggagctacccctggaactggccactcttcttttctcccacattcttccgagtagtcttgtctttcttctcctgacctcagcctccactctgttgcctccagttgtaccaaactctgttcctgagactctctggagtcaggtctccatttatgggcctctgtcaggcccaacttctggtaggcagattcccctgggctcagtctactttccacctcttttctcctggggctttgctctcgagactctgctagtctcagactccgctctggagtttctccaggactcagcctccatttccatgcctctgacagtcgggagctcctgtctcccacctctcctgggctttgcctccagtcccgagcctccagaggcctcaggctcaactcttgggctccccctatccccagcnnnnnnnnnnnnnnnnnnnnnnnnnnnnnnnnnnnnnnnnnnnnnnnnnntcccttggggctctgatcccgcatctccccagggctgggtctccgctcccgggcctccagaggcccaggctttctctctgctagcagctcttcactccgttgttgttgctgctgctgctgctgccgctcctgccggatgaatcggttctggtgcactggcccgatggcctccagaaggaccgcagactcatccgggtctggaggtccagcctctacagtccctagcacagggctaggctccccaggggacagcccaagcttggcccggcggcgctccaggagccctcgtttccaggctggcatctgggacaggcgctcccgttctgctttctctcggcctcgaacggacgcctcctcctgccggcgccgggctagcagctgtagcttccagtctgggatggtggccatggtcgtcttgaggtgagggtagggagcactggggacagagaacaggaaggagaggctccagagagtgagacagcccgggggtgagactgagggtgggaggagaggaagtggagggggagaggtgggacacaaagcagggcagaggggctaaggatgaggacagagggaaagacggaaggcagagaactggggaaatggaaaaagtgaagagaagttgtgagcccaagttgggggtggtgggggtgatgtgagaggaagagtccggattggaggcaatgagggcaggagccagatgtggcagcacagggttaatgcgtattaaagaccgtctctaggatgtgagaaagagagccaa

SEQ ID NO: 241624 - DNA, 983 bp, Homo Sapiens
ttggcacaggcatctcgaacccagtgtgtcccacaattctcttcctatccatgcctgttcctcttccactgcctcatatgtcggtgactgtccaccttctctctctctccccctctccgtttggctcataggaaaagtgtcaccaagggctgtaagtgcagatttctaattatcccctaaatttgaacatttttcctctcgaaagtgtatggccattaccctattacagatcaacatcttcaatcactggaatgatggcaataatctaattgggttcattttatcctctatctaacaatgacaactcattgcctacacagcaggtagaaggagtttgttttcagaattgccctctgacctatttaagacgctcagatattccctgaggcgccttggcatggccacaaaggccctacacattccggctgcttcctcctttccagcatcctcgctcacgtctcctctcctcagttccaccctcaggaggcaccagaattcctcacttctttcactacaaggcaccgtcttactcccaagaccagtgaatccgaaggtggaccaccagctgagggactagattccagactgaatagaacaactttccctgtctctccacataaagtgtgtttgtttttcctcttacaggtttccttaatgacaacaaaaaagggagtaatcctacccactgtaagagtcatgactcttgattgcagctgacagaaactcatgacagcctgctttagatgaagggggagagaaggactggaagaatcttggagttgggaatgtcacacgtaattgaaggaagaacaagaaaactatagtaaagaaccctggggtggtgatgtagtcatgggccaagtgtcctggaaccctggggtggtgatgtagtcgtgggccaagtgtcctggaaccctggggtggtgatgtagttgtgggccaagtgtcctgggttttgggtggagaaagagtcccctagataa

SEQ ID NO: 241625 - DNA, 1314 bp, Homo Sapiens
  misc_feature (700)..(737): n is a, c, g, or t
  misc_feature (1188)..(1210): n is a, c, g, or t
ttggcggctggcctcaatgttggctctttggcaggaatggctgctttaaatggtggcctgggcagcagtggcctttccaatggcaccgggagcaccatggaggccctcactcaggcctactcgggtatccagcaatatgctgctgctgcgctccccactctgtacaaccagaatcttctgacacagcagagtattggtgctgctggaagccagaaggaaggtccagagggagccaacctgttcatctaccacctgccccaggagtttggtgatcaggacctgctgcagatgtttatgccctttgggaatgtcgtgtctgccaaggttttcatagacaagcagacaaacctgagcaagtgttttggttttgtaagttacgacaatcctgtttcggcccaagctgccatccagtccatgaacggctttcagattggcatgaagcggcttaaagtgcagctcaaacgttcgaagaatgacagcaagccctactgagcgtgctcccctctgagactggagtgagagggtcttctgattcctgccgtttgttcatcgttgtgcctaaagcatgtcgatgtggcgtcaagtacatcgtccaaatccctgtctcttcagcttctctgatgcttgaactctcacctttgaccttgtgttgacctttgatgctgatgtgtatttttattatgtttgtttctttcttcgnnnnnnnnnnnnnnnnnnnnnnnnnnnnnnnnnnnnnngtgctgccaaattggttttgctagaacgactgctgaaggggaaatatttaaacttgcatttgaatataaaaaaaatctatttttctagaacttcataagataaccacttgattttgtgattccaattctttgtaattgtcttcagagcagccctactagcacataccgcgtggtgtttgtatttctgtgaacacacagccagtccgtttctaggctttgtttctctgtgtgcttagttttaaagacaactttgaagtaaacaatgaaataaaagatgtcactaaaacctctgaggctcctgagcacattttgctgatacagtctgtggggcttgaggagaccgcatgtattgttctttcttttgtttttcttctgagttctcaactgcggagagcacctgaaccccctttcctttttgaccgcaggctgcactttgggccccagccagccnnnnnnnnnnnnnnnnnnnnnnngtggttcttccctggagcgactctggggagtcctggatatcccgcctgccccttcccctcagccccatgcttgttccaacagtctccacagcaaaatgtgatgc

SEQ ID NO: 241626 - DNA, 1370 bp, Homo Sapiens
  misc_feature (1068)..(1130): n is a, c, g, or t
  misc_feature (1235)..(1257): n is a, c, g, or t
gagcggccttgagcataataccaggcaacctgccagccccagagcagaaacccttgctgggatcccttccttcatcaacctgggtgtggaggatgctcaatagcgcttccacctccccctccccagcccctagctacatctctccacccttccctggacagtcctacttcccagctcacccacccaccagcagcttaagtctgggtgggatctatcatcagctcctccccctgtaacctcttccctccacagatccaccctgtgctcctctcctcacctctccccctccactcacattcttactcaagtctccaagaccctgaggctggatggtgccacaagagaggagggtcagtttccctcagggaaccaaaaaactggcttgcttggcacccagggacagtagctgtttggctctccacccaattaaaaaaacaaatccctgccctttcccccaccccactagctaagcaagagcagagctgtgatgaagagccagtgccgggtggctggtgcccagggctgtaaacagtgtgaagactgtagtattgtgcttgtcacctaggaaaagcgccagcaggtgaattgccgcttggtgtgcagatggcctcctacgggtgattgggagcgccctccttcctccaggtgctcactgcccctaatgtgctaaataagcctcttacccacctgctgccaccttctaggctctacctctgcttctcgtgtctctccaggcccccttcccaccctctctgagcaaagcagccagcctcccggaagccccggtaagacctggaggccacacgaagtgacagtctaagtgcacaggcaaacgctctaagggcaatagaggagaaagttgccacttcaaaattaaacaatacaatcttgaaaaaaataatcaaccctacaacaatttaaaacagcttctttgaaacccttttaaatcgatcagtttttgcacaaactatagaaaacagagaggtgaaggtgatatatacgaaggtgtgaagaaacagcaggaaacatgcaaaacttttttctgggcataatcttagtaggaaaggnnnnnnnnnnnnnnnnnnnnnnnnnnnnnnnnnnnnnnnnnnnnnnnnnnnnnnnnnnnnnnngcatcacattttgctgtggagactgttggaacaagcatggggctgaggggaaggggcaggcgggatatccaggactccccagagtcgctccagggaagaaccacnnnnnnnnnnnnnnnnnnnnnnnggctggctggggcccaaagtgcagcctgcggtcaaaaaggaaagggggttcaggtgctctccgcagttgagaactcagaagaaaaacaaaagaaagaacaatacatgcgccaa

SEQ ID NO: 241627 - DNA, 841 bp, Homo Sapiens
ttggcgccgaccaagatggagactgccgagcagccttgagccgttgagcagctgaacagaggccatgccggggcactccgaggcctgagacgaccacgcctgtgccgctgaggaccttcatcagggctccgtccacttggcccgcttggctgtccaatcacactccagtgtcaaccactggcacccagcagccaagagaggtgtggcgtggccctggggacgcatggctgaggcaggaacaggtgagccgtcccccagcgtggagggcgaacacgggacggagtatgacacgctgccttccgacacagtctccctcagtgactcggactctgacctcagcttgcccggtggtgctgaagtggaagcactgtccccgatggggctgcctggggaggaggattcaggtcctgatgagccgccctcacccccgtcaggcctcctcccagccacggtgcagccattccatctgagaggcatgagctccaccttctcccagcgcagccgtgacatctttgactgcctggagggggcggccagacgggctccatcctctgtggcccacaccagcatgagtgacaacggaggcttcaagcggcccctagcgccctcaggccggtctccagtggaaggcctgggcagggcccatcggagccctgcctcaccaagggtgcctccggtccccgactacgtggcacaccccgagcgctggaccaagtacagcctggaagatgtgaccgaggtcagcgagcagagcaatcaggccaccgccctggccttcctgggctcccagagcctggctgcccccactgactgcgtgtcctccttcaaccaggatccctcc

SEQ ID NO: 241628 - DNA, 980 bp, Homo Sapiens
ggggaccatagggcactataaaaggatatactgactgccattcaggcctgaaagaagtaaatgaagtgtcacaaaatgtaggtattacttttccattacagggatatttgtctggctcattccccaagttctgctgataatcacaatgtgatggcatagctttattactaagatctttcttttcttcatcaggttttaagagaccattattatgaccctcataaaatggaacaaattgttcctgagaaggttcagattctttacaactgttctcaaaaccatctttttccttttcaagctcttcaatttctttgtaaaactggaataattcattgtcaatctctgatttttcagagttaaatttctgtttctctttttgtcctcctctgtcatttataccatttagaacatgtgcctcattcctcccttcattacgtttctttttctcagggggtttgtaaatgggtcctataaatgctttacttgtgctatatatctcatcgtctgcggatactaatggaggacgtgcttcctgtaaaacctgtgaatcaatggattcaataacatctggtctattaccaggcatctcatcatgcaaaggtctatgcaaatctgtagttttgattttgttctcctgcaaataactatgtcctctgacatcaatgatggtcacagggacccaatcatttccagttttctcttggattctgtgaaaatcagcattactatgattgtgaaaaacatacgactctgtggttgacttcaattttttacagcgtggctcactcgttacttcttctctaggtcccaagaatttaccttcaatttcaccataagacatctctgtgaaggtgaaagaaaagcggagacagcactaaagccgaggtctggagggactaaaagcccacctctcagaatcgcggtaacaaacctcacccaacttttttgtacaaagttggccattataaaaaagcattgct

SEQ ID NO: 241629 - DNA, 1679 bp, Homo Sapiens
  misc_feature (241)..(282): n is a, c, g, or t
  misc_feature (990)..(999): n is a, c, g, or t
  misc_feature (1437)..(1445): n is a, c, g, or t
gaaaaagaattttaatttgggagaaaccattaagcgtccataaaactttaaatacactcacacataggcaacacaaataaattgcttactctgctgaactttcaaaatgtattttaatctcattccaaaaagaaataaaatttctagatacaaatacatctcattcaagtcactttttaacatacattctgcaacttaaaatattataaggattcaatattttcatcttttataatctcannnnnnnnnnnnnnnnnnnnnnnnnnnnnnnnnnnnnnnnnnaggtagtcagcaggtttacaaagtaatttctttaaagtctgatcagtattgataaatattttagcctattaaaaggaactagttaggatcacagaataaaacaaaatatggcaggtccaaacctaatggcaagattacaaatgttcatatggccaatcattttaaaagaactctcaagttgggtggaatatgttttaaaacaatactcttgctattctcaagcagcagtagttatatattttaaccatattcatctccattaaatttaaaataactatgcagctttctttactgtaatatacagtagctatctcttcctttctgttggattttattgtttcaagagtaactaataaattaccaacagaagagactttagcccctttccctcccctaaagcatggctcagtttgaagattgttctataggcagccactatgactatcaacagtaccataaaaccattaaaagcaatcaataactagagtcatgtgagatgtttcaaagactgctggaggtttctgtaaaccagggtaatcagaaatattacccttgtagatagccctctcataccagtaaatacaaagagttaaaattccaatgccacagtgtaacagttaacaatctattttgtaattttaaatattactacattaattcaccgtgagaatacagaggaaacatttaatacaagacattctgatatgnnnnnnnnnncccattgtatttgctttcttctggttttcatcagccctttaagggcacagatattttaatttaaagggtgatttggatatgcttttttgttaactgagattcatgccacagtcagatactggtgatagaaaagcccaaaaaggcttgtagaaaagaggcaagcagcaatccaccaggtcagaaaagacagaagtcctcgaaaaagaagaggagtaaaaatattttttaagctgctcagtgccactgttatttgtgtaacagttaccttcattttcccttcagctgatggtaattcagagtaaacagaattggacagtagactattatccactggtaaggtagagatagattctggataaataccccaggaatgattacctagaaaatcaaagacacaaatacaatttgaagagtaactaattaccaagctttttattnnnnnnnnntcttcctatatttgaaattaacaatatgtttagtggcacagtacatcattttatgttaaaaataaagtaaaataataatccttctagatctgtaaaaaattaacctgactagagactatctggcctcatcagtaaaggtacacattaaagcaaaaagtctgatatatttttaattaactgcactaaaaattggtaaaataacaaaacaatttcctcattgtataagaaatccaa

SEQ ID NO: 241630 - DNA, 1275 bp, Homo Sapiens
ttggataatttcaaaacagtgctttctttcccttggtttcatcattttcatatcttaaaccaaattacttcggtatctgacaacagcatcatctacctcagtcattaggatttcttaataaaaaagagattgtatttttgacttggttattaagattattaaaattagcccttcctttgaaatatgacatcagctttgctgttctaaatttaaaattagttgcttcatcagtaccacacttccagtttctataccaagccagtctcctcagttttcccattagaatggacatgttctgttcagcgtgtcatttctgtaatgcttcatgcagagagtttggtcatagtattaaagagaaaatacagtgagggcacaatgtctccagagctaaaagttagtgaacaagaaagaaagtccaaaatgaagtgatgaaagaatgaggacttttcttatattctgcatatttcttggaagtcaggacaagatgaaaagaaaaacatccaaaagaagtgaaattggtgacagaatgagaggagcaaagcataccagtgtagtaagtggaatgtttgaatgactttgccaggtcagagcaagtaatatttctgtatctgagtttttgtttgtgttttgataaggctaatgaaattgcattccaggtaggggttaacgtcaaatttccatggctggtagctgtgcttttggcatatcacagtgttgtgtcactactacaaggtaaagcatctacagcggagaatgagcttgaaaatgagagacctattgtgaataaatatgcccatgagagcatatttaataagcctctataacatgcagccaaaccagacattcactcctgcagagaaatgttgccctggagaaaaagagatatataaagataggctatcacccttcttttgctgcagtactaagcatagcaagaaattagaatcatttacattggaaatttgaaaattccctttatatacacaactttactgtgtataaataaaaaatatttattaatgcagtgatgtccgtcaggttgttttaggaatggcttctgcaattagaaaaatagcttgctagaatgtaaatgttctgttactggtaaatgtactgcacacattcattggacgttaaaacaagtgagtagccttttttacctgccagcagcatggctgtgtgcagccactaactgagacaataaattaccaaaaattataatgtaccgagctgaaaatgctcagtacattatgtggcatattctggatgtgatga

SEQ ID NO: 241631 - DNA, 1154 bp, Homo Sapiens
  misc_feature (225)..(235): n is a, c, g, or t
  misc_feature (318)..(332): n is a, c, g, or t
ttgggttttgattacttatggaagattcctcatttttatttgccctttatgcatttaatccacatgataggacattaaaaattaatataaagaaaaatcgtgctcatactgtacatctatttctgtgcttggaactacttgttaatagtttttatcgaagctgtcagcaataagggacataaaactgctgtattatacattgtggaattgaataaacagcctaannnnnnnnnnnctagtatagggtacttaagcatttccacttttggaagaaaagtgtattagtattttatattgcatttcatttaaaaggacagnnnnnnnnnnnnnnngtaaatccattcattgaaatggtttctaaactgtataatgtaatttggagcctatttagtaatagaattaaatgtcctatgtagtgctacaatttttgaattagaaagtgatcaaatgtaagaaaaaaatttaaaaattcagcccagaaaacaaaatagtgtattaaattagtttaatgtaaaaggaatttataagatttttttcctcaatatagatacctcacttgaaaagaaagcacagcatacttaaagtagttctagtaaacatgtcctagaaaacagttgctaaatgtaggacatcttttgaggaattagtttatgagaaataaaattttacttgtttttactatcctgttagaagtatttgtttatcctgataattttaagccaacatagtagtcttaaattacttttgaatttctaatctgtgaaggcagtaaatgaaatatctgttctgcaactgttgaaacaaataattggctacattgaccataattaaagttaaaattttgccaatgatgtacagttttatggttaaagttgctgtggttggttgcattacatgacacagaaaactgtcctctacctcacgtgaaataaatattttatatggttttactaaaaataagactcatgtatctggtcacctagtttacaaattttgaattatatttattgaaacatgacatactgtgctctgagcttatacctcaattgtattttgtgctgttttccattttcatgccttgtaaataacttgtatagattgtggatcaaatactaaataaaaacttttaatgccaattaaatttgattcaagtt

SEQ ID NO: 241632 - DNA, 1936 bp, Homo Sapiens
  misc_feature (1672)..(1681): n is a, c, g, or t
  misc_feature (1764)..(1778): n is a, c, g, or t
ttggcgagtagctgggactacaggcacccaccaccactcccggctaatttttagaaacaaatatttaaaatgacatattctcccaatacaatctatttagatctggagaaggaaaaatcagatatttatgatatagttttattttaattttgaattatttgtgtcacagctcagctttttggaagacaaactcaaacacctataatttcatttatatttctaattcacttggaacctttctgctttatgttacctagaaaatgataatttgtgtaacccaaaacttctaaaataaattgcttaatccttgaaatatgttattggaaaattttaagcagtgcttaaacaccattaaattattatgaacttgtaattcagaattgagtaaagaaatattttttctagtccttcatatattgaaaacttgccacatgacattgtatcgtcttcattttccagaagatgcgttggtgtgccataggtttctaacttccttgaaaatagttttttaagtcaattgtaaatatacgtattattgttaaaagtaactttaaactgcaacacatagcttcaaaacaatatagagattttgtaataccttataagtggagttggctaaaataccttatccatataaaacttattctattctttgcatgcttattttgtgtgttggttgctagcttaaagtttgatttgttgttactctttgtgtgccaaattcactaggcaagcggatttttcctcagacttcaaaaaataattcttttaagaaaaaatgtaaaaatgtttattctaaaaagctgcattaaagggacaacctataaaaagttttgctagctcatctttagaaggaagaaagaatattagcttgggtgatgtttaatttgggtggcgatagtttctgtagctaaactttatgagaaaagtgtacctactctataaaggtaataaatgtaaaacctcttgctgttattgaggaagctcttcaactaccctaaatttcacaaatgtaacttataacactatgaaaagatttgaccaacaatttacgtttgctgtgtgctttagtttttgtttaagcatattcttttgcttgaatttctgtgttcatgagagttagggtgttttatgcttcttgaactaattttataacatatttaatatattaccagttaagatataaaatcatttgtacatagcgaattgtaaagcagctattaaagtaggtgaaataaagtatatatttgccggttatccatatcttttagaagtcctgacagaacaaccagtttatttgcacataggtagcttctgtttgaaggaaggtaaagttataaggaaactcaaatactataagatgtgtcaaggtatttctccagaattaattgcaaagctagtgctgaaggattttaatcagcttctaaaattttcttctcaataagacatatgttttgattacttagggaagattcctcatttttatttgccctttatgcatttaatccacatgataggacattaaaaattaatataaagaaaaatcgtgctcatactgtacatctatttctgtgcttggaactacttgttaatagtttttatcgaagctgtcagcaataagggacataaaactgctgtattatacattgtggaattgaataaacagcctaannnnnnnnnnctagtatagggtacttaagcatttccacttttggaagaaaagtgtattagtattttatattgcatttcatttaaaaggacagnnnnnnnnnnnnnnngtaaatccattcattgaaatggtttctaaactgtataatgtaatttggagcctatttagtaatagaaataaatgtcctatgtagtgctacaatttttgaattagaaagtgatcaaatgtaagaaaaaaatttaaaaattcagcccagaaaacaaaata

SEQ ID NO: 241633 - DNA, 947 bp, Homo Sapiens
tgtacaaaaaagttggctaacaaagtcaagattcccggctggacttttgcagcttccttccaagtcttcctgaccaccttgcactattggactttggaaggaggtgcctatagaaaacgattttgaacatacttcatcgcagtggactgtgtccctcggtgcagaaactaccagatttgagggacgaggtcaaggagatatgataggcccggaagttgctgtgccccatcagcagcttgacgcgtggtcacaggacgatttcactgacactgcgaactctcaggactaccgttaccaagaggttaggtgaagtggtttaaaccaaacggaactcttcatcttaaactacacgttgaaaatcaacccaataattctgtattaactgaattctgaacttttcaggaggtactgtgaggaagagcaggcaccagcagcagaatggggaatggagaggtgggcaggggttccagcttccctttgattttttgctgcagactcatcctttttaaatgagacttgttttcccctctctttgagtcaagtcaaatatgtagattgcctttggcaattcttcttctcaagcactgacactcattaccgtctgtgattgccatttcttcccaaggccagtctgaacctgaggttgctttatcctaaaagttttaacctcaggttccaaattcagtaaattttggaaacagtacagctatttctcatcaattctctatcatgttgaagtcaaatttggattttccaccaaattctgaatttgtagacatacttgtacgctcacttgccccagatgcctcctctgtcctcattcttctctcccacacaagcagtctttttctacagccagtaaagcagctctgtcgtggtaccatatggtccccactatttcaagggtcttactctttgtatgatgaaaaaaatgtgttatgaatcgg

SEQ ID NO: 241634 - DNA, 1635 bp, Homo Sapiens
ttggcatgaattcatatttcccgagcttatggtatgcacaatactaggaaaagttcaaccatgagcaacattccttacatcttaatggagggaaacagagcttaaacaaatgactacagatttggaaggaagcagtgctgtaaggaaacctgaagtagtgtaaagagagaaagcttagtgggaaaggccctttcttttcatttggtgtcttgttttctactcttgctcatgaaatgttctgagtagcttcaaatatgttttaaattgaattgtgtagagtccagtacctctgagaggtaactgagtgcagctattctagggagatgtgttctttatttgtttgctttgttttatttttaaagaagctgtggaaaaattctttcaagtgtaagtttaaatgactttattactgtttgttcttatttggtcgcctatagtaacatttttaccctgctttaattgaaggctcttgagatctgtcaacagagaaactttgtagaagagacagtttatcttctgagccgaatgggtaatagccgaagtgccctgaagatgattatggaggaattacatgatgttgataaagcaatcgaatttgccaaggagcaagatgatggagagctgtgggaagatttgattttatattccattgacaaaccaccatttattactggcttgttaaacaacattggcacacatgttgacccaattctactgattcaccgtattaaggaaggaatggagatccccaatttgagagattccttggttaaaattctgcaagactacaatttgcaaattctgcttcgtgaaggctgcaagaagattctcgtagctgactctttgtccttactgaagaaaatgcaccgaactcaaatgaaaggtgttcttgttgatgaggagaacatctgtgagtcgtgcctttcccctattcttccatcagatgcagctaagcccttcagcgtggtggtcttccattgccggcacatgttccacaaggagtgcctgcccatgcccagcatgaactctgctgcacagttctgcaacatctgcagtgctaagaaccgtggaccaggaagtgcaattttggagatgaaaaaatagctcatttctccttgtcagtctccttgtcaccactctttttgagactgtttttgcaacaacaaaagcatttgttgacactcgtgctgttaagagatttgtttatgtttatattatactcaaaaacaatttcttcatctattcctgtactaatggtttctctttgcagttcacagagaatttggggctctcttcatgccttgaaattttggggtccatagtgaatattttgttatttatttgtttggctcattctttatatagtaatggaaacataagtctaggagttagaaatgaattttttagaccttagtaaaaccatttaaccataaaatggacaactgagaattctcccagctgcctgaaagcgtcgccaactgtggttatcctgcaagctgctacctgcaacttgggacgttgtttccacgtgctctgctggctacgattcttgcattctgggtttggcttttttctgtgtcatccactatggttatcctctaaataggcatttaatgaaaccattgtacaaatttg

SEQ ID NO: 241635 - DNA, 1801 bp, Homo Sapiens
ttggccatgatcgagctgtcaaatttctcatgtcaagagcaaaggatggttttcttgagaagctaaattccatggaattcataacactttctagattaatggaaacattcattttagacaccgaacagatctgtggaagaaaaagcacgtcattacttggagcacttcagagccaagctattaagtttgtaaataggtttcatgaagagagaaaaaccaagctcagcctcctcttagacaatgagcgctggaagcaagcagatgttcctgcagaatttcaggatcttgttgattctctgtcagatgggaagattgctttacctgaaaaaaaatcaggagccacagaagaaaggaaaccagctgaagttcttattgtcgagggacaacagtatgcagttgttggaaccgtattgctgttaataagaattatccttgaatattgccagtgtgtggataacatcccatctgttactactgacatgcttactcgtctgtcagatttattgaagtacttcaattcaagaagttgccagttagttcttggagctggtgcactgcaagttgttggactaaaaacgataactacaaaaaatttggctctttcttcacgatgtttgcagttaattgtgcactacattcctgtgatccgggctcattttgaagctcgactaccacctaagcaatatagcatgcttaggcattttgatcatatcactaaggactaccatgatcacatagctgaaatatcagctaagcttgtagcgataatggatagcttatttgacaagctgttatctaagtatgaagtgaaggctcctgttccttctgcctgtttcaggaatatttgtaagcaaatgacaaaaatgcacgaagctatatttgatctccttccagaagaacaaacacagatgttatttttaagaattaatgcaagttataaactccacttgaaaaagcagttatctcacttaaatgtgataaatgatggaggacctcaaaatgggttggtcacagcagatgtagctttttacactggaaatcttcaagccttaaaaggccttaaagatttggacctaaatatggccgaaatttgggagcagaagaggtgatgtcatcctggaaaactgggtagttcatctgaccatgggatgtgtttgttatgaagaaaatctggatgcctgtgattcgagaattgaacctgaaacccaaagtgaactggggtgggggaagggaaaaaggaaagtatcaagtgttgggaaactggattcagtgggatctacaaggaatgtcatttttgtgcatcctacagtgaggagtaactgatcaggtgtctataacatttttcattctctctggaaacagactcaggtttctttggaccaaatccaaaagaacacatagctgtaacacagctgtagttgactagaatgctctgtatactttatattaaaaaatgctttgcatttcttccagtgcaatgaaattcatatggtgtcccaccttatttaatgatggtacaatttaaaatcttagtcaacttctgtagaaagttttctctatgaaagtaaagctgtttgaaaaattattatttttttacagatctttctataaaaaataaacatcttttgattgcttggatttaggaattcaatttttgtttcagtgaccaatgtcaagttgcaggctttgtgtgttgcatatttaatatttctactaccaccgtatgtcaactgggtaaagccttccagagctctctaaatacctgaaagacttaaggcctttttttaagtaattaatactt

SEQ ID NO: 241636 - DNA, 1683 bp, Homo Sapiens
ctttgtacaaaaaagttggcatctctctccctggaaggacacacacaggcacgtgtgtccacacatgggtagacatttttatccctaactgtggtaagattgggcctatgataaagctgagtacagagacttaacgtcctatcctcaaaccaaaaagagtgaggagtgggagcacacaagcacattttcatatctaaataagaaaagtccaagttgagtctataaatgttataaacgggtaaggaaggtagagagtttatggatttagataatgtggaaactagaaggaatgggcacttctttctcaagcctgggaagactgtttgaagtaggattcttcaagttagttgccattgtgatttcctgtacaaaattattcatcacttaactgctgatgcttttctcttgaatgactggtcagatttttaatgtaactttgagactagagcaaatctgacttgttctgcttgcttcctttccattcattttactcatccaggcacttgacaccaaggtattgatgtcccactctcctgggcccctcattcctggctgatttcatgtgctgctcccctatcttagaaccctgcagtggttccctaatgttctgaggatagactttagttgccttaacatggcctgcaaagccggcttgatctgatcctagcttgcctcttctacatcatttctcaccactcctctgcaattcactattctctatgcaactaacacacactaccttatctttccttcaggccttctgtatcctattacttcttcccagacacttccccgctgtttatttaattaactcttcctaatcctgcagttctcagtctagctgtcaccacatgacttctttaaactcttaggctaggctagttgccctcctctaggctcacaccatgctctataatctgcatcacaaccccttaccatgctgtgttgttaattacttgttcttgcttgtaatttccagcagactaaattctgtgggggaaaataatcttctttgttttattctctgctgttttgatgagcatctagctcagtgctgggacatagtaggcactttcgtaaatttttgataaatgaagtgggtgtattgttctgtgacaggaatgggaaaaggacagcacaggatgccctccaaggatgagctggtccagagatacaacaggatgaataccatcccccagacccgatccattcagtcacggttcctgcagagtcggaatctaaactgtatagcactttgtgaagtgattacatctaaggacctccagaagcatgggaacatctgggtgtgccctgtgtccgaccatgtctgcacaagattcttctttgtatatgaggatggtcaggtgggcgatgccaacattaatactcaggaccccaagatacagaaggaaatcatgcgtgtgatcggaactcaggtttacacaaactgagggggccccagccctcgtaccacccctgttaccccaggatccatctgccctcataaaagtgttcaggtacagcagctgaggctgccctgaggaatcaaggggccattaccaaggggcaggaaaaggatatgtaaagaggtggccttcatggtagagcttgacccagaactactccacattcggatggcccagactgactcccatcccctgactttccctttgacttcacccc

SEQ ID NO: 241637 - DNA, 1813 bp, Homo Sapiens
tctccatctcatcatgactttaaaaaggttcagcagaccaaatgtaggcttttgcttggagttcacttccttaaatctccagcttttctctcagaccttgaccaggataccttctatgacaactcagaacaggctgaagagttacaggtttcctaagattggttctaagtgaagagcattctgagagtctgggtacttctgctcaggactgtgccctgggtagtgatggcattaagcaaacgctggcagagtaatcttttaagatgtgaccctaatgaatgaaactacccccactggctagtgttataaaagtcagaaaataaataattatgtctaattaagatatgggtagtctccacatacagaggatgtagtttactctggaacaggtatgactccaaagaaagagcaagggcacgggatcagctctgacaagaccatgctcagaccacatcaacattataacctcatctcatctgtgctccagaacctctttcactcctgatgtatccaaaaagcagcacatatctagaccatccaacacaggggtcttgggagatgtaacctcacctgaacgccatagagaaattcctctgattcattatctccctccgagtcgtcatcattccagaactggcctttgatgtcctagtggtgagaaataaggatatcatgctttgttaggtccctattatcccatggaaaggcgtgggatgatatggtgaggaagattcccacaaagattgggaaatatagaataactgaagccctgatccctttacacctttcatgtcaccctttgtgagagtctcagtctcttcctgatatgatcatatccataaactagctcttagtgggacagaggaaaacatctagggaattttggccttctgaagtctcagtatgatgactgagaggctctggtagccagtaggaaagaaatgcaaatgacttcaatgtcaaggttgactcctaagcatatctgggttccagtacaagctggcctcttccaggatcattacctaagacagttcccaagcacacctaaactctcttgtctcattattttctttctatcctttaaagtacttaactctcctctccctccccaagaaaacccactacacaaacacaccaagtaatactgtttctgtgccccttccctttcctttaacttcaaatagccactctatcttccaaaagggtagaagggaaaataccaagaaagggtgagatctgcactttgtctcctctaccctttgaacaatcagttggagaggtgggcagtcagttctcaccattgggtcagtgggtcacacacactctcaggtcagtgctaggcagcacccctccataccactagccgaaccaaggccaacgagatgggcatttaggagaccacaaagggagacaaggtagggcacgatgtcagggacaactggtgatctgttggggatggcaggctctgctgttgcggtggtaacaagtcactgtccttcaagagcagctgagatccagaatgtgaagatcttggggtgaggttcgtgagatttgaaaataaacagtcaagtgctgatctggatgatcacagaggaataaagagggaggcactaaatgtccagcctgggttgccctggggtgaggggtaggatgacggcagcgttaggccagaagtgccaacttttcacggtctttgttgctgcagaagtcaagaaaaatttagcctctttccaagggctgttgctgcttggtttctgttgctatcacaaggagaaaaaggtatttcagagggagtttttcttgttcaagccaa

SEQ ID NO: 241638 - DNA, 786 bp, Homo Sapiens
cccttcagttttgtgtaaacttgagttccgatcacacgcatgatttccttgtgtatcttggggtcctgagtattaatgttggcatcgcccacctgacgatcctcatatacaaagaggaatcttgtgcagacatggtcggacacagggcacacccagatgttcccatgcttctggaggtccttagatgtaatcacttcacaaagtgctatacagtttagattccgactctgcaggaaccgtgactgaatggatcgggtctgggggatggtattcatcctgttgtatctctggaccagctcatccttggagggcatcctgtgctgtccttttcccattcctgcagtttggtgtaggatgcattgaccagcccattgcgcaggatcgaatgccagttctcaatgtgggacccactgtaaggcagggtagaatacatgtctccttatgatatgaggttcccaggaacactcccaagactgccattcccacccattctcacccacacaggacatgaagatggacaggtacacctagtgatggacatgcacatggatacagtcacaggcatgcaagatgtgtgtgtgtggttaaactctacgtctctatttccagtcccatcctctcttcggtgcttcagctactcccatcctaaatcctcaactgctggttcagtatttttatttgcccattatcctgacatttcaaattcaataaattcatctgaaaatcaacaaatttatcactgaccccaaatatggcttccagttctgacttcatccaacttttttg

SEQ ID NO: 241639 - DNA, 1518 bp, Homo Sapiens
  misc_feature (961)..(1014): n is a, c, g, or t
  misc_feature (1115)..(1199): n is a, c, g, or t
ttggcttatctgtaaggtggaaatactatgtagcactgtgctcctgcgcctctccttccaactcaggttgttggcttgaaaccaggcaccgtggaagtatttataccagtgaaattgggaaaggcttacaaatcaatgctcctcatcccttttttggagaactgattgttacatgtttaccagaacaccaccacactccgcctacttctccattgaagtgctctagttttggtaaaatcttctccttgacttcaggaccctctccacatttatccccagtctataactcgcatatttcgtgttttcaaacagaaaaccgtaattcaggagtgaacagcatcctctgtaaggtgtcacaggagcagcctgaaatccattaggcagtcattctgaagctgtggtgaaatcgaagggaagctaatgttgcagctaggaagatgagatccaggctgaggatcacactttttccagaatacttttttagtgtttccaaagccagcaaaagccgtttagaagtctcatctccagaatggcagaatacacaaatgtaaggctttattttaggggtgggccctgggttttgcagtcaagtcagccgctatttgtatgagcaagacttcatcggtagcactactgggctccccctcttctacatgatggcagcaatttggccttagaaaatatgcctaagtgactccacaggctataagctattttcttcataagtagaaatggaagatttctgttaggaaggtagaagtcagttttgtccgtatgtgggccaaactattaaaaataataaggcctggggattcctatgttcttagatgctcaataaacatttcagttcatcaaactatgaccaacttacaaggctgtggcattgtgctagttcactggaccctgggaaagtcttttaaatccaaatgatactttttgttttttaaagagacaggatttnnnnnnnnnnnnnnnnnnnnnnnnnnnnnnnnnnnnnnnnnnnnnnnnnnnnnncttgagctcctgggctccagtgtcctacctcagcctcttcagtagctaggactaaggcacatcccaccacacccaggcaattttagaattttttgtagatnnnnnnnnnnnnnnnnnnnnnnnnnnnnnnnnnnnnnnnnnnnnnnnnnnnnnnnnnnnnnnnnnnnnnnnnnnnnnnnnnnnnnagcaccagccactgcccccaaccctgcattatgttcttaaaggcagacctgaatcctgtgcggtgtcaattcaggtgtgcactggcccctgagccttacatacaggacccgttccttaggatgacgttgcgttcccttgcttagagcctcagcaccatggcacctggctctcccccgatgcctgggtcttgctcttgcccatttcctagccagggtttgtggtccaggcaacctgtcacatcagtgtgttccaaacatggcacccagatctcaaaagcttcttcaacgctcccatggtttgggatacacctcaagtttt

SEQ ID NO: 241640 - DNA, 1056 bp, Homo Sapiens
catgtattaaatagcttttttaatttgtaaattaaaatcttacaaactaaatcagtgtgctgctagagggttctttttcacttgacatgcttattagaaagctgacccaacaagagctctctgcctccggtcactcttgctgtggtgctacgtggaagtgaatggagactgatctcaaatctgaactgcagctttcgctgctgtgagttggggatatgatagtcagctcaggcttcagattgtatgagaaaaatgaagagaagtcaacaaatattttggtactcttcattcatttatctctaaaaccaggagttgaattttcctcatcttgaaagactcttggggtctgtttctggtattttacaaaattgctaagtggaatgcatgaattgcattatgttctctggtaacacgtagagttcagacccttctgaactctgttgataataccacaccatgttctggacccatagctctggcatcctcaggggttgtgatccagctccatatattgtttaccttcaaagatacaattaaatggcttgatttttaagctgtgttctagtcgtttttgacttcgggagtagtgatctgtagtttccagaagcagccaagacagtcttcgattggagctgccttaagttctcttgcacttggtatcatttatgaaagagcatctcattcccctaaatggaaacaggcagtctgctgtagtgaggagagttctctgagcccagaagacccgggttccagtttgtacctcagatccctcatttatgaggtggtaggttgcagtccgtcatctctgaagtccccagaacagtgtttcaaaagggacacatttaccacactgcagcaagttgtaagtacctcagaccacaggccaaacaggcatgttactaagaatggaacaatgtttcccccaagataagtgcacaggactcctagaggaacaaattaaataaggcactaaatcatttgacatacagtagtcacggatattaaatttcctctcttgaacagatagaacctctcaaatgcactacgtggatccaa

SEQ ID NO: 241641 - DNA, 1633 bp, Homo Sapiens
  misc_feature (692)..(929): n is a, c, g, or t
  misc_feature (956)..(992): n is a, c, g, or t
ccccccaaaatgagaaattaaatatttaaacatattcaattacaatttttactagacaaatcttataatccacatgccttctctgaggttttcatctgtttgtttttttaaaaataattatagcaaatgctttagtacaaagacttagtccaagactattattgttttccaatttaaggtgaagcattctattaataaaactcactgtaaaaacatttacaattcagtgtaaaattactacttagtaaaaatgcatataattccttgttcctactgtctacaaaaaaggaaatttccactttttatgttttaaaattgattcaaacacttgtatagaggatttattaaacctgctcataaccacttcatagaaagtgtcagcaccatctcatactggtgcatcacggtaaaagaaaacattttagaaacaaaaccactaaaaccaacagtttaaatgactatttacagagcattaggtctccaagttaatatctccccactagagttttacaggcttcctcatatttctgaggcttaacaaaaataattttatagctgccactttgttccaaagacaaatttcctaataaaataaatttctatagaactggttcagtaaaataaaatctctcccctaaaccagagatcttaaaactgaatttttaaaaaatgctgccatgtgcagtggctcnnnnnnnnnnnnnnnnnnnnnnnnnnnnnnnnnnnnnnnnnnnnnnnnnnnnnnnnnnnnnnnnnnnnnnnnnnnnnnnnnnnnnnnnnnnnnnnnnnnnnnnnnnnnnnnnnnnnnnnnnnnnnnnnnnnnnnnnnnnnnnnnnnnnnnnnnnnnnnnnnnnnnnnnnnnnnnnnnnnnnnnnnnnnnnnnnnnnnnnnnnnnnnnnnnnnnnnnnnnnnnnnnnnnnnnnnnnnnngggcaacaagagtgaaactccatctcnnnnnnnnnnnnnnnnnnnnnnnnnnnnnnnnnnnnngctagggaaacaaaggtatatccccagtctctgcctctattaagcccacctcttgtctgttccagggtgaaagagtgagctttacacgttatgctggcttatatttcccaaacatttccccaacacgatgcaggcatattacatggctcaggacagtaataagatggattaagcattctgtacaacttaaaaagcattatcaaaccccttcaaaaacaaactaaacaatggctggttggatacctgtgaatgacccaaggctttataagataaactatttagaactcaatagaggggtctcctaatgaaatcaagccttctggaaaggaaacaacttgtagtttgcaagaactcaaagatactttggatccactacagagcttgccaaaattatgaaatgaaattttttactaagcagacaaaggaagatgcattatatttaaaaatcactgtcaattttactaggatttagaatataaaacctttacatctcttttacaataaagagaatttagagctcacttgtcaggaaaatatttttcattattaaaaaaaattgttataaagttatttcttctccaacttttttgtacaaagttgcccactttataaagaaaagcattgctcatcaatttgttgca

SEQ ID NO: 241642 - DNA, 930 bp, Homo Sapiens
tttttcagtttttcacattcctgatacagacgtaggagtgctcgtattttggattttgcatccaacttgtacttagttttaaattctgcacaaaaatgttccactaacttttcatcgaagttttttcctcctaagaaaggatcaaaagctgttcccagtactaatttggttgaaacaacaaatagtctggttattttcaatcacatttgtaactagaatcttaaatattactactcaaacaatgaaagactaagagactcaagactatatttaaattataacatgaaatccaaatcagtcaggaataaatctctaagatatttttgacttttaaatgactacatagaaaataactgtaaaaagccttttctttcctaaacaagaacacttaagagtatgctaagacaattacatcatctttatggagctcaaccttagcaaccgtttcctgttaacatctttacctaaaataaaactcttcattaccaagaagaaaaagcctagtaaagaggctcagtagcttaaagtcacaacacttaacgtgttttggacactgagttccaatgtatgactttaccttcaattttcccttgttaaaagcacaagcagacacttgaaaagctgaatgtcccatatcaacaaaaaccactatccgaggtttctcatccaggcttgggagatcctgcttataaattccgtaattcaaagcaactacaaaaaataagtatgtttcaattctttggttcacattttcttaggaatctcactgttacataaaattacacatgcaggaagcttgactattaacttgaaacaattaaaggtgaacacattacattccttttatacctgacttcacactgattttcttggaattaattattactctctttctgatttcagaacaatgctctatcacttttcaaccaa

SEQ ID NO: 241643 - DNA, 711 bp, Homo Sapiens
  misc_feature (188)..(196): n is a, c, g, or t
tatttcaactctagaaacattttaaagcttatgtaacgctcctgactcagtatttgctataagcaaagtattactttttttaatccttttgcattgtatgtaaatccttaatttaaacatgatatatcaggaaacagattttttaaaatctattatcaattgatgtattatttcgtccttacagttgnnnnnnnnntttagttaattaaatctttcagcttatcagcatttttctaaagttacctaaatagtgtaatgacatttcaattaccaagcatgtctgttcatctccatgtcctaatcgccctccaggaccatgaccacaggtataaacctgccctttctgagacagaaacacggagtgaaatttacaaagcaccacctaagggaaaacaagagaatattattaaacttctctgaataaaatatcctttattttatgaaaaagaaatagaatattgttaattgtttaaacaggataatggatacaaggggaatttataagactttaatttccacattttaagtttcctgtaataaaaataaaagatacatatgctttgttttaaaattatgtctaaaaacattgacacgaaaaaaaagaacaaagaaagaattaagcatgtgttacccacagaagagattacccaaaggaaaatataattttaaaccttcaattccaaaaaattagtagccagccaacttttttgt

SEQ ID NO: 241644 - DNA, 1290 bp, Homo Sapiens
  misc_feature (696)..(822): n is a, c, g, or t
tttttcagtaggtcctcatttttcaaaggctcactgtctgtattatgacacttcacaccaaaaagctaaatgaaactgatttgaagatgttttctgctgaaaatcgagtcatccaacatcttgaaccaaagagaaagttatttctcatatgccagaggtttcctggtgccataatggttaggtagttcaaaccttttgaaatgctgtgtaaaacaacacataaaatattacacaaatgcatgtgttaaacaactaaatgaccatattacaatcctataagcatcatggtcatttctatgagaatataccttcagctccagctctccagaactgtgttaataattcagccactgctgaattattaaataaatagtaaaactacaatttatatttgtcttagcctttgaaaaattctacatgttttataatataaacaatatgattgtactgtaagacatatataatcaataaacaaatgtacatatataactgtctctccctagctcactgcttctgttacctgtaagcacaggactgcttccattgttaacctaaagaaaagcaggtggggcaccattagtgccccagaattgttcttgcttttttcttgctctttttgtttacctttgcctgccttggctacctaaaatcagttgaccctctccatctctgctttgtcctcctgatttccaaacnnnnnnnnnnnnnnnnnnnnnnnnnnnnnnnnnnnnnnnnnnnnnnnnnnnnnnnnnnnnnnnnnnnnnnnnnnnnnnnnnnnnnnnnnnnnnnnnnnnnnnnnnnnnnnnnnnnnnnnnnnnnnnntggtctcttaagcttcctgtttcatgcattctatttaattgtggtcattgcttattagcattttttggagacttagctatgtatcattttctgaaagctcttacatacagacttggattattttcatagaatactgccaaaagggtgtagtgaacagcaatcatgttggcttttcaattatgtatttattttttcatgaaaactttttttaattccaaaaaatgcaacatacttcaaatcagtgcttggtgctttagtgaagagccatgccaaataacacagttggcctatatgaattacaatcaaatatgtaattcttctgttcaattcaggttgaagaagccagtgaaactttaccgcttttgatatttgcattcagcatataggagtctagaataagatacaaccccccaaatctggaagtatcttattctagactcctatttgcattcagcatataggagccaa

SEQ ID NO: 241645 - DNA, 1171 bp, Homo Sapiens
ttggctcttctcttctccctccctcctccttccgtgtgtccctccccgcccggctggaggctgctccggaccgggacgcagagtctgcggacccggcgccgaggcggccacccgagacgcggcgcgcacgctccggcctgcgcagcccggcccggccatggcggccccccgcccgtctcccgcgatctccgtttcggtctcggctccggctttttacgccccgcagaagaagttcggccctgtggtggccccaaagcccaaagtgaatcccttccggcccggggacagcgagcctcccccggcacccggggcccagcgcgcacagatgggccgggtgggcgagattcccccgccgcccccggaagactttcccctgcctccacctccccttgctggggatggcgacgatgcagagggtgctctgggaggtgccttcccgccgccccctcccccgatcgaggaatcatttccccctgcgcctctggaggaggagatcttcccttccccgccgcctcctccggaggaggagggagggcctgaggcccccataccgcccccaccacagcccagggagaaggtgagcagtattgatttggagatcgactctctgtcctcactgctggatgacatgaccaagaatgatcctttcaaagcccgggtgtcatctggatatgtgcccccaccagtggccactccattcagttccaagtccagtaccaagcctgcagccgggggcacagcacccctgcctccttggaagtccccttccagctcccagcctctgccccaggttccggctccggctcagagccagacacagttccatgttcagccccagccccagcccaagcctcaggtccaactccatgtccagtcccagacccagcctgtgtctttggctaacacccagccccgagggcccccagcctcatctccggctccagcccctaagttttctccagtgactcctaagtttactcctgtggcttccaagttcagtcctggagccccaggtggatctgggtcacaaccaaatcaaaaattggggcaccccgaagctctttctgctggcacaggctcccctcaacctcccagcttcacctatgcccagcagagggagaagcccctgagtgcatgagaagcagcaccccgtgcccccaccggctcagaa

SEQ ID NO: 241646 - DNA, 851 bp, Homo Sapiens
ttttctttaacattcttcataaaatgtgattaaggctattaaatataaagcttggatgagggtgcagataattttacaaaacagctgtattttggcaaatattttattattataaatgaaaatacagagttttaaaacggcacttaatctgttctctctctcagagtctgccaaataaatcagatttcttggaaaatattcaaacttgatacaatggaggcaaaattaactcttgtcaggtaagtcatttgccataaacgaaaggacccataactgcattaagcagagagggactgactgtcaatgaagcttctctatttgcaatttattcagcaaaagcgaacaatttttaaaaagtctctaatgcaaaatttagttcaagtatcaaaggtctgatcaattttaaaaggcattagttttatttttaataaattgaactggccttagatgaaagatatagttctgttcacatattttatacattatttacagagaaatgaaaaatcctgctgcctttgttatcacttgtcatttgcgaaattcttactaaaataaaagaaaatggaaagataatttgacctctgacttccaggagaatgttcaggccacatctaaaatttaccaaagaatggggaaaaaacttttttcaagttggaaggtaccagagtgattagctggtctaacctactcattttacagattagaaaactgagatatggccgggcgcggtggctcaatttgcataattctttacagtaaaacccattcagaaatagtaactacttgtatctaccatcagagctgaaagaaacagatttcgttaaaaaaaagtataggggtgggtcaaggca

SEQ ID NO: 241647 - DNA, 1497 bp, Homo Sapiens
  misc_feature (1298)..(1307): n is a, c, g, or t
  misc_feature (1378)..(1392): n is a, c, g, or t
tttaaaaacattttttcctataaaatgtaggtcatatacatttataaattggcggttttatttctaaagcagtgatgtgtgtgttcaaatagctgtcctgtacagtataatatctactcacttgaaactataataggtttgtctttctttgtattgaagttgaataaattcatctgatcagctgagaaaccaagcttgaaaaataagtatctaaaaatcaatgtagaaagtttagaattattgaaatgtagttatgaaatatgaagagaactatctatttcacaatggagctgaagtcacctcaaaacttacgggcttgaatctaaaacagaaacaaatattaaaatccaaagcaaatcacaaagttaggtagcagtacagaagcaggaaaaaaaaccacatcccttccttcagtgtgatgggcactaagttttgcggtcttcctccatcttgcagaagagtggtaaggccattcaatgcttagtgaaagtgagtacagatgaagtcagatttagcctgtctcccctgcaacttcaattatgctgtgtaaacagtgttacgttccaataggaggaacaatggaatttgcttataaaaactgattaaagataatcattattaaatgaaataaggataattaataactctgaaatgtttttagaactttcctgatgctacttgtaaagttagcactgctatgtattattgcttacatacagtacaacatcatatgccttctaacataaagcagtactgtgatttgtttgtacatatttacagattcttaaaaacaagctgtaaaaacattacatactttcagacaatacaaattagcacattggtactcacttcaaaacaaatggaatgcataacattaataaacatcataaaggaagactcacataaaagtccttgattgtcaagacacgtttatatataaactctaactgtgcagaattaaagattcaatcataggtacatccttatttgatgaaccatatttacagcatggtattgcataaaaaaataaaataatgtttacagggttttacttttttatccattggattaaagaaagcaacaaacataacaagaaatgtttgtctgctttagtttgtttcctaccaaagtttaagtgaaaaaaggaaacacggtttttatttgcagaatatagcaaaacaactggaaaattatttccctgaaataaagcaatttgaaacggaaaattaaattaaatttcagactcaaaatacttctcaatgattattatagtgcttcttcaagtaaatatactgtgnnnnnnnnnntgagttctagtttaaaatgttctaagaaatgcagtactacagtaatgcctacttttaaagtttcccggccnnnnnnnnnnnnnnnaaacagccctttaaaaacccaaattaatcaaatgaaagaagcggcaaaagatctaacctagctggcactctgcaagtgtctctcctctgtggaaacgaaatccaa

SEQ ID NO: 241648 - DNA, 1024 bp, Homo Sapiens
aaatacaaggagggcataggggatcccaggaaaataacactatatatcagaaaattcaacgtgctccaccatcaggatttccatcacacacatttaatttcttctgtacaatgtttataaacttgtttttcttttcaaatcatcagattttcagattaaattcagcactacacagtatgcccttgaagtaaaatgaggttactgctttatttggataccaagttcccttcagacagcattaaaataaagacaagtaagactacacagataaaatccagtataattcaaatccaacaatgaaaaatttcccccatattgttgcaaaattctttctactgaaatgctttgctacaataataaaaagcatacattacatataaaagataccagtgtactaaaaagtgacagaagtggactagcaaatccttcaaagcacattatataaatgactagcatttaaaaacattttttcctataaaatgtaggtcatatacatttataaattggcggttttatttctaaagcagtgatgtgtgtgttcaaatagctgtcctgtacagtataatatctactcacttgaaactataataggtttgtctttctttgtattgaagttgaataaattcatctgatcagctgagaaaccaagcttgaaaaataagtatctaaaaatcaatgtagaaagtttagaattattgaaatgtagttatgaaatatgaagagaactatctatttcacaatggagctgaagtcacctcaaaacttacgggcttgaatctaaaacagaaacaaatattaaaatccaaagcaaatcacaaagttaggtagcagtacagaagcaggaaaaaaaaccacatcccttccttcagtgtgatgggcactaagttttgcggtcttcctccatcttgcagaagagtggtaaggccattcaatgcttagtgaaagtgagtacagatgaagtcagatttagcctgtctcccctgcaacttcgccaacttttttgtacaaagttggcttttatagg

SEQ ID NO: 241649 - DNA, 945 bp, Homo Sapiens
ttggagacttaccgaggagggagcttgcggtgcgttctgggaaagttgctgggccagctcctttgtttccagtctgagcgttgcgttcggtttcccgagggtcttctgaggcaccgcggctgcgggcttctgagttcccggctctccgcagggaagcctcctcttcgtacctcgttttttggctcgtggggggtcctcccaccgctggccgacgcagccagcatgtccggggtgcgcgcagtgcggatcagcatcgaatcggcctgcgagaagcaggtccatgaggtgggcctggatggcaccgagacgtacctgcccccgctgtccatgtcgcagaatctggcgcgtctggcccagcggatagacttcagccagggttcgggctccgaggaggaggaggcggcggggaccgagggggacgcgcaggactggccgggcgccgggtccagcgcagaccaggacgacgaggaaggagtggtaaaatttcagccttccctttggccttgggactcagtgaggaacaatttgagaagtgccctgacagagatgtgtgttctctatgatgttctcagtattgttagggataaaaaatttatgactcttgatcctgtctctcaggatgcacttcctccaaaacagaatcctcagacgttgcaattgatatctaaaaagaagtcacttgctggagcagcacaaatcttattgaagggggcagaaagactgactaaatcagttaccgaaaaccaagaaaacaagctacaaagagacttcaattctgagcttttgcgattacggcaacactggaaacttcgaaaagttggagataaaattctcggagatctgagctacagaagtgcaggatctctctttcctcatcatggtacatttgaagtaataaagaatacagatctcgatctggataaaaagatacctgaagattactgt

SEQ ID NO: 241650 - DNA, 1426 bp, Homo Sapiens
ttggggaggaggcgggggcggccatggctgctgtggtggtggcggctgcgggtggcgcgggaccggcggtcctgcaggtggccggtctctaccggggcctgtgcgcggtgcgcagccgcgccctgggcctggggctcgtgtcacccgcgcagctgcgcgtcttcccagtgcgccccggctcgggccggcccgaggggggcgccgacggcagcggggtcggggccgaggccgagctccaggccaaccctttctacgaccgctaccgcgacaagatccagctgctgcgcaggtcagacccagctgcttttgagtcccgcctggagaaacgcagtgaatttcggaagcagccagtggggcattccaggcaaggtgattttatcaaatgtgtggaacagaagacagatgccttggggaaacagtctgtgaacagaggattcactaaggacaagactctcagttcaatctttaacattgagatggtaaaagaaaaaactgcagaagaaataaaacagatttggcagcaatattttgcagcaaaagatacagtctacgcagttattcctgcagaaaagtttgatttgatctggaaccgggctcagtcctgtccaacatttctatgtgctctgccaagaagggaaggttatgagttttttgtaggacaatggacaggtactgaactccacttcactgcacttataaatattcagacccgaggggaagctgcagccagccagctgattttatatcactatcctgaacttaaggaagaaaagggcatagtgctgatgactgcagaaatggattccacatttctgaatgttgctgaggcacagtgcatcgccaaccaagttcagctcttctacgctactgatcggaaagagacctacgggttagtggagacctttaacctcagaccaaatgagttcaaatatatgtctgtcatcgctgaattggagcaaagcggacttggagcagaactgaaatgtgcccagaaccaaaataagacttagaactgtacaggttggcccttcacctagttgactcagccctcgatagtctagagcccaccccctcctcaggaactcaagagctcagcatttataatgagcagttggtaatgagttgccctatgtgcttgtcgcaagcagtcacagagatgagccctattacttgatattcaggaacaaaggtacctgaacattctgataattatctcagcatacttgaggtttccttttttaagtgttcgaggttataacaagagacagccaaggacctacaagacagttgacttgattttgcacagtgtaacagcgcagttgcattctggccactttgaccttatagctcccaaatgatgagtttgtcatctttatgaactcatgacaggataataagcttgaagacctgctgtagtagatatggg

SEQ ID NO: 241651 - DNA, 855 bp, Homo Sapiens
  misc_feature (663)..(704): n is a, c, g, or t
ttggcgcgtattgcctggaggatggcggacgccggcattcgccgcgtggttcccagcgacctgtatcccctcgtgctcggcttcctgcgcgataaccaactctcagaggtggccaataagttcgccaaagcgacaggagctacacagcaggatgccaatgcctcttccctcttagacatctatagcttctggctcaacaggtctgccaaggtcccagagcgaaagttacaggcaaatggaccagtggctaagaaagctaagaagaaggcctcatccagtgacagtgaggacagcagcgaggaggaggaggaagttcaagggcctccagcaaagaaggctgctgtacctgccaagcgagtcggtctgcctcctgggaaggctgcagccaaagcatcagagagtagcagcagtgaagagtccagtgatgatgatgatgaggaggaccaaaagaaacagcctgtccagaagggagttaagccccaagccaaggcagccaaagctcctcctaagaaggccaagagctctgattctgattctgactcaagctccgaggatgagccaccaaagaaccagaagccaaagataacacctgtgacagttaaagctcagactaaagcccctcccaaaccagctcgagcagcacctaaaatagccaatggtaannnnnnnnnnnnnnnnnnnnnnnnnnnnnnnnnnnnnnnnnntgatgactcagaggaggagaaggcagcagccacccccaagaagactgtacctaaaaagcaagttgtggccaagccccagtgaaagcagctaccacccctacccggaagagttctagcagtgaggattcctccagtgacgaggaagacgagc

SEQ ID NO: 241652 - DNA, 966 bp, Homo Sapiens
cctatgttacataaaaactctctagtattatcttgttctgcttcttctccttaccctacatgtcaccatgtaaatctcctttgaattcccacctttgggggttttagctgtcttctctttgcctggaaagctgagctctctccttgttattcaggtctcaatttaaatatgacctccttaaagaagcctctcttggtcctccagtctcaagtagctatccagtttctctctgccacatccacctgtttaaattatctacatggcttgtgatttttcaggatttattactgttttgtgttttcttatttattttctatcagtttcatgagagcaaataacctgtcttgcttttgatcctcctgccccctgcacacagcttttttggtgttttagaaaaggctataaacttggagtcaggggacctaaattaaatgttggttctggctgcattttttacttccttgtgtgctctttagaagtcataccatctctctgaacccaatttatcttgatttttggtgctgtgttattaaagcttgctgtatagttcgggatctcaagacttttcctagtccaaggctaggtaactgtgttaccttcctcttggctattactgcataattagtgccttgtcctccactagatggtggtggcttggccctgtgtcatcatcttggattttcccctccctcacctcactgttgtttcaaggttttgtgtagagtctataggtgggattggagtgataggaactccccttggattaattggcttctctgcttctttgtaggtggattgctcaggtaatgacctggagcagttacacatcaaagtgacttcactgtgcagtcggatagagcagattcagtgttacagtgctaaagatcgcctggctcagtcaagtaagcctctaacctcctcactctttctgccttcttgcttcctgttttatgattattacacccc

SEQ ID NO: 241653 - DNA, 1646 bp, Homo Sapiens
ttggcatcacacttgccacaagtttagggctgaaagagctcctttctcattcttccatgaaatctaacttccttgagctcatctgtcaggttcttcggaaggcttgtagctccaaaatggatcgccagagtgttctccatgtactgggcatattgaaaaactccaaatttctcaaagtctgcctgcctgcttatgtggtagggatgatcactgaacccatccctgacatccgaaaccagtatccagagcacataagcaacatcatctccctcctccaggaccttgtaagtgtcttccctgccagctctgtgcaggaaacttccatgctggtttccctcctgccaacctctcttaatgctctgagagcctctggtgttgacatagaagaggaaacggagaagaacctggaaaaggtacagactatcattgaacatctgcaggaaaagaggcgagagggcactttgagagtggatacctacactctagtgcagcctgaggcagaagaccatgttgagagctaccgaaccatgcccatttaccctacctacaatgaagtgcacttggatgagaggcccttccttcgccccaatatcatttctggaaaatacgacagcactgctatctatctggatacccacttccggctcctgcgagaagatttcgtcagacctttacgggaaggtattttggaacttctccaaagctttgaagaccagggcctgaggaagagaaagtttgatgacatccgaatctactttgacaccaggattatcacccccatgtgttcatcatcaggcatagtctacaaggtgcagtttgacacaaaaccactgaagtttgttcgctggcagaattccaaacgattgctctatgggtctttggtatgcatgtccaaggacaacttcgagacatttctttttgccaccgtatctaacagggagcaggaagatctctgccgaggaattgtccagctctgcttcaatgagcaaagccaacagctgctagcagaggtccagccctctgactctttcctcatggtagagacaactgcatactttgaggcctacaggcacgtcctggaaggactccaggaggtccaggaggaagatgttcccttccagaggaatatcgtggagtgtaactctcatgtgaaggagccaaggtacttgctaatggggggcagatatgactttacccccttaatagagaatccttcagccactggggaatttctaagaaatgtcgagggtttgagacatcccagaattaatgtcttagatcctggccagtggccctcaaaagaagccctgaagctggatgactcccagatggaagccttgcagtttgctctcacaagggaactggctattattcaaggacctcctggaacaggcaaaacctatgtgggtctaaaaattgttcaggccctcctaaccaacgagtctgtttggcaaattagcctccagaagttccccatcttggttgtgtgttatactaatcatgctttggaccagtttctggaaagcatctacaattgtcagaagaccagcattgtgcgggtgggtggaaggagcaacagtgaaatcctgaagcagttcaccctaagggagctgaggaacaagcgggaattccgccgcaacctcccc

SEQ ID NO: 241654 - DNA, 1728 bp, Homo Sapiens
  misc_feature (1412)..(1440): n is a, c, g, or t
gatacagcaccagggcagacaatcgccccaacgggtggctcccccagatcccaggactctaggcccgtagacgcaagattcccctgctgccacgcaggcgaggagagctttgatgctgccacctcccttagagctggggtaccgggtcacggctgaagacctgcacctggaaaaagagacggcattccagcgcatcaacagtgcactgcacgttgaggacaaggccatcccggactgcagaccctcacggccttcccacactttgtcctcacttgcaacaggggcttcgggtgggcctcccgtttctaaagcacccactatggatgcacagcaggacagacccaagtcccaagactgcctgggcctagtggcccccctagcatctgctgcagaggtccccgctacagctcccgtgtctgggaagaagcacagaccaccaggacccctgttctcctcctcagatccccttcctgccaactcttcccactcccgggactcagcccaggtcacctcgatgattcctgcccccttcacagctgcaagcagggatgccggcatgagaagaacaaggtcggctcctgcagctgccgcagcagcccctcccccctccacattgaaccccacgtcggggtcactactcaatgcagtggatggaggcccctcacatttcttggcctcagccacagctgcagcacgtgcccagaggtcagaagtgagatataaccagagatcccagacctcccggaccagatcgtgcctcaaacgaaatgccagctccagctcccacagctctacggaaggcctccaggaagtaaagcggaggagggggccagcctcatcccactgccagctggccctcagttcctcaaacacagtgagtgaggacggacctcaggctgtctcttcgggtcaccgctgtgaaaacaaggcaggtacagcaccagggcagacactcgcccccaggggtggctcccccagatcccaggcctctaggccccgcatcaacagtgcactgcacgttgaggacaaggccatctcggactgcagaccctcacggccttcccacactttgtcctcacttgcaacaggggcttcgggtgggcctcccgtttctaaagcacccactatggatgcacagcaggacagacccaagtcccaagactgcctgggcctactggcccccctagcatctgctgcagaggtctcctctacagctcccgtgtctgggaagaagcacagaccaccaggacccctgttctcctcctcagatccccttccggccacctcttcccactccggggactcagcccaggacacctcgctgattcctgcccccttcacacctgcaagcagggatgccggcgtgagaagaatgttttgtgttcgaaattgtttgaggggtttgggtttannnnnnnnnnnnnnnnnnnnnnnnnnnnngcttacatgggcatccttcagcttttaataatctgaaaaactctatttacccattgtcaatgtgtataaattaatctgagtcaattttatacaataaaaggtgaacttttatgcatgaaacaataatttaacaagaaatgtacctgaagaagaatgttcattacaaatataggaaacataaatattaccaaatattggcaagcactaaaatgttcagaaatataagtctattacagttatagctctctcaagcaaaaaaacagcagagaaaaacttagtttaccccaa

SEQ ID NO: 241655 - DNA, 1611 bp, Homo Sapiens
  misc_feature (458)..(472): n is a, c, g, or t
  misc_feature (488)..(502): n is a, c, g, or t
  misc_feature (513)..(764): n is a, c, g, or t
  misc_feature (1482)..(1495): n is a, c, g, or t
ttgggtccagtattctgctttgtgattaggtcttttgatgtacagtggtctagtggagtcaagattcgcattgggttttctaaaattccagttgataaaagttccagataacacagctttcctgtatatagatcactattgggcaggtcagcaaagatctcttacagtgtaataataatctatgatgcttcatttagcagaaactctgcttaaaagaatcttcataatagtaagtttaggttttaaaaacttgtttcataaatatacatatatcctctctagtagtctggccaaaagaacagattttgttattgataatttgtagctggtaattttccacattttctatccactgtaatttttatgttgtcactgaagtgcctgcccagtactgtatattacagtctctcacaaacactgggaaaagggactgtcatcatcttgagtactctgtgtgnnnnnnnnnnnnnnnatatagatagatagannnnnnnnnnnnnnngagacagagtnnnnnnnnnnnnnnnnnnnnnnnnnnnnnnnnnnnnnnnnnnnnnnnnnnnnnnnnnnnnnnnnnnnnnnnnnnnnnnnnnnnnnnnnnnnnnnnnnnnnnnnnnnnnnnnnnnnnnnnnnnnnnnnnnnnnnnnnnnnnnnnnnnnnnnnnnnnnnnnnnnnnnnnnnnnnnnnnnnnnnnnnnnnnnnnnnnnnnnnnnnnnnnnnnnnnnnnnnnnnnnnnnnnnnnnnnnnnnnnnnnnnnnnnnnnntgagccactgcgcctggctgagtacaatattaatgtagacaaaccatgaagtttattatttcatataagaacattacaggtttgttttttcttgcatgtctgtccacctaatgtttaagtagttctggtagctcttcctattctttattctatttgattccatttctgtgattcttttattaccactgatgttttgtgatagttaactatgataaatttaactgatcatgatttatcttctagagtatttaaataatgtatgagtgaccacccaattccaacattaaaagtgtaatctgggcccataatttatagtgaaattgtatcaaaacatagggaaactgtattactgtccattttgaaaatatgaaacttgagtattgaaaatattcaaacatggaatggcagtattctaatttcagttagttggttcatgttaatttcttacctgttagatgtttaaactgcagtgacctttacttgtatctactctgtggtggaaatgttaaaccatgatagcttttgctaccaactcaaccacttaacttttagagcagttttggggagagtttatgcttcatctgagtttagaagtaatgtcagaaaatgttaagcatgtctgtattaagaaaatataaggtttctaattgtcttattaatatggtaattcaagtgaattagaaatatttaactgcaatcttgaattataaagttgagnnnnnnnnnnnnnngtatcaagatctcaacttgatgtaaagtaaatgagcagttacctggcgggattttttttaaataactgatttaatccataatcccataacaaacatagcttcacctcagtattttc

SEQ ID NO: 241656 - DNA, 1276 bp, Homo Sapiens
  misc_feature (261)..(269): n is a, c, g, or t
  misc_feature (1187)..(1219): n is a, c, g, or t
cagtggtgctgtgaacatctgtgtttttccagcacacttattaagttatttatatgtaaaaggatagaaattaaaactatttggaaggatttataagtatataaaaatgcataaatagttcagtttatattatccaactattatttttaataaagagccactgtatttcttcattatatatgttcaaggatatatgtttatccaagtccagggacttaatcaatgttcttaatagctaatgacaacagggtttacttaaannnnnnnnnaaataattaaacaaatatgtagtgatctctttagtttacatacactgtaggtatagcatgaatataatttcatttcagaatatttgaaagcaaatgtatattaagaactattataaatgaaatattaactactgttataaaatgattgcactgaatgaatgtataactacacttcttctctagaaagattaataaaccaatattaataacttctctcttgagatgttttacaattttccaaattaataagactatgctaaattaaagttcgattccattgttcagcatacaaataagctaatttcttaattatccttaagatgcttagccatgctgtttcagtttttattgtaactgggattcctaaatacatttgtttttggtgatactctatttctaggtgttagttacttaaagggaatttcacaacattatttttgcaaagttaaaattaaaactgggaacagttgacatggaacaccaaattcagaaccattttaactttaagtcaattttacaacttttaaaaattcttcccaatagggtaagaaatagaaagtaaaatatttaatgtcttcttatcattttatattttgttttcaccaataagaccacagcaatattagttactagctttaagatgcaaaattataaaacaaatacatgaagctgatctatgcttgaaaatgttaaaccaaataaaggaaaaaatcagatctatgtaaaaagcaaactcaggttcctgaagatgctagagagacaaaataagggtatgatatgaaggctgatctcaaaagacttcccacttacaagaaaccgagaataagaacattatacaatgtttattattcatcctccaactgacagcgagggtaagaagctttctaagattctaaatggacaatgcgtgggagtttnnnnnnnnnnnnnnnnnnnnnnnnnnnnnnnnntaaccctattctttgcaatacaaccccagataactataagtaaacaaattgatccaa

SEQ ID NO: 241657 - DNA, 1459 bp, Homo Sapiens
  misc_feature (1402)..(1415): n is a, c, g, or t
attctacaagaaattgataggtgcaatcctgttaaagaaatttcttttcaaaagtaaatgaaaaacccctttgaattatttatatattattttttgaaaacaatagtcatagggcctgctttgtcctatttaactataaatgttacacatttacaaactgaaacaaaaatgcatagtacagagatttaaatgaaatcttcgaaagaataaatttgcttttcagtccactgtattttcaaaattgattatcaccaagcttggatgaaagctgtgaaccacaaaccatttgtttatttaatagaaaaaagaatgtgtagattattagcaaagtaatgccttaaaatgtatcttcacacagttgaaattttagtataaacttgtatatcaagttgctttccattatttattctactttaaaaatatatacaactatgatgttcaaatatgtattctgagccattatgttcaaacataaatatctgggaaattcaaactgctgcaacaagttaggaaaggattaaggaaaaatgatgagctacaaattatgtagttggaggaagaaaaaaatgttacttagcatttatgtctggataggtatgtattttctaatttacatacacatatccagttgagtatagacaaccatcaaaatgtaaccagttacacagagactagactaagccaacactattttctataacaggtaacagtagtgatttcaaaaattttaatatctcaatagtttcaccaaaaattatttgtggtaatatgctaatattctgaagttttgagaggcacagattaaatgagtgcactatctatgccaaactcagcaagtctataacttactgtttaattatggtgtaagtatctgaacacaatagcatagagaggcaaccagaaaaggacattttacatatgcccatgctgatcaatcacattaacatcagtgcttacaactttcaaatttaaatataaagggacacttgcaaagccgcaagacaacttcagtacaaaaacccaaattgataaatctgcaaaatcttaaacttcttaatccattgataaatattaaggagtagctggtcttcaaacaccgtaaaaagttaaagggttgaaaacatgttcaccctttgctatacggtggcatctgaaattatcaggcatgacaacttgaatttgttttgctcttccatgcaagaagtatatatatgcattttaagatagcttagaattaagagttaacttctagtcagtattggtaagtgactaggatggctatccaatcagtattctatggtatcacataccaaagtctctacaatatgacagtcttgtcttgttcagaactcatcacttttgggtagggaagagaggcacggcagaaaagcagttgcaattnnnnnnnnnnnnnncagcagaaaagctttaaatatctatataatttgtacaaagttgg

SEQ ID NO: 241658 - DNA, 2153 bp, Homo Sapiens
  misc_feature (1739)..(1793): n is a, c, g, or t
gaggaattatctacagaacactgtctatttcaagtccaaaacacaaattactcatttttcttaacagaccgcataatttttactgcatgaatatttagggtttctctattcacaagtacagtttattactagactttaggcttgaatgattcatatatatagatatcagtttactacagaggacatgtacttttaacattttttgtttagaaaatattttacataaaaacacaaagcatttaccaacactccacaaccagtcttcagcaaagatttggctgaagataactttctacaaaacactccaagactgaatagaatgtagtattttacatactttagcttattgttgcagttaaaagctcccccttgtttgatggcttctgcatgtatctacaaagcagaagtcttaactggtgacctgttaaataacattgcctttttaagtgaacttgtccccagcccggaacctaagtagtcataatgaaataaagtaattgatatatgaggggcttttagtaagggctttttcaacctaataaaataataatttagtatctatcagtgcaatattcttttactgttttgtgttcaataaccacctggagtgctaattgtctagtataatcagttggcatcaaaatagaaagtaaaaagatgtacatttaatataccaattcttacctgaataatcttggatttctggagaatgttccacaaagtggaatttcttcctaaagttatgctgaatgtggtacaatgtgtacaacttggttaaccagtgcctgcttttcatttccaagatttttccttatcttgaatcaaatgcacaatcttacaactgtatcataatgcactggcttacagttctgtatataaagtccaactcaagcttattttggtttattgtacatgctttattaaaatggtacttgtatttacagtatctgcagaaagagtcccttccaaggcctcacacattcagacacatccatactgacacccactccacagccccatgcacccacaccagtgagatgtggagggtcagactcctaaaattaggcagctgttggggataagagttgatttgtttttcaatttttttgaaaacagaaaagcatgggggaatgcatttggccattacaatgctaattgagtttgtgtatattacatatatggcagttaacactgtaatattccttttacattctatatacacagaatgatatcaaggttttatggtcaacagaatattccaacttcagtcttaatgctgcttgtagtgatttctgaattcattataggggctttccctaaaaataattcaagtctatgttaagtgaaataaggcacaattaatattgatttgatttagggaaagggaaggaaagagaagggataaaaactggtttcaaatgatctttctgttggggaactagctctgacttaaacccacctgaaattccttctcctaatttccaaagatttctttataaagatatttttcttttccctgacaaagccaaaaagaaaagtttgggaattcacattttaatgtttcagtagcctgaacaactcaaattgatgtgtacccccacctcccctgatcaggtcgcctccctcacccatgttaaaataaaaacacagtatgtgacacaggagtcccttgatgtttcttgaggagatctgtacacttgagtagcaaatacatatctggttgtcttcaatatattttnnnnnnnnnnnnnnnnnnnnnnnnnnnnnnnnnnnnnnnnnnnnnnnnnnnnnnntaatattgtgactttcttgctctttaaaaaaatccctgtctccttcttttcaggatgatgaagccccactagacattacaaacaactgcaacaaatgagtttggcagcataaataatgtctagttattcaaatcttcatagtgagattaatttatcttgtacacaatttgttgaatgtttttcgcagcaggtgaatcaaacccaaagactccggacagtctgtgaaagggagtaagaattgcagttctgaaggcccctgactttggttgtttacaaagttcaatcctgtttattgtgatccttggtatcttcttcatctgtatattctgatggttcttctcctggttttaggagtcccaa

SEQ ID NO: 241659 - DNA, 718 bp, Homo Sapiens
  misc_feature (325)..(337): n is a, c, g, or t
ttggatcccattaccgatagaagagtatttaaaagacccaactcagcccatcttagaggccttggacaaggacagctcaccaaaggatgacgtctgggactctgtgtccattatctcgtttccggaaaaggagcaagaagatgttctccaaacgctttgaaccaaagcatgggcctagcccactggctccctggaagagatcaagccatcggagctgctagagttctgtctggactttccagagaccagtattcccttttgctgcctctaaaaggcctgtccctgcagacatgagagacagcaggtctcatgggggtgacaagcnnnnnnnnnnnnncttaaagaattttcaaaatcaaattccagaatgattttacggagatatcccaggaaaattaaggcttctcttaaacactaaaaaggcatgtaattgcttgttagcaaaatggatatgacacatctctgatacttttttcattattggttgggctgagcagtcagaagacctggtcgtcgtcttgactttggcaaatgagccggagccccttgggcaggtcacacaacctgtcccagcgagggacaccgagtggcccttcatgtacatccatggtgtgctggcttaaaatgtaattaatcttgtaaatatactcctagtaatttaagattttgtttttaaactggaaataaaagattgtatagtgcatgttttttaaagtct

SEQ ID NO: 241660 - DNA, 1714 bp, Homo Sapiens
  misc_feature (76)..(84): n is a, c, g, or t
ttggagctagtcacacttttcagaccaattcaaactgtctatgcacaaaattcccgtgggcctagatggagataannnnnnnnncttctcagctttatgaagagaagggaaactgtctaggattcagctgaaccaccaggaacctggcaacatcacgatttaagctaaggttgggaggctaacgagtctacctccctctttgtaaatcaaagaattgtttaaaatgggattgtcaatcctttaaataaagatgaacttggtttcaagccaaatgtgaatttatttgggttggtagcagagcagcagcaccttcaaattctcagccaaagcagatgtttttgccctttctgcttcactgcatggatacagttggtaaaatgtaataatatggcagaattttataggaaacttcctagggaggtaaattatgggaagattaagaaaggtacaaattgctgaggagaagcaggaaacctgtttccttagtggcttttatcccctcggcatgcgatggggctgatgtttctataattgcctcagactttcacatttactagtagggctgagagaggctttagtgaggaaggaatattcagaataaaacggttgagaaagctgagaagaccattgagttttgatcagttgtgaatagagtgcaaagccatggccaagctgtttttggaaacgctggccggcgtgtcttcagtggaaaaagcaaatcaaaatggagcgagagcaaaggggcgtcctcagtcctcaacctacaatcactgtatggaatcggtcctggcagctgaacataggaggtcactggaacaagtgatagtgcagattggctttcaacatcctcctggcttgagttttatcagctacagtgtgggtcctcttttgaagccttaattcacaacagcagctttttgggggtggggctgggcgggtgttgtcattgttctttcccttcctgtaagtgtcgctagttgctgcctcgtatctcagtttttctctgtttttgagaaatggacagttttttgaccaggatgtgacttcatgtttcctatggtgacttctaaaaccagcacagaatgatatgactcaacacagaccgacttggttatggggatgatgagccgcacagacctcactagttgtgcacaaataatgtgctatgatggggtgtaaagtgaaggcagaagagggtcagccgcattgttatgatactgggaaagtgctggtcaacgatttgagttagtttttagatatacattgaaatctttaatcagacattctcaagtttcacacagtagtttttgatgttatgtacacacacaccaaatgtgtaacagttcaccacttccagagtgtggtcatgcccaaaacatgtttaagaaaggaaagcagtagctccttgctaacgatgtttcaggaggtttgggggacttggttttaatgagcttctgtcatttagggcttctcttggccatggtccccttccttctggaactgtgatgtagtcacatcctacagcctttagtgctggttcactagtgtcagataatcagttcttggaatcgagactgccgtggcgaaggggtggtctcggaggcaggctctggagctgcatggatgtctttaggtggggtggtggctggctctcttcagcatgtaattggggaaaccctcgtttttactaagggtgatacggtggtgattttaa

SEQ ID NO: 241661 - DNA, 1131 bp, Homo Sapiens
ttgggtctcaggccctgccctgctctactctgcgctctctgcccgcgccgccgccgcctcagcctcggccctgcgctgcgcgcccggcccgtgctgccatggcctgccgcccgcgaagcccgccgaggcatcagagccgctgcgacggtgacgccagcccgccgtcccccgcgcgatggagcctgggacggaagcgcagagccgacggcaggcgctggaggcccgaagacgccgaggaggcagagcaccgcggcgccgagcgcagacccgagagctttaccactcctgaaggccctaaaccccgttccagatgctctgactgggcaagtgcagttgaagaagatgaaatgaggaccagagttaacaaagaaatggcaagatataaaaggaaactcctcatcaatgactttggaagagagagaaaatcatcatcaggaagttctgattcaaaggagtctatgtctactgtgccggctgactttgagacagatgaaagtgtcctaatgaggagacagaagcagatcaactatgggaagaacacaattgcctacgatcgttatattaaagaagtcccaagacaccttcgacaacctggcattcatcccaagacccctaataaatttaagaagtatagtcgacgttcatgggaccagcaaatcaaactctggaaggtggctctgcatttttgggatcctccagcggaagaaggatgtgatttgcaagaaatacaccctgtagaccttgaatctgcagaaagcagctccgagccccagaccagctctcaggatgactttgatgtgtactctggcacacccaccaaggtgagacacatggacagtcaagtggaggatgagtttgatttggaagcttgtttaactgaacccttgagagacttctcagccatgagctaactgccccctggcggccaggaagagaaacagctcctccccgactaggtggaatgctggccaggcaccaagcatgtgtgtgcacttgtacctggtggtttctctgttagcagtccattagctcatgctgaattatttttgccttactttcttaagaaacattaattttatgtatagtgagtatattttgcatgttttaaattgtaaatggagctaagtccaa

SEQ ID NO: 241662 - DNA, 1113 bp, Homo Sapiens
ctttgtacaaaaaagttggaaagcaagccctacatagagtccctggtgcagattctgcagccacagcgtcgtgtagacatgctccgggacatcatggatgcccagcgtcgccagcgcccttatgtcgtcaccttctgcggcgttaatggagtggggaaatctactaatcttgccaagatttccttctggttgttagagaatggcttcagtgtcctcattgctgcctgtgatacatttcgtgctggggccgtggagcagctgcgtacacacacccggcgtttgagtgccctacaccctccagagaagcatggtggccgcaccatggtgcagttgtttgaaaagggctatggcaaggatgctgctggcattgccatggaagccattgcttttgcacgtaaccaaggctttgacgtggtgctggtggacacggcaggccgcatgcaagacaatgcccctctgatgactgccctggccaaactcattactgtcaatacacctgatttggtgctgtttgtaggagaagccttagtaggcaatgaagccgtggaccagctggtcaagttcaacagagccttggctgaccattctatggctcagacacctcggctcattgatggcattgttcttaccaaatttgataccattgatgacaaggtgggagctgctatttctatgacgtacatcacaagcaaacccatcgtctttgtgggcaccggccagacctactgtgacctacgcagcctcaatgccaaggctgtggtggctgccctcatgaaggcttaacgtggctcttgcccaataccaaatcgccgctttccccacaagcccttcttcctgtatcaagaatgtgctttagagtatgtgagcaacctgtcttcagtgtagtacaaaggcagagtgagggggcttgtggctccttccaaccccactccccgttcagcacagccgccatctgcaaggagggcctaatcatgttacaatcactgcccactgaccctctcccagcgggcctcccccctcctactcaaggcacccccttcactctgcctacagactcagtcttattacagctttgaccaatggttggaacccaacaccaaagctttgctaata

SEQ ID NO: 241663 - DNA, 844 bp, Homo Sapiens
ttttattctccatgaggcatccagggtggtctgggctatgggaagaacccttcaacttgggagtagacaggtgctccaattcatagtgcccattctcagaggccttgtgtgtgagtttctccttcatgccttccttctggctcttcttgtgctccataatctgctggagctggtgcccagcatagtctggcttggtggtcagcgggccagccggcacagctacaccaaggacatctgacaccatgtaggggcgcagccagcccaccaagggagtgcttccggggctgtagtgggtctgtttgtggtagaagagaagtccatctacctgactcatgctcctgctcagcaagtgctgctgtccccaagggccatcttctttggtgaggaaaggattagggatttggacatttgttggagtcattcagtcacagaagcaccttcactttacaagcagccacgacagccaaaccagggacctgggtctcagcttgcagtaggaagaggcacacaagaaggatctaggcatgcaagtcttgctcctatctgggcctcagtttctccggacctcagtttctccatctgtaagatgagggagttggacgagctgtccattaagggcccttccagtgccagcattctgacttatccagcatgggtggagctcaggctctgaagggcagcaagtacatcctttctccagaatcagctttgtcccattctgatgctttgacacagcacaatcaaggaatattttaagactttgtgtaactaagtctctctgcagcctatcatcatgtcaaggcaataaagacaatggtttcgttacccaacttttttgtacaaa

SEQ ID NO: 241664 - DNA, 974 bp, Homo Sapiens
tacaaaaaagttggaatcgtttcatcccagccatggaggccaccagcaggagtgttcatggggatgtgggcgaggtggggcactttgaaggaatggcggtctgctggtgccctcgaaggggcatccttcctggtcttcgctgacccagaggcgctgtgcctgcatatcatccaccaccaccctagcccagccttcccactgccccaggaaaagctcttctcctggccacctctgccccccagcacctcaaacttgcatggctgggctgtggcctctgcggccaggaagcctgacactaggcaccccccaggcgagagctagtggggtgcagagggccccatgccagacagcccttggggctcgttgcactttaagaaataggatctgtggtgtattccagggggcctgatggacacctttcccgggcgtctgcagctgccctgcccgtgcccgcctgcagtggttggagacgggagtggcccttcggctcccgagctccctctggggacggctggctcactgtctccagttctcaatggccaacgaaggtgcttggaaacacctaaccttgcaagttttaccgccttttgaggaacacaaatcggagaacaaacccagggttcaggcgtgttttctgtgaatgttggatgatgaatttttgtctcttctggtggagctgtgcctggccctgtaggcccagggttggctggaaggtgacatctgtgtttcgttttagctgaggttggcagaaacgttcccaaactcccccagccctggaccccagcagatgaggaaacggccccatttactgaccccgcccccttttcgaggttatgctcacctggtcagctcctcacgtaattgggggtgagggaaagcatggtggtgccctgggccgtccctgtgtgaacgcaggcaaaagcagcccagtccccctcactgcttgagctaacactgccacctcttttgtgtga

SEQ ID NO: 241665 - DNA, 1008 bp, Homo Sapiens
ttggcgccgcctgggccaggcagccgagccgtccgagcagctgggctgggagcagggaacccggagctgggaatcgggagccgggcgcggggagctgcgcgaagccggggcggagcacgcgagctatgatgtcgacgtacaagcgggccacgctggacgaggaggacctggtggactcgctctccgagggcgacgcataccccaacggcctgcaggtgaacttccacagcccccggagtggccagaggtgctgggctgcacggacccaggtggagaagcggctggtggtgttggtggtacttctggcggcaggactggtggcctgcttggcagcactgggcatccagtaccagacaagatccccctctgtgtgcctgagcgaagcttgtgtctcagtgaccagctccatcttgagctccatggaccccacagtggacccctgccatgacttcttcagctacgcctgtgggggctggatcaaggccaacccagtccctgatggccactcacgctgggggaccttcagcaacctctgggaacacaaccaagcaatcatcaagcacctcctcgaaaactccacggccagcgtgagcgaggcagagagaaaggcgcaagtatactaccgtgcgtgcatgaacgagaccaggatcgaggagctcagggccaaacctctaatggagttgattgagaggctcgggggctggaacatcacaggtccctgggccaaggacaacttccaggacaccctgcaggtggtcaccgcccactaccgcacctcacccttcttctctgtctatgtcagtgccgattccaagaactccaacagcaacgtgatccaggtggaccagtctggcctgggcttgccctcgagagactattacctgaacaaaactgaaaacgagaaatgctgaccggatatctgaactacatggtccagctggggaagctgctgggcggcggggacgaggaggccatccggccccagatgcagcagatcttggactttga

SEQ ID NO: 241666 - DNA, 1429 bp, Homo Sapiens
tgtcagctcagcaaagatacaacctggataaagaacttcaggagcttgggagatgacagatcagatgccacagaaaaggggtgccaccctgtaaataggtttgatttctgtaaaagtgttctctgagcgtaaatgggaaagaagccttcctactgtgaggtaatactatgtgaatttttggaaaccatgcagtcactgacattggtgaagatttctaatttctctgggctcactgaaaaaaaatattttccttgttggcctccatcagtcaatacctgcacatccttgagtcacacctttgtataacttgaattaaaccataacgttataaaaatgatattggaagggcagctgatttttttaggacacaaatattcctgtacattccaagttatgctcctaggagaccataaagagtgctgcaaacagcatgctcttgaatagatgaaaatttgttcgagtctttccctaaaaggctgaaagccacatctaactaaaggtggtctgtgctctgttaacttcagccctgcgaacatcaggattgggtggaggtggtcgtattatcttggttttaaggcttctttagtgtcctgtggcgccattttgctgactcaagtcttggaccagggacgggtgggagctggtgatgcttggtgctggtgagttaatgattgtcccccaccccacctccacaaccataaaaccttcagagcattcacatcacaggaccggagaacgaaatgcaatagtttcaagtacccgcattcaaggggcaatttcatccatgtctatgccaaggactacttcccttttccctcccaaataatccctcccaacacaaagaaacaaacaaaaaagagctaggcaatggaatgaaatgacacccagtagtgctgtaggaattatgagaatgaatccagtcagtctaatcctcgaacacttccaagaacaaaggggggaagagttctgtggggcattccaccttcatgtgcaggaagcggctggcatggcaggctcctatcatccgcagatctgtcaccttcatcaggagttttggccaaaagtgtgtcacgtggtgttttcggtaattgatatagtgttcaaaggccagcaggaaactatcttggtacttttctattctctcaacacaggcaagccccgggcgatctgaagacatcagcaggacggcctgaaggagggctacttcagtgtcatccaggttgaaagaagacagagacatgcccaggtcaaagatggcgtctgacaccaccccaagacccccatttttcagctggccccgtgtcactgccatttccccattcaaggttaaagtctcactttctgggtcatagcgcacagcagcgcgaagggacatgatctccatgcagcagcctttgaggaggatgatctggtcttcacatggcaccaa

SEQ ID NO: 241667 - DNA, 1160 bp, Homo Sapiens
aacattcctttttaataaaatggaaaagtaacacatttaagtagagagctaaatatgatcgccattcaggctgtagtcaactgaagagggtgatttgaagggcattaagaggattcctctgtcctaaaatcattttttggtcaaggtttaattgatcaaagactattcctttatttaaatcacttactttcataatgtcttcctttaatatataagtgattacacagttttttggaggaaggaagagtatcgtttccattaatatattagcatgaattagttcatctgtgagagttctctacaatagtgcaacctcatataaggaagataaagttaagaattttgatttgagaggaataatttaccagggaactgactaaggaggtctaagtgaaggactgattggcaaaggggaatatttacaatatgtttttatatcttatttgatcatggcaccttcattttaaaaaggaggtggaaggaggtagaaaataacaggccagagattcagtggccctcttgagccagaagcttgtcagcaattcagctgggatccaaatcactgccttctgcctccaggcttggggtcttccccatatgctgcttccagactgtgaatgtcctggtagaaacagtggctaccgaaagcaatagaaaatgaagcctgagcagagagctgagagggcagcaaggctaaccttggactacagtcaaccctggtcacgatctgcctctttgttcttctgaggcatacagaagtaacagacaaatacatatttgaacaatcagacactaggttgatctcaggaccttcactcttgacttttatcacgatgactataatattaagaatattgtgttcggttggggccatttcatgcaggaattcagaaggaaataaacaatatacttgtcacaacctaactagggagtagagcaaagcacactggttttagataaagagaaccatatgcttaaatcctgacacttacttagctgtgtgtctgcagggaagaaacttaacttctctgagccctagtattttctttagagtggggatactgacagtatctatacttcacaggtttactgggaggattgtaagaggaaatatgtgaaaaaggtctaccctagttagtacagaggcattacaacgccaa

SEQ ID NO: 241668 - DNA, 1650 bp, Homo Sapiens
ctttgtacaaaaaagttggggcactctccttattcagaaagcccagcgttctgacagcggcaactacacctgcttggtcaggaacagcgcgggagaggataggaagacggtgtggattcacgtcaacgtccagccacccaagatcaacggtaaccccaaccccatcaccaccgtgcgggagatagcagccgggggcagtcggaaactgattgactgcaaagctgaaggcatccccaccccgagggtgttatgggcttttcccgagggtgtggttctgccagctccatactatggaaaccggatcactgtccatggcaacggttccctggacatcaggagtttgaggaagagcgactccgtccagctggtatgcatggcacgcaacgagggaggggaggcgaggttgatcgtgcagctcactgtcctggagcccatggagaaacccatcttccacgacccgatcagcgagaagatcacggccatggcgggccacaccatcagcctcaactgctctgccgcggggaccccgacacccagcctggtgtgggtccttcccaatggcaccgatctgcagagtggacagcagctgcagcgcttctaccacaaggctgacggcatgctacacattagcggtctctcctcggtggacgctggggcctaccgctgcgtggcccgcaatgccgctggccacacggagaggctggtctccctgaaggtgggactgaagccagaagcaaacaagcagtatcataacctggtcagcatcatcaatggtgagaccctgaagctcccctgcacccctcccggggctgggcagggacgtttctcctggacgctccccaatggcatgcatctggagggcccccaaaccctgggacgcgtttctcttctggacaatggcaccctcacggttcgtgaggcctcggtgtttgacaggggtacctatgtatgcaggatggagacggagtacggcccttcggtcaccagcatccccgtgattgtgatcgcctatcctccccggatcaccagcgagcccaccccggtcatctacacccggcccgggaacaccgtgaaactgaactgcatggctatggggattcccaaagctgacatcacgtgggagttaccggataagtcgcatctgaaggcaggggttcaggctcgtctgtatggaaacagatttcttcacccccagggatcactgaccatccagcatgccacacagagagatgccggcttctacaagtgcatggcaaaaaacattctcggcagtgactccaaaacaacttacatccacgtcttctgaaatgtggattccagaatgattgcttaggaactgacaacaaagcggggtttgtaagggaagccaggttggggaataggagctcttaaataatgtgtcacagtgcatggtggcctctggtgggtttcaagttgaggttgatcttgatctacaattgttgggaaaaggaagcaatgcagacacgagaaggagggctcagccttgctgagacactttcttttgtgtttacatcatgccaggggcttcattcagggtgtctgtgctctgactgcaatttttcttttttgcaaatgccactcgactgccttcataagcgtccataggatatctgaggaacattcatcaaa

SEQ ID NO: 241669 - DNA, 1205 bp, Homo Sapiens
  misc_feature (917)..(929): n is a, c, g, or t
ttggcttagaaatcttaaggacacttaatggcaagcaaaaaagtttaaatttagttttttataaattacatatagcacaatttatgtgtacatgtagaatcttttagtttttagtgtttatgtaatatattagacaataataaacatttacatttatgtttacatttatatttaatttttcaaatttaatttaaatttctaaatgcttctgtggatttaaattttggaataatcttttcttccccattgatactggaatcttgggaagtttcttactcatatcacaatatgttttatttaaatggtgcagcttacattgcagagtttatataaataatcacataacaagccaattccttagtcattttctgtattaaaaaactcagagatctagagagcttttggattgaaatatttccttggtgattttggatgcaaacctgatttctgtgttcacaccatggccagagatgggactgttagcaccacctgcttctttaatgtcgtccatatgatcagcatcagcaccagaaactccaggtgtcccaaacttaaagtgaaagccatagagtcctttggtgactcccatgttctgtgctggttctagaacatgctggtaaatatcagagtttctatgcttatggctgataagtagacatttttaaaaatcataaaaactgtattttctatatagttcagctaagtttatgaaaaagatgcagactcagtatttggagcattgctatcgctccatgatgtgtttaaaaattatttttaaattgacaaaattttatatctacatatatatatatcttgtaacacatgatgtttgaaatgcttaattctagccaattaaaaatgctttacctcaatagttatttttattgtgagaaaggtcaacatggtcttggcacttnnnnnnnnnnnnncaatatattctcaataactgtattcactctgcactacaataggtctcttgaactaattcctcctagctaacaggcattgtttatcatttaacagataattctctaagcccccttctcctaaaacttcagcatctcttaaccttctttctagtctctacttttatgagatcaacttgtttagattccacgtgagtgagaccatgaggtattcatctttctgtgttctgctccattggtctatttatctgtttttaatgccagtattggactgtttca

SEQ ID NO: 241670 - DNA, 1324 bp, Homo Sapiens
ttggctcaggcgaactctccagggcctgcagctggatctgcccctggaggaggagacgttgtcccttccgagagacctggagagtcttgacagaagcttcaatggtctccttactatgtatcagaggaagagggagcagtttgaaaaaataagcagtgctgatccttcaggagccttccggatgctgagcacagcctacgagcagtcagcccaggctgctcagcaggtctccgacagctcgcgccttttggaccagctcagggacagccggagagaggcagagaggctggtgcggcaggcgggaggaggaggaggcaccggcagccccaagcttgtggccctgaggctggagatgtcttcgttgcctgacctgacacccaccttcaacaagctctgtggcaactccaggcagatggcttgcaccccaatatcatgccctggtgagctatgtccccaagacaatggcacagcctgtggctcccgctgcaggggtgtccttcccagggccggtggggccttcttgatggcggggcaggtggctgagcagctgcggggcttcaatgcccagctccagcggaccaggcagatgattagggcagccgaggaatctgcctcacagattcaatccagtgcccagcgcttggagacccaggtgagcgccagccgctcccagatggaggaagatgtcagacgcacacggctcctaatccagcaggtccgggacttcctaacagaccccgacactgatgcagccactatccaggaggtcagcgaggccgtgctggccctgtggctgcccacagactcagctactgttctgcagaagatgaatgagatccaggccattgcagccaggctccccaacgtggacttggtgctgtcccagaccaagcaggacattgcgcgtgcccgccggttgcaggctgaggctgaggaagccaggagccgagcccatgcagtggagggccaggtggaagatgtggttgggaacctgcggcaggggacagtggcactgcaggaagctcaggacaccatgcaaggcaccagccgctcccttcggcttatccaggacagggttgctgaggttcagcaggtactgcggccagcagaaaagctggtgacaagcatgaccaagcagctgggtgacttctggacacggatggaggagctccgccaccaagcccggcagcacggggcagaggcagtccaggcccagcagcttgcggaaggtgccagcgagcaacattgagtgcccaagagggatttgagagaataaaacaaaagtatgctgagtgaaaggaccggtttgggtcagagttccatg

SEQ ID NO: 241671 - DNA, 830 bp, Homo Sapiens
ttggcgcagccgctaccgccgctgcagccgctttccgcggcctgggcctctcgccgtcagcatgccacacgccttcaagcccggggacttggtgttcgctaagatgaagggctaccctcactggcctgccaggatcgacgacatcgcggatggcgccgtgaagcccccacccaacaagtaccccatctttttctttggcacacacgaaacagccttcctgggacccaaggacctgttcccctacgacaaatgtaaagacaagtacgggaagcccaacaagaggaaaggcttcaatgaagggctgtgggagatccagaacaacccccacgccagctacagcgcccctccgccagtgagctcctccgacagcgaggcccccgaggccaaccccgccgacggcagtgacgctgacgaggacgatgaggaccggggggtcatggccgtcacagcggtaaccgccacagctgccagcgacaggatggagagcgactcagactcagacaagagtagcgacaacagtggcctgaagaggaagacgcctgcgctaaagatgtcggtctcgaaacgagcccgaaaggcctccagcgacctggatcaggccagcgtgtccccatccgaagaggagaactcggaaagctcatctgagtcggagaagaccagcgaccaggacttcacacctgagaagaaagcagcggtccgggcgccacggaggggccctctggggggacggaaaaaaaagaaggcgccatcagcctccgactccgactccaaggccgattcggacggggccaagcctgagccggtggccatggcgcggtcggagtcctcct

SEQ ID NO: 241672 - DNA, 1342 bp, Homo Sapiens
  misc_feature (866)..(886): n is a, c, g, or t
  misc_feature (964)..(972): n is a, c, g, or t
ttggagctccctcagcgtccggccgaggcgcggtgtatgctgagccgctgccgcagcgggctgctccacgtcctgggccttagcttcctgctgcagacccgccggccgattctcctctgctctccacgtctcatgaagccgctggtcgtgttcgtcctcggcggccccggcgccggcaaggggacccagtgcgcccgcatcgtcgagaaatatggctacacacacctttctgcaggagagctgcttcgtgatgaaaggaagaacccagattcacagtatggtgaacttattgaaaagtacattaaagaaggaaagattgtaccagttgagataaccatcagtttattaaagagggaaatggatcagacaatggctgccaatgctcagaagaataaattcttgattgatgggtttccaagaaatcaagacaaccttcaaggatggaacaagaccatggatgggaaggcagatgtatctttcgttctcttttttgactgtaataatgagatttgtattgaacgatgtcttgagaggggaaagagtagtggtaggagtgatgacaacagagagagcttggaaaagagaattcagacctaccttcagtcaacaaagccaattattgacttatatgaagaaatggggaaagtcaagaaaatagatgcttctaaatctgttgatgaagtttttgatgaagttgtgcagatttttgacaaggaaggctaattctaaacctgaaagcatccttgaaatcatgcttgaatattgctttgatagctgctatcatgacccctttttaaggcaattctaatctttcataactacatctcaattagtggctggaaagtacatggtaaaacaaagtaaannnnnnnnnnnnnnnnnnnnnggtcacaggagtagacagtgaattcaggtttaacttcaccttagttatggtgctcaccaaacgaagggtatcagctannnnnnnnnaaattcaaaaagaatatcccttttatagtttgtgccttctgtgagcaaaactttttagtacgcgtatatatccctctagtaatcacaacattttaggatttagggatacctgcttcctctttttcttgcaagttttaaatttccaaccttaagtgaatttgtggaccaaatttcaaaggaactttttgtgtagtcagttcttgcacaatgtgtttggtaaacaaactcaaaatggattcttacgagcattttagtgtttattaaataactgaccatttgctgtagaaagatgagaaaacttaagctttgttttactacaacttgtacaaagttgtatgacagggcatattctttgcttccaagatttggg

SEQ ID NO: 241673 - DNA, 945 bp, Homo Sapiens
ggggacgggggaaggtgttatacaaacagactaggtggaacccatttttcctaggcttctctaggacaatatgataaacaagaaagattagtatctactagaagaatttgtcatatttaaaatcaatatgattagtaaaatgtattttaagtacaaattaaaatgattagtatacatttctctcatctctagcaaacaagagagccctcattagacatagctgcctcctcaatgctgtatcttggacattagcctaaaaaaatatctttaaaagtgctttgcaggtatcacctcatctcatggaaccatagagggatctaagaaaaggctactccaatctaaaggactattttcaagcaaaaatagaggaattctgtgtatcatcaatgaaagaagtttaggggaagggtatagtacatattacaataatttaaaatcatacgcacatttcactttccatgcacgatgattttaacatgaaacaatgtaactatacatcactgaaaatacaatcaagctttgccccagaacttacagccactctctatagtcagttaagaaaaaccctggaagaatatatgataaatgtattcagattctattagttttatttgtaagcagattctaaacaaagaggatgaatttgggcacatatacacatgcacaaatgaaatggttcaacatctaaatgatatgacacaaaattaccactatgagaatcaagaggctactcttatgcaagcaacaaacttttacttatgatttcaaacatacagtttaattttctgttaaaactgttttaaaaaacagtactagggttcagttttctagtctcggcatgaactaatgccagggacctatttgaattaggaaagagacaaaatggtgtgattcgtgcttcattacatcatggtttgttgagggttaggtgaatatcttccccaa

SEQ ID NO: 241674 - DNA, 1280 bp, Homo Sapiens
  misc_feature (839)..(883): n is a, c, g, or t
ttgggggccctcaccttacaaatgggaaaactgaagcccagagagggtctttgacatccctgaggtcacacagcaagttccagcatctcttccttcccagaatctttgtcccaaagagtggtgtctctttgctaaatagatggttctgttctttcccttcttcctcttctttcctcggcttgtcctctccctcttattctatttgtctcgtggtgagtcacatagtgcctcatgtagacccccacttcccctctccagactctcaggctcgggaagtgatgggtttcctgggaatccacaccatgatgactcgtaccttctacatctgtgcccagctgtggctgcctctgggatggtggatgagttccttcagggctttgtgtgaactgggcctgagccaagcccctagatggggaaaacaggccacattgttcaggagcacaaaggatgttagcaagaaaagacacatgacccatggccgcccacacacccacatctctccacgccccgtgccatttctgcccgccgctgcgtgctgggcggtttcctctgcacagagtttcccttgagctgctactctgaggtcgtgtgcctgttgtcatcttttaaagcctcagttttgtcgccatttcccaggtgacctctagcacactcaagtttgagaagcgctggtgtggttcaggagcagggccccttcattctccagcacactctccccagtcctctaagtcgagcgtgagctctgtccagagaaggcctccaaccagaccatgtggaccgcggggcaggctggtgacactgcctgttgacagtggatggacagactgcttcccgcatannnnnnnnnnnnnnnnnnnnnnnnnnnnnnnnnnnnnnnnnnnnngtggttgccaggggagaacatgtaaaagggaacacatgatgttccaggaggccgctggctatctagaaggagaagcaggctacggggaaggtgttaggcaccagaaggctctttcctggtgtacaggctaaggtcgtgggctacatgcagagaaggagacgaaggctgtcctagagctgtccaaagtgggcctggactagccacgagccgcccctttccctaatagagctcacatctgttctattttcaggtccccttcccatcctctccaacggcagctgtgtgaaagcaagctgactggcctgtgtgaccagagcagggcacgctgtccatgtgggaggcgaggcgaggaacgcggggctggggcactcacagctgggcgcctgggctgctggag

SEQ ID NO: 241675 - DNA, 1389 bp, Homo Sapiens
ggacaaaaattaaattatattgccaaagcaaacaaagcacgaagaccttgtaaatatcagcaggtgggccaatctgcacctcacacccaccctactttaacacctagaaatcatttattcccacatctgtatgtatttgtacccaacttaactggaatgtcatttaacaccacagtgcaatttctgccattgtgtaggttttagtctgtgaggcctgttccttgagaaggtgtttatttctctgattactttgcctgcacttggactagagtgggagagatactttgactcatgataggaacccaaaaggatggtcaacagtgatttacatattaatctattcaatttcactttgaaaaagataaggatatctttaatcataacatcctggtcactatatatgaagatgacatacattccaaaatacaaaatgtaaacacatacagaatgctaaatattattaatgtaaccctaactttaacatgctgtactgaatgaaacacttctaacctgcctaaaaaccaagtaccctccagtgcacttagactcgtaattaaataactttgcagctagtgctatgaatattttgcactataggattatgaccttattcattctgctggcaaaggaattccaaacaagttccctccttttccgagtatttcttttccctactgcaaaacctgcataagctagaggaaaagaaaatttaattaaacacttggtttatgagttacacttcagtatcatcttttttatttttaattagatgtagaaatactctccttcttaatgacagcccgatgctacagcaagcaagatcttgtgggtctgaacagacgttcactagcctgctggctgtcatcacaaaggatgactgatgatatttttcctaatataaagcttaaaaagttaaatgtcaaaccatatgtcacatttaaatatatatttcgtaaaaagccaacaagtttgttattgtggttttcagatagaaattgttcttggagccctgttgggtagccatgctcacagcagcacagtctcactaaaatgaagtacagactccctcaagttcaaagactgtgtttaggctgccaccaggagagagatgcttagataccttagcagcaaatcctctttaccttggaggctttttttgttttgaaatgaggtaagttgtgcctcatgatcattttaaattcgaaaagctactaaaacatattgaacctagcatggaataaaagaaggtggtaatcaatgtacttcagctccaataaactttctccacatttaaataacattacttatattacactttcactacagagataaaaaatctgaaataggaactataaataggtaccagttgttaaatattgcttttattta

SEQ ID NO: 241676 - DNA, 804 bp, Homo Sapiens
  misc_feature (145)..(156): n is a, c, g, or t
gaaagcatctctaaaaagcactgttcctccatgggtgaagactggtattaggaagtgcacacacaatttttgggtatttgttgcaacaggaacacgtggatttatgacactcaaacctagacactgcaaagttaactggtaagannnnnnnnnnnnaaacaccacacatacacaaagcattttaaaggagccacatatatctatatagcaactctgactgcttttcaaagttaccagggaaaggaacttattcaggctttctttaaaaaaactccttagttttaatgtatatctttttaagattgatgctgtcatttgaagtaaaataatgtcatatggataatgggggaagaggggagagagacgagaaaatggaagaagcagacactgagttcagatttgcacctgaggtggcaagggaggaaaggagaaaaggtacaggtaaagttgatcctaaagcgacaagtggtttaaggaagcagcatttatactcagcaaacattcactgatttttgatgggaaaagaacagccagtaaatctcctgtaacaaccttttctaaaaggaaaagtagggttgattcagcaaagcctaacttaggcaaaaggccagaggaaagtgaacctacttcccaatggagtaataggatgtacagtgtaagagcagacaaagctgcctcacaaatggtaaacactccctaggcaaaagacatttaaaggaagacgaagaggtcctcagcctcaactggtatttcatatttagacctcttaatctagttgcctagttcactgtgcactcctgccaa

SEQ ID NO: 241677 - DNA, 1790 bp, Homo Sapiens
  misc_feature (1564)..(1573): n is a, c, g, or t
ctttgtacaaaaaagttggctataaggtagctgatccttttctcttcttttaaaaatatactcttgtgacatgaaaacaaccagctttgtagttcatttctaagtcaactgatagcattctggactcttgatttgtttttcaaaatatttcctttaaatgacagccttactctgtgcctgtttccctgacaggggtcaagacttgtggtctggatttttattatttggcctcttcacatactccttaaagtgtgtgcaaagccagggcaaagtacagtgagtgcgctgaatagggaatcaggaggagacatttggcagctttcctgcataagcttaagccatctcagagtctaatgaatatccatgatggatgaggagatggcaacagaggcattagtacttacttactgttaggccaattgtggattaaagttttattgaattttttcagttgtggaatgatagctatttttataatctgaattgattaaaaacttaccttatttagaagaatttggtctgttttccgtttatttaagggctttggaatttgttactgaaagatgaaaaaaggttttcattagaatttgttagtgaaacaaaatcaagaatcacccctctcttccccagagttccaagtaacatggtcttgcccatgttagacacatgctatgtctttctcatctaatctcttttaatgtaatttgcaggaaagtgcagatcaccttgcacatgaagtgagcttggcagtatttcagctggctggaggaattggagaaaggccccaaccaggtttctgaagataattttcatattcctgagaaactggactttttacaagtctttacaaaactgtcaataataatggcagtactaagagatttataatcataatgtttacaatgcagcctactggattgtctctagatctgtttttcttaaacactaacagaataattctttataaataggtaagccttacacttgttaaagaaatttacctctaatttcagtctcactaatgtaaaatactgggacttaagtatacaattcagtcactaactgtacagttttatgtggggaacaattcatgcaggctactggaaaattaaatcttattaccaactccttgtgatatctttgccatcaccatcacatgagcaagatgatgttttgcagcattccccattgctgatacaaatggagagggcagagaagactttatacaaccagtttttccattgcagagtcttaagaaagattattagatgacttacctatatgactaatgccatcaggaactcagaggtatgaatagggggttgtccatccctcttccatactgaggtggagatgctcatgcaatacttttaaggatgcatggtccagccttcagttattcttcactgctcttggtgaaggtatgtgggagaaaaactaattataatacgtttcccagcctctgatggagaaggaacaccattctgataccagaacatggttaataaggaaaagagaaaaatccccaaccaatcttaattgaaccaagtctgaaaccaatggnnnnnnnnnntgggtagtgtatattttgcaggtttaagacaactcaggacaataaaaacaatggactttacatgtgtatatatatagctctcttaggcaccataatcagtatgagccaacaatatttaaacttgattcaggccacattcagacatttgctcttatatacaaatatttaaattaaatacaatctgaaatgtgttctgttacatacaaaaaaggaaaaa

SEQ ID NO: 241678 - DNA, 584 bp, Homo Sapiens
  misc_feature (304)..(317): n is a, c, g, or t
aacactttctcaaagagtagttataatgtttataagagacaatgtaggtaaaagtagtttcagttgcatgcagctaaatgcagtttagtatcccttcagagtcctccgcagaaaaggcacctgataaatatttatgtggccttaacctaaggtattattctttatatagtgccttcccatgtaatgattgatgtcatgtttatcattttgcagtgcagtttatttcttatagggtcatggctaacaagaaacatgggaagaatgaccctcactaatagagtcattaaaataatgtaatttcaannnnnnnnnnnnnngaaggactattaggttaacagtgatttttaaaatttattgtaaatatgagtgctataaaacaggaattttcatattattttgggattataaattggtatgatcctgaatagcaatttggcaatgtatatgttaagaaccttagaaaatgtttttcacttttgatttagtatttccacttcatgaagtctatccttaggaaataatatttgaacaaagatttatgtacaaagatgtgtgagctatataatctataatataatgcccaa

SEQ ID NO: 241679 - DNA, 1396 bp, Homo Sapiens
ttggctttctttctcacttacctgccttcaagtagcacagcatggtgattaagaggaggatctcttgggccagatatgaaagctggcttttctacccaccagctgtatgacactgggaaacttttaggtttgtttgaataagagatctgacctgaccggcccaactgtacaactcttcaaggaaaattcgtatttgcagtgggaagaataagtaacattgatcaagatgaatgccatgctggagactcccgaactcccagccgtgtttgatggagtgaagctggctgcagtggctgctgtgctgtacgtgatcgtccggtgtttgaacctgaagagccccacagccccacctgacctctacttccaggactcggggctctcacgctttctgctcaagtcctgtcctcttctgaccaaagaatacattccaccgttgatctgggggaaaagtggacacatccagacagccttgtatgggaagatgggaagggtgaggtcgccacatccttatgggcaccggaagttcatcactatgtctgatggagccacttctacattcgacctcttcgagcccttggctgagcactgtgttgggatgatatcaccatggtcatctgccctggaattgccaatcacagcgagaagcaatacatccgcactttcgttgactacgcccagaaaaatggctatcggtgcgccgtgctgaaccacctgggtgccctgcccaacattgaattgacctcgccacgcatgttcacctatggctgcacgtgggaatttggagccatggtgaactacatcaagaagacatatcccctgacccagctggtcgtcgtgggcttcagcctgggtggtaacattgtgtgcaaatacttgggggagactcaggcaaaccaagagaaggtcctgtgctgcgtcagcgtgtgccaggggtacagtgcactgagggcccaggaaaccttcatgcaatgggatcagtgccggcggttctacaacttcctcatggctgacaacatgaagaagatcatcctctcgcacaggcaagctctttttggagaccatgttaagaaaccccagagcctggaagacacggacttgagccggctctacacagcaacatccctgatgcagattgatgacaatgtgatgaggaagtttcacggctataactccctgaaggaatactatgaggaagaaagttgcatgcggtacctgcacaggatttatgttcctctcatgctggttaatgcagctgacgatccgttggtgcatgaaagtcttctaaccattccaaaatctctttcagagaaacgagagaacgtcatgtttgtgctgcctctgcatgggggccacttgggcttctttgagggctctgtgctgttccccgagcccctga

SEQ ID NO: 241680 - DNA, 1084 bp, Homo Sapiens
ttggcttttcctagttattttaattacttttcattttatttgaatagtgtgtgcaaatgtagagagtaaaacaatactgcggccatttcctgccctcccttcccccaggcagccactcttggcttgtttcttctgatgtgcacacgtgtccgtatttctaaataacgtgcatatcctgctgtcttcccccaaaatgtgtacttaaccaaaacagcaccagtgtcactcctgaaacaaaaattaccaagaatgtcttagtatcatcaaatacctaaatggtgttcacaattccacttgccttaaaattaattttttcgattatttgacttgaagtccaattaaggactacaccttgtgattgttttttccctagcaatttattttttgaagaatgaactttatttttattggatctacttaaaacatttttgtgtcacctagtagcaggggattttgaatacatgtcatgtgtgtttataaagccagctctccatatcccccagtgtctccaggagctgcttttgtgacctcactgcctgatctctttatcatcttcaggtgcttgacccttgcacagagagaagcttcctgggctacagggcatggcagcctgtcctttcggggagtgagattagatttagtccctgcactttgcctctctagaagcagcttctcgcctttccctcccgagggctggcaggagtcactgtcagtcacccttcatggggtctgaaaggttgcatgggctcacctggtcttagacaaggacagttgcagcttccgcaccaggcagacctgcagtttgagtggctggggataggtggagcggcggcctggccacagtgccctggacagcagcacatcacatcagttaacactgtttgccttccaactagttattacggtgtcctgtgggacaattagactggaggagccaaaggaatgtgcaggggcactgggtttctgtttggagagaggctctcggtaaacagagttcgcattcctccagattctgtgggaccagagtaaatatcattatgccacagccaggcttaagcaatctatctgcagtgccgttcccgca

SEQ ID NO: 241681 - DNA, 1322 bp, Homo Sapiens
  misc_feature (57)..(77): n is a, c, g, or t
  misc_feature (441)..(485): n is a, c, g, or t
ttttctggtgatattgctgtagctttcattgcattctcaaagggatgtgttacttcnnnnnnnnnnnnnnnnnnnnntccataggcctagagggtgccacagaaatgaagctaaggttctaggaaagtaatttaccagctttggtaagcagaaaatgataatcagagttaacatttgttgagcatctgctacataccaagctcctgacagtcaccatatttaatgttgcctgcaaggtaggcactatcatctcatttggccaatgaggaaactggagaggcttgccccaggcacatagttgttaaacatcaaatgtgagatctgaaccagaatctgttgattccaaatttggaagttttcaataaaatggtttctgtttctctggtgccctacctaaaataataatgatgacaatgaaaataataatttaactttgagaannnnnnnnnnnnnnnnnnnnnnnnnnnnnnnnnnnnnnnnnnnnntatgtatgaaattcaaggatagctaataacttactgaagaccctgcagctggtaagtgaaggtccatcccctggctgaggccaccgccccacactgccttcacagcccctgtgggatggcctggctgccccgggactcttaaacaaaaatcagtgaactgggtctttgcttcagcataccataattattcttctggaattgagttctcttccttcacatttctctagagagaagtccaatctgtcaagcatttataaggcacttcttttgtacctagggttgtgttaggcactgtgggaaacagggaaacacatctgtgggtgtgagtgtgtgtgtatgtatacatgtaaaacagccacactttttaaactaaaatcctacatattgttttagaccatctgattacacttaggagctatttaggaaaatggtgactgtgcaatcaactgtgcaagttgtataagaaacactccctgttcaatctgcaaggcatactacctacaaatttagcaggaatttagagacagtactgttgatattggatatatatggaagtttggtcataggatcattcaagattcatttgacattatgaattcattccacttagctactcagcttgatactacgaaaataaattaaaatgtgaaagtgctgttagctctttgaaagatcataacattgaaattcaagtttaatatgtcacctaaaaggcagttttacacggaagttaagcaaagcctgggccctaaactcaaaggtctctgagttcaaatctctgctctgccatttactagatacgtgctcttagaaaaaattcacttgatgtttctccaa

SEQ ID NO: 241682 - DNA, 1340 bp, Homo Sapiens
actttgtacaaaaaagttggcatctcccccgtgttaccattagttcctcctcctgccactgccctgaaccccccggctccacccaccttccatcagccacagaagtttgctggagtcaacaaagcgccgtctgtcatcacccacacggcctctgccaccctcacccacgatgcccccgccaccacctttagccagagtcagggccttgtgatcaccacccatcaccctgccccgtcagcggccccttgtgggctggcactgtctcctgtcacccggcctccccagccacggttaacttttgtgcaccccaaacctgtatccttgactgggggcaggcctaagcagccccacaaaatagtgcctgctcccaaaccagagcccgtgtccttggtgttgaagaatgcccgtatcgccccagctgccttttcaggccaaccacaagcggtgatcatgacgtcagggcctctgaagagagaagggatgttggcctccacccgtgtcccagtccaacgtggtcattgcgcctgctgccatcgccagggctcctggggtcccggagttccacagcagcatcctggtgacagatctcggccatggcacgagcagcccgcctgcccccgtctcccggctcttcccaagcacagcgcaagaccccctggggaagggcgagcaggtcccgctgcatgggggcagcccccaggtcactgtcacagggcccagtcgggactgcccaaactcagggcaggcctctccgtgtgcatcggagcagagccccagtcctcaatctccccagaacaactgctcagggaaatccgaccccaaaaatgtggctgcactaaagcagaaccggcagatgaagcacatctcagctgagcagaaaaggcgcttcaacatcaagatgtgcttcgacatgctcaacagcctctctccaactctgccggcccaccgtggcatcgggaggccatgctcaggtctgaagcaggtttggggcctgctgacagcaatagcccgcctttgggaaccccttgctgtgaactctctcactcagtgacctcagtcaccaacctcctctgccctcggggcagcccacacaaaagggaagtgctggccgtgctggtcctgccctgctggtggcctgccgggcctggcgccggtgagcggaatcgatgggatgagggtgacagggcctgctcctgtcctgaggcccagccttgtccctcctgccacgtcctgtccacatgcatgcctctgcctgatgccctgctccactctctggtctgcccgtggggcagttggaaagcgtctttctttctcccctcaactctgacagcacccagccc

SEQ ID NO: 241683 - DNA, 1154 bp, Homo Sapiens
aaaataaaagaaaaatatccttagatgaatctgacttgtaaataaggaaaagctattaagtgcttactgtttttggtctctctatcataaacactataaaatattctcagaatatacagctcatctgccctactcagcgaggcctcatttttttagtaaggaaaagcacacaatactggctaatttttctggtacccaatcctcatcttttaaaaataaataaatgaataaaaaggtgggaagaggaacactgtcaatcagataaaatagaaagtctaggaatataagcaagtcttgtgtattgcctatcacgtacatggctagttatatttattgactgcctaaaatttgtgaaaggccacctccaaaatttcttgacatcaccagtatttttatggacttgggagcctctttaggtaaaccattttaggagcaagagtacagaaataatccatcctgaaaatgccttctagtctaagcacctggcataaagctattgtgaccagtgatttcatattatggccttccacacataaaggaaatgctctgaatcctaaggactaattgcacatccacagacttcctctttcaacagagcttttaattgggcactttaagttgccaagtacgttcaaaaatggtatttccagtaagcacgcaaagtgatcttgaattggaatattcagcttccctttggatgaggaactgatgcacttattttaagctgttcattctctagtagatgacaacatgaagggagaaaccgagaatcttggtctatttaattcagcttgcattcataataatatgaatgtttcagtataatttcaatgcaaaaagataatgtaaaaaggggttagaaatctaaaattagaaaccactactcaaacaggatataaatattagatatgtgtacttctacttcctgtaagcaattagttttgtagtagacagaatgggataactatttaggagcttaattttgtgttagactaggttgtttctgaaacttccctcctccagtaaaaccccgtgttttgattcaaaagaaaagggtagatatcacctacaagactctgcaacatcacacaaccacataaaactgtcaccatgaaatactgcgctgcatgattctgttactgcttctttgtaca

SEQ ID NO: 241684 - DNA, 2083 bp, Homo Sapiens
  misc_feature (97)..(160): n is a, c, g, or t
ctttgtacaaaaaagttggctcccctcctggccttgagtcggcggcggtggcggcggccgctgcagagattggaatccgcctgccgggcttggcgannnnnnnnnnnnnnnnnnnnnnnnnnnnnnnnnnnnnnnnnnnnnnnnnnnnnnnnnnnnnnnntcggcgcgtccgtccgcgcgcggcgaagatcgcacggcccgatcgaggggcgaccgggtcggggccgctgcacgccaagggcgaaggccgattcgggccccacttcgccccggcggctcgccgcgcccacccgctccgcgccgagggctggaggatgcgttccctggggtccggacttatgaaaatatgcatcagtttaatactgtcttggaattcatgagatggaagcataggtcaaagctgtttggagaaaatcagaagtacagttttatctagccacatcttggaggagtcgtaagaaagcagtgggagttgaagtcattgtcaagtgcttgcgatcttttacaagaaaatctcactgaatgatagtcatttaaattggtgaagtagcaagaccaattattaaaggtgacagtacacaggaaaacattacaattgaacaatgactcagctatacatttacatcagattattgggagcctatttgttcatcatttctcgtgttcaaggacagaatctggatagtatgcttcatggcactgggatgaaatcagactccgaccagaaaaagtcagaaaatggagtaaccttagcaccagaggataccttgccttttttaaagtgctattgctcagggcactgtccagatgatgctattaataacacatgcataactaatggacattgctttgccatcatagaagaagatgaccagggagaaaccacattagcttcagggtgtatgaaatatgaaggatctgattttcagtgcaaagattctccaaaagcccagctacgccggacaatagaatgttgtcggaccaatttatgtaaccagtatttgcaacccacactgccccctgttgtcataggtccgttttttgatggcagcattcgatggctggttttgctcatttctatggctgtctgcataattgctatgatcatcttctccagctgcttttgttacaaacattattgcaagagcatctcaagcagacgtcgttacaatcgtgatttggaacaggatgaagcatttattccagttggagaatcactaaaagaccttattgaccagtcacaaagttctggtagtgggtctggactacctttattggttcagcgaactattgccaaacagattcagatggtccggcaagttggtaaaggccgatatggagaagtatggatgggcaaatggcgtggcgaaaaagtggcggtgaaagtattctttaccactgaagaagccagctggtttcgagaaacagaaatctaccaaactgtgctaatgcgccatgaaaacatacttggtttcatagcggcagacattaaaggtacaggttcctggactcagctctatttgattactgattaccatgaaaatggatctctctatgacttcctgaaatgtgctacactggacaccagagccctgcttaaattggcttattcagctgcctgtggtctgtgccacctgcacacagaaatttatggcacccaaggaaagcccgcaattgctcatcgagacctaaagagcaaaaacatcctcatcaagaaaaatgggagttgctgcattgctgacctgggccttgctgttaaattcaacagtgacacaaatgaagttgatgtgcccttgaataccagggtgggcaccaaacgctacatggctcccgaagtgctggacgaaagcctgaacaaaaaccacttccagccctacatcatggctgacatctacagcttcggcctaatcatttgggagatggctcgtcgttgtatcacaggagggatcgtggaagataccaattgccatattacaacatggtaccgagtgatccgtcatacgaagatatgcgtgaggttgtgtgtgtcaaacgtttgcggccaattgtgtctaatcggtggaacagtgatgaatgtctacga

SEQ ID NO: 241685 - DNA, 1980 bp, Homo Sapiens
  misc_feature (566)..(613): n is a, c, g, or t
  misc_feature (687)..(724): n is a, c, g, or t
gatttcaattgtcattgttttattttttccaaaataacataaaaatactttccagttgaattacataaaaaatttaatccataaaaccattatacagtcatgcatggataacaatgggaatgtgttctgatgaatgcatccttgggcgattttgtcactgtgtgaacatcataagagtgtacttacacaaacctagatggtatagcctattgttcctaggctataagcttgtaaagtgtgttactgtactgagtactataggcaactgtaacacagtggtacttgtgtatctaaacaaatctaaacatagaaaaggtacaataaaaatatggtataatggattaaaaaaatggtacacctgtacagggcacttaccataaatggagcttgcgggactggaagctgctctgggtgagtgactgagtgagtgagtggtgagagaatgtgaaggcctaattgctgaacactactgtagacatgataaataatgtacacctaggctacagtaaattcataaaaataattttatttctccaataataaattgaccttagcttcctagagcnnnnnnnnnnnnnnnnnnnnnnnnnnnnnnnnnnnnnnnnnnnnnnnngtgatgacatttagcttaagcactcattgttcaactgcacaaaaatattctttatatccttattctctaagcannnnnnnnnnnnnnnnnnnnnnnnnnnnnnnnnnnnnngttaaaaactaagacacatacacacacataaacctaagcctacccgtggtcaggatcatcaataccactgtcttccacctccatatcttgtcccacttgaaggtcttcagggtcagtaacatgaatggagctgtcatctatgataacaatgccctcttctggaatatctcctgaaggacctgcctgaggctgttttatagttaactttttaaataaataggagtacactgtaaaataataaaagtatattgtatagtaaatacataaatcagtaatatcttttattatcactatcaagtattatgcactgtacataattgtatgtgctagacttttatatgactggcaatgcaggtttgtttacaccagccatcaccacaaactcatgactaatgtattgtgccacattacaatgtcgctaggtaacaggaatttttcagctccattataatcctatgggaccaccatcatatatacagtccatcattgaccgagatgtcattaagaggtacatcaacagaaataatgtatattatgtacaaaaataaatgaattaaaattaaatgaatacttgataaatgacaagttataaaagtcaatttctgattctaaaaaatacatgttaatattttttctacagagcatggaaaatacattagatgttatagaacatttggcaaataatgttaaagaaaagttatcagagaagcaggcttattcatttcaactaagtaaagaaacggaggagcagaagccaaaattagaaagagtgaccaaacaggtatcgatatcttttaaaaactgacctttcatatttacatttttgaagtcccaaatcctccttcatctattaaaaatattaaattctggtaaacacgtttatagaataattgactattatttaccaacagtgtgcaaaactcacaaaggaaatccgtcttttgaaagacacaaaagatgaaacaatggaagaacaagacatcaaacttcgtgaaatgaaacagtttcacaaagttattgatgaaatgttagttgatatcatagaagaaaatactgagatccgtattatccttcaaacatactttcaacaggtaatacagcaccttctattaaatatttcttaaaaacttcatgaaaataaaaactttcatgacattcatcatgaagtgaaagctaattaaaaatatttataattctaaaaaacccaacttttttgtacaaagttggcccttttaagaaagcattgctcatcaatt

SEQ ID NO: 241686 - DNA, 1431 bp, Homo Sapiens
  misc_feature (947)..(958): n is a, c, g, or t
ttggggaactggtgctcccacagaggtgggcccggtggtttggtccggcctggcctactggaccagcctgtgctcggtcggccacggctctgctgggctcctggcgccgcctcctcccggcccgccgcgggctgcgcgcttctgtgggtgggggaaggcaggactgacgcagaatgacaacggcaacacgacaagaagtccttggcctctaccgcagcattttcaggcttgcgaggaaatggcaggcgacatcagggcagatggaagacaccatcaaagaaaaacagtacatactaaatgaagccagaacgctgttccggaaaaacaaaaatctcacggacacagacctaattaaacagtgtatagatgaatgcacagccaggattgaaattggactgcattacaagattccttacccaaggccaattcatctgcctccaatgggccttaccccactccgaggccggggacttcgaagccaagagaaactgaggaaactttccaaaccagtatatctcagatctcatgatgaagtttcctaatctagaggaaagtttatttctgcaaatgatgagccaactagttattgaatgtaaaccagatggcaaaacacttcttgattaggggcaaaaattcaaatgtcttcttaaaacctccacaattgattctccccctgtgatgtaaacttagatatccctagagtttctcagcatctttcttcctgagtggatggcattatccctagaggtcatggaccttacatcctcactgcagtcacctttggaaacaagaccgaggcctgtagaaggaaagcggaaggatgtaagagctgttcatgggaattccattcaccacacatgccagctgatgcaaagaaatttgccagtcactggaagttactgtggctactataaaactatgtaccactctcagaatattcttaggcnnnnnnnnnnnncaagttatagatttgcttaaagtgaggttttttggtgtgtgcttttttgttgtcttttgacccttccagtttccaaacaaacttgtcttaaaaagtgcatcattggattgaccatggtttttcatgaaattttatgagatttctgccttaacaaaatgcatatattccttatcttaaagcctgtcattacttaggatgcacttataggatctgaaaagctcactttaaactcatactacattcgttacgagtattttacgttaacataattgaaaagtacaaggtccaagctggctttcaaattatgtctaaacagaaatgggacaaatagacttgaaaatagaagggatttattccacccctgcaagggtagagtcaggtgagagtcccttgggtgagtcatttgtacatcagtgtcatttcttcttaacctctgaagaagatgggcatcggaataaagacaagcactatcc

SEQ ID NO: 241687 - DNA, 1197 bp, Homo Sapiens
ttggctgcaacctgaaaggactccagtgttttcagttgggagaaaaagccctcatcagaaatgggatcattttcctggccccatcagcccttcgaaatttggcccagctccctaaagggtttccaaggcaagaccggccctccaggcccccccggcgtggtcggccctcagggtcccacgggagaaacgggcccaatgggtgagcgtggccaccctgggccccctggaccccccggtgaacaggggcttccgggccttgctggaaaagaagggacgaagggtgacccaggccctgcaggcctccctgggaaagatggccctccaggattacgtggtttccctggggaccgagggcttcctggtccagtgggagctcttggagaaaggcaatgaagggccccctggcccaccaggccctgcgggatctccaggggagagaggtccagctggagccgctgggcccatcggaattccagggagacctgggccccagggacccccagggccggcaggagagaaaggggctcctggcgagaaaggcccacaaggcccagctggccgagacggtctccaggggcctgtggggctcccgggtccagctggccctgtgggtccccctggagaagacggagataagggagagatcggggagccggggcagaaaggaagcaagggggacaaaggagaacagggtcctcctgggcctacaggtcctcaaggccccatcggacagccaggcccctctggagctgacggcgagccggggcctcggggccagcagggccttttcgggcagaaaggtgatgaaggtcccagaggctttcctggaccccctgggccagtggggctgcagggtttgccaggacctccaggcgagaagggtgagacaggagacgtgggccagatgggccccccgggtccccctggcccccgaggaccctccggagctccaggtgctgatggcccacaaggtcccccaggtggaataggaaaccctggtgcagtgggagagaagggcgagcctggcgaagcaggtgagcctggccttccgggagaaggcggccttccgggacccaaaggagaaaggggagagaagggcgagtcaagcccttcacgtgctgccggactctctggacccaaaaccctctcggagatgatggtctcaaaagcagccctggcccagtgggttttcctgga

SEQ ID NO: 241688 - DNA, 1372 bp, Homo Sapiens
  misc_feature (423)..(449): n is a, c, g, or t
  misc_feature (943)..(983): n is a, c, g, or t
ttggcaagtcaacagttcatctcttctctctaccaaaagcttgaacgtctctcagcatttttggaagcataaggaaaggttcagaaattagaatacacattccaaaagcacttattcagcacttgctatgtgtattgcttgctatttgcactggagagaaacaagaaaagtaaaactaagagaacttagcatctgattgactgttccctttcttttatcccctatacgtcaaaggtacctaaagcttggaatttatgttatttcaaggatattggttccatcaaatacataatgaagattttgtgaagaaaaagcgatgttgttttgaacattgagagtttgaagttccacctatgggggcattcagattcagcattcccttcaggattggtgcttgggagatagattgagtcatcatttacnnnnnnnnnnnnnnnnnnnnnnnnnnngataatacttgaattcgtataagtagattgtgaagtttaagaattttacacactaaatttgattttgttctgtccagtttttctctatttgggttagactggctttgtaagtttttcaagagttgaggcacttgggaatagacagttttcatatttatagtatttaatttaagcatataaggatttaagcagtatgcctttttctttgccaaaggctatactaattagggtgaccattaatcttggcttgcccaggacagtcctggttcaccgtattgttctggcataagcattaatagtacccccttttcactcaaagatgtcccggattggataataaattacatagctataccctgtccatagtagaacctgactacctttatctatggatttatttatagtttgtcacacggtcgaatagctccttcttctcagtaatacaagcttttttggtttgaaatatggatcctcttcccagcataataatgtgnnnnnnnnnnnnnnnnnnnnnnnnnnnnnnnnnnnnnnnnncttaaaggaaaatgctgctatttgtgatgaaattgctcgtcttgaggaaaaatttcttaaagcaaaagaagaaagaaggtgagctggcttcattttgtgttcagcatcacctttttggtgattgatttggtgattgataatggtgttactgctctggagactttttttcccagtgggattgatgcgtatcgcacagccccttggccacttgatcaagcacagagaaacttacagcctgaggcattggtgcctgcacacccaagttatgttgggccatggcgatgagacagctcctctactcatctttctgaaaaagccatcttgccacatctaataaataatcttactaagattatttaatcttatggcccaattataaagccaagtga

SEQ ID NO: 241689 - DNA, 1132 bp, Homo Sapiens
gaaagcattttctgacatagtacacatgaaaaattgaaaatttccaatatcttcaatagaagttatagaaagtgtatgtcttctgggagtttgacacccacttaacacagcagaaaataaggtactatactgtaaacaaaaaagtacagtaaaggacaattgtaaatttacataagaatagttcataaacattttggtctttccataacagtttttatataaaatgaataaaaaaacctttagacagctgtcatcactcttgtttgaccacttttcacttatatgcacacagacatatttatatagcaatatattgatgcaccgttacatggatattaaactatgagtactgcttgtaactgagatgtgcattatccaatcaacattatccatagttgaaatactcttacattatgtattcttgtcatgttgtatctataaaaacatgaaaatataactttacattatttcaattatttacattagttcaagcttgacagagaaaaatcgataagctacaatttttagaagagtaggcccagaggtacaataaatagcattgattgtatatagtcatttctttttcacttttaaaaactcattttaagtacaatatggaaacaattagtctgcaatttggtcattctagcacttattattaaaacttaaaatgcacctccagcattcctgatgaggagaaatgcactaaaattatattatattaccttaggatctgtgattagggacagctaaatttagtgaagaatatcatgataccacatgcctccatgttcaatgcaagtgcttactgttaaaccttacatttttccttcccttctatgaaatacggtaagtaagaatgttttaaaagcactttgcaaaataccaagtgctacacaaaggctttcttccagaaataacaagaatacaaatattaaaaataactattggatgtcaataatcattcaaaatcctaaattaattaaacttggggggctttaatggaaataagaggtattttatgaagggaaagatagatcctttaaattcattaactagataaatataggctctttagtcaaaagttacagaaatgtgacattttatccacactgggcatattaaaatccaa

SEQ ID NO: 241690 - DNA, 1252 bp, Homo Sapiens
tttgaagaaaaaagatggtattgctattcataattacaagaaatggatgataatattttaaattagttaactttggtccatcatgcttacttcatggtgtgaagaaaacagcacttgaatgattttttcccttaatttgttctaaattacagcaaagtgctctgcaagaaacaagtgcttgtgttaattaattctgagtaaagaaggtcaccggtatacatagggttcattttgtggttttagttattggcatccttctgcaattagaattcgtcattaggtattagaggaacatgcagattttcacttttttaaatccagaatttcagatttaggcacattttaaactttttctctaaaaatattctgaccccaagctaaaaacttgctttctaactcaaaaaatactaaagaaagctgtttatctaacatttcctacaatttaatacatatcacttatcttgttaagcctttctctacttctgacagaattaatcagtcccctctccttttttttctgattctcttcttcttgatattatttatgtcacattgcattgcacttatcatttacatattcctctcccctgagactgagttccatgaggggagagatggggtgttattggtatttatagcctctgagcacaggacactctctgggccacaataggctctaaataaatgtttactgatcataattgtttattgatatattttaagtgctgtccatatacattaacataacagtgcttgctaagatacgttaaagtatgtaagacttccccatttaggttttcactttctaaatcaggggttggcaaacttcctgtaagggtccagaaagtaaatattttaggctttgcaggccattcggtctctgttgcaaccactcagctctgtcatggaagcatgaaagcagtcatgcacagtatgtgagtgaatggggatggcagcatcccaataactttatttccaaaataggctgcaggctggatttggccctgccaactcctgctctaaatccttattttgaaaggtggggaaagagggaataaatattccaagcatgtatcttgataatcactacagtcaaagtttcttataaatgttggcaataagaattatgatgtacatgccattttggaaatgtctccaaatttttcttctccaagaacaaaatggaaactaagtgagtttttcctgctgtaccctattaatactaaggcacgaggttgtaggggatagccaa

SEQ ID NO: 241691 - DNA, 872 bp, Homo Sapiens
atgaactaaaaggtcaaaattgtttcattttctcttctgcagattctaagtaaaaaatgacaaaatatgcatagagatgtttgtaaaccaaaaataaatgtctaaggccccgaaccatctgaatggacccctcctctcagccaagggcattccaaaattaacctgcaaaactacttcaggtcatgatgggtaagggaagccaggcatgcctcattctgccctcctccttttcggaattactgatagaacagactctttaaatctgataagaaacatttacaatctattctctctgaagcctgggaggttcaactgcatgataaaaccttggtccccacaaccccttatcataacttagatattcctttgtattgataataactctttcaacctgaataactctttcaatcagaaaatctttgaatccattgatgacttggaagaccctctgcttccattgtcctgcctttccagatggaagcaatgtacatcttgcatgtgttgactgatgtcttgtgtctccctaaaatgtatacaaccaagctgtacccgaaccaccttgggcacaggttctcaggatctcctaagggctacatcacgggccaccagtcactgatatttggctcagaataaatctattcaaatatcttaccagtgtctgactcttttcatcaagaatttcaaactgtgctcacacagaaaaataactattttagctgcactcattcatccttgaaaattatcttccacaaagcaaaatgctacatactgaatgcaaagtgtttggctaagagcaaaatctatctcatccatcaactccttaatcctttgaggtatactgtttcttcttacccaacttttttgtacaaagt

SEQ ID NO: 241692 - DNA, 1837 bp, Homo Sapiens
  misc_feature (300)..(311): n is a, c, g, or t
gttttgtttttaaatttgcaatgatcaaacaaatgcagttagtatgtttttgatgaaccatggatgaaaaaggatcattgatattctagagaatcaatctatactgtagcttttctccctaaatcccttctgccccttaaaaaacaataaatgatttccttataatacgcctcaatgcatgttctacaactacatctgctgcaacaggaatgctggtatttagttttagtgacactactctgatagcaaatgttcattgattctatcatttatagggcaatgaccaaggcaatgtctggnnnnnnnnnnnnccaaaacactttaatttttaagacaactgcaagcacctcaaacaatggattattgttacaacacttgttagcttttcacaatctagttattgcaaaggcatatggataaatgttaatggacaaagtcaaaaacgaggcaccttaatgaatgtaaaatttaaaataaaaagacattcaatccactgacttctaaaagaggctaaatatacctctatatattacattctaaaattgtattgcctactatggtttgtatcctggagtctacaattaattttaaggaaatgcataaacaaaactgtgtgcaacctgcaaagggaaaatcattttctcaacttcgtttcatggaaagacaatgaaaaagctagtaaaatttgttgtagccacacgtaaagctacctatggaatgaatgtgatcactgttatctttgagctgtgagaagtattctgcccactgcactgcaaattgtatataccataccttgtgttctagacaagcatgatcatgcttttccaaaaatatatgtattttttcattccacacaattaacacgtttctccaatttaatctatgtagagcttaacttacagcgcccagaggaggcaacatgacatggtactgagccatcacatttttaaagggaaattgctcttctttaaaagtacttttaaaaatatgcaaaatcacaaatgggactgctaaattataatgcatattttagaatgagaaacatatcttttcttcctttaaagtgccatatagagaatgacatcttataacccagagccactttgtttaaaatccaatgtgaaaagactgttatggaatgaaaagtttgcacaactccttggagcagttaaagtccgctacatgcaacataggctacaaagcactcaagacttggtagcttttctgaaatttgagtccccctcccatatttaatggaaagtaacatttacagggtgcatttacatacactataatacaggaatgatgtccctttgccagaagataaaattgtacatttccttgctatttcttggttccaacttgataatttcttaagattgtaaattatatagtactcagctaaaatatttcttcataaatagttacaaaacctgccaaaacacaaaggggaaagtatttttcattcaaaaaaatgacatttgaatgtcacacaacacaagaaacaatgcttagagacatgttattgtttccagaagaaaatggtcagtaaactacttagctgaagacaaaagactacccttccccaggatcacagtgcacaaaaagcaaaatgtcaaacaacagtacctcaaagcaaaataaaggtctgaggatgaagccagctcacttgtaatcctgttaaagaatgagagtcaccgtttaggtccaatgtactgggaacacttgctagctcagaatgcaatattggtagaatttgctaagaattcaaccaaggatgccgaaggcattcgccagctgaggctcgtttttctggaaccatttctaacatcgccaa

SEQ ID NO: 241693 - DNA, 823 bp, Homo Sapiens
ttggctaagtgctggcaagagcgatgtctactacttcagtccaagtggtaagaagttcagaagcaagcctcagttggcaaggtacctgggaaatactgttgatctcagcagttttgacttcagaactggaaagatgatgcctagtaaattacagaagaacaaacagagactgcgaaacgatcctctcaatcaaaataagggtaaaccagacttgaatacaacattgccaattagacaaacagcatcaattttcaaacaaccggtaaccaaagtcacaaatcatcctagtaataaagtgaaatcagacccacaacgaatgaatgaacagccacgtcagcttttctgggagaagaggctacaaggacttagtgcatcagatgtaacagaacaaattataaaaaccatggaactacccaaaggtcttcaaggagttggtccaggtagcaatgatgagacccttttatctgctgttgccagtgctttgcacacaagctctgcgccaatcacagggcaagtctccgctgctgtggaaaagaaccctgctgtttggcttaacacatctcaacccctctgcaaagcttttattgtcacagatgaagacatcaggaaacaggaagagcgagtacagcaagtacgcaagaaattggaagaagcactgatggcagacatcttgtcgcgagctgctgatacagaagagatggatattgaaatggacagtggagatgaagcctaagaatatgatcaggtaactttcgaccgactttcccccaagagaaaattcctagaaattgaacaaaaatgtttccactggcttttgcctgta

SEQ ID NO: 241694 - DNA, 1148 bp, Homo Sapiens
  misc_feature (287)..(321): n is a, c, g, or t
gaccagttttcaagtattttatttgaaaagtagccaaatgaccagtggacatatttagattgaggatactataacattactgaatggattattattcttcagtgcgatacactctgatattcagccttgccctgagttaatcaaatcactggagaacaaaagcgaataacagcaggtctctcttttttattccaatttcttacatttattgtcaatgaggaattcagatgccagtggcctgcctagaaagccactcttaagcaacaaggagtctgccaatccacttnnnnnnnnnnnnnnnnnnnnnnnnnnnnnnnnnnntctatgttaatgaagcagcaactgtggccccctagcctcctccacttcaagtacaggtgttcctagcagattaagtcccttaatcctcccagcgacccctagcatctgatgtgctatctgcattggctccgtgtcagtatcagctctggccttggcctacagagcttccaatgaagagactgtaatagaagaagccagaaggaaaaaacaaacaaggcaacatgggggtatttcaagactgtcggaggtgttcctgaatcggtggcattaatctagaggccatgttctgcagtgggagagcaatgggcttgacatcacagggaccaagattcagttgccggctctgagggttcctttctaggtgatctcaggcaaggaagcttcttgcactctgagcatgtttcctcaagtttcaaatgcagagataattctgacctcacaggaattgagacaatgtgtatgaaagcacctattttactacctggcacacaatgtaggtgctcaatagatggtgtttgaatcttaaacttacctggggaaatttttaaaacttcaccattcaatagataggagttagcaaattagcaatatgactgcttacttcctttggtttatttatacataaggctttaaaatcatcaaacgctaggctgtcaaggaaaatatactatttaataatcttagagttcatttaatctcagcacaggggaagggtttcacaatgaagatgtgtagcaggcgttatcccattgttatcactgggcagaacaaagaccaatgagtagacactataagaaggcacattggctggtcacggtggctcacac

SEQ ID NO: 241695 - DNA, 264 bp, Homo Sapiens
aatgtagccggcgcggccccggcagagttccgcttccgagcgccgccactgaggttcgatattggaacgtcgcgctggctgccgggggccgccccggacgctcgatcggggccgcggggctcctcgcgctccacgccccgcgggctccggcggccagaggctggctggggcgggagggacggcgggccgggttacggccccgacggcggcgcagccgggcggtcgcccggctcggaccccaccccggcagaagcccccgggcaa

SEQ ID NO: 241696 - DNA, 1714 bp, Homo Sapiens
  misc_feature (613)..(626): n is a, c, g, or t
aaaaatccactaaacaccgatcgtgggcctatctgtttccccaaagtcagatcttttaagttccctaagcttatgactcaggtggtacttctatattgagtgaacagaaaacatacttttgggctcacacacaaaaatattaagtatcaattccttctaaggaaaaattcagattttcaccaaagtcatttaaaaaacaagttttgattatttttgtttcattgatttctgaaaataaccaaaatgaatcttctgttttgatctcttttgacatctcacctaaatatacttttaatcatttgttattatctcggacagtctctaaagccaaattagtaaagatctcattacctttccttctaacgtgattagctattttccattatgttagaactaaacagcatagtaacaatagtaaaagtacaactgaaccttgcttctctgaaagactatttgtgaatgggaatgctggactttggatgctgccagacaacagcaaaaaatttcgcttcagaatttcctggtgctataagctaggagttggcaaactgtggccctcaggcctcttttttattgcctaggagtcacacattttacatttgttaagtagctnnnnnnnnnnnnnntaataatatttcaagatgcatgaaaattatatgaaattcaaatgacagtggccattgagttttactggaagacagccatattcattcatcttcatactgtcttctgtgctactgtgtctaaggtgaatatgcacttagaggataataaggatacatcatcataagacagccccagggaaataagaataaaattataatcaagatgtaatatttgtatattgtagcagcttttaaaaaaaataactttatttttgtgctctattctttggtgctgagctgtgagattcatgcagtgctgatcattttactgtttctttattgatatttaaacttctcataaattcacgccaggtgccttatagctggattataaattctagatggcagaggctattaccttacatgatttttgcattcaggggtgcctgcaagatgctccactattgactatctcaatcactctttcatagaaatagaaataatcttacttaggatattttactgctctgttccttatgcctgtatgcaagaaagaagccttgcaggcttcaacttctcatttattcatggataattcccttcagatctgtagcccctacacaaatctaatatagtgaaaatcagattataaggacttcagatttccatgagctaagtgaatgtacacattattagtaggagaaagcaaaagttcattttcctgaaggtcttgtcaatgatgtttttagcaggagaacttctcaggtaataatattttcgaatttcctttcaaaatattcttaattcagagacccagcaactgcaccataagggttttgccagttccacacctagaaatgaatgctgataaataggaccaagtaagttcacaggagcagaattggaatggcaagaggatttaaagccatgtaatcatatgagaaatggttaaaaacctggagacacaggtacctacagaaacaaaaaaaacaaacagctatttaaagaatatttaagggctgctgtgtggaagacacatttggtttgttctctattaggtacctagagatgtgccactctgaccacacaaacttgagatttaaaaccaa

SEQ ID NO: 241697 - DNA, 897 bp, Homo Sapiens
ttggctctcatgaccacttcagagtcctggcactggctaggggtgtcaatgcatcagccgtagtgaacgtcactgtgagggctctgctgcatgtgtgggcaggtgggccatggccccagggtgccaccctgcgcctggaccccaccgtcctagatgctggcgagctggccaaccgcacaggcagtgtgccgcgcttccgcctcctggagggaccccggcatggccgcgtggtccgcgtgccccgagccaggacggagcccgggggcagccagctggtggagcagttcactcagcaggaccttgaggacgggaggctggggctggaggtgggcaggccagaggggagggcccccggccccgcaggtgacagtctcactctggagctgtgggcacagggcgtcccgcctgctgtggcctccctggactttgccactgagccttacaatgctgcccggccctacagcgtggccctgctcagtgtccccgaggccgcccggacggaagcagggaagccagagagcagcacccccacaggcgagccaggccccatggcatccagccctgagcccgctgtggccaagggaggcttcctgagcttccttgaggccaacatgttcagcgtcatcatccccatgtgcctggtacttctgctcctggcgctcatcctgcccctgctcttctacctccgaaaacgcaacaagacgggcaagcatgacgtccaggtcctgactgccaagccccgcaacggcctggctggtgacaccgagacctttcgcaaggtggagccaggccaggccatcccgctcacagctgtgcctggccaggggccccctccaggaggccagccttgatccagagctgctgcaattctgccggacaacccaaccctgcccttaa

SEQ ID NO: 241698 - DNA, 913 bp, Homo Sapiens
acaaaaaagttggctccccgccgccaagtgggcggcgtggctgtcgggaaagaagggctggggcctgccgttcttcctcccgagtatcccctccagctggacgaccccacgctgcagcacgggcttccggcttctctcctcagtggccaattcgagggcacagcgggctccggaggcgcggcggcaagcctatcccgcctcccaaccacagcctccagcacccgagagaacggccgcccacagcacacgttctccggacaggagggcgaaggcccaagacctggagagatgggcagctctcaaaaaaggcacaaacaattgaaggatggataccatggcatatgttaaaagcgtgttgaaaggaaaataagaaagccaggaatctcaggatgaatcagtctagatcgagatcagatggtggcagtgaagaaaccttacctcaagaccataatcatcatgaaaatgagagaagatggcagcaagagcgtctccacagagaagaggcctattatcagtttattaatgaactcaatgatgaagattatcggcttatgagagaccataatcttttaggcacccctggagaaataacatcagaagaactgcaacagcggttagatggcgtcaaggaacaactagcatctcagcctgacttgagagatggaacgaattacagagactcagaagtccctagagaaagttcacatgaagattctcttctagaatggttgaacacctttcggcgcacaggaaatgcaactcgaagtggacaaaatgggaaccaaacttggagagctgtgagtcgaacaaacccgaacaatggagagtttcggtttagtttggaaatccacgtaaatcatgaaaatagaggatttgaaattcatggaagaagattatacagacattccacttt

SEQ ID NO: 241699 - DNA, 1148 bp, Homo Sapiens
ttccatgattagctttgactaatctggacttaccacctaagtcatctgggagaaggatgcacaaaaatataaaatttagctcagcaaggatgaagtagggaatggtcatcatgtgggcagtgtctcttagaactgctgaccaatgtgttccaagggggcaaaagaaacaacaggacaagggaggcagagatactctaaaatactaatacgcagaactagtgttacatagaccgtgcccaaacagatacacaatgaaaatcaaggatatcaaaagggcctttcattacataccgccactttttgaggagtgcagtgttactgcttgttaacctttgcataatttatgtaaaaaccattcttattaacaacatttacattacagaatgacccagaggtagctgaaaaacctcagaaaagtactgtttaacttctttactgaagtgatagttcaataatggccatattcatgcatatatgccaggaaacagtcagaggaaaggtacgtgatatagttctttgtgaaataatatttcactaaaaacatatactggccaacctacaaagagactccggtagtatttagagtaggacagattcagaggtagttaaaaacctcacggaaatatttttggcttctttcttgaagacgtggttcagctgtaaatggccatagccatttatttatgtcaggaaatagaaggggtatgtggtttgtattgccaaatacgttttcatatatacacagtgatgtgctgtaaatatttgacagcaggttctctgagaaaattaaaaccctgatttatagtttgtcaatttccatggtgtaaacactcccactaagtccaagctaccaagacagcactgaatgtggagctgggaagagacagatgtgcagtgcacactattatacagtattttcatcatacagattaaataagtaaaacagcaaaggtaatagtgaaatgtagcaaaataattaggaagtgatgagtgctgagtatttattacctttgtttttaactgtaagtttacatattttaaataatgactgcttttaataactggctcacaaaattccttaaaatttaacaatcagaacttttaagtcagtatgaggttatactagcacatcactatatttaagccaa

SEQ ID NO: 241700 - DNA, 1703 bp, Homo Sapiens
caaaccacagaattcttaaccccagagccacacaataaagttctcagaattgtaagccattaacatttttctaaacaatgcagtccagagatgaagataatttccaaccagcagggatgcaatatatagtaggttcccctatgaatgaagctcaaattagcatttcctttaattctcccacagccactccatcaacagaagcagaaacagtacacatattcatgccactcggctctgaaaagaggttcaaggtgggtcaaggtgggtcttggccagtggaggaaggaaggtgtccaggactttagttaatcaacagtggggacagagaggaatgatttcccttggaaaacaacagggttcctttctcatattcttgtggccagaaactggggtgaacttcagtggggtaatgaaagaaacaggagagccatttctccaggaactcctatgacctccattttaacttctgacaaagttaacttcatttatacaatcgtattgaaaacagtaatcacaaccaaaaaggtcctataaacctgtaatagatgtcaaagggattcacattctgaactttaattttaaggaccctttaaaaggcctagacttggattaaagtaaacgtaatattccaagctaaaagaggcaccataaaaaatcaactcaaaacatccaaacaatggctagatgactaatgtaggttgttttgctttttagttgcaaagcttttcagtatctcagattagtgtatgttcataaaacaatgctcagttattttaatagctgcttatgaaacaataacagtttaactcaagggcaatgcttcttgcataataatcacaaaaataattaactgctataaaacgggaaaaaaagtagaagaaaataaagccagcctcaataataaaaaggcaaaatctggaggggttactcggcttaaaaagagattaaccaggattatttaaatactataatacaagtgctcctgctcacttctaactgcagaaaccaattttgtttgctagatcaccattacctttgctagtatgcgtacagaccaccactcggaagttatccttttgtgctgaaaaacgttcaaatcccttgtttggtcagtacagaatattgcgaggtgatgctcatgcaaactcttcctgaggaatttatgtgtgcaaatctgcaacccgacagcatggcacgcagccagggagtggtagctgcacagtgtgagcactggagatggatgtgcagtgtgcagtgttcacagccatggacatccattcttctgcaatctcatctacccacaaattagctttcactctagaccccaaagggagggtaattgctgcaaatttgttaaagggacagaagaaaaagtagcttgtctacaaaataatgcacaatgcatgcatctgggtttgtgtttcttctcactaaccttgcctaagaaccattaggataaaagtcacaacaccaggttttgctttctgccccacaaaaaaacagtagttaattcctgtcaggttagggtacaggtgtgacaccaaaaggtcacaaaatgacaatgttactgaagcttaaggccaacctttaaaacatgtaccgtctctcaaaacaattatcgatttacttttacatgtcattttttcaagatgactgacccggctttccttttaaggagccagtttcaggctgcacatacccaa

SEQ ID NO: 241701 - DNA, 666 bp, Homo Sapiens
  misc_feature (224)..(248): n is a, c, g, or t
gtacagataatcaaatcacaataccaacatttgcaaattgtaataattttatgaggtaaaagacaccacaccaggaagcctgggctcagaaaacacttgaggtcagatccctagtaggtagagagtgcagaaacagtatataatttcaggctaggaaaataagataatagtatgtatctgacagttcctaatagctaagaggcctaagaatgcagacggggagnnnnnnnnnnnnnnnnnnnnnnnnngacacctctccaattgctgggagggcctgggaataggtgaagatcaaaccacagtgggagaggagggtaaagatgtgagcttcaagcgggtaatgggcaagccacacctcccagttcctaggagggaatcgccacggccgacttcagcattctcgtctttactaagacttacccatagagaactacagcaggaaaccgatttcttcattcattctctttaaaaagtatgaatgcccagtattaagcttctatttttatttgaaccaaacatattctttggttaactatgtcatgggttctcactataatcaacaaagcatacttcatatattttatatctaaatgaaaatatgcttaaaattcaactggaaccagggcatttcacccaacttttttgtacaaagttggcttttatagg

SEQ ID NO: 241702 - DNA, 1569 bp, Homo Sapiens
  misc_feature (538)..(597): n is a, c, g, or t
ttggtgagcttcgtgagttgagcgctgctgctccgcggtggagtcaccgcaccgctcccgggatcatggtgttctacttcaccagcagcagcgttaattcatctgcctacactatttacatgggaaaagataaatatgaaaatgaagatctgatcaagcatggctggcctgaagatatctggtttcatgtggacaaactctcttcggctcatgtataccttcgattacataagggagagaatatagaagacatcccaaaggaagtgctgatggactgtgcccaccttgtgaaggccaatagcattcaaggctgcaagatgaacaacgttaatgtggtatatacgccgtggtctaacctgaagaaaacagctgacatggatgtggggcagataggctttcacaggcagaaggatgtaaaaattgtgacagtggagaagaaagtaaatgagatcctgaaccgattagaaaagaccaaagtcgagcggttcccagacctatcagcagagaaagaatgcagagatcgtgaagagaggaatgnnnnnnnnnnnnnnnnnnnnnnnnnnnnnnnnnnnnnnnnnnnnnnnnnnnnnnnnnnnngggaaatggatgaacttaggagctattcatcactaatgaaagttgaaaatatgtcttcaaatcaggatggcaatgattcatatgaattcatgtaaaaggagaaaaggagaaaaggacctttgaaagatgtgaatgtagagacaattgcagaccttttggtttcatctgtgttctgaagtataaaatacaaccaaaattctaccttcatcctacccagaaattattgattttcaagttttaaaaaaattgtaccttttttgctgacagaaaaggatcagatatgtataaaatagttgaacttgacagcatataacttaaagtgaaaatgtttttgccagaacatgtcttggtaccttgtgaaagcaggctgcccttgttcttgagatagactttaaaatgaaccagctctgaaaagtacttctgctgctctggtctatccctgaaaacagatgtcttgaaacacttttcatattcttaaaataatcttcacttctgttaagaagaacatgttggtgggtaattatgcgaatgtttccctgtccctgatttctcgattaggcgtatgggttttgaaaaagagatttttcagaagattgtcagcttcagtattcacgttccatcgtgtcatctgggtctgttagtgtagtgaccctcagtgcagtctgtcccagcgtttacgtccttgcttcctctgagcagaggcctccatcttagtatcaacatatttaaagaaattgatggtgttcatcaagctggggcctgtggcagttgttgcctgagcaccaagtaacccaagccacctatgtgacaacttctgggcccaggagtaatttctcagcattgacggtaaaatatgatggagtgctctgttgatcatttgggagatgtaggttacctgatttgtgccttagatgcagcgtgaagcagaagtccatattgcaattatgattttagaaggaactaagcatttta

SEQ ID NO: 241703 - DNA, 389 bp, Homo Sapiens
tatatagttgtgttttgttttcatgtgactttattccacctgaaagattctaaacttcttccattagcgggaatctgattgggatcagccagaaatgtagtgcagatggtgaaggaagagaaggggataaagcagagaagtccaatttagttggggaattctcactctatccaaagccccggatgaggtcactgcttttatgagcctccttgaaagaagccttgacataatccctggcttattttgggaataaggttcttaggaggaaattccccagcagtcaaagtcactcctctcccatgtttatcacaactaggaaggaagggataggggaagaaataaaagtattaatttacccagtaattttttatatggtccccataggccaa

SEQ ID NO: 241704 - DNA, 1568 bp, Homo Sapiens
caaaaactaccatgaagaattaaatgaatagtaccagaaacaaaggatattataataaactgttaaatatgaaagtgaattacttcttcatgtgcattttgtgcacatgacacctgttttcaaagggctttttttccccctggtatttcaaaaaacttaaacatcttaaccaatcattgtatttactggaaacatgtacttatacagacttcctggacactcccaggtctaggaagcttaattaaggagggcacaactatgtaacaaggtattttaggaagcagcttcctggactttggagaagtcagaaagttagtaaggggtgtgtgccatatacaaaatcttttttaaaaaagtactattagtttaagtttgcttctcataggtcaatactaatgagtacattccctaactaaagtactaagaatttataaaaggcagcacccttcagttacattttaaatgatccaaaacgtttttggtcacatctcttagattaacatacattttgtacacatgacatttgatctggaaggcacaaattaatgtactgaagcatgctttaataaagccaacagggtctttagtttttaattctctgaaattcagtccactgtctgtttgccaccaagaacttatatactgcatttccttcatgttttatctttaatctaacaaatgagaacaaaatataaagtctgttctacctcagtccaaacgcctctaccacactggcttactcaattacatctgactttctcttgcatttccaattcccaatctttgctatactgctctacagctgggttcagttagagcaataacatcaagagttaatccaaatcagttggtagtactttaagttatccccataaacattgcagattttttaaaaactgtctaaatatttgccaggtacacaaaaacaaaactagtacttggggactccattaggccaatgctctaaaaagtaacacatggcttgttacggcagtgggattttgtagtaactctcctataccctctttatggttattaaatcctctacttaaccttctttatggtaaaatagaaacgattagccttcatggctactaagtcagcaagtttcatgaatcctcactttccttgcaaaacagaaaaatactggaaatggagggccaaaggaaagggcatgggatgatcttttaagtgctgcaaagaaagagaagactagttattcctacagtgtgggtttttgttttaaatttaaggaaacttacctttgaaagattcattttactacaaaaaggaacagactttctggggtctgaagggatttgtacttgaagatactccagtcagcagagggtcatgttgagcattctgcagacagaactgtttcaagtctgcagctgcctgggaaacctatacataacaaagagggggggaagtgccagatggtgagaacattttaatgaaggttttctcaatctttggaaatattgtacttacaataaaacagtacttctcttgcttcaaaagaagatactatataataattgaagacttaagtcaaatagtgccaa

SEQ ID NO: 241705 - DNA, 1460 bp, Homo Sapiens
ttgggtggagggtgtggctggagaagaggatcatcatgatgaacaggaagaacacggggaagaaaatgctgaggcagagggacaacatgatgagcatgatgaagacgggagtgatatggagctggacttgttagcagcagctgaaacagaaagtgatagtgaaagtaaccacagcaaccaagataatgctagtgggcgcagaagcgttgtcactgcagcaactgctggttcagaagcaggagcaagcagtgttcctgccttcttttctgaagatgattctcaatcgaatgactcaagtgattctgatagcagtagtagtcagagtgacgacatagaacaggagacctttatgcttgatgagccattagaaagaaccacaaatagctcccatgccaatggtgctgcccaagctccccgttcaatgcagtgggctgtccgcaacacccagcatcagcgagcagccagtacagccccttccagtacatctacaccagcagcaagttcagcgggtttgatttatattgatccttcaaacttacgccggggtggtaccatcagtacaagtgctgcagctgcagcagctgctttggaagctagcaacgccagcagttacctaacatctgcaagcagtttagccagggcttacagcattgtcattagacaaatctcggacttgatgggccttattcctaagtataatcacctagtatactctcagattccagcagctgtgaaattgacttaccaagatgcagtaaacttacagaactatgtagaagaaaagcttattcccacttggaactggatggtcagtattatggattctactgaagctcaattacgttatggttctgcattagcatctgctggtgatcctggacatccaaatcatcctcttcacgcttctcagaattcagcgagaagagagaggatgactgcgcgagaagaagctagcttacgaacacttgaaggcagacgacgtgccaccttgcttagcgcccgtcaaggaatgatgtctgcacgaggagacttcctaaattatgctctgtctctaatgcggtctcataatgatgagcattctgatgttcttccagttttggatgtttgctcattgaagcatgtggcatatgtttttcaagcacttatatactggattaaggcaatgaatcagcagacaacattggatacacctcaactagaacgcaaaaggacgcgagaactcttggaactgggtattgataatgaagattcagaacatgaaaatgatgatgacaccaatcaaagtgctactttgaatgataagatgatgactctcttcctgcagaaactggccaaaaccatccatttttccgacgttcagactccatgacattccttgggtgtatacccccaaatccatttgaagtgcctctggctgaagccatccccttggctgatcagccacatctgttgcagccaaa

SEQ ID NO: 241706 - DNA, 1688 bp, Homo Sapiens
  misc_feature (1287)..(1300): n is a, c, g, or t
ttgggttctgacctcattccatagtttgcagtgagcatggcatctttgcctggagatactatgctaggggcagctttccaggggcaaagcaagccctcgtgttacacggctctcctccagctcacacgacatgtgaggagatgaccaaatgtgaaaacaggtttcccctgtgttgcccgtcatcctttggcccgttcacaggaatggagtactgtataattttaggctttcattcccagcagtgtttactgaggacctggttttctagaacaggtgtgtcctgtcctcttccatgttccctgggggctggtcagctccaagttgtgggtggcagagctgtgtttcagcatgaactgactagagacccatctggaggcaaatattaagttgccaggactgctttcacttcagggtgattgaaggacacatattgaagtacctagaatgccagaaagtgttctattgcccaaaaaacaaatcagaaaagcctattcttttttgcaacgctgttaatgattagtggagttctgaaattactttgtgccacttggaagtactgtgaaaccgcattcactgggattttgctgtaattcacatccgctggactgaagtttaccttgatgttagctataagaaatagttttctaacacatacgatagcaaatacaagacaaatagcattgaaggccaacaaaaatggcttcagatacaccttagctataatgtttgcattcagacaatgaatgtattcatcacaagtcacttaccaaagcacttctagacttctccaacctccatgactttgctctgcttcctcctgtccctgtcagcagggttgctgtttgtacttgaaggtaataaacctgtaatccttcaaaaatgccatttagccccaggcttctgagctgagtcagactgacccatcccaccgttagggcaaaagtcaggctgggacacagcgccagtacagagaggatcctgcttcatgcaactccccttttggagttaatgcagcgtgatttcctgggccggtgttttcaggcatcgcccaccccaggtatgctggttcccagctccacgtaggtgtgcctatcacgctgggccactttgctgacaacattcatagcttgacatgagagagaatatcagcagaagcatgagagtaggacctgacgtctttgactctgcaaaagcatttagcacacactcatgggggggaactggctgtgagccacagcagccccacacagacagtggtctctgaacttcaggaaagccatggacagnnnnnnnnnnnnnnttcttttccatcattctattttcaaagaggtcttggcgttttcctacatcttttgtttagagggggaaaaaagtttcatttgctgccatttcagaaaggttatgctatcctgttttatccaagcagttgtgagtcaggaactgcctgggcagtgtgcatcaactttgtggccgaaccattacagctgtcatatccttggctgatcgtctctcccagggactactgccctccacttagtgtctgagggtaagcctagaagggtgctgctattgcgtctatggaagcttatctatcaaaggagcaaacatccagaaaagtgtttataaagcaaatgtattgcctctgtttagagatttgcccagctgttccagttttaaacattaaaaaa

SEQ ID NO: 241707 - DNA, 1181 bp, Homo Sapiens
  misc_feature (424)..(439): n is a, c, g, or t
  misc_feature (1130)..(1138): n is a, c, g, or t
acccaaggctgttctgcaggaagtgaaaaggaacaaatgaagatttgaggggcagcctgcagctacttggcacaggggaaccaaatggcaagggagaaggctccaccagagctgccatgctgccgtagcaggccagaccacagcattggctgtgcacctgtgtgtgctcagcttccagaagctgtcactgaccatcccgaaggcagatccagaagataggagggtgacagcacggctggagagcactgatgtcaacgtttaacaaggttccccagtgtccctagaagtggctggaaggaccacagctttggaactgaactgattttcttgaatgtgaaataaagtcatcttttgttttcccccttaaggaacctagagccagagtgtctatgaattccaagtttgaaaacaatatgaatgtttnnnnnnnnnnnnnnnncgctgtggggagaagccaacagttaagaaaaccaaaccaaatgcagctggcattgaagtccccagtgggtagatgggcatctgagatgtatacccacactctggacttcatcccactctagtggatggtggacaataccgcaaggccactggtggctgagcaacgagccgcatccccagtgaccaaggcagagctgccagcgtcaggagggcaactttaacaggcaaaagtgagtgggttctgaccccccaatccctacctcagcagcaggaaagggaagtgctggtctccacctgttcccactaaggccccgtggtatcctggcagaagcctctgcatgtatctgcgctctgaggatgggggtttgaaaacaaaataagaccctacgtcctactaccttgagcttggctctaaaaccacgggaaaggaagagatatattgcaccttaaaacatctctgcactaagaactgcatttcattagaccaaggaggggttggggcgctgggaggcctgaggcctgccctcagccccccaagtctcatttaaaacctgcatctcagcgaagagactgcagctcaggtcacacagaggtggtgactgcaccgaacttcacatgcaatttcctggcctttcctgcacagaattaattcagacattatatataaatagagcagtgaaacatttacttcnnnnnnnnncacctagacctacaacatcaatacatataaataaattctagtg

SEQ ID NO: 241708 - DNA, 1581 bp, Homo Sapiens
actttgtacaaaaaagttggcttctagtttgcggttcaggtttggccgctgccggccagcgtcctctggccatggacaccccggaaaatgtccttcagatgcttgaagcccacatgcagagctacaagggcaatgaccctcttggtgaatgggaaagatacatacagtgggtagaagagaattttcctgagaataaagaatacttgataactttactagaacatttaatgaaggaatttttagataagaagaaataccacaatgacccaagattcatcagttattgtttaaaatttgctgagtacaacagtgacctccatcaattttttgagtttctgtacaaccatgggattggaaccctgtcatcccctctgtacattgcctgggcggggcatctggaagcccaaggagagctgcagcatgccagtgctgtccttcagagaggaattcaaaaccaggctgaacccagagagttcctgcaacaacaatacaggttatttcagacacgcctcactgaaacccatttgccagctcaagctagaacctcagaacctctgcataatgttcaggttttaaatcaaatgataacatcaaaatcaaatccaggaaataacatggcctgcatttctaagaatcagggttcagagctttctggagtgatatcttcagcttgtgataaagagtcaaatatggaacgaagagtgatcacgatttctaaatcagaatattctgtgcactcatctttggcatccaaagttgatgttgagcaggttgttatgtattgcaaggagaagcttattcgtggggaatcagaattttcctttgaagaattgagagcccagaaatacaatcaacggagaaagcatgagcaatgggtaaatgaagacagacattatatgaaaaggaaagaagcaaatgcttttgaagaacagctattaaaacagaaaatggatgaacttcataagaagttgcatcaggtggtggagacatcccatgaggatctgcccgcttcccaggaaaggtccgaggttaatccagcacgtatggggccaagtgtaggctcccagcaggaactgagagcgccatgtcttccagtaacctatcagcagacaccagtgaacatggaaaagaacccaagagaggcacctcctgttgttcctcctttggcaaatgctatttctgcagctttggtgtccccagccaccagccagagcattgctcctcctgttcctttgaaagcccagacagtaacagactccatgtttgcagtggccagcaaagatgctggatgtgtgaataagagtactcatgaattcaagccacagagtggagcagagatcaaagaagggtgtgaaacacataaggttgccaacacaagttcttttcacacaactccaaacacatcactgggaatggttcaacaacgccatccaaagtgcagccatcacccaccgtgcacacaaaagaagcattagtttcatcatgaatatgtttcagctcctacacttcctgatatttctgatgacaaagatgaatggcaatctctagatcaaaatgaagatgcatttgaagcccagtttc

SEQ ID NO: 241709 - DNA, 1581 bp, Homo Sapiens
acagattttacagatttatttttaaaaaagagagcaaaggttaaaaaagtccttcatttccaaccctgcaagagggtgtgggtggggaatagaataagctcagaaaggtgcctacctccttcctgcaaaggacacggcaggtcagaggcaggccctcgccctttctgccctgcctcctcctcaggtagctcaaattgctgctaggaagatttataggcaaagaagtgtgggagtgggaggccaagagctgccttcttcacatcaacagaaactccagctgttctttccccttagcagttctctgagcctcaccactgggactcccagggtgggcgggcaggcaggccaggaggctcagccctttgggctatgttgctcagaccaccgcagctttcttaatgctctttgtgaaccaggagggcggtcaggggaacttcacagtgcggggaggggtgtctggaaaggaaactctgaagcgccgtctctttctgaccttgcctctgcgctgaggctgccattcttggctattccccatcctgaggctgagtggagtccaggacaaagcactaagtggctgtttgctacaaaacacctggagatgccagagagtagcccttggcctatctgtcagtccaggctcccacacagtcacacagtcatacacacagcgttaaggcgtctgtgccagcaggcacggcccggctgggcccagcttctctctctccacctgcagagggtgtaggggggagaaccctggctgctgcagaaacaggctgaagggggagaagctgacaacggaagagttaaccaggcctggagaaagaagtgggaggaaggaaggcaagggctttctaggcctccatccaggcctgctggctgcccttgaagtaacccaactcaggttggggagccctgaccatataccccctggaaaatgggggacagaaagaggggaagagagcggggctagagtattgggactttggaggaagccagtgctatcaatatttacaagcataaagccccatcttctgtgccacctacctctctgcccctcccacagaaatgaaaggcccctgagagccatggaggaggtgcccagacctcctcaccagctatgcccctagggagagcccctgccctccaaccggccccatttctgggcccctcaggaatgtctgtctggctctgctcagtcgggaggaggcgccctgggccagaatcctggctgccaccagccctaggagtccttgagcatgctgatgcgggcgtagatcttcagggcgggccccagcttgatgttcatggcgctcatcaggtggtcctccttgagcagcagcagggcttgcccgtcgatttcctgggcacggaattcctctgctatctcctggcagcctgagggggtaccaccaaagacagtgtcaatccaagccgccagtgttcacctctggcagccactgcatctagttatctagatctagttatctgcatccattatttcttttagtcctcataaccacgccttgagccaacttttttgtacaaagttggctattatagagaaaagcattgctcatcaat

SEQ ID NO: 241710 - DNA, 1138 bp, Homo Sapiens
gggctggaagaccatgttggtgttgagcaggaaagagcggagcaggggctgggggtgacaggccagctgggccaccagccccgtcagcaggaagttgacatagacggagttctgcagcatgttctcgagtttggcaaagagcacagccatgaaggggcctgggttgggggggaggtgggcacaaggatacaaagcctgaacacaatgcacatcgcacgcattcctccccaaaacaagagacccccaccagatgaaaagtatttgtatgtcagcctctgggtatgtttaaatatcccgtggccacctattctggaggaaataagatggcagacaccatatggacccacaagattccagatgccagctttacacacattcaagctgacaagccagatcttaggctctggactctgaaagatctggtttcactggctttgccctttactagtttggacaggtcaaaattgtccaagccttagtttcctagttcgtaaaataggaaaatatacctacctcataaggtgatgaagaggatcaaagagttatcaatataaagcatttagcctcagatctggcaaattttaagtgttcagttataaccataagctacaattacatattgtttttataaaagattcacccaagaggcacaacagaagaacaaataggttgagaaagtaattaggtccaaaaagaattaggttccacaaaaaacggaggataacactaaacctgctcagaaagaaagctagaagatggtgttgcaaagacaaagtaactatgtgagccaatttaaagttagggaaaaaaatatttggaggaccagagaagacatcagttttgtctttcagaagctgggaaccaagacggtggaacagaatatgtagtaaaaggatagcttagtgcaggggcagagaaactgactgaggacagactctttggtgggagagaaggaagggaaaggatcagcattatccactgggaaaactgacctcagctaagccagatcaccagcagtaggcctctataaccatcacagtccttctgattagggatttttttggggaaagggagtatatatctaagaactgtactatgcattgagacaggagaatgatggagggcaggagggagccaa

SEQ ID NO: 241711 - DNA, 896 bp, Homo Sapiens
aaaaattattaaagagataaactaaaggaaaatatacaacctggctgagggggcaaaaattttatgttcaacatatatttgataacacatactgagaaaacacggtctacttttacttttcaaaagtttgttcatgttgacattgtggggcgtagaagatttttatcaagttttctatttttgccaagtcatatgatctgctatagttcagctatagttaaccaaatgtagaaaagaaaaaaattttccataatatctagtaattctccaaaacaagcttgttcctagttaaacactgacattctttgataactctcactttatcccacagaggtcatgtacttatttcccatctgttgtcctatgcttacattccaaattcagttgcattgacttttagaacagctttaggaactgcacccagttttaaaatacattatttgtctaaaaattatgacatgagattaaactgtcatctttgtaggtttctacacatactccaactcattcaccaatccttgaaaagattatgtaaccaatctcaatgccctgacccaggccaagcccatttctacatgtgcagtgttctctggatctgatatttaaagccccttatcctgatactacacaccttttgtcttctggaatgcacctctcttctcatcctttttcaaggcactagaaaagcagaccatttctgcagcacctcaaaccagggtgagaaagctccactctaatctcatcattttagctacatagatacatcggctcaagggaagatgccaagtgtagtactttaccactctgaggatttttgaatctataacagttgtttcaactgggccaataattatgaagggcaataattaaaagagtatccatagtaaaggagtaag

SEQ ID NO: 241712 - DNA, 610 bp, Homo Sapiens
gattttatatcccagtcttatgatgttggttggcaaggctagataaaaagatgttagaatgaaagaacatatttttagtgatatgtaaatgaaggattctacaatagtcatatatttttatatgaatgaatgttgggttgggctggagaggtatgtgtgtgtaaatataaaggtctcacattcagagtatagctctgaaataatggaactcatgtctacaattcaacatgcatctgtatagttacatctcatgtaaatatacacagacatattttgcagccagtaattgacagttaatgtccaaaacaggtgattgataggtaacagaaattagataaccaccaattttgcccaagagaaagactagaaggactaaaagcagttgaatgtatggtactgacattgtcataagcagtctgataaccagtttattgaaacgtgtgcattaacagagaatttaattttaaacccataatttctcctatccattaaaatattataattgttagtagtatgaaaccaacaggaaatgttttttaatcatttagtgaggtgattcatttgttttcatgggcaaacactatccaggaaaagccttgcttgcctgttt

SEQ ID NO: 241713 - DNA, 834 bp, Homo Sapiens
  misc_feature (660)..(711): n is a, c, g, or t
  misc_feature (721)..(742): n is a, c, g, or t
gggtgaggggagagcactttccaggcaaggctgggccaggaggcctgggctgctgaggcgggaaagcggtggctgtggagggcacgtgctgcccccacctccgtctcggggcctggcttccccactggatggcagaggccgctccaggtgcttccacttggtggcgcccatgagtctgctattggagaagctgtggtctcagggaggagacagacaccacaggccagactgggtggaggaatcttcccctcacaatgtcccctggctaaaagcatccatctagctgcaagtactatcttgattcaacccaggggctgacaatggactgcagcccagggtaagtccagcagttttgcagtcttccgatgccctgtgccatggacctgccggccagagctcctgggctcccgtggaggttagccctgcaggcaccggggaaatggggctatggcctgtgcttcagtcaggacacctgggggctgcactgcggaggccaagggcatctaggagcaggggctgtctccttggggtggagactggcggctgcagcctcagataaggcactagaggactggactggtcctgggagccaggcccagccatgtggtggatgacggtgctcagagagaggatttgggtcctgcgggaggtgacagctgnnnnnnnnnnnnnnnnnnnnnnnnnnnnnnnnnnnnnnnnnnnnnnnnnnnnctccgcctcnnnnnnnnnnnnnnnnnnnnnngattctgaaggggccaggcacaatggctcatgcctgtaatcccaccacttcgggaagcggaggccagaagattgcttgaggccagtagccaa

SEQ ID NO: 241714 - DNA, 1479 bp, Homo Sapiens
  misc_feature (462)..(766): n is a, c, g, or t
  misc_feature (1408)..(1417): n is a, c, g, or t
aggagacagacaccacaggcccagactgggtggaggaatcttcccctcacaatgtcccctggctaaaagcatccatctagctgcaagtactatcttgattcaacccaggggccgacaatggactgcagcccagggtaagtccagcagttttgcagtcttccgatgccctgtgccatggactgccggccagagctcctgggctcccgtggaggttagccctgcaggcaccggggaaatggggctatggcctgtgcttcagtcaggacacctgggggctgcactgcggaggccaagggcatctaggagcaggggctgtctccttggggtggagactggcggctgcagcctcagataaggcactagaggactggactggtcctgggagccaggcccagccatgtggtggatgacggtgctcagagagaggatttgggtcctgcgggaggtgacagctgtttctcnnnnnnnnnnnnnnnnnnnnnnnnnnnnnnnnnnnnnnnnnnnnnnnnnnnnnnnnnnnnnnnnnnnnnnnnnnnnnnnnnnnnnnnnnnnnnnnnnnnnnnnnnnnnnnnnnnnnnnnnnnnnnnnnnnnnnnnnnnnnnnnnnnnnnnnnnnnnnnnnnnnnnnnnnnnnnnnnnnnnnnnnnnnnnnnnnnnnnnnnnnnnnnnnnnnnnnnnnnnnnnnnnnnnnnnnnnnnnnnnnnnnnnnnnnnnnnnnnnnnnnnnnnnnnnnnnnnnnnnnnnnnnnnnnnnnnnnnnnnnnnnnnctcttttctcctttccctggggaagagggttggccggacagaccctggtgtggctgggatgggggactgctgcagagaggtaacgggcccctgagatagacatgggacagcccgaaaaggtgggactgagaggggacacttgtggccagcagtgtatctctgacacagtctcaccccgcagggctcctgcagtctcgattcagggtgcttggtgttcccagatggtgtttgagggtcctgacccgacctcattctgctatagccatcagtcccctgctgtggctttggggatcagaacttcccagctagggctcccactgttggactcaggggacggaggcaggctagctgaaggggcagtgcccatgagctgggccccccgcagagcaggctcctctctctgcctggcctccacacctctactggtctccacgcccttgcatgaggtgacaggagctgaaatcacacatcccaggggctgaggcagctgtctgatttggagacttgctctgtggcccagggatccgtgcctcagcccagcctcacagggagtggggaagagagggagtaaatcagtggggcttcccttgtccacaggttatttagaaaaacagaacataataaataccaattctttccttnnnnnnnnnngtgtttaaatgtgtttttccctgaagatttccagtgtattccacagtggttaaaaaatagcc

SEQ ID NO: 241715 - DNA, 1493 bp, Homo Sapiens
ttggggctaaacgagtgcacatcaagaagagggctcccctaggctgagcccaggcccagatccccagaaactagtccttgccccaacacgggggagctccctgagacctccataccagtcccctccttcaccacctgccatgggaacccctgagctttggttttctctcctcccaggcttaccagaactgggtgaagaagaacggggctgagcactcgctccccaccctgggcctcaccaataaccagctcttcttcctgggctttgcacaggtctggtgctccgtccgcacacctgagagctcccacgaaggcctcatcaccgatccccacagcccctctcgcttccgggtcatcggctccctctccaattccaaggagttctcagaacacttccgctgcccacctggctcacccatgaacccgcctcacaagtgcgaagtctggtaaggacgaagcggagagagccaagacggaggaggggaaggggctgaggacgagacccccatccagcctccagggcattgctcagcccgcttggccacccggggccctgcttcctcacactggcgggttttcagccggaaccgagcccatggtgttggctcaacgtgacccgcagtctgatcccctgtgaagagccggacatcccaggcacacgtgtgcgccaccttcagcaggcattcgggtgctgggctggtggctcatcaggcctgggccccacactgacaagcgccagatacgccacaaataccactgtgtcaaatgctttcaagatatatttttggggaaactattttttaaacactgtggaatacactggaaatcttcagggaaaaacacatttaaacacttctttttttaaggaaagaattggtatatttattatgttctgtttttctaaataacctgtggacaagggaagccccactgatttactccctctcttccccactccctgtgaggctgggctgaggcacggatccctgggccacagagcaagtctccaaatcagacagctgcctcagcccctgggatgtgtgatttcagctcctgtcacctcatgcaagggcgtggagaccagtagaggtgtggaggccaggcagagagaggagcctgctctgcggggggcccagctcatgggcactgccccttcagctagcctgcctccgtcccctgagtccaacagtgggagccctagctgggaagttctgatccccaaagccacagcaggggactgatggctatagcagaatgaggtcgggtcaggaccctcaaacaccatctgggaacaccaagcaccctgaatcgagactgcaggagccctgcggggtgagactgtgtcagagatacactgctggccacagtgtcccctctcagtcccaccttttcgggctgtcccatgtctatctcaggggcccgttacctctctgcagcattccccatcccagccacacaagggtctgtccgggccaccctcttccccagggaaaa

SEQ ID NO: 241716 - DNA, 642 bp, Homo Sapiens
gaacaatagcttttccctaaaagaaaactttgtacaaaaaagttggcaatggcgtggcagggactagcggccgagttcctgcaggtgccggcggtgacgcgggcttacaccgcagcctgtgtcctcaccaccgccgcggtgcagctggagctcctcagcccctttcaactctacttcaacccgcaccttgtgttccggaagttccaggtctggaggctcgtcaccaacttcctcttcttcgggcccctgggattcagcttcttcttcaacatgctcttcgtgttccgctactgccgcatgctggaagagggctccttccgcggccgcacggccgacttcgtcttcatgtttctcttcgggggcgtccttatgaccctgctgggactcctgggcagcctgttcttcctgggccaggccctcatggccatgctggtgtacgtgtggagccgccgcagccctcgggtgagggtcaacttcttcggcctgctcactttccaggcaccgttcctgccttgggcgctcatgggcttctcgctgctgctgggcaactccatcctcgtggacctgctggggattgcggtgggccatatctactacttcctggaggacgtcttccccaaccagcctggaggcaagaggctc

SEQ ID NO: 241717 - DNA, 1040 bp, Homo Sapiens
caactttgtacaaaaaagttggctttctgtagagtgttaaaggatgataaacgtttgaggttcaaataactcgactgtcttatcaaacaccatgtctataagtaataagtttctgggagaattgtgaattggattttgttttatttcaagtggatgcttttgtgcccatatttaagctgccgttgcttacaagacctgtactgcccttccccacctgccttttccatcataccctatgctcacagacaaatctcagcaagaggcaggagttgcttcactaatcaaaaccttacattaaaatagttttacctagatctaagttctagtcccaaatcaaaaagcaatctgtggagttttcagtataatttcgtactgacagctttccaaatagtaacgtaaacggttcacgtacttggtgaactgaagaaatagaatggaggccattagcactgtaagttgttagtttgcctgtttaccaaaaatatgttgagtttcggggcacataccttaaaattgccctgtttcactgtgtaagaggaactggcttgactacttcacccttggtgaaaacaaacaggccctaaaagaggcagcaacagctgaagtggatatcacagaaataaacagacagcagaagctcttcagacacccccgaaacctgccaaaactcacaggtaatacaagtgaaacgatagcataagaagaaaataaacatgagaatcttcaaactacaagcattgaacggtatcctccatccaagaagagaacccacttcatacaaggaaaaggcaaaaggaaaaggtcaagactgtgacctttataacactgtgaccccagctgtgggccaggtggagttgtctgtggtgacaccaagtacaggcctgacaccctggtttgacagaaggctcttcaagatccctggtcttcacactgtagcagccaaaaggtaggtttacaatatacactgtccccaacttgccatggatcaattataatttttcaacttgactatggaggaaaaccatcgcaatttcagcttc

SEQ ID NO: 241718 - DNA, 1603 bp, Homo Sapiens
acaaaaaagttggggatatcgggtggcggctcgggacggaggacgcgctagtgttcttctgtgtggcagttcagaatgatggatcaagctagatcagcattctctaacttgtttggtggagaaccattgtcatatacccggttcagcctggctcggcaagtagatggcgataacagtcatgtggagatgaaacttgctgtagatgaagaagaaaatgctgacaataacacaaaggccaatgtcacaaaaccaaaaaggtgtagtggaagtatctgctatgggactattgctgtgatcgtctttttcttgattggatttatgattggctacttgggctattgtaaaggggtagaaccaaaaactgagtgtgagagactggcaggaaccgagtctccagtgagggaggagccaggagaggacttccctgcagcacgtcgcttatattgggatgacctgaagagaaagttgtcggagaaactggacagcacagacttcaccggcaccatcaagctgctgaatgaaaattcatatgtccctcgtgaggctggatctcaaaaagatgaaaatcttgcgttgtatgttgaaaatcaatttcgtgaatttaaactcagcaaagtctggcgtgatcaacattttgttaagattcaggtcaaagacagcgctcaaaactcggtgatcatagttgataagaacggtagacttgtttacctggtggagaatcctgggggttatgtggcgtatagtaaggctgcaacagttactggtaaactggtccatgctaattttggtactaaaaaagattttgaggatttatacactcctgtgaatggatctatagtgattgtcagagcagggaaaatcacctttgcagaaaaggttgcaaatgctgaaagcttaaatgcaattggtgtgttgatatacatggaccagactaaatttcccattgttaacgcagaactttcattctttggacatgctcatctggggacaggtgacccttacacacctggattcccttccttcaatcacactcagtttccaccatctcggtcatcaggattgcctaatatacctgtccagacaatctccagagctgctgcagaaaagctgtttgggaatatggaaggagactgtccctctgactggaaaacagactctacatgtaggatggtaacctcagaaagcaagaatgtgaagctcactgtgagcaatgtgctgaaagagataaaaattcttaacatctttggagttattaaaggctttgtagaaccagatcactatgttgtagttggggcccagagagatgcatggggccctggagctgcaaaatccggtgtaggcacagctctcctattgaaacttgcccagatgttctcagatatggtcttaaaagatgggtttcagcccagcagaagcattatctttgccagttggagtgctggagactttggatcggttggtgccactgaatggctagagggatacctttcgtccctgcatttaaaggctttcacttatattaatctggataaagcggttcttggtaccagcaacttcaaggtttctgccagcccactgttgtatacgcttattgagaaaacaa

SEQ ID NO: 241719 - DNA, 810 bp, Homo Sapiens
ttggcagcgggctcgcgtcgccccgctctcctcaccgagccgccaatcggctcaggatccgcccctgacgacgcgggccccgcccctggagacacgcgccgcgcagtcgtcacccgcccgggatcaggaggccgggggcgcccgccggtcgggcctgggcggccgccatgaagctgacgcggaagatggttctgacccgggccaaggcctcggagctgcacagcgtgcgcaagctcaactgctggggcagccgcctcacagattgtcaacagcatctccaccctggagcctgtgagccggtgccagcgcctgagtgagctgtacctgcggaggaaccgcatccccagcctggctgagctcttctacctgaaggggctgccgcgtctgcgggtgctgtggctggccgagaacccgtgctgcggcaccagcccccaccgctaccgcatgaccgtgctgcgcaccctgccgcgcctacagaagctggacaaccaggctgtgacggaggaggagctgtcccgtgcactgagtgagggagaggagatcactgcggccccagagagagagggcacaggccacggcggccccaagctatgctgcacactgagctccctcagctccgctgctgagactggccgggacccgctggacagcgaggaggaggcaaccagcggcgcccaggatgaacgtggcctgaagccgccttcccggggccagtttccttccctctcagccagggatgcctcgagcagccacaggggcaggaacgtccctgactgccatcctgctgctgctgcgggagctggatgcaaa

SEQ ID NO: 241720 - DNA, 1424 bp, Homo Sapiens
ttggcgaattagagttgagggtaaaaaacacatcttgatcatagagggagcaacaaaggctgatgctgcagaatattcagtaatgacaacaggaggacaatcatctgctaaacttagtgttgacttgaaacctctgaagattttgacacctctgactgatcagactgtaaatcttggaaaagaaatctgcctgaagtgtgaaatctctgaaaacataccaggaaaatggactaaaaatggcctacctgttcaggagagtgaccgtctaaaggtggttcacaagggaaggatccacaagttagtgatagccaatgccctcactgaagatgaaggtgattatgtatttgcacctgatgcctacaatgttactctgcctgccaaagttcatgttattgatcctcctaagatcatcctggatggtcttgatgctgacaacacagtgacagtgattgcaggaaacaagcttcgtcttgagatccccatcagcggagaaccacctcctaaagccatgtggagccggggagataaggctattatggaaggcagtggccggataagaacagaatcttaccctgatagcagcactctggtcattgatatagctgaaagagatgactctggtgtttaccacatcaatctgaaaaacgaagctggagaggcacatgcaagcatcaaggttaaagttgtggacttccctgatcctccagtggcaccgactgtgacagaggtgggagatgactggtgtatcatgaactgggagcctcctgcctacgacggaggctctccaatcctaggatattttattgagaggaagaagaaacaaagctccaggtggatgaggctgaattttgatctctgcaaagaaacaacttttgagcccaagaagatgattgaaggtgtggcctatgaggtccgcatctttgcagtcaatgccattggcatctccaagcccagtatgccctccaggccttttgttcctttggctgtaacaagccctcctactcttctgactgtggactctgtcactgacacgactgtcacgatgaggtggcgccccccagaccacattggtgcagcaggtttagatggctatgtgctagagtattgctttgaaggaactgaggactggatagttgcaaacaaagatctgattgacaagacgaagttcaccatcacaggtctgccaacagatgcaaagatctttgtgcgtgtgaaggctgttaatgcagctggtgccagcgagcccaagtactattctcagcccattctcgtgaaggaaatcatagaacctccaaagattcgcatcccaagacacctgaagcaaacctatatccgcagagttggagaagctgtcaatctggttatacctttccagggaaaaccaagaccagaattaacttggaagaaggatggtgcagaaattg

SEQ ID NO: 241721 - DNA, 916 bp, Homo Sapiens
ttggcattttgctgctgcagcccattgagagtgacgacatggagcacaagaccctgaagatcaccgactttggcctggcccgagagtggcacaaaaccacacaaatgagtgccgcgggcacctacgcctggatggctcctgaggttatcaaggcctccaccttctctaagggcagtgacgtctggagttttggggtgctgctgtgggaactgctgaccggggaggtgccataccgtggcattgactgccttgctgtggcctatggcgtagctgttaacaagctcacactgcccatcccatccacctgccccgagcccttcgcacagcttatggccgactgctgggcgcaggacccccaccgcaggcccgacttcgcctccatcctgcagcagttggaggcgctggaggcacaggtcctacgggaaatgccgcgggactccttccattccatgcaggaaggctggaagcgcgagatccagggtctcttcgacgagctgcgagccaaggaaaaggaactactgagccgcgaggaggagctgacgcgagcggcgcgcgagcagcggtcacaggcggagcagctgcggcggcgcgagcacctgctggcccagtgggagctagaggtgttcgagcgcgagctgacgctgctgctgcagcaggtggaccgcgagcgaccgcacgtgcgccgccgccgcgggacattcaagcgcagcaagctccgggcgcgcgacggcggcgagcgtatcagcatgccactcgacttcaagcaccgcatcaccgtgcaggcctcacccggccttgaccggaggagaaacgtcttcgaggtcgggcctggggattcgcccacctttccccggttccgagccatccagttggagcctgcagagacaggccaaggcatggggccgcaagtcccccc

SEQ ID NO: 241722 - DNA, 1443 bp, Homo Sapiens
  misc_feature (287)..(538): n is a, c, g, or t
  misc_feature (1019)..(1028): n is a, c, g, or t
ggagtttatcctgggtatattgtttgattgattctcacttaaaaaatgttcgataaggtgcattttaacaattttgcctggtaattgtatgtatttttaacttcttttggctttttataattggctacgttctttatattaatattttttcacttagggagaaaagtccaatattgtggttattcactattcttttactggtaatcatgataattgcaattatggtaaaatgagtcagaggaattgcaaactttactggtattttatgtatttagagacagagtctnnnnnnnnnnnnnnnnnnnnnnnnnnnnnnnnnnnnnnnnnnnnnnnnnnnnnnnnnnnnnnnnnnnnnnnnnnnnnnnnnnnnnnnnnnnnnnnnnnnnnnnnnnnnnnnnnnnnnnnnnnnnnnnnnnnnnnnnnnnnnnnnnnnnnnnnnnnnnnnnnnnnnnnnnnnnnnnnnnnnnnnnnnnnnnnnnnnnnnnnnnnnnnnnnnnnnnnnnnnnnnnnnnnnnnnnnnnnnnnnnnnnnnnnnnnnataagccaccacgtctggccactagtattttatttaaaaaaaattagggtggtaaatgtaatggactgacaaattctttccaagggattgtggacctttggtatttgacataaaaagacagagttggaattttttgcttcctatagtaactgtatttgtcaggcaatgtctattctgatggagcagctgttgctgcttggctgtctttcagaagcaagctgctcacattgatattggttggtgagcaaggccagtggtcattgatcgattgactagattttgaactggctctgggtggcgtcttgtgaccatggctacaggtcaattcttccctaagtttcagtcaactttaactagaaattttctgttcaaaagttgccttccattagatatgttcaaaatgaaactttttaatattccagaattgtggatttaaagttttggttatgatgacttggttaataatagctctcacgaagannnnnnnnnncatacattgtcttaaccagaagaattctctgtatagtttatttcttaaaaataattgttttgcttttgtttttggtatttttagaagcttttgctataatctccagtaggagattttagtctctttgtcagttcatgtatgtatatgatagtcatattctgtctttttaaattccttttcatgttcacttttttctctgtacaataatagtgatattgttatacatttttatctcattaaaaagttgttacaattttctgctggcaaatctagctttttctatattttgactgaataggttaaaagtgaagaaaatttaccagatcattttattttcaaacaaatcataactaataaaaattgctattttgaatataaataatgacatttagatattttaaaataaagataacca

SEQ ID NO: 241723 - DNA, 1703 bp, Homo Sapiens
  misc_feature (113)..(121): n is a, c, g, or t
  misc_feature (1598)..(1606): n is a, c, g, or t
aaatcatttttttaagtgaatatgataatatgggtccgtgcttaatacaactgagacatatttgttctctgttttttagagtcacctcttaaagtccaatcccacaatggtgnnnnnnnnntagaaagtatttgttctacctttaaggagactgcagggattctccttgaaaacggagtatggaatcaatcttaaataaatatgaaattggttggtcttctgggataagaaattcccaactcagtgtgctgaaattcacctgacttttttggaaaaaatagtcgaaaatgtcaatttggtccataaaatacatgttactattaaaagatatttaaagacaaattcttttcagagcttctaagattggtgtgggcagatttttaagagcctagagtttagtcttagagaaagagtgaggagatagtaaggttagatagagccactgagtttcaagaaaaaaacatactactaagaatcccatatgttataatttaaagcctttacttttggcctcatgctgctaggtgaaagagtggttgttcacaggacttgtattttccaagatgattaaagatggtaaaatactatctttcaatgttatcaaaaaatggtagcaacttatacttctatttcaaagccatataaatttaacaaaattaaagtttgtgggtgtttgataacccaatcactcaatatccaattaaaatatggaataagtttcaaataaaatatggaattacatttctctgcttctgataactgtggtcactaatcaacccccatgttatccccgatatgtctaggacttagcttaaaaagatagcagatgtatttgagatgagtgggaactatacatgggtatcagctttcttggtaaatttctgctttttccatggccttgaccatctttgctactgcgcagtgaaccaggacttaatttctcacactgtttctgcaggttccggtaccaaagaagatgcagttcaaaatactgccagttttccaagaaattttgtaaagttgaacatggccatctactcttgccttaaaacttttctcaccacacccaccttcccacatgcatgatatccaaggtcgacagacctggattagaatccactctcaagcttctcatgcagtgcgtattgtattttctgcataagaaagggctgcctctagaacacagtaagtgtatttgcccagtagtgacattgcctacatatagccaagtgttatagtataccaacttagtatatttttcaaggagagctaaaccaccttttgtaatgtttggtttctcactgttatcttcctttcctataattaatttattttaatctacaaattgacatagggctaaaagcttcaatattttacaaaatattaattaatgtaattgttcccaattattagaaacttttttccatttttcaaaatgtttgccaacttcacacaagtgtgtaaaaatagggctctggattttcaaaagcacatacatgaataatttattagctattccaggcaagctaagtactagaataaactagataaaaacttggctttaagcatgtactttgatatttataaaacaaaggtgnnnnnnnnncatttctgcatctgaatcaatacaaatttacacatgaagaattttggctgtaaattaaaattttagagatttttactactgccctcacctctgccaa

SEQ ID NO: 241724 - DNA, 563 bp, Homo Sapiens
cacagaacataaaaagttttaaaataaaacaggcttcagattatcttggctttcataattatatttttcttttaaagaaaaatatcaacccattgtcaatgcactgtttttcaaagcatttaaatagagggtaaaaccctttggaaattaatacagaagaaatgattcactttatgcataaaaaataaataataatatagctgagacatgtggtttgcttctgctcttgaagatgtgaacagcttctaagcattcattttctctgacccatacaacagcttctcagtgatacagggtttaatttaaacacatacaatgtccacccccaaaccttctgcccacatctacaagttttatttattttgtgggttttcagggtgactaagtttttccctacattgaaaagagaagttgccaaaaggtgcacaggaaatcatttttttaagtgaatatgataatatgggtccgtgcttaatacaactgagacatatttgttctctgtttttttagagtcacctcttaattttctcgggtcccacaatgccaacttttttgtacaaagg

SEQ ID NO: 241725 - DNA, 797 bp, Homo Sapiens
ttattaggaaaaatgtctgtgttaactctgagagaacaaataatggctttttaaagactgttaatagaataatgaagacttactgtgtttttaacgtgaaaattttaggtgaccaagggtcctgctataacatactgggggtcataggatagtagaatggtcaacatctcaatttagacatgttacttcctgctctaaatacacttgtggacgctacttgtggtgtaactccttatgtatttaataattatctgactctggttttcttggttgatttttttaaatgggtgaagaatctagttatgaattctttgccctttatggaatgtgatatcttggtttttattccatctgttacttcccttttacttaattttatcttattgttttgcgttgtgtttctaaaataatggctttggcttgttttttcctgaatgtttctgcagtttggtttgagtatctgggtttgggcaccactcctgaacttggactccatctgtacttgtgacttttggaaggcagagtcagtgttttctgtggaagatgacatttttttaatattatatatgtgtatctccccctcccctttttggtttctcttaaaagactggaaagaaagcagttaaagcagttctgtgggtctcagcagatggactcagagttgtggatgaaaaaactaagggtgaaaggttgagccatgcagtaactgtgcttttgcagcctgtttagagcgcaagcagaagcgggagaaagaatgtggagtgactgctacttttgatgctagtcggaccactttt

SEQ ID NO: 241726 - DNA, 1032 bp, Homo Sapiens
tagttcaatatgaaaagcattatatgagacaaaggcaattttcaaaaattgataaaacattccaccaaaaatcatgactacgcatctaacagcttcaaaatatagaaaatactcaaatgcaaaatcaacaaatctgcaattacagaaaaagacttcaacatacttttagaaagtagtaactcaagtagacaataatagctaacacttaccgggcacttcttatgtgagtggcactgaaacatgtgctttcatgcattacctaaggctagagaaaatgttaataacttagacaagtcatacatgtatcataaatatctttgtacctgacaaacagaataaacatctttttaaacaccattagataattatttaaagaccacatattgggaacctacccctaaagaacaataacaaccacaataacaactatcaccccagtaaacatggctggcaagaatacaattaaatgaacattatcactgatttggcaacagctcttatgaagaataatttggcattatgtatcaagtgcccatactctttgacaaagtaactgtctttctgataatctatcttaagtaatacaaaaatggggggaggggaataaaaatacaaaatattagaaacactatcgtcaaaatgaaagggcatggctgagtatggtacaaccgttcaacagaatattgtcattaaaaacatttatggaggctatattatatagtcaataacagaaaatgcttgaaaggttagaagtacatcatcaaattatgttttatatagctgtaaaataaacccaaatcatctttaatgaacacatactattatggtaaaaaaaagtctacaatttctaactttcaccttaggcagctttttattttgcatcctttttttcaactttgtcttctattagctgtgcaagaaatacatgtctgctaaagttacacgatcttcgcacaacagcaacctacacattagtctacaaaggggaacaaacccaaattcctcagaagtctgagtccactgttgccccaa

SEQ ID NO: 241727 - DNA, 1560 bp, Homo Sapiens
tggagtataaatttcaaaacattaaaatatgaatcaggaaacttcgattctggtctttttcagactttaggttattttccttggttttatatctgagtataaaagtgaaaatagttattacacaagtggaaaatgttcttctgatgaacagtatacattttattttctatagatgaaagaaatgacctgccgtgatatcgttaaagaagttgcaaaaatgtaagttgaaatttttcttaccatccacaaaaatatttcatttgacctttgcatatatatattacattaatcctaagaagctgttttcctgtaaaataacttagtgtataatttttagaaggtaaatttaacattctaagaagcctcacgaaggaagaaaatgtttttaagcaatattttttagtagtaatgaataggatgggaaaaatagcttgacaaaataaactcctgttacaggttaaggacatataccattagggtcttaatttgttagctcccaacttctcaaatctcttaagtcctaataatagtaatcttaagattgcctctattgtaagaatgcttacaaactttataggttacaactaattatttcaatacatgatccatgaagctggctcatttatataatctgctatttatttgggaaagatatgtttcactttttcaggtttattataaaagttcctataacaaggtaagaagagcagtattacaaaacatttcaacaaccagcttaagaaaccctgaatagtttattacaggtatataaagtagaatactattaatatgtaacaggtatttggacagtaaacaataaaaaagtcaattaacctgggtagtgatgtttctaaaattttgtgattctctagatcaaagagtgtagacatttggtattacaaaaagattccaacaaaatacgttgtgtagccagctttttagattcaaaagttatggataatcgtaattcataacaactctaagtattccacattagaactacataaacaaggtctagtcaatcacctgtctgtatggtagtgtatcaggttttacatctaacaatacgtggaagaaaaaaattccaatgggctctattgtttaataaacatactatttacatcacactcagagtctcttattaaccggtccatcattactgctactgcctttacccctcttgccacctcctcccctccgccctcctagtttcagttgtgaagcaagcagaagccattctatgattgtcagttaataatggcaacactaggaaccaacatgcagcagagctgctaagaaaggaagtcagatatcttccttgaattgtatagtatgttatcatgatatactctgtttccttcaccgaaccaatcctttgaagtccttctggaaatcagttcttaccatcttttatatttaggtataatggtagtcatctgttaagtgttccatgttaggaaagccatcccttcatcatttaagaaaatggagcagcatgttatcttttacttagttgtagaaaatcaagatcctctcatattatagcaaggttttagccaa

SEQ ID NO: 241728 - DNA, 908 bp, Homo Sapiens
ccaattaaaagttgattttattacatagctacaaatttaaacataatgcttgctatgcccctgtaatgaattatctccaatttcacctctccatatctatgtctgtccctgtccatctgctctctgctctgggaagctaacatgtgggcctggccattgaggagccttacaaaaactggaaggagtaaaggtacctactcctctagctctctagtaaaggtacctatttctcctgtctctctcaagggttgcctcagggtgactgcttccctctactcaaggtcacagctttttttccaactacctttctcctcaattctgttaagcactgtcttcgttccacactgtcacttgtgattttcctacaccctgctcacaccttagtaaataattccttaacgaaatctacttcgaattattctaatttacatctatcatcttttctctgactgataaccaccaacctatatatttatacttacttcacaacaacatctgtgtctatttcttctgtttgtgaaactttattaatcacacactgcaaaatttaagaaaaaacaaaaacaatttgattaattgtctttcaaatcctaagtattccatgttccatttgtacattaaaaaggcccttactatatgaacagacacttttcaaaaaaggacatacatgtggccaacataactgatcattagagaaatgcaaatcaaaaccacaatgagataccatctcacacaagtaagaatggctattactaaaaagtcaacaataacaggtgctggcaaggttgtagagaaaagggaacacttatacactgctgatgggagtgtaaattagttcaaccattgtggaagacagtgtagcgattcctcaaagacctaaagagagaaataccattcaatccagccaa

SEQ ID NO: 241729 - DNA, 891 bp, Homo Sapiens
  misc_feature (250)..(272): n is a, c, g, or t
tttatgcaatacccagagataactttttcaaatatgaaacacttataccagtgaggaaattataaaaacatatatcaattatactgaaggacttgatttagaggctgtctgtatatagatgcatttcaccttaggaagtacacatgcacatcaaaacacttcaactgaatatagatgccattacattatttagttacgttacaaagcaaacggcaggttcataaacgttgttctattatgtatcaactgnnnnnnnnnnnnnnnnnnnnnnngtttttgaagactcatgggagtggaatgtgcccacattaggaataaagcttttacaggaccacctgtctccagctggctcccagggaccactgaaaacagctggctaccctcagaaagacaagatggtcttgttaataatttcaatggactctcgaagctcatcctccttgatcaccagcggaggcgcaaacctgataatgtcgccatgggttggcttggccagaagtccattatctcgaagtcgtagacacaccttccaagcatcccaatctaaagaaaaatagtaaaacgtacatgctcaaagataaacgtttaaacatcccttgccatatgtatgggcaaagtgcagcctggcaaaacaaaattaacagaacttgctcaactaagggaagcttgggctgggagcggtgattctttaagtgcagccaaggttgggaggttggaatcgttgctttaaaaggaagagttatcacaagaaaatccagcaaggaacacctaagggttacaaaggatgtactaaaacatcaaacacccaattaagtgacagccagcattatttttattattgaccccataactgtcattcatatcattatttctgctgctcctataacccaa

SEQ ID NO: 241730 - DNA, 1020 bp, Homo Sapiens
ttggcctaggtgcgctgcgagcgcgcgcggaccgcgcacaggcggcggagccggtatgggcccgcctgaccctgggcgccgcgccgcacgagcaccagcctagagccaggactgaagcttcaagatggctgaccaggaccctgcgggcatcagccccctccagcaaatggtggcctcaggcaccggggctgtggttacctctctcttcatgacacccctggacgtggtgaaggttcgcctgcagtctcagcggccctccatggccagcgagctgatgccttcctccagactgtggagcctctcctataccaaattgcctcctgtattgcaatggtgtcctggagcctctgtacctgtgcccaaatggtgcccgctgtgccacctggtttcaagaccctacccgcttcactggcaccatggatgccttcgtgaagatcgtgaggcacgagggcaccaggaccctctggagcggcctccccgccaccctggtgatgactgtgccagctaccgccatctacttcactgcctatgaccaactgaaggccttcctgtgtggtcgagccctgacctctgacctctacgcacccatggtggctggcgcgctggcccgcttgggcaccgtgactgtgatcagccccctggagcttatgcggacaaagctgcaggctcagcatgtgtcgtaccgggagctgggtgcctgtgttcgaactgcagtggctcagggtggctggcgctcactgtggctgggctggggccccactgcccttcgagatgtgcccttctcagccctgtactggttcaactatgagctggtgaagagctggctcaatgggttcaggccgaaggaccagacttctgtgggcatgagctttgtggctggtggcatctcaggacggtggctgcagtgctgactctactctttgacgtggtaaagaccaaacgccaggtcgctctgggagcgatggaggctgtgagagtgaacctcctgcatgtggactccacctgggctgctgctgcgga

SEQ ID NO: 241731 - DNA, 676 bp, Homo Sapiens
ttggctcttaacagactatagtaaaggagagatggtggcacatgtgagataaaacttgtttatatttacattcttattagtggatagatatcacctcagtacaacactgaaattaaactgccttgttcatgctttcatgtctcaaatcaaggcctaaatgagtaaaaagatgattacagattacctaaaacccttaaccagttttggtttttgattatgcatatgtgttggcttgcaattaggtttttagtttctgtttatgtgacttgtttgaaaacattggattcgtcttctctccacagtttctacttgaacctagtagcttattttaattccctgtaagaggaaaataatatagggaatctgttcaactattcctttaataaatcatgtgacttggccaattacagaaattcctaagtgtagtattttgaaatgtggccagtgtcccagatttgtaaggtacagtgtgcatacagtgtgtcttaggatttttttaagtaaattaaggatgtttaccagaaattattgatttactgaaccaagtatttattttcagaagcccacttttggggaaggttgcctatatttttgatagtaattagatggaagattaaatcctgtttaacctggatagaaacagttttaactattgctgaagttaaaatcactttgg

SEQ ID NO: 241732 - DNA, 907 bp, Homo Sapiens
gtacaaaaaagttggcaatcctccgcttccgcgcttgcgcgccaagacggctcggatgccggcggtctctgctgaagagagaagatggcgcttgacggaccagagcagatggagctggaggaggggaaggcaggcagcggactccgccaatattatctgtccaagattgaagaactccagctgattgtgaatgataagagccaaaacctccggaggctgcaggcacagaggaacgaactaaatgctaaagttcgcctattgcgggaggagctacagctgctgcaggagcagggctcctatgtgggggaagtagtccgggccatggataagaagaaagtgttggtcaaggtacatcctgaaggtaaatttgttgtagacgtggacaaaaacattgacatcaatgatgtgacacccaattgccgggtggctctaaggaatgacagctacactctgcacaagatcctgcccaacaaggtagacccattagtgtcactgatgatggtggagaaagtaccagattcaacttatgagatgattggtggactggacaaacagatcaaggagatcaaagaagtgatcgagctgcctgttaagcatcctgagctcttcgaagcactgggcattgctcagcccaagggagtgctgctgtatggacctccaggcactgggaagacactgttggcccgggctgtggctcatcatacggactgtacctttattcgtgtctctggctctgaactggtacagaaattcataggggaaggggcaagaatggtgagggagctgtttgtcatggcacgggaacatgctccatctatcatcttcatggacgaaatcgactccatcggctcctcgcggctggagggggttctggaggggacagtgaagtgcagcgcacgatgctgga

SEQ ID NO: 241733 - DNA, 588 bp, Homo Sapiens
ggacaaaggaaacacaaatgcatgaaatcaaacaaatgctttctctgacggactccgtctttgcaaaactgaacctaggacaatgtgcacgtttctacctagcaattccggaggacagagcgggcagggaggtgaacttgcttttctgtaatttaattgacttgtcagtaaagtcagtgttttgcaggcattttcagtgttctgtagtgggctttagttccgatcacagtgtggcaggccaggtttccattagcaaccagaacagtttccactaaccctttactataattttgatgaatgcataagttaaacgttgaagaaatggagaaactggtgcctgagtatcagggatggaatgcgaaaacgaacccattaagaccctgccttggtcttctcagatcctaaagtctgatcgaataataatagcattcttacacattcacctcagcctgtcttaagattcagaaactttccaagactctagagaaatctttccagaccctaggccctagttaaagattagatgttgattgaatgcaacacttctgcttgtaggtgcagtcccacacataccgtggaccttaagat

SEQ ID NO: 241734 - DNA, 1067 bp, Homo Sapiens
gttatctagtatcttgtggtatgatttagtattcattcaagcattgacaacttttcatgttgattcagattttataagatttgattacagtgagtttataaaatatttcagttatatatgcaatagaaacgaagtatctattttggaagataagtctaaggcattcacagcaataaaaaagaagtgctttagtatttctggacttcagtcaagggaattattattgtaaagcactaataatgcaggtttagatatttaaccagccatagataccaggaagccaggtgttaaatcaaagaaccaggaaaccatgagccacaaaagcatcagtgtagcagtgttttaagtattacgactatatggacctgcaccctaaaacataaacaatggtgtaccttatgaagttaaaaaccctatttaagactaagaagcactttagcctggtggggaaagcagtggttatgagtggaataaagactggaaaatttgcttttgtagtgcagagctttagagcaagcacagttttatttatttgccttaaaccaatatttccggataaaaggtatatttttcttgtggagattgtagaataactatcatgagcaaaggcagaaagtattcatttcaacttagtaaagacatattttttcactatcacagaaagatgacctttacataaaaattgttacatatacttccatagatactaatagtaagtatgattttttttaaaaaaataactttctaagacaaatggcaaaggctttctttttcatgaattctttggttataaacaggttttgagtgatttttgttctatgaagtattaagtgattctgctgatatctgttctgtgtgtcctttgaagaccagaatataattaattttattctggtctaacatatttattctgatttacattgcttttatgtaacataattacagaatgaaaatatacctttagatctgacatatatcgttgatgaagctcctgctgagcatgttgcataagcttttcatccttttaaaactaaagagagctcagagccaacttttttgtacaaagt

SEQ ID NO: 241735 - DNA, 1667 bp, Homo Sapiens
  misc_feature (1315)..(1371): n is a, c, g, or t
ccaactttgtacaaaaaagttggcaccattggtgggttgaataaaaaacccatgagccttgcttcaggcttagtgccagctgccccacccaaacgccctgccgtcgcctctgccaggccttccatcttaccttcaaaagacgtgaagccaaagcccattgcagatgcaaaggctcctgagaagcgggcctcaccatccaagccagcttctgccccagcctccagatctgggtccaagagcactcagactgttgcaaaaaccacaacagctgctgctgttgcctcaactggcccaagcagtaggagcccctccacgctcctgcccaagaagcccactgccattaagactgagggaaaacctgcagaagtcaagaagatgactgcaaagtctgtaccagctgacttgagtcgcccaaagagcacctccaccagttccatgaagaaaaccaccactctcagtgggacagcccccgctgcaggggtggttcccagccgagtcaaggccacacccatgccctcccggccctccacaactcctttcatagacaagaagcccacctcggccaaacccagctccaccaccccccggctcagccgcctggccaccaatacttctgctcctgatctgaagaatgtccgctccaaggttggctccacggaaaacatcaagcatcagcctggaggaggccgggccaaagtagagaaaaaaacagaggcagctgctacaacccgaaagcctgaatctaatgcagtcactaaaacagccggcccaattgcaagtgcacagaaacaacctgcggggaaagtccagatagtctccaaaaaagtgagctacagccatattcagtccaagtgtggttccaaggacaatattaagcatgtccctggaggtggtaatgttcagattcagaacaagaaagtggacatctctaaggtctcctccaagtgtgggtctaaggctaacatcaagcacaagcctggtggaggagatgtcaagattgaaagtcagaagttgaacttcaaggagaaggcccaggccaaggtgggatccctcgataatgtgggccacctacctgcaggaggtgctgtgaagactgagggcggtggcagcgaggctcctctgtgtccgggtccccctgctggggaggagccggccatctctgaggcagcgcctgaagctggcgcccccacttcagccagtggcctcaatggccaccccaccctgtcagggggtggtgaccaaagggaggcccagaccttggacagccagatccaggagacaagcatctaatgatgacattctggtctcgtcttcnnnnnnnnnnnnnnnnnnnnnnnnnnnnnnnnnnnnnnnnnnnnnnnnnnnnnnnnnatgtcactgcagattgagacctacaggctgacgttccgggcaaatgccagggcccgcaccgaccacggggccgacattgtctcccgccccccacacttccctggcggccccaactcgggctcccgggtccttggccccctttcccgggctgtccactagaccagtgagcgcttgggcgccgtgctgggcagcccgctaggctcgccttccctcctgctttgcgtgcccggggcagcagcagccctgccccacacctcctctcactccccagcctgggcccatctccctgctttggt

SEQ ID NO: 241736 - DNA, 1142 bp, Homo Sapiens
ttggctaatttccaaaatgtggttggttacgaaacagtggttggccctggtgatgttctttacatcccaatgtactggtggcatcacatagagtcattactaaatggggggattaccatcactgtgaacttctggtataagggggctcccacccctaagagaattgaatatcctctcaaagctcatcagaaagtggccataatgagaaacattgagaagatgcttggagaggccttggggaacccacaagaggtggggcccttgttgaacacaatgatcaagggccgatacaactagcctgccaggggtcaaggcctcctgccaggtgactgctatcccgtccacaccgcttcattgatgaggacaggagactccaagcgctagtattgcacgctgcacttaatggactggactcttgccatggcccaggagtcaggtgtttggagcgaggcagggcagttggcactccactcctatttggagggacttcatacccttgcctcttgtgccccagcaccttctctctctgccccccgcctaaagtcctgcattcagtgtgtggagtcccagcttttggttgtcatcatgtctgtgtgtatgttagtctgtcaacttcagaatgtgtgcgtgtgtgtgcatgcacacgcatgtatgtatctgttccctgttccttctgggtcaggctgtcacttccggctctcagccctatctcctgcaacctcagtgcctcagcctgagagagagatgagatgctcttggactccccactgcatctgggctgcagggccagagctagtctgaccattaggtcagtctgcctcctgacagtttttgcgtagtcaagctctaggcggtatgggaatggctaccgggactctaatggggtgaaagagaggggaggcttgcctttgagagcctgtatagccttcctgtgagagaggattagatagggttccaactgggcctacaagctcaagccatacataaaaggaccttgggacataagaaccaatgattgtgcataagttctaaattagagacacatatagtttctctctttcagcaccagctcttgcccctatgctgggtaccaagggagttctcctagctgtggcttctctaggttctaggggtgcaagcct

SEQ ID NO: 241737 - DNA, 1174 bp, Homo Sapiens
acaaaaaagttggcactccgctcggctcaccatgtgtcactctcgcagctgccacccgaccatgaccatcctgcaggccccgaccccggccccctccaccatcccgggaccccggcggggctccggtcctgagatcttcaccttcgaccctctcccggagcccgcagcggcccctgccgggcgccccagcgcctctcgcgggcaccgaaagcgcagccgcagggttctctaccctcgagtggtccggcgccagctgccagtcgaggaaccgaacccagccaaaaggcttctctttctgctgctcaccatcgtcttctgccagatcctgatggctgaagagggtgtgccggcgcccctgcctccagaggacgcccctaacgccgcatccctggcgcccacccctgtgtcccccgtcctcgagccctttaatctgacttcggagccctcggactacgctctggacctcagcactttcctccagcaacacccggccgccttctaactgtgactccccgcactccccaaaaagaatccgaaaaaccacaaagaaacaccaggcgtacctggtgcgcgagagcgtatccccaactgggacttccgaggcaacttgaactcagaacactacagcggagacgccacccggtgcttgaggcgggaccgaggcgcacagagaccgaggcgcatagagaccgaggcacagcccagctggggctaggcccggtgggaaggagagcgtcgttaatttatttcttattgctcctaattaatatttatatgtatttatgtacgtcctcctaggtgatggagatgtgtacgtaatatttattttaacttatgcaagggtgtgagatgttccccctgctgtaaatgcaggtctcttggtatttattgagctttgtgggactggtggaagcaggacacctggaactgcggcaaagtaggagaaaaaaatggggaggactcgggtgggggaggacgtcccggctgggatgaagtctggtggtgggtcgtaagtttaggaggtgactgcatcctccagcatctcaactccgtctgtctactgtgtgagacttcggcgggaccattacgaatgagatccgtgagatcctttccatcttcttgaaagtcgccttttagggtggctgcaagtagaggtttgggggttggtgggctg

SEQ ID NO: 241738 - DNA, 804 bp, Homo Sapiens
ttgggacttctggagtccgagaagtcaacggcgcggttgctgcggccgccgcgctccccggcccgaggcgatggagaacggagcggtgtacagccccactacggaggaggacccgggccccgccagaggcccccggagcggcctcgctgcctactttttcatgggccggctcccattgctccggcgcgttctcaagggcttgcagctgttgctgtctctgctggccttcatctgtgaagaagttgtatcacaatgtactttatgtggaggactttatttttttgagtttgtaagctgcagtgcctttcttctgagtctccttatactgattgtgtattgcactccattttatgagagagttgataccacaaaagtaaaatcatcggatttttatattactttgggaacaggatgtgtgtttttgttggcatccatcatttttgtttccacacatgacaggacttcagctgagattgctgcaattgtgtttggatttatagcaagttttatgttcctacttgactttatcactatgctgtatgaaaaacgacaggagtcccagctgagaaaacctgaaaataccactagggctgaagccctcactgagccacttaatgcctaaagactctggggagcagatgttacctaaggtagtgaccctgcattgtggtgcctgagccctggcagaagctcttgtaaaatttgttaattgtttaaaccacttcttttggagagcaaggggaaggtcaagaaggcagttttatcaatattgtgtcagtcaccacaaagtaggccagataagtt

SEQ ID NO: 241739 - DNA, 832 bp, Homo Sapiens
  misc_feature (743)..(760): n is a, c, g, or t
ttataaatggtcacagcacatgccacttgatacaatccaaactttgaaatgtttgacttctcagtgggctgtccctctccactgcaaccccccttctccagcctctgaaacatcgcactatcctttggtaagcaattccatatagatagctgggggaggaggagtataacctgaccatagcatcaggtacatcaggtacatttatttctaaagtctaatagagaacagtttttactgcttaatagtaagaagcactgagagtgattttaatcgacattcttaactctttcaactccacctagatagctagtatctacagatgatgcagaaaagaggttaggggagtactttccaatagtttattgtattttcttaaatatcctttctggaattttcagaaacaaaacataaaaaaattatatactttattacaaatggtaaactcagagtgctccaaatctcttatttacaaacaacactgggcaggatacccaaacaaacaaacaagaaataacttacaaaggcatgaagctgtttattgacagtaatcagctttcatcaaattaaaaaatatatatatgtacatacacagttaacgaaggcaggccagaaagagttcatctgtaggctcagcctcgctctcacaaacctccctcctgccgcccctccccaaccctccccccgctttgtgttcttaaggagtactacagaagcaatctacagtctctattgcagtttgtaannnnnnnnnnnnnnnnnntttaatactgaatgagatcgaatgttaggtccatgcagttcttggtcaatgttaacgaaaagtccaacccaa

SEQ ID NO: 241740 - DNA, 1710 bp, Homo Sapiens
  misc_feature (44)..(69): n is a, c, g, or t
ttcagaccctgcaaaaccacattccccattttaacgggcgttgnnnnnnnnnnnnnnnnnnnnnnnnnntactgacagcaggtctgaggttgcatcataaatacaaaggactgaagttataaaagagaaaagagaagtttgctgctaaaatgaatctgagcaatatggaatattttgtgccacacacaaaaaggtactgaagatttaccccccaaaaaaaattgtcaatgagaaataaagctaactgatatcaaaaagcagagcctgctctactggccatcatgcgtaaaggggtgctgaaggacccagagattgccgatctattctacaaagatgatcctgaggaactttttattggtttgcatgaaattggacatggaagttttggagcagtttattttgctacaaatgctcacaccaatgaggtggtggcaattaagaagatgtcctatagtgggaagcagacccatgagaaatggcaagatattcttaaggaagttaaatttttacgacaattgaagcatcctaatactattgagtacaaaggctgttacttgaaagaacacactgcttggttggtgatggaatattgcttaggctcagcctctgatttattagaagttcataaaaaaccacttcaggaagtggagatcgctgccattactcatggagccttgcatggactagcctacctacattctcatgcattgattcatagggatattaaagcaggaaatattcttctaacagagccaggtcaggtaaaactagctgattttggatctgcttcaatggcttctcctgccaactccttcgtgggcacaccttactggatggctccagaggtgatcttagctatggatgaaggacagtatgatgggaaagttgatatttggtcacttggcatcacttgtattgaattggcggaacggaagccgccccttttcaacatgaatgcaatgagtgccttatatcacattgcccagaatgactccccaacgttacagtctaatgaatggacagactcctttaggagatttgttgattactgcttgcagaaaatacctcaggaaaggccaacatcagcagaactattaaggcatgactttgttcgacgagaccggccactacgtgtcctcattgacctcatacagaggacaaaagatgcagttcgtgagctagataacctacagtaccgaaaaatgaaaaaaatacttttccaagagacacggaatggacccttgaatgagtcacaggaggatgaggaagacagtgaacatggaaccagcctgaacagggaaatggacagcctgggcagcaaccattccattccaagcatgtccgtgagcacaggcagccagagcagcagtgtgaacagcatgcaggaagtcatggacgagagcagttccgaacttgtcatgatgcacgatgacgaaagcacaatcaattccagctcctccgtcgtgcataagaaagttacacgacagatccatgagcatgagcaggagaacgagttgcgggaacagatgtcaggttataagcggatgcggcgccagcaccagaagcagctgatcgccctggagaacaagctgaaggctgagatggacgagcaccgcctcaagctacagaaggaggtggagacgcatgccaaacaactcgtccatcgagctggagaagctggccaagaagcaagtggctatcatagaaaag

SEQ ID NO: 241741 - DNA, 656 bp, Homo Sapiens
ggttgagctgaagtgttaaggttgctgtgagacatgattggttgcaccactacactccacccagagtgatacagagagacactgtctcaaaaaaattgcagaagcatttgaatggacatataataattttgaaaaatagctgaggaatgagtttagaaaaatcaaagcccaagaacacattatttattttcatcatagaaaaaagaaaaagaaactttagagaaattaaatttatcagagtttaattgagaaaagaatgatttgcaaattgggtagcctgtgtaggctcagagagtctccagcatagccacatggtggtaaaaaatttatgaacagaaaaggcaaattgacatgcggaaaatggaagccaggtacagaaacagtcagattgattacagcttgggagttgccttatggtttgaacagttgacgtcattttactggccaaaacacattgattggtacaagaatgggtacagtctatttacatatccaggtaggtttcagtttagtattttaaataaaaacgaccaaaattaaacgtgaaagggggcagctttatggtgtaattaatttaataatttgtccttttggtcatcttaattttgagagatagaccaaaactttagacattggccgggcgtgatggctcatgg

SEQ ID NO: 241742 - DNA, 521 bp, Homo Sapiens
ggaagccttttctggcaccgagcacaaagttgggctctgtggcacatgtgtcctccacactgcaggggaagattagtcatgttcctaaagtgcccccagggccgagcccacagctcacacatttagcaaatggtgaatccctaggtgggtccaggcgactgtccattctcatgtcccagtgctgactattcccgctccaccttaacaaaggcagaacaacttcttcagatgagatgagcatctaacttcccaggttttcaatcctgtgaaacaaactgaggcccacagagggcacacaagatatgccaggatcaaggtgtcttgtgttcccttttggggactcccgactcctgcttaaactcagaaaaatgcaccacccccccggacagtagttccgacagtcacattcaagacgggaacctcaaacactccgatgaaatccactagctgcatgtgcttttagttgccattggaagttccataacaggtcacgtgactgttacataattacatgactggac

SEQ ID NO: 241743 - DNA, 1024 bp, Homo Sapiens
agtttaattttacaaaggtctgcaactttcacaaaccagtgaaacataaagaaagtttaattcactgctaaaggaaataaatagctttggatgagaaatttggaagcacactctaataagctagatacaaaatacatagagaaattaagtaaaaagatgtaagggcaatctgctcattctccccataaaataagtgatcaaaacttagagaaatttctcaactccatgaagagccctagaaactacaggaaaaaaatgcaactcttcttaagggtaagtcagacaaagagtagtttaatgccagtgagatgatcggttgtaacaatgaggaccacatgttatgctgtttcagtttgaattgtaatcaactatgtactttaaatgaatcactaaaatatatagattacatagataatacgtctatatatataatgcataacttccaactcaatggacaaggggagaataaagaaaataccccaaaaggacagaaaaagaatgagtttgaaaaaaatctagattagaaagcacaaaataagagggtagaaataaacatttgtatcatttacacgtttaaactaggagtcacaataaatgtaggcccatcaatgaaaccaccagataccggcaaaggaaactttaaaatcccattatacataatttataagaaataaacctaaaacttaaggaaaaggaagttaagactaatagagacatacaataacacaaagcaaatgaagactcatacaactatactaatatcagacagtggacttaaagtcaaaaccactgttggagacacaatggtcacaacatgctacataacagtttttgaaaagctgtaacaatactaaactaaaactacaattttaaatatattagtaagttgtcaagtacaaggagaagctgacatttttaagagagcaggagaacttaacacatttacacattagcaaaaatacagattgagtatacagaatacagaaaactgagacaaataattacaaggtacatattttaccaa

SEQ ID NO: 241744 - DNA, 1169 bp, Homo Sapiens
  misc_feature (197)..(205): n is a, c, g, or t
  misc_feature (815)..(856): n is a, c, g, or t
ttggacaaagagtgcttagattcttacaaattatgatgtaagttatccatttggctttttcctaactagtcttaccaaacttagggggaaacctgtgctccattaccacatgggtgcaagtcagcattgtaagttttctcaggttattattattagagaggttggaaacattggtaaactctgttgattgagaaggnnnnnnnnngtcccattgaactgttgcaacaaatcagaaatccacataaaagtgctctcctgcctgggcagcaacaaccaagaacaaagccccgggactgttttctttttaataaagccacaggcaggcatcgtagctccacagcccgaggggacacaggatggaaaccccaggatgagaagggagcagggagagttccagaaagggggatgaaataggagtattaaaaagctgcgttggtaagtttttcatggaaccaagatttgacaaaggcatctcttatccttggttttaaattcctgctgggagcaaggcctggtatgagcgccctgggtcttgtttttggtgtttcgcttttctgtaaggattaagcagatagggagaagggaaaaggggcctcactttagaatgaatgagtcaccttgtgatttttaaatttttattttaataaagctaatcaatttctacaaccttgtcacatgtagctgagtctgggatgactcagtggatcagtggatgcgtggaaggttttggtgtttataactcatgacccaaatccttccaagacacaaatgaagctaatcttcttcccctccctttcctctcccacttcccctcnnnnnnnnnnnnnnnnnnnnnnnnnnnnnnnnnnnnnnnnnncgcgcgcgcgcgtgcatgcagagaggaaggaagggagctttagcacaagtagctacatagtgttcaaggatcagctttcttgaactccgaggcttggttgcctttgctgaactccaagttagtggattgcagaatggaaacttggcttttgcggcactgggtgagttttagtttgtgtgtgtcttgctggggggtggtgatgattgtctcagcactcacgcactgcacaagatggcagcagatacagcactgcacaagatggcagctcctctgcagcttcctcctcagcctccctccttgcaccccacagttt

SEQ ID NO: 241745 - DNA, 1173 bp, Homo Sapiens
ttggtgcaaattctcctgcctctgagaaggcagagaagccctttactcagaaggtcttcaattctagcattactccaactcctagggaaatttcgggtgggtgcctatggctgtatgaccatctgattcctcagggacaggacaggaattcagcaagggagcttaaaatattttaagtaattgtcaacattccatggtgactctccccaaaaatctagtggtaggaaaataatctgtacttattcctctttctgcacacaaagccctcatttaaatttgtgagcctgcttgggatccattacctagccattcagagatcctgtcaaatgcacagcagattggatactcaccatcccaaaggggttcctcccacctggatggggccaatctctagttgacagtgcccctcagagtgcaccatggagatggaatgtcccttccagagagacttttacacagggaaaagcatttgttggctgggctccaactctcatttggtacaaaaagctttacattcttttccctttttacattacattcttcaaagacttccgtgcttgccagctggataacaactcaagctctagtgtttactcttgcacagccccaaacccttggaaactcagcttcgttctatcagtgacatcacccattgtggccgaggaaccacaaaaccttaaaatacaggcttaaattcagcaagcgaagaacattccatattgaatgggcatgagatatgcctatcagattgtgtgtgtgtgcgcgttttttaaagacagccaattacatcgtatctagtcaaatgagcggattctaaagcagcctgctgggatgttccacttagtctaatgctgttgccactgtacgccacagcaccggacagtgttctttgggacatctctgggaaatgctctggaacatgctccttgatggaaaacactaatttttgaaagaagtagatgtctggaggcaggtctggtgaataaactgaatagtactgccttggaccccagctgaggggtggcagtaagcaatgaggatgggctataaagctgttaactggctaagggccatccttgggcaggcatttcagacacatctgtagagagggcagtagcatctccgataggccagctctgaaggaagcttaatgcttaatacagtcacacccaa

SEQ ID NO: 241746 - DNA, 988 bp, Homo Sapiens
ttggggcgtttcttttgcttccccttccctctttcacgcttcctcccctccccctcctcccttatcccttcgctttcgctcttttccgtcgaggccgacccctgagttgtgagtctggggtctggttggtgaaaaagagcccttgaagctggaagacgggagaggacaaaagcatgtcttcccttcctgggtgcattggtttggatgcagcaacagctacagtggagtctgaagagattgcagagctgcaacaggcagtggttgaggaactgggtatctctatggaggaacttcggcatttcatcgatgaggaactggagaagatggattgtgtacagcaacgcaagaagcagctagcagagttagagacatgggtaatacagaaagaatctgaggtggctcacgttgaccaactctttgatgatgcatccagggcagtgactaattgtgagtctttggtgaaggacttctactccaagctgggactacaataccgggacagtagctctgaggacgaatcttcccggcctacagaaataattgagattcctgatgaagatgatgatgtcctcagtattgattcaggtgatgctgggagcagaactccaaaagaccagaagctccgtgaagctatggctgccttaagaaagtcagctcaagatgttcagaagttcatggatgctgtcaacaagaagagcagttcccaggatctgcataaaggaaccttgagtcagatgtctggagaactaagcaaagatggtgacctgatagtcagcatgcgaattctgggcaagaagagaactaagacttggcacaaaggcacccttattgccatccagacagttgggccagggaagaaatacaagtgaaatttgacaacaaaggaaagagtctactgtcggggaaccatattgcctatgattaccaccctcctgctgacaagctgtatgtgggcagtcaggtggtcgccaaatacaaagatgggaat

SEQ ID NO: 241747 - DNA, 1256 bp, Homo Sapiens
  misc_feature (229)..(243): n is a, c, g, or t
caaaaatgacaaaaatattttcttaaaggcacaaaagcatgaatattaaatgagagttgtattttacaaggccaacttttcaatggaatgcggttaccaactgagctgtgacaaagagtacactgtacctttataagtgatataaaacaaaaaagtactaacatgaaatacaaataaaatatctattgctgtaacttaacatttcacatgccctatttattgttgttgnnnnnnnnnnnnnnnacatgtcctgggccagctacattttactaaatggtggatgatggcatagtacatttaacagctaaaaagaaaatgcacatgtgaataattattactcaattaaattttcatgtaggaaaataaaatcttggtaaatgaaaaaaactggtcataaggtcataaatcctagaaaccctcatgaggctctcagacaactgggaaccgtttacggtccatgtgtgaaggaagattaatttcaggtaaataacattcaaagtcaattacatatatggctacaaagttagtaattatgtgttataaagattcatataactaagcctagtacaagcactgatctaaaattaagccaccaattcctgagttttgtgttcagttcatagaaagagactcatacaactaaaagcataataagaggactattagattagatgcatgcttttagtgtataaagaacagtcatgaataactctgctctttcttaagaaatagtttttgactctttgggtaagaacccataacatttgctctaaaaagaaattttaaaaataaagaacacaactacctatttagtcttagaagatacccatacaaataaaatattatttggaccaaatgaaaacaacatacacgtggataagaccaaagtcctaagaggtgggtcaccagtacaaaatgttaacaaggtttactgatgaaatgatttttgtgataagccaatcaatttgtatgtaattaactaatttaaaccataaaaaagatcaaattgtacaatatttacagaatatcatatatcaatgaataggcagagtgtaacagaatgtgaatacaaaaattatattgacaaatataaaatataaccaaaaacccatttgttctaatatcatgaaaatactgggtataggtagatcttatttaagcttttatcaatttaaaacatcatttcacatgtacatatggaatacagcattattttgccaagaaaacatgggaaatggttcttcacagaaacccaa

SEQ ID NO: 241748 - DNA, 825 bp, Homo Sapiens
  misc_feature (582)..(635): n is a, c, g, or t
gctctttttaaaaattttatttagaagcctacttgtagaagttagcataattttacagattattagaaaaattcttttctttctgcaaacagttataataggttaggaataatagattagaaatgtactacattacaaaacagtggcctataactatctgtacatttactgtgcaccttaaggaaaagaatttgacagtgtgctgtacttacactgcaggtaacatatttttattctatcacacaaaactgaccagtggtagtgcttgaatttatgaatggccattaaacagaacatttaaactcagatgtatatttagcatgctaaaaagtgaaaaaaatttcaactgaagttctgtggctcatcagttcaaatgtttcatggcattttttttctttaagtgaaaaattttgatactgtaaaacagttttacataataaatgcaaaaagataacattttctaaatttttagaaagaatattcacattcattttgtcatgggtttcacgtggctcttctaaatatattaatcatattaataagacactggtcctatacaatttcaacagtccatcttcaatnnnnnnnnnnnnnnnnnnnnnnnnnnnnnnnnnnnnnnnnnnnnnnnnnnnnnnatactaaactcacacaacaggtagaataaaatgaaaccaaattacataatggcaggttatacattttaaagaatctctttccacttagtcaaataagatagaaattgaaatgtaaacttactgatttctgtgggattttccccactggttcaaattggaaaatttgatataaatctaatattttatccaa

SEQ ID NO: 241749 - DNA, 930 bp, Homo Sapiens
aagcaacagacccagcagcaccctcaaagcccaaggtcacgtgagatggggcagagggacagtaagtgccggcaccccatacagaggtggagcctggtgggacagcggcgccattcagaagtacccgtcttcttgccgatgcccacggaggcactgtgtgagcagagtgcggggacctttgtaactggaatagggaaacccaagagacatggcagtaagcacgcgtgtgtgtttccgcggaagatgggaagagccttccagaacaggaaaaagtggttcaaactctagcctggcattgctccccgggagtttggtagaggaggcaatggctaggagcaatttctgccatttcttcatcttttcatgatttatgtcaattattatttcttccttgctggtgttctgcatgaaagatgggcgggtaaaaagtacacttgtagtggacacctctaatttcctttggacaagagctgggtaggaattggccttttgtgactctgcctgcccgaatctgtgtctatccgtatatccacacctagcgttgttaggtgtgacatgaacccctatgcctgcgtgggaatgtgcttattctggggcaggccttcctaaagggccctgggagaaatgaagaactgtggcccagcgaaaaagacatgtgatttacccagactcaactccacacaaaaaatgtcccatgtgtcacatcttatataaactaactcccaaattttcatggcagaaggcatagcagtgaccagccttcacaataaagaaggaaagaagtttgttggaaggattacccagtgagtgctagaacgtgcattgaaccgacgcaagtaactcatgggaaatacactgtgtccctgcagcagcacagaggtcaagaaccttctcgatccccccctactcaagcaaaatcaggtgagccaa

SEQ ID NO: 241750 - DNA, 1244 bp, Homo Sapiens
ttgggtcttcctttgtcccggacctgaaggagctgctccccagtgtcaaagtctggtcagattggatgctcggctacccggacacctggaatcctcctcccacatccctggatctgccctcgcatgttgctgtggatgtatggtcgacgctggctgatttctgtaacatactgactgcagtgaatcagtctgaggtgccactgtacaaggacccggatgatgacctcacccttcttatcctggaagaggatcggcttctctcgggctttgtccccttgctggctgcccctcaggacccctgctacgtggagaaaacctcggataaggttattgcagctgactgcaaaagggtcacagtgctgaagtattttctggaagccctttgtggacaagaagagcctctgctggcattcaagggtggaaagtatgtgtcagtggcacccgtcccagacaccatgggaaaggaaatgggaagccaagagggaacacgactggaagatgaggaggaggatgtggtgattgaagactttgaggaagattcagaggctgaaggcagcggaggcgaggatgacatcagggagcttcgggccaagaagctggctctggccaggaagatagctgagcagcagcgtcgccaggaaaagatccaggctgtcctggaggaccacagtcagatgaggcagatggagctcgaaatcagacctttgttcctcgtaccagacaccaacggcttcattgaccacctggccagtctggcgcggctgctggagagcaggaagtacatcctggtggtgcccctcatcgtgatcaatgagctggacggcctggccaaggggcaggagacagaccaccgggctgggggctacgcccgtgtggtacaagagaaggcccgcaagtccatcgagttcctcgagcagcgattcgagagtcgggactcttgcctgcgagccctgaccagccgtggcaatgaactcgaatccatcgccttccgcagtgaggacatcactggccagctgggtaacaacgatgatctcatcctgtcctgctgcctccactactgcaaagacaaggctaaaacttcatgcccgccagcaaagaggagccaatccggctactgcgggaggtggtgctgttgacggatgaccggaacctgcgtgtgaaggcgctcacaaggaatgttcctgtacgggacatcccagccttcctcacgtgggcccaggtgggctgatggagccacactgggg

SEQ ID NO: 241751 - DNA, 1142 bp, Homo Sapiens
  misc_feature (1001)..(1040): n is a, c, g, or t
ctttgtacaaaaaagttggattaatggtatttcttttttacactctacaagtgaattagggagtctcttgttgacccctttgttgcaggaatgtgcgtcgggctaggttatccatgagtttctttattcctaatgcagttagaaagacctttctccttgagctctttgactcccagaaggtaccccagtccccagtgtacttagaaaggatctcgaacattgctggacgtcctcatagtactcacaaagggctagccttgaatgtcactcgcccagtcttcagtctcctgacttagagatacaatcacgtcacaggtctcttggcctcaatctgaaaactgctgccgccgcgccgaggagactcgcatgccgccaccacctcactgggagggcgccgagcccaccgtcgccccctagaccctgacagctgcagctgccttgccttgccgccgcctccctgcagggcccctgttccaatgaaaaacagaacacaaaagagcagagcacctaagcctgtctctgcctccctgtctaccggactggccagggcccaagacccccgctgctccactgcggggctgggcgggctgactccctgcttcctccaagctgctgcctcccctgcagccagggtctgggcagggtgcagccggtcctcggggcacgcagcttccttcaagtacactgtgtgtgcttcccggacctgcggcgatgccacgggcctgccttttctatgcgcctcactagcttaccaccctgtgcaggtaatgcaactgactttgtctcatcagtctttttctttccctgccaccctttatttatcaagcgtaatgttacactttaaaggacagcaaataagaactttgtagaatcccaccaggactttgctaacaataatgtttggaaataaagaagtgctttgaaaaaatatcagccaccaaaatagttatgttggcactgtgttcacacgcatggtccccacacccccaggttgggtgggnnnnnnnnnnnnnnnnnnnnnnnnnnnnnnnnnnnnnnnncatgttacatccatatctgtatttatatcttatttgtttcactttcaagtgtatcatggcaaatgtacagatttttttgttaataatgtgctaggatttgct

SEQ ID NO: 241752 - DNA, 1108 bp, Homo Sapiens
  misc_feature (289)..(311): n is a, c, g, or t
gataactcccttgaaggtacatgtgaaaatgcagtggtagagcccttgttaagaacagatttactttaggcataatatttgctgattaagcccattgattgaacacacaaatctgagcaccatcagagttctacatactgacatggctattttctcacattatctggaggtgggttggggaatagcacggatctgatccagacaaatcacaccattgccagcggataaacagtaactcaggaaacagtaactgaagtcccataggcagcacgtggtatgattcagttcnnnnnnnnnnnnnnnnnnnnnnntttcaatatactaagcgaggtcaccttttggtctaccaactgttatcttcatccgggagctgtgtgaccagcgaattgcaaaattttactaacatactacctgtgagaagatgtcactttgggaattaaacagaaaggtgttccatagtacgacttgaaatctcagtttgattttggttttctaggaaaacagagaacacagttgcgtatgtgcacttttataggcttttctttcaaattttcagtcattctgtaagaaaaaggcaacagaagaattcagtatgaagattttcctccaattttcttcagtaatgagaaacaaaaagttggtaataacaaaaagcttgcatttccaaagttcttgaagttgaaaggataaaattccagtcttttgctaaaaggatgtatctgtagtacaaaacaatgaagtaaaccatatgtttgctaaaggtggagaggacagtctgtggttaatatggaacatcacttacgctcccttgagagggcctacttactctcccatcatttgttttgtttagtggcaccacaaccaagtacaaaatgagattctctgagtgcctgacaaaacgaatttaagtaccagccaagtacacacgatgatagcttcaaggaatacaactgactttatgatatgaattttcaaggaacgtatcttatatggattttgaagaatcttgtttgcttataagaacttcaagaagcctaagcttggctttaattttcttgtactctctgtactcctcaagcactggaacacgatcctctttctgggccaa

SEQ ID NO: 241753 - DNA, 680 bp, Homo Sapiens
  misc_feature (62)..(79): n is a, c, g, or t
  misc_feature (126)..(152): n is a, c, g, or t
  misc_feature (314)..(521): n is a, c, g, or t
  misc_feature (625)..(635): n is a, c, g, or t
tggcttttgtttttacccttgacctgccaaggtagctgaagaccttttagacagttccatcnnnnnnnnnnnnnnnnnnctgcctatttaaagacaaattatgggacgtttgtagaacctgagtannnnnnnnnnnnnnnnnnnnnnnnnnngagctcttaggtttattggagctagcaataattggttctggcaagtttggccagactgacttcaaaaaattaatgtgtatccagggacattttaaaaacctgtacacagtgtttattgtggttaggaagcaatttcccaatgtacctataagaaatgtgcannnnnnnnnnnnnnnnnnnnnnnnnnnnnnnnnnnnnnnnnnnnnnnnnnnnnnnnnnnnnnnnnnnnnnnnnnnnnnnnnnnnnnnnnnnnnnnnnnnnnnnnnnnnnnnnnnnnnnnnnnnnnnnnnnnnnnnnnnnnnnnnnnnnnnnnnnnnnnnnnnnnnnnnnnnnnnnnnnnnnnnnnnnnnnnnnnnnnnnnnnnnnnnntaggatatgtgtatcaagaacatgattatccaggggtattttctaattcagatcatcaaactgattatatagaagagttggctttaaaatgtttgcaaatgtcnnnnnnnnnnnaatactggaagaaaaaatattctgttgtgtctcatacagtgctta

SEQ ID NO: 241754 - DNA, 1882 bp, Homo Sapiens
  misc_feature (766)..(820): n is a, c, g, or t
  misc_feature (896)..(914): n is a, c, g, or t
  misc_feature (940)..(956): n is a, c, g, or t
  misc_feature (1333)..(1361): n is a, c, g, or t
ttggggagaagagatgagagaagatggtcttagcccaaatgaaagcaaactttgtactgaatctgaagggatcagccccaataactctgcctggaatgggccccagctctcttcttcaaacaataactttcaacagactgtctctgataaaaatatgcctgacagtgagaaccctacgtctgtattctctcggatctcagaccattcagagactcctaatatggagttatcctgcagaaatggtggttcacacaagtcaagttgtgaaatgagatctctggttgtttccacctcatcaaacaaacaggatgttcttaacaaggattctgggaagatgaaaggccatgagagaagactaggcaaagtcattcctgttctacaaactaagaccaggactaatgttccgacgttttcacagtcaaatctagaacagcagaagcagctttatctcaggagtgtcattgctcatatagaagacccagaggacactaaccaaggtatctcgggggagctttgtgccttgatggatcaagttcatcatatgcagcactcaaaatggcagcatccttcggacctcaccacgcgaaactacgcccgccgacagaaacatctgcaaagatacagtctgactcagtgggttgacaggaacatgcgaagccaccatcggttccagcgtctcccagacttctcgtacagttaatttgtgtcatcccatcagcaatgaaggtccctatccagggtcctgcttggagcagcatttcatgtnnnnnnnnnnnnnnnnnnnnnnnnnnnnnnnnnnnnnnnnnnnnnnnnnnnnnnnatttaaaaaactcgtcaccttttggaaatgcccattgccgacttgaatttttttgtatgaagtccctcctgatttnnnnnnnnnnnnnnnnnnnttaagcaagcgttcggttggtatagnnnnnnnnnnnnnnnnnaatttaaattgaaggtagctgcctcctgaaagccagcattaagccagaacacccaggttcaagcaaaagacccacctctctgcagaggcaaagtctactttctggtacctcaaagaaatcattgttcaatcttccataaggaagagattctttaccaggctgtgagccagtgttagataacttgtgaatggatataagttacttttaacaacccctcttacttttttatttgaatcctctgaatacctgtcagtattttaaagttggcaatccaggacattataagtaggatggagcaggagaagaatcctattgaaaggacaaattaaaatagtaaatcctctcctctcccttctgtaggtactagctgccttgannnnnnnnnnnnnnnnnnnnnnnnnnnnncattccttattgaacttattttgcacaatagtgtttacaaatcttatacatcttactttgacagaagacttataataccttgtggtcttgagactggttgtctcctttgcctttcttcaaggattttcctttttctttttaccccccagtgaccactctgctctttaggattctagtggcagtattcttgtaacctgttagacgtggatatacctcttcaggatggcctccttgctgtctttattgaagagctgcccacccagagtcttgactctagggcaggctagtgctattgtggtgtcagttgatatttagtttcatttgctgaaccccaaatttgagtgttagttagggagcctccattctgtgggagagtgtggaaaggcactcttttttctccatattagttaacaagaggtgtctttacgccctggatgttaccatctcatttggtcaagcccctgatacctagtttcacatggatgctaacgtggatgtaatatagttgtgacagcctatgc

SEQ ID NO: 241755 - DNA, 1578 bp, Homo Sapiens
  misc_feature (1270)..(1353): n is a, c, g, or t
gatgaaagagtactttcataggaagtcatgcatgtatggatttggtacaagtcatttaggaacctaatagaaataggaatgtgggaaggccaggtggttctgtagaattttgaacaaggcttttccaagaaactcctccctccgcccccatcctccatatggagagttggtgagctgaagtggaatgacagctgagtccttctctctgcagagctttagccgccagtcttcactcctgttcaagattctctccagtgttcggaatcatcagatcaactcagatttggctcaactactgttacgactagattataacaaatactatacccaggctggtggaactctgggcaggtaggagcaacccttgggtaactcagtagactttttaaggtggctttttaatgagttgtagaattctagaactggaagaagactttagtccaaataccctcattttataagtaaggcttagagatagaggtgtgaccatctttaataattttaatggaggttattttctagtagaagtcatcatcatcataaaatactaaaaaacctgacagtgagataggtgttaagtcctttgctaggttatgtattgctatgctgggaggcagtgggccttccactcccaattctgatatgaactagctgtgcagccgtgggcaccccgccttgctggtccctagcttccgcatctgtgaaaggaggcgaccaccccttctaactctaaactttaaaaaaaactgataccgagattcagtggtagctggcttcccagaggtctgtcattcccattcagaaaatcacttcattgtcctttctctctaaaatgtctgcaagcagatttttttctaagctattgtagcagaagagtcaaaagaaactcttcagttttaagatgacattatttagatcacaggttatcctgattcatatttctttgaaggtagtcttgggaaagcatgacacttaataaggctctttttctcttttgtagtttcgggatgtgaaaatttctggctcataaattgaaataacagccacgttcccaaggttgtaacagaagattcaaaacatcccattctagccacacacaaataaatatctgcggcttagtgataggactctaccttttctcctagaagcagttactgaacatccaggagtacaactccttcccatcattcccatgtggaagggtctctcccatcaaggagaacatgtggcatctctgatcctttacattgagaacatttgttggatatgnnnnnnnnnnnnnnnnnnnnnnnnnnnnnnnnnnnnnnnnnnnnnnnnnnnnnnnnnnnnnnnnnnnnnnnnnnnnnnnnnnnncaatatagagcagaaagttaaatattttatggttcatatgtgaaaaagtaattatgtttataaatagactaactgctggatgttaccaccaagtaagaaagcaacaggtaagataggctttctctctccctataccaagtaatttatacctacacagattgggcaattctagctaatgaaaatatacttaaaagtatttcttaggccgggcatggtggctcacac

SEQ ID NO: 241756 - DNA, 1258 bp, Homo Sapiens
gggggaacgtatgagtgaagtcaatttgcccaatcctgtcccggcaactggcctttgggcttgaagggagggaaaaggaggtggtctaagggcccttgaggggaagtctgactgcaggcagagcaacctttagtgaggcggtccaagctgatggccatggtaagggaatgtatacaggtttttagaaattggagcaacgggagataacccgcatggaattggttatggatgtgggtgagaacagaaagtttttgggtcttgggtaggatgagtttgtagtctaagtaaattcagctttcgttatgaacagccctggagccagcaaggcacctttttcttcttgggtgtatgctagggaaaatgggcaataacaatagtgttctaagggctgcctgccaggctgccgaatctgctaagaagtttcccttggttatggcatctgtagccttttggtgtcccttgcaatggataatgacggcctctagtggtagtttagctgcctccagcggcttgtgtatgagtttgccatttattatggcggttctttttgtagttagaaaaacccctttcctgccagattacagtgtgagactgtaggacatggtatgcatatttggaattggtgtaaatgttgaccctctttccctttgctagagtgagggtcttggttagggcaaatagttccgcttgttgtgaggtgatatgtgatgagagagcattggattataggagtttgttttcggcaatgatggcatagccagctgccagatatggttccttaaaagagcttccatcaatgaaccatgtgggttccttccgcaaaggggcttctgaaatgtgttggaaaggggaggagagggaggctaagaggtctaggcaagagtgggggattcagaattggaagtacttatagggaggagggtggttggatttagaattttacatctctggaaggtgttagagggttgctgtaagctggatggcaggaggaaaagaagagatcaatggctcatggggtcccataagttatgggaagatgcaatagtaatgtgctggtagagggtgagtttttgtgcctctgaggccagcaatgtagctgcatccagaactttcaagcatggaggccagccttggatgatagagtccagttttcagaagtatgcaatggcttctggagtgttgccacgggtttggcagagaaatccaagggcaaggccttgattacaatgaacatacagggtaaagggtttaatgccaa

SEQ ID NO: 241757 - DNA, 1258 bp, Homo Sapiens
  misc_feature (99)..(111): n is a, c, g, or t
ttcctacattgggtttacagctgtgagccactggtactggcctcttccccattgttaagaacctcagaattgtcagttgtactccttgtcagttgtacnnnnnnnnnnnnnaaatcctttaactgatttgtacatgagcttgtagtctgatatttattcccctgaataatcttcacatctctggacctcacatcttaattttattcacatcttcatctgcagtggtttccagtattagcatacaggttttgtgttagcaaaatgtgtacactttgttaaactgtcctcaagcagaagctgctgtgttgtgcttgtgttttccttggcctggacaaatccctctctacagcactcgcatgtcatgaggacataaattctgcagatgagtggtttgcagatgcagggattgtagaccctgcctctactccctgtgttacatacatggttgtgtcctttatgttatgaggcctcctacattctgtgaccattatagtccagtaataatacatagcaccatcttccacctgaagccaacatcctgttcctccaagtacttccttggagtaattcctcagtttttcagatacacttgtgggtggtctgtgccttcccaccagagttaacatgcacttcaccagcattttcttgctttcaggttgttggtgtggagtggaagatgaggcggcaccttctaagcagagtatttatatacaaagagagactcaggtcaggactcctatggcaggtgtgtctcccaagaaggcccacccctgtgagatgtgtggcccgatcttgggagacattttgcatgtggcagatcatcagggaacacatcacaagcagaaactgcacaggtgtgaggcctgggggaataaattgtatgacagtggaaactttcatcagcaccagaatgagcacattggagagaaaccctacagagggagtgttgaggaggcgttgtttgcgaagaggtgtaagttgcatgtgtcaggggagtcatctgtcttcagtgagagtgggaaagactttttgctcaggtcaggattactccagcaagaggccactcacactgggaagtcaaacagcaaaactgagtgtgtgtctctgtttcatgggggaaaaagccattacagctgtggaggatgcatgaaacattttagcaccaaagatatactcagtcagcacgagagactgctccctacagaagaaccttctgtgtggtgtgaatgtgggaaatcctctagcaaatatgacagct

SEQ ID NO: 241758 - DNA, 1534 bp, Homo Sapiens
ttggcaagatgcaaagcaggaggaggaagtgggctggaaactagttcccaggcctcggggccgggaggcggagagtcaagtgaagtgccaatgtgaaatttcgggaacacctttctcaaatggggagaagctgaggcctcacagcctcccgcaaccagagcagagaccatatagctgccctcagctgcactgtggcaaggcttttgcttccaaatacaagctgtataggcacatggccacccactcagcccagaaaccccaccagtgtatgtactgtgataagatgtttcaccgcaaggaccatctgcggaaccatctgcagacccatgatcctaacaaagaggccctccactgctctgagtgcggtaagaattacaatacgaagctgggctaccggcgccacctggccatgcatgctgccagcagcggtgacctcagctgcaaggtgtgcctgcagacctttgagagtacccaggccctgctagagcacctgaaggcccactcacgccgggtagcaggcggtgccaaggagaagaagcacccctgtgaccactgcgaccggcggttctatactcgtaaggatgtacggcggcacctagtggtgcacacaggccgtaaggacttcctgtgccagtactgtgcccagcggtttggccgtaaggaccacctgacgcgtcatgtcaagaagagccactcgcaggagctgctcaagatcaagacagagcccgtggacatgttaggcctactcagctgcagctccacagtcagtgtgaaggaagagctgagccctgtgctgtgcatggcctctcgggacgtaatggggaccaaggccttccctggcatgttgcccatgggcatgtatggtgcccacatccctaccatgcccagcacgggcgtgccacactccctggtgcacaacacgctgcccatgggtatgagctaccctctggaatcctcacctatctcttccccagctcagctccctccaaaataccagcttggatctacctcatacttgcccgacaaattgcccaaagtggaggtggatagttttctggcggagcttcctggaagcctgtctctctcatccgctgaaccccagcccgcctcacctcagccggcggcagctgcggccctcctagatgaagcactgcttgccaagagccccgccaacctctctgaggccctctgcgctgctaatgtggacttctcccacctactgggctttcttccactcaacctgcccccgtgtaacccacctggggccacaggaggcctggtcatgggctactcccaggctgaggcacagcccctgcttaccactttgcaagctcagcctcaagattccccaggagctgggggaccactgaactttgggcctctgcactccttgcctcctgtcttcacgtctggcctgagtagcaccaccctgcctcgtttccatcaagcattccagtagcccccacagagggccctcagctcagtttttggctctgttatggagcctttattacccaccccgtctgttgtcccc

SEQ ID NO: 241759 - DNA, 841 bp, Homo Sapiens
  misc_feature (320)..(373): n is a, c, g, or t
ttggctcttaaccactgtggggggtctagcaccagctgcaaccaagtgtctatgtatgggaactggtctaagtgtcttgacttaccagttaccttgtgccataccttagaaacaagggacctgtccaggcttccttctgatggccaacccacttctaatgttggccaatctatttcatacaaagttctaagtttccctggtgtcatagtaaccccatagtctccattaaatcccttcttaaaatttttctacatagttcctagcggagtaggcttactttgtgtctgacccatgtttcctcgagacaaaacaccaagctnnnnnnnnnnnnnnnnnnnnnnnnnnnnnnnnnnnnnnnnnnnnnnnnnnnnnntttttcagtttacaccaaaccaaaatcaaaaccaaaatcagagtatccagaaatccaagccaggtcaaaaccaaaaccaaagtatcaagcaattcaagtcaagtcaaaaacaaaaaccaaagtgccggtacaggcacgccgtgggtgatgaggccacgcttccactcaaatggagtgggcaagttccaaagactgttcttaccaagtttcagatgtccggactccaagtgcccgttccttcccggcgttcagccactgcgttgatcctccacaggggcctgccacgcactgctctggtgaggcgttccactgggacaattgcctacccaggagcactctcaggatctgcgttgctcaagctggccggagtcccccacagagatgctccatggggtaggcctaaactgcctaaggggctgcctcgaccgtctgttaatcacctcacttcctggtcagggaaccaagaaa

SEQ ID NO: 241760 - DNA, 2620 bp, Homo Sapiens
aagtagatatccgaccaaacgttttattggggttttattgcaatctactttcagcaataaggggaaagtgagcatgaaaagaactccaatcagactttattcaataaagcagcttttcatgaatgcttcaggtcagtgtatgatcagctcagcttccagtatcaacttgagtacctcgttatggatatttatgctagaatgacaacagtaaggcattgcaaaatccaaagtcatctaatattaaaccatattttacataatttgtaggacagtatactaatactctacaataaataaggatttaaaaatgtgttgcttagcccttgaactaaattcaattactagcttattctaagtactccagttaataaacgttgattgtaaagaactctgacttctccaaagataaaaaaaattagttgtcatgacaaaaattaagcttaaaaagcacattcacacttgtccttaaaagcaagtttacatcatatatgagaaaacttttcatgcctgatgacatggcttatatggcaaaaaacagtcatatgcaaaggacaactagagggcaatcgtcccatccccacttcctccaaaaagccacactcggcctcagtgtaaaagttatattttattgccatgctacaaaatgtatgaagttggcactgatagggagaaatagagaacaaagggtgggaagggatagagggaaaattatgttgttacatatacaacaaggttttattttaattaacagtggttacgttttgccaatattaaaaatgcaaaccaaaatttaaaatgctgatctgaaacagcattaagatacaatgtatgcatagtacagtatcacttatgtctttttattagagaaatatggaatgtttataaaagaaattaaccatgggggtaaaattcatatttcatatacaatttggcaatggtagtcccactgttggacaattttttataaaagaaaaaattaaaaatctaataagctacctttatacaaagttgctatatttatgcctttacgtaggaaaaaaacatttataatgcaaattaggacatacaatagtcttacaatattatacaatgtaatgaaaataaaacataacacaaagtttgtcctttataaaatgtatattttgcattactaatgcaaatgtggcacactggtgactactgtactatttataccagtctgtttccatgctataactgtccaattgccatagaactgcaattataatgatgctacaaaagaactgtgttataccaaaaatgaggaagtagggatggggaacagggatgtaaagaacaggaaagatagatagggtgctggtttgggcagagtatactgtggtacgtcataaaatatgttaatttttcaagccaaaaacattttctttacattctgtaatttcgtaccaatgcctttattcaaatttggcaaacatcaaggaaaaggtaattagtaccatatacctcacacatcagaaatatgaatgagatgccaatacatcagttacttgtgaatgatgtctctgatggtatgtctatttcaagaatatatgtatttatacacacacactacacattgcacaaaacatttgggcattataggttaggaatagcacgggggaattgggaagtactttttcatctgttaaaacctttaccttgaggcaaaaatatggcggcacattgttgggaaattatgaaaacataaggcccctgtcccatttttaatagaacattattgaggtacatttttatatgctgtgccacagttttggggagggggaggagataaacactagcttgacttgttctatttataacattgaacgctggagagagtcaacattagtatctataaaaacaaagattgcttggcaaattttcctaagtcccagatatgatgtattctggatatactgagaagtgaaaagctttttgctgaatcttaaagagtaaagtgcatatctcatcactccacagcagcagtaaataaaaggaaatatttgccagtcttcctggagggagggaaggcaccatattttcatttttaaaagaagatgaaactgggaaataaaatacactaagaaaaaacacaagtaataccaatatcagtttccaaccctagcatgggatagatgctgttatgatttgtatggataaaacagtattctatttggagggaaaacattaacaatgattatatttccaaaaccaaaaagaaggatcacatggtctaccaacagaattatctaaaattagatctgcctcagaaaatctgagatatatggccacaattatatgctaataaaatatcaatatttcattctaaaatgcacctagtaataggtacatccttcgaggacacagcttaatgcccattactaaactactgcaaaggacaagtagtattctaaattaccttttattaaataggaacacaagtgatttctagaaaatatctagaaattaacaccagttgtatatattttcctaatactcttatagtacctaaaatcaaattcttagcagacaaattggtcccattttcctttttaaagcacatagtatttaaagcataaactgtaatgattatattggccaa

SEQ ID NO: 241761 - DNA, 2076 bp, Homo Sapiens
ggggttcacactggtttattgggggccctgccgggccaagagctcttcagtgcataggcagacatgcatgtggggcagtgctaggaactggggtaggctttgggcaggggtcactggcaggtgttgtagatctgcacctgcaagttgatggcttgaagcacgctgcgcatcctggcctccaacccgtccaactgggctgccttactctccagtgcccgctcattttcctcataggtgccttccaattctaggaagggcaggtgtcagtttagggggggtttcccgcagtcttgtgtctctggtgccccatttcttaccctgtagccgctgcagcttgtcctgagcggcttgcaacaggtcccgagcctcatcccgcagttgttctgcccttgcctgtgcagccagcacaccttgggccttgcgctcagctagggccttcaccgtctggtactgatcacccagaggaccgcgtagcagctgctcagcctcctgggcacgaccctgggcactgcctgccgtttcttctgctgtagaggctgccagactatttcctgcccgtttcaatttcagagcctccaggagagcatccaactgccgagccctttcacctgcagagctcagtgcccgctctgcacctgccatcctctcctgtacctggtacagggtctgctctgtgtcccgtgtgtcagccactgccccccggatggcaccctgggcaataccctgtgcccgctgggcctcctccagtgctgcctgtactgtctctgccttctgtttctcatcctcagcccagctccttgcccgccgtgcatcttgcagtagctgctcggcacgacgcacatctcctacagtacgtgccaggatcgcatccacatctgccaggctccggactcgctttgcaatcgcacccgccaggtgctggatctgctcagctgaagctgggatggagagctctagcacccgtgtggccaccatttcaatgctatcaggatcagccccctcctctatagggacacagcaagaacttaagaacatagattctccagcatgggcatgaggatacagttttggggtatggactcaggacatgtacatgggataggggtttgttaccaggcataaggatataatcacaaggacagggactatacaaggggctcagactcaagaacatggacctgggaccacatatgggcaataagtcaggagccagtcaagggatcataaacactaatccagtgtagtccctgaggctcaagtatgaaccaagggagatacagacaccgggagttgccaaaggggacaaccacatggcctgggacacgtgggaggctcacggttgaggaagtccttcacactctggataagttcttgaagttcctggttggcctgttccacctgtcccctggaagcattagccttgtccagggctgcctgggcccgctgctgtgcctcgcttgcctgccgacgagtctcagccactctgctgaggatgctaccaccttctgccagtgcccgctgcagctctgcctgtgtgtgccgggcccggcccagtgctaggtctgctgtagccgctgccccattgcagctgaggcccccacagcgcggctgcccatcctcatctcgacagccggcacccccacaagggcttgtagcacagggtgcatcccctggtgccccacacacctgccaggcacagaacaagtcagggccctgtgagaggaacatctacacccacctgccccacccaacacttcaacctcaccagctcatttatgtctgtcaggctcagggtgtgggtatgggcagagagcttgccaagtgcccgctggttggccatgtgtttgctgttgaagtcctccttctgagcatccatcagtgcctctgtccgatgccgagcacttgccgagttgctcacagggctaggtactgccagggctgaggtattggcacgacgttctgcctctgcagactggctatgggcatgccggatgctgtcataggcacccaggaagtttgaatgtttgagcaagtcaagatgctggtcgagctgccgcagtgtgagattaagtccaa

SEQ ID NO: 241762 - DNA, 702 bp, Homo Sapiens
  misc_feature (248)..(274): n is a, c, g, or t
  misc_feature (428)..(438): n is a, c, g, or t
  misc_feature (506)..(515): n is a, c, g, or t
gttgatggagaatgttttatttatgtaattttcatctgtagagatgcttctgtcctcatctttatatttgtctccctcttctcattgaactgcaaaattcctgaaggatgagacctgggatgtttaatgcaaaccgtacattctcagcagagcacaagtatcaaagggacattggatatattttaataatgatctaacacaagcaaaaataaccactgaaaatataaaactcaacaagagacataagnnnnnnnnnnnnnnnnnnnnnnnnnnnttcttattttagaatgatgctatatgtaacttgtaaaatatttaagtttttatacatgagattatattggtttccttatttaaagaaaaaaattacaattaagaatggaaattaaaatgtaaaaccaagataaatatttttggcttttggactnnnnnnnnnnngattagtgaggaaaaccaataaataatggggagagaaagaaatgctactaattttctcttcatgattnnnnnnnnnntcttttaaccatatttggggtgactggaaattaacagtgatgattttgagctaaaaaatcagtgacacattttattaaaacaaaaggaacaaaggaactttaaccagaccatacatgtaaaggctgtttagcatagcaatttcatggattcaaaatatagctttaatgccaacttttttgtacaaag

SEQ ID NO: 241763 - DNA, 1597 bp, Homo Sapiens
  misc_feature (1013)..(1071): n is a, c, g, or t
aactttttcaaatttttgtgttaaatagaaggctaaagggttagatttaagtttctgctacatgatcctattacgtttacatgattctctgtggctgaaacaaagttctaatcaaaactacttttgctgaagaaaaaattcagcctccatttgggtgtatttttaagcagttattcacagttatcacaaattgtaagcacaaaaaaacctgactgaagaagtagggatgcaacaatataatatgaaaaaattagtttaaattaccaaaacagctataaaagttgtagtcgtagcatacgccccgctctgtcagaagtaaggtgtataaaaccattgagtactaatagactgcggtttccaaaaaacccccaacactctaggttgaaattttggttattacataattataatggcatattttataacacaaaattatattgtaacatccctatgaacattttataagcccccgagctgctgcagagcctggtagcatttggtcaataactatttttatactgtattttttctcaaaatatttacatatctgtacaaagtaacagggtttgttagttctgcaggtaacagcagcagcttggctttcttctaactttatttaaaaatagcttcattcacttattcaataataaatacaaaagtttctcttattttacagaaatcaaaaactacaataaactgactcatggaatcaagtatttaaatgtatttagtgcaagttattatcccttagctctatccctaaggaagtcatttcagtacattccttgttcagtggtgtctactttatttaaaaacattttgaagttagagggcctgcccctttttaataaggccgtggccagcactctctgtccccctcgctggtgatttcagtcttacattcataggaaggcccctgcccggggcagggcagccatcggctctttgccccagtaaaagtttctccttagtgagactagaaaaccaaaacaatgaaacccacccacaagggnnnnnnnnnnnnnnnnnnnnnnnnnnnnnnnnnnnnnnnnnnnnnnnnnnnnnnnnnnntgctggaccattctgtgattccgtttaacctcggccacttcaggaacgctgcttctgtcagcttcctcctggcgctgctttaacctaaaggactgaggaaatcagaactcccagaagctttttcaaaaagtcataaaacagaaaacaaaaatctctttctgtctgcaaaattccaatggtgtgttgaatcgcctcttcctagggacaagccgcccgctgagctagcaaggaatgcatttcagttcatccacttccggcagttcacagctccacagtgacacggaatcttgtgctggtcatcttcaaagtcaaacttatagtcatagcagagctcttctcctttctggattctccgactggagctgatgataattttgtgtcctctctcaaaagtcaccacttcagccacacaattaggtgcacacgaatggttgatataccttgcgggccctcctgtgagcgtcgcgtcaatcacatggtcgttatccatgcggaacatgtaccaacttttttgtacaaagttggc

SEQ ID NO: 241764 - DNA, 1464 bp, Homo Sapiens
  misc_feature (413)..(698): n is a, c, g, or t
  misc_feature (701)..(825): n is a, c, g, or t
  misc_feature (979)..(1110): n is a, c, g, or t
acttgagaccactttctcactcagttggcttcccaagtagactaaccccaccattagtagagtggctggcacacggtaagtgctcagcaaacgtctgcagaagtagaccatgtaactaaaccacatccacctgtgctcatttcacctcctttctcttcagaaccgtgctttttggttattatcattctctactgagctccagcttttacttattcctttcactctttcaataaatatgcctgaattattcccatcctaaaacaaccacaaaacctctccatattacttagttctataagccagatttcacctctacaaatccactgaaattggtctcaaaaaggttactaactgccaaatcaaatggatactccagtcctttttcttttgtatttggtgtttgagttttttcnnnnnnnnnnnnnnnnnnnnnnnnnnnnnnnnnnnnnnnnnnnnnnnnnnnnnnnnnnnnnnnnnnnnnnnnnnnnnnnnnnnnnnnnnnnnnnnnnnnnnnnnnnnnnnnnnnnnnnnnnnnnnnnnnnnnnnnnnnnnnnnnnnnnnnnnnnnnnnnnnnnnnnnnnnnnnnnnnnnnnnnnnnnnnnnnnnnnnnnnnnnnnnnnnnnnnnnnnnnnnnnnnnnnnnnnnnnnnnnnnnnnnnnnnnnnnnnnnnnnnnnnnnnnnnnnnnnnnnnnnnnnnnaannnnnnnnnnnnnnnnnnnnnnnnnnnnnnnnnnnnnnnnnnnnnnnnnnnnnnnnnnnnnnnnnnnnnnnnnnnnnnnnnnnnnnnnnnnnnnnnnnnnnnnnnnnnnnnnnnnnnnnnnnnnnccaatctaaaattttatattcttgctacaatgttttgaacttccaggttaatcatttctgcttttaaatcatttgctctttgaccttataaagagttctcttaaaaataaataaataatagagaaagaaacaaagaattctcttgaccagaggnnnnnnnnnnnnnnnnnnnnnnnnnnnnnnnnnnnnnnnnnnnnnnnnnnnnnnnnnnnnnnnnnnnnnnnnnnnnnnnnnnnnnnnnnnnnnnnnnnnnnnnnnnnnnnnnnnnnnnnnnnnnnnnnnnnnagctactggaactctgcttagaactataaatctgcctgtatttgtgtgctgctgtcatatctcaggttccccaggatggaagagatctttctttttaatctccctcaagacccagtagagggcattatacagacgagggctgcttgtgtgggtgctgttggctcactgtggatatatcctcaatggcaactctccaagttatttttctttgcctgtctttgatatgcccagcccacaccagcttaaaataaaagctgttggacagtaacggtgacttcatccctgccaccctgtatattagatggctcagctagtggcttgtcagcacaatcaggttggaggagtggaagccaa

SEQ ID NO: 241765 - DNA, 1682 bp, Homo Sapiens
gtcctagaagtttggctgtgggcagcagtaagagggggcagacatcatgatggaggatcgtcgctgtgagtgtccggtgatggctggcacccagagcttcatgccaggcccagaggctgctggtcttgaggtgggaagaggcagcaggtgcaggctttcatctctgggttcacacccacctggggtctttgcagacatctggggccaggcaggggagggggctaggaggagaggggctggccacggcaccctgtacatgctcactggtacacacaggtctgcacgggtacacacacaggcagacgaagaagtgcacacgtctcagccccacaggcccacccggtaccagggcctccattccaaggggatgacttgggggtaacgggaggagggagaggtgtcgcagacgcccccggctccagcctcgcctcacgatccaacccctgcagcccctcgctcctgcatcatcgacaaggatgagctgaaggacggcctgcgtgtgctcatccccatggatgacaagctgctgtacgccgggcacgtgcagaccgtgcactcgccagacatataccgcgtggtggtggagggtgagcggggcaaccggccccacatctactgtctggagcagttgctgcaggaggcgatcatcgatgtgaggccagcctccactcgcttcttgccacaagggaccaggattgcagcctactggagccagcagtaccgctgtctctacccaggcactgtggtccgagggttactggacctggaggacgatggggacttgatcaccgtggagtttgacgacggagacacgggcaggatccccctctcacatatccgcctcctgccccctgactataagatacagtgtgctgagccgtccccggcccttctggtgccaagtgccaagcgccgcagccggaagaccagcaaagacactggggagggcaaagatggtggcacggctgggtcggaggagccaggagccaaggcccgtgggcgtgggcggaaacccagcgccaaggccaagggtgacagagccgctaccctggaggaggggaacccaacagacgaggtccccagtacccccttagccctggagccgagcagcaccccaggttccaagaagagccccccagagcctgtggacaagcgagccaaggcccccaaggcgcgcccggcaccgccgcagcccagtcccgcaccacccgccttcaccagctgcccagcacccgagccatttgcagagctgccagctcctgccacctccctggccccagcacccctcatcaccatgcctgccacacgccccaagcccaagaaggcgcgggcagccgaggagtcgggtgccaagggccctcggaggccgggggaggaggccgagctgcttgtcaaactggaccacgagggtgtcacgtcacccaaaagcaagaaggctaaagaggccctgctgctccgggaggatccgggggcggggggctggcaggagcccaagagcctcctgagcctgggcagctatccccccgcggccggcagcagcgagcccaaggcaccctggcccaaggccaccgacggggacctcgcccaggagcccgggccggggctcacgttcgaggactctgggaaccccaagagcccagacaaggcccaggctgagcaggacggggccgaagagtccgaga

SEQ ID NO: 241766 - DNA, 920 bp, Homo Sapiens
atgcacactgccttcccaaattgtgacacgtgtgacaaactctaccagagtgaatgatggtctgggaaaggtatggcagtgcagctccgtggcatggtgaaaggaagaaaacatcatcaggtttcaattcaaggcagtggtagttaataatggacttcctgaaacctgtagctcaatcactaagggaatattaagattttccacttgaaataaccaggattatgtgggccatcctagaagcctgctgaactggaatgcattcataccctggtaatcatattaacttactgttaggccaaggtcaacttgattttgtgtttcaccaaagctcactgggtcttttctcttgacagccattgggcaagtgagggatacacggttgacttgaagctggaatccacccagacccaatgaatcactgacctctcatttttaaccctaatgaattggggtagaattagatattttgaattatcatacaaagcagagtaaacccaacaatctatcaaaattatctaactatctagactgaacaattttacttggaaaggatatacctgcttatgaaatactaatgatgacagcaagaaagtctgatttcaaatctatgggtgccaacattctatgtatggtcatggaaatacatatgtaaacttgatacactgacaagtcatttcctatgacattttgccaatcaaaataaagtaaaatgaagaaaattgtttagaaaatctggatcttgtttccttaaggtgtatgtaggaggaagcagtaggaggcaggaggcattttcatttttattttactgcaccagtgtttggagctcagcagctgagatggggtgagtaacacatgagctttgatgagcaattgtggacacagccctttttgccaacatctcactcattaccttttcccaa

SEQ ID NO: 241767 - DNA, 2010 bp, Homo Sapiens
  misc_feature (112)..(136): n is a, c, g, or t
  misc_feature (302)..(314): n is a, c, g, or t
  misc_feature (1846)..(1866): n is a, c, g, or t
gggccattaatgattctatatttttcaaatcacagggcttttagaattgttcataatgttatcactaagtttctgaaaatgttaaaatctagattaattgtttcatttttannnnnnnnnnnnnnnnnnnnnnnnngtacataacacacatttaaaaaaatcccaccaccaagccttttctctgtaaactaatctcttagccccttccagctttaatccccctggatttgtgtgttctgtatccaactagtagaacaaattaaataactaaatattaaaatactgtaattatattcatagcnnnnnnnnnnnnntagacattgatacagtataaatctcactgttttcaggtagatgacattaaatggtaaaggttaattttaagcagttctgacatgattcagttttacaacaaagtttatatgttaattctgtacacttctttctttcctttttttaccccttgtttgaaaataagctatagtagaacattagtgtcaccaaagacacatacttattatgttctatgcaagataagctaattttgggttacatgcaaatatatttccattagttgagacagggctgtttcctgcactacactggtcatctgaccacctttctgcaatgctaagaaggtattctttgaccaaacagcagtccacatacaagtttaaaaggggccctgtttatgtaggaacaacactgaggtggtgcgtagccaggtacaagacgcccaaatatttccagtttatcttacggctggactcctattctcccacactgtttcctaaagaaggtccacattattttggttactagcctagtttaagtggagatactgtgggcaacttgaaagaaatgacatcaggcacacaggctgagcttgaaaggaaaaaaagaccacagataatgtctttggggatttaaaaaaacatatttataattaattggtaagtgagggatgtcagacaaaccataagtagttcattgagttagtggtttagtttgaagtttcatgttacaggcagttaagtccttatttagaaaaaaggccttttatatctatttacaatatacatagttacttgcaaagaagtcagatttacaaccattttctaaaagccttttttgttgttggtttttccaaataaggatgagtagctctataaaaatgagatgcaagaaaagagagttaataagtgaggatttttctcttggagacagctactgtcatcagggagaactggaggtcgaaagtgttgctcctaggaaccacctcatattcttcttgtgctgttcacctgaatcgcgtctgccccattcctgtactctacacccgttttattcaatgatccctttgaattttaacacttcaaacacgtggtatgaagagatgtgtaaacggagactgttttcaatgccttccaagctgggacaggagaatcgggaaggggtctacagaccatggtctccactcagcttgttgaatcttcaacaatttcgaggcccatcttctgaacctctctcatgctgtaagttataataacagttctgacaaacacgcaccggggatgagattttcaagcgtttgatttcagattgaaagcgactgcacctaaaggaaaggaaaagtcaattaattataggtcttctccatgcttgatcatgggcaccggaaacattaataatcgaatggaaagcttgcagtaaaatgccaaaggccatactggtttgtgttgtgtggctgaacaaggactaaaaggaaagctgtattatttgtttcagtctatgaagaaaagcagtattaaaccagggaagctatttctttgactgacaagaattnnnnnnnnnnnnnnnnnnnnncagagttaagattttcctatacaatgaggccaaggtgtctgaacagtgatgtaaggccattctacctgtgtagactaattctcatggcctataagcttgggaggtatgtcaatgtctttacctggagcttgacatatttcccaa

SEQ ID NO: 241768 - DNA, 1043 bp, Homo Sapiens
aaagtattttattgctatattagcaatgggttttttggatattttttaagggccacataaaaatagattcaaggaacaaattaaattgaagtcctagatttaaatgtttggtttaaagaattttctacaacaaatttcatgtttatgtatgaaaagttatataaccttatatgaaaatgtcatggaagtattttctacactatactaaatgtgttccccaagagggaaaaaattaaaatatctaaaatatattagattaagattacaagaccatcatagatcttttgaacatgcatctgtttacagaattaacagtatacaaaatttttatttcattatggaccataaagaaatgagttggtgacaactatcctttgcacaacattatcaactcactttagccacaagcatgtccttggtatgtgtgtaaaagaaataggttcatttatccctcatcaaatcatccacgggtttacttggaagtaaagatgaaggtacagaaatgtgaaatatgtcaagtgtattttttctttctttcaaacaacatcccaagcatggcctcagtagcctgaaattataaaatacttaactgggcttttagttatctacaccgactgccagaatgtaaattaagttgcccaaattagcacatcaaataacaaaatcagccagaaagcaggctgaaaagcattaaatgtttcatataggtgagtttttaaatcatttaatttctatagaaaaattttattcacaatataaggtgacagaaattgccacaggaatgatatactgattgcaataaggttgcatgcagcagcagctttgtactttatagctatttttgtttataaaaattaaacctctccagtcatgcttatcacatggtcttagatttgtaatgtaagtgaataaggaataccatctagttcaaagagaaaatgtaattttgaatgtgaattatctgtatgaaacatgaagtatactactgaaccctgaaacatgcatgtctagatttgctttttgtccaaatccagcctgtccaa

SEQ ID NO: 241769 - DNA, 1570 bp, Homo Sapiens
  misc_feature (445)..(453): n is a, c, g, or t
gtttgggggaaggtgcaaggtgggttaatgtgaaaaacggtaaatgccagttttaataacaaaaatggtactaaacgcagatgaacattaaattaatacagtataaaagagaacagcttaaataaactggtattcacatattacaatagcaaagttatgacagaatgaactgaagacacgaacagttttgaaaattctcttttcagcctacttccaaatagaaatagtcaggcttttttcctgtacatagtttgatgctttgtctataccatatatagtagaaaaataaattctttagcaacctagaaacagtttataaaactcttaaagtttaattttctttgccagacatgccaatagttaaactgacaactataaattaaagctatatagacaataggtataagtaatatagaacaggttaagaatactacatttaccggannnnnnnnnaaaaattactgtactttcttaattcctgtgtgctttgcaataggaataatagggactttgttttcttagaaaagataacatgtaagagtataacacaaataagataatttataatatacatgtacttcaacagcagcctggttcatgccaacatcttggttctgaagttaaaattggaagtacaatacctagaacttaacagttgggagagacaatatttattttaggaaaaaacagagcaaatcaaactcttaggagccttgaatctgaaaatcatctatttactataatacacataagataatcttaaattgtagtatgaattaagataacattgaccaaataatttttttctttactacacaaaatataacctagtgaaatttacctgtgccacctattctgaaaattttatccataatttagtgttctggttttatcttcactaacaaaatgtttacccacaaaagcagcagtcacttatagtaattctggtaccaacatcaaaggaaaaaattgagttaaaaatggtgcaaaagccatcttggattttagtacaacacatcactgaaaagaatatgaattcaaatatgtaaaattaacaatccaaagattctgtcagtacccaaagtatttttattgcccagtcagcaatgggttttttggatattttttaagggccacataaaaatagattcaaggaacaaattaaagtgaagttctagagggaaatgtttggggtgaagaatttttttcaacaaatttcatgggtatgtaggaaaagcatataacgaaccctgaaaatgtcatggaagtacttctacactatactaaatgtgttcccatggagggaaaaaattaaaagatttgcaatatcagagggtacgattacaagaccatcatagatttgatgaacaggcattcggttacaggcaggacagcatgcaaaaggaatttttcccgcaggaccgcatagaaacgaggtgtcgccaaccatccgttgcacaactttatcaactcactttagccacaagtatgtcgctggtagggccgtaaaagaaataggttcaagctgagacgatcaaatcatccatggggaaccggggagcagccccaa

SEQ ID NO: 241770 - DNA, 1466 bp, Homo Sapiens
  misc_feature (322)..(330): n is a, c, g, or t
aacctggtattcacatattacaatagcaaagttatgacagaatgaactgaagacacgaacagttttgaaaattctcttttcagcctacttccaaatagaaatagtcaggcttttttcctgtacatagtttgatgctttgtctataccatatatagtagaaaaataaattctttagcaacctagaaacagtttataaaactcttaaagtttaattttctttgccagacatgccaatagttaaactgacaactataaattaaagctatatagacaataggtataagtaatatagaacaggttaagaatactacatttaccggannnnnnnnnaaaaattactgtactttcttaattcctgtgtgctttgcaataggaataatagggactttgttttcttagaaaagataacatgtaagagtataacacaaataagataatttataatatacatgtacttcaacagcagcctggttcatgccaacatcttggttctgaagttaaaattggaagtacaatacctagaacttaacagttgggagagacaatatttattttaggaaaaaacagagcaaatcaaactcttaggagccttgaatctgaaaatcatctatttactataatacacataagataatcttaaattgtagtatgaattaagataacattgaccaaataatttttttctttactacacaaaatataacctagtgaaatttacctgtgccacctattctgaaaattttatccataatttagtgttctggttttatcttcactaacaaaatgtttacccccaaaagcagcagtcacttatagtaattctggtaccaacatcaaaggaaaaaattggcttaaaaatggtgcaaaagccattttggattttagtacaacacatcacagaaaagaatatgaatacaaatttgtaatataaacactccaaagagtctgtcagtacccaaagtatttttattgctatattagcaatgggttttttggatattttttaagggccacataaaaatagattcaaggaacaaattaaattgaagtcctagatttaaatgtttggtttaaagaattttctacaacaaatttcatgtttatgtatgaaaagttatataaccttatatgaaaatgtcatggaagtattttctacactatactaaatgtgttccccaagagggaaaaaattaaaatatctaaaatatattagattaagattacaagaccatcatagatcttttgaacatgcatctgtttacagaattaacagtatacaaaatttttatttcattatggaccataaagaaatgagttggtgacaactatcctttgcacaacattatcaactcactttagccacaagcatgtccttggtatgtgtgtaaaagaaataggttcatttatccctcatcaaatcatccacgggtttacttggaagtaaagccaacttttttgtacaaagt

SEQ ID NO: 241771 - DNA, 1402 bp, Homo Sapiens
  misc_feature (1163)..(1171): n is a, c, g, or t
cccaggtttacattatttacatacagtatgggaaaaaaagctgctttttggctaacttagattgcggttacttgcagtatttacactgtaaatgttaaggggaagaagcactactaacaaataccatttaaaaaaatatattgtgcctggaattttattcttaaattagttgtatatcctaataagtgtctgttgaatagaatttgacttctaataaatctactgaaagtgaaacagagtaccactatgcttctttatattgctaatctagatcctgttaggtccaatattgtagttaactataagcactgaaccttaaatgaaacaatggcaacatgtgtgtagatgaaattttattcagtattgtaaaatataatgccttgatgtttactcacaattatgagactatcctattcttttaatcctttaagaagtctcatatgataggtccctaaacagtgaaaccttccagtaacttaccagaaaaaagtttaattatgttattctgttcttagatgtttctaatatttaaaagcatatctaaacccttggcaaaaacaaacacaatcaattcagtgtaacagactgagctttaaactgtactttaattttcaataactgtaacctactggttaattgaaccaaacgtagagtatttaaatgactcactatgaagtgtgtcaaatcaatgatagaatgcatagaaaagtggagataagtttgggggaaggtgcaaggtgggttaatgtgaaaaacggtaaatgccagttttaataacaaaaatggtactaaacgcagatgaacattaaattaatacagtataaaagagaacagcttaaataaactggtattcacatattacaatagcaaagttatgacagaatgaactgaagacacgaacagttttgaaaattctcttttcagcctacttccaaatagaaatagtcaggcttttttcctgtacatagtttgatgctttgtctataccatatatagtagaaaaataaattctttagcaacctagaaacagtttataaaactcttaaagtttaattttctttgccagacatgccaatagttaaactgacaactataaattaaagctatatagacaataggtataagtaatatagaacaggttaagaatactacatttaccggannnnnnnnnaaaaattactgtactttcttaattcctgtgtgctttgcaataggaataatagggactttgttttcttagaaaagataacatgtaagagtataacacaaataagataatttataatatacatgtacttcaacagcagcctggttcatgccaacatcttggttctgaagttaaaattggaagtacaatacctagaacttaacagttgggagagacaatatttattttagccaa

SEQ ID NO: 241772 - DNA, 2377 bp, Homo Sapiens
  misc_feature (953)..(991): n is a, c, g, or t
  misc_feature (1360)..(1374): n is a, c, g, or t
cagcccgttgcagagttgcagaagcaggaaggcacacgcgccgctcgtacgcctcgggctccgtttggtaggctggccgccgaggtcccgcacgaagttggaggcggtctgatgtggcacctctcgggtgatgaccaccacgcagtcctgctcctgggcagggggggtgtgtgggcagggcaggcacagggtccttgggcgcgtcgggggagctgagcatgctggacggcaccgaggcgacgaagtggccgcagtcctgctggatgttaaagtgcacgggcacggacgggctgcagtaggagactgttttgggctcaggggctttgcagattttcacagcataggtgctgccggggtcctcagagcaggtggcacagtaataaatggcatcccccgagtcacagcagggcttgttacaagtcagcttgaagagcgaccagttattctcattgaagtggagctcctttttctggccgcccatgaagaggtcctcacatttggctacaaggcgggccagggactgggtgtagagtccccccagcttggcataggtgccctccttgctgctgatgttgctcaggagaccgtgcagctgaagctgggtgctcccggtggaggcttgactggacacgctcagctgggaggatgaggcggagggggcccctttgcactggaggccagggctcccgcagccgcctctgttgcccgccagccctgctgccggaagccagtggccactgcctttgaaagctttctccagaggatcggaagaggagaagacaggatggtggcggttcccggggctcaacgaatagctaaagtgagattcgtcgtggacgttggtttccgagtggcttaggttcagcttggggcttgctgttccgggcttgggggagccttgggtccagaagaagccatccggtgaagaggctgcccggctcactatctttttnnnnnnnnnnnnnnnnnnnnnnnnnnnnnnnnnnnnnnncacgtcctcagtggagcgtgaaggaaacggaacgggagcaaagagcttcttcccgctgttggtgggcgagtgagccagctcagacgagggacctccatcgctgcaggtcctagagtctgaggccaggctgtccgtggagccggtggtgaagctgacgtggacacccctgaaggatgggctgaggctttctgcagagccctggctcactttttccaaatcagagctgctcttgttcatttttagaaggtgcctggaaaaggtaggaacaaacaatacaaataactcattggatttccattcagaaaccaggctgatggatcatgaacttaccatgctcttgaaacctggccaatgtcagcaagtttattnnnnnnnnnnnnnnngattttggggagacagtagaggttctcttctgagttcttatgtgcatgaatgacaggagacttccagagtgtggttaggagaagcgagtctattaaatttaaacaagcaccaaaattcttacatggaaggaattgccttcatattctgaccccatctgccaaaacagttgtgtcacttattatatcctgtgtaaaatctctacaaagaaaaataaagatattatcatacacaccaatgtatagagacatacagatattgggttgtttttgcaagatcccaggacaaatgaattgcaaactaggcctttacaagtgggatttctttttttacctggtactcttttgccaaagcttcaaagggtctagattgtttcttggaattaaggaaaactttaaatgtgaaccagacttccagtgacatgcttagatagaaacaaattgacataacccttattccagaacaatggaaccaaccttttgcttttctgtgaaatcttttgttgcatctctaaatagcatcaccaacagatcaaggacagaaataccaacttcaagagaaaaacactcacattggagaaaacagttctattattaggttgggtgtttagcttattgatttctccttcccactttccaagggccacatgaatattcatttctgatctgacattctcaccatgaagggagacagatccacaccaggtccagctcttcccctgctggtggaaacccacatttgtctgaactgatatttcctgatgacattcctgttccttctacggcagatccatatctcaatatctgctatgggaaatatacagtacagtactgatttggcatcagaactgccttatttaatgcgcatgaccttacggtcaagaatttattggctgttctttgtgttcaacattgccaggccctgttttaattttcatagtcacgggaatcccctgtgtatcaacaggagggtttaaagtttgttcgctaccacaaaaagtgccaa

SEQ ID NO: 241773 - DNA, 1193 bp, Homo Sapiens
aagtgctccgggggcgggcgcttgaaatgctctgggggtggccgccgaagtgctctgggggtggccgccggaagtgctctgggggaggccgttaaaatgctctggaggtggtctccggaaatgctctgggggtggccgacggaaatgctcctgaggtggcctccggaaatgctcctggggtgactgcctgaagtcctcctcaggggaatgcctgaaatcctcctctgggggccgcctgaagtcatcctcgggtggtcgcctccattctccctgaagaggccgcctaaagtcctcctctgggggccgtctccagtcctcctcaggtggccgcctgaaatcttcctctgggagccaccttaagtcctcctcagggggttgcctgaagtcctcctcggggagctgcctgaagtcctccgtgggagaccgcctgaaatcctcctccagtggccgcctccagtcctcctcaaggggcctcctccagtcctcctccctagggtgcctgaagtcatcctccggagggcgcctgaaatcttcctcccaagggcgcctgaagtcctcctcagaaggccgcctgaagtcttcctccctaggtcgcctgaagtcctctggggagtgcctgaagtcctccggggggaacctaaagtcctctgaggagtgtcggaagtcttctggagggtgcctgtcaggctgccggaaatccctctggggatgcttgaagttatccagttgcctcaagtcctctagctgatgtctaaagttttcaaaagcaccaactgagtatattggtgggtcttttgagtcaaataaatgggaatggtcacctcgctcacgtgactgtgagcgagcttgcattttttcactggacatcacagaaaaatttacaccaaactcctgtatttgtgcctcagatataagtcttaataacacctctgtccctaggaatcttcgtcggtttaaacgttcagctttcatggcctgttcttctgatttaaatttcactaatgcttctcccagaccaacacctttgtcatcataaagcaagtaaatgtcatcctcagcaagaagaaagtctgcaaagaacttctgcacttcaacttttgtaacatcaaatggaaaatttcttatatagatgcacagtttctggccagagttaccttcttgagagtatttttgtgaaacatgtccgggcccaa

SEQ ID NO: 241774 - DNA, 1683 bp, Homo Sapiens
aaaccaaaccactgagtttatcttagaaaacttaaattcaggccattattttacaattggaagtctgagtaatccaaactccaagatgactttttcattgttgaagttgctttgtcgatgtgtgattttaggacttcctcttgtttccaagccattcgtgcatatgacgcaccttggagatgggaccttgcaattgtccttgcactgtgccccgggtcagtgttctggacccagcctaccaatcccagctttttaccctcagcctaaggggggtaaaaagagagagagatccagtgagattgaagaaaacaaggtaagactacaatctgttgccagaatcttggcctagaatcaagccactgaaactaatttgatattgcccagaacagtcaaaagaaagacagcaagaaggatctcattgcttatcttcacatgaagtattggccacttgactgcatgtctttcttctaccctataaaacccaggcactagaatttttcactgtgtagtcaatttggttaagtatcaaagacttaagtccaaaacagatgcttttgaaatgatcccctaaggctgattgtttttagaatactggactgtatcttgctcattttcccttcccctaatcaagaatctattgggtatgttaaatggaaaaaacatgaagttatctgatccttccctttgcctttaaccaggaccacacctaaacaaatccagatgaattagtgttcattatatctttaaagatcattagaaagtatttcacaatttcctgggcaactcatcccgttgttcttactgtagtgaaactgtctaacccaacatctttatgttgtagccaaagcccactttattatcttcctagaaaaggaaagcagctggtgttcagcctctcaacagcaaaccatgagactacataactatcaggttttcacttcactttcttctcttctgtctaaataatcacaatgcctttaggcttataaaaagcatctaatcattacagtgtcttatcctttttaatgttctttccttttattaaactgtggcaagactgaatgtttaggaaaggtagcaatgttttggaggtaattttatttttgtataaatttatgattagaatattaagtcattgattgttaaagtaattatctaaatagaagatgttggattacaaaagaaaatgggagttaacatgattgcatgtcaaaatgtgggaaattgctggagttggccaaagaaaacgttatgcatagcaacaaaatgtttgatgaggaatttaagtatccatcaaatcaaagacatgttcaaagcaaagacatgtttgcttaatgaacaaaacagactccagccaaataaataaccatttgagggatacaaaggaaattaaggaatgaagaaaaatagaagatgcctacctgatgcgctgctaagtgccaaagaagataccataaaagaagaatgctgagaatgaattttgagtaagactccgcatccaactgacagggcagtataacaactgccctcttctgcttcaaattaacccaggggagctgactatctccagttcttaagagttatcttatatggtaaatagctgtaagaatgtgcagttttaaacaggaggttgtcacagtcaaataaatctttaaaaatttgcaatgtgatttatctgaactc

SEQ ID NO: 241775 - DNA, 929 bp, Homo Sapiens
ttggatttaaatctaaaattttagagtaatactttccttctgatcagttgccctgtggttatttttgttaaggaaactaccattatgacgggaaactcttatttttgctgttatattttgtttccttatttcaccactagaggtgacatcattattttgtaactttagtactaggctttccatttgtggtatggacacgtatgatatggagcaatttttgaattgtctttcacataggggaaattgcatcttatatacccataaattgggttttagtgaaagagccaggatggaacataatttcctaacttccatcctagtttcctttctacttgttcagaatggccagtgaaacacacaaatggcactcagatttgttgatggctcaccaactcaaagaggttccttctctcctttgataagtcccacaaaaacatctactgtaaagacttgaaatacaatgcctttcttttttatgagagccaagtttacccacaactctcaactaccagtactggtctgactgtgcagaaaagggttgcccgcaaaggtcaatgatatcaccctagaacattctagaatgatgaattttgagaatgtgaaaccttagaacctcgtgcggttgtctgccttggaattcctgtgctgtatcctgaaattttagctgaatttggcagagaattcagagaaaatttgcttttctaatccttgctgcctgaaagtgctaattattttccatagctaggatattaccatggagcaatattttctctgcctttgataactcccagcaaattactacattaaccgcctttgaaatccaggagccacaaattttaattcagtggcctgctaaaacatgcactctctggtttaaagtttgcccaaagtggtgctgccccatatgccaccgcgcctggccccgtatt

SEQ ID NO: 241776 - DNA, 1319 bp, Homo Sapiens
  misc_feature (308)..(334): n is a, c, g, or t
ttggctcctttctgtctctgagtgtgcctactatagggacccatgtaggtggaatcatgcggtatttatagtcacatcgtgactggcttatttcacttagcataatggcctcagggttcatccatattgtagcatgggtcagaatttccttcctttttaggctgatactccattgtgtgggtggaccacattttgtttgtgccttcatccatcaatgggcacttggctcgtctccaccttttggctgttgtgaattatgctgctgtgaacatgggtgtgcagatagctcttcaagattctgctttcannnnnnnnnnnnnnnnnnnnnnnnnnncatatacccagtacaattactaggccagatggtaattcccatcatttttttaggaaccaccttaccatttccaccgcagctgcacccattttacattttcaccgaccgtccacaaggtctccactttctccacatcctcactgacacttgttactttctgtgttttgttaatagccattttaacgggtgtgaaatggttagaagttcacatttattctgagaggactgtgtccatttccctgctgttttccttaggaagatgtccagatgctgcctacctgtcaacccctaagaccccttttttacccgctcctgtctgaagaccacgaccatgacataatcactcctctgggcagtcaaagatgttccgcccccagtgggagcatgagtggagctttgagctctggcaggttggtgctactggcagaagcgctgctctggcacacaggaaacgtctggtcctcccagcaaccatgtgcggtagaaagggcaagctcactgtccctagttggtaggtgaggacacagatgctccttgacttaggatgaggttggatccccataaacccattggaagctgaaaataggatatcctaagttgagaatgcatttaatatacctaacctgccgaacctaaccggacctcatgtaggtggaatcatacggtatttatggtcattttgtgactggcttatttcacttagcataaagtcctcaaggttcactcctgttgtatgtagcatgggtcatagcttagctgagcctcccttaaacgtgctgagaacacattagcctacagttgggtaaagctgtctaacacaaagcctataatgaagtattgaatatctcatgtagtttattgaataccgaaaatgaaaaagagaatggttgtatgggtacttgaggcacagtttctcccaagtgcatattgcttttgcatcatcataaagttgaaaaatcttgaatcaaaccactgggactttggg

SEQ ID NO: 241777 - DNA, 1089 bp, Homo Sapiens
agttcatgaaaagaactcttgaatgcaggtttctggtaactttggagagtgtgccattggattagacagaaaacttccaaggcactaattgaaaggctgatgtgttcataaagatgaatatgaagtagagcaggagttgattacatggactgaaatgaactaatggaagactgaaataatttgtatggcttttgttgtttgaaatattgctacttctttttgttttttcagagtctgaataatctttttattttgagctatttatagccttgaaatacactttaagtgtattgagtattctaatttctccagaatttgtaaactatttatgaatattcttaattcatggcatttgtctgtataaagttaataaccacgttttcttttgtaatagggcacaattgaaaccggttactttctcaggactttgactgaaatggccttgtgaaatgttctagcaaagccaatctaggagagtctatatggacaatgattcttgttgcactttgtgtgggtaatcaggcccagtatatgggactgcagtttattttgaagttaggtcggttctgctgtgatttgtctttggtggaagtggtagactggagacagaaatattgtatgtccctaaattaatatagctcccaacaaccaatccctcattatacctttaactgcaaccaccagacacaacggctaggaataacagcagaggtaggaatgggagttagcgggattgcaacttccctatcctattaccaacgcttgtccaaggattttatggaaagcctggataacattgctcaaagtattgtcaccttacaaattcggataggctccttggcagtggtcgctttgcaaaatcgaaggggactagatctcctaactgctgaaacaggtggcttatgtattttcctagaagaagaatgctgttttgatgtcaaccaatcaggattagtaagggacaccacctgaaaactagctgactgggcctctaaaatatgacaacagctggggcacctaaagggcactaagttgggtttcatggctccctcccttggccagcccattattaatgattatatttgccaa

SEQ ID NO: 241778 - DNA, 1112 bp, Homo Sapiens
tttggctattgctaaacttggactagccccttactaccgatcttaatacccatgtaccaatcattgctgcatcctattggaaagcaatggacagacagccacgctgaaagcccttactagagactggtccacaagatcagatttagctgcccctggtttgagccttgctcccctggtgtcttttctggcgaagctgggcccagagagcgttttactaagtgggctccatggtagtggaagtggtggggacagaaggctggctctatatgtggcagaggcctgaataaacagggatttgagagggctcaagatatcctgacttaatcctcaatgtggcaggcacagggccatggccaggcctagaggaaggtgggctgtttggggtatggcccagcagggcacgatgtgatcaggtagggcgtagggaaatgggttactgtcctctaaatattccatatatcacaaagttactgactgcggtctccacaaattcaggctgccagtccgatgcactatatcccaacaatctgagcactctgtcaaagatgctcacagagacaacaggagcagacagagccttgtttctctcttaatcttcagagcctagaactgagcttggccctcaccaggcacttagaaattgcataatgaaagaatttcagatttttattagtggcagtgagcactgaaaacccagtatttggccaggtccagtggctcacacctgtaacctatttttaaaaaagatgtttatggctttggtgatagcaggctggaaagctagctgaatttgcaggcaacctcaagtagctaatgaaaaattatagtggcttgtccaaagggattgagttttccaaataaaaaagtgggcttcagttttatgtcattgtaagaggccatgtgagggatgtttggatgctcgctttgaatctgtaggaccactcaatgattttttaaaaccattggtttctggcaggcaaaacattcaaaatataggctatcccaggaaatatagcataagggctgtcctgcagtaatgcattaaaccacgtaacaaacgaactcaagaagagggatgtggctctggatttgtgaccctcaacataacccaa

SEQ ID NO: 241779 - DNA, 2147 bp, Homo Sapiens
  misc_feature (249)..(278): n is a, c, g, or t
  misc_feature (1656)..(1681): n is a, c, g, or t
tcccaaaaagagaaaacttacaaagcagaaaggattttatataacagatgaggacttgacgtttggaaacactgagcttaaaattactgtgggatgtctaatgaagatatttgatagacagttagaaacaaggtttagaaagcaagagataagtcaggatacaagttacaggtttgagactcagtctgttattacaggtggtaaaagaagccatagttatgaatgacattgtataaaatatgtaaagtnnnnnnnnnnnnnnnnnnnnnnnnnnnnnntatagtgaagatcaatacctaaaaggtaggcagaaagtgagacaacactttgtggggaaatgagagagacagcgaagatgaaaccaacatgtagcacagagtcgcctttgataggaagcaggcaacctcttttcctctaaaatgggaaaatgagtaaagttggtaaatacaagttgacctcttcatagtctcaattttctgttcaataggagaaagagccatatgctaggggaggggcagagggcctaaggaaagtaatgaagtttggctcagccacagcgggaaatgggagagaggccaccctagtaacaaacataaggtttacattgagggcttttctaaggctgaagtgagacacttgtagtgattctactttgaaggactacccatcacaaagaactcagcatccccgaaaaggtagataataaataggattaatctgaggttgagggcttgccaaaggactagactaaaagaccagggaaagaagaataactggtgagattagttcatatagtatcccataaagctgagggtggatagggaagaaagcctgaaaggggctgacagtttaggaggaaggggagcagtcaagaaaagggggtaagaaggaactgaagaatgtggaatgagcataaaggagagaaaagtcaataaaataaggaagtgaaaaaattgaaaagagggcagttatcagttactgaaattttaccagaaagagaaactcaaggtggtgacattcaaagtgcggccacgggagtaagctgctggaatgtaataaagtcactgggcagaagtccaaggtatcagcaaggtatcagaaagatcatccaaagatgacaacaggagttgaggtagacagaaagaccatgagcaagatatcaagttaggctctctggcctttaacactcacccctattattaaaggcaaaaaacattaaaatttcagtatgttatgaaaagatgtgctacaaaaacatatgaactaatggtagactaacctagcttggtttttatcttcattactcacttgaaaagccatgcattgtcttttaaacaaaatagaaaaataatttttaaatttttataaaatgcctaagggaagtagaaattttaaatacaattagtaatacatggcaaaataattaaacacaatgattcctttgtgagatctttcattatttaccttattgaaaatggaatctgaatattagtcataatctttcattttgcctacatttatatccatagtatgtattcaaagcagtgaagtaacttgactttaatttctgaagcatggcaaacttcaaggtagtgagatttaaaaataatctaaagatgataaaaatggtaaacttgtgttacatataccacaatnnnnnnnnnnnnnnnnnnnnnnnnnnctttgtaaagctaaattgggttactactcattattagtgacataacatctgtattttaaggtgagtttgaacaacactttagaaattaaagaatcatcccttcataggtttactaatatataatgaaaaagatggtgatgttgttttagtagggtacccaagctggatatctttatgcagtgtaatgttctcatattcagtatcaacaggtcttcttttttggaactctcttttccatttcatgggttttgttgtttttctatttgaaaaggactagatgaacttactagttacagcgatgatgaaagaagtttaaaatttgttttgcattcgttgtattccattcttgttctttcaggggtccttcacacacagatacatactttttcaagattttttctcctacttctcggaaatccaagggttccttgtatgtagtgcagcccgctccagacacactagccaa

SEQ ID NO: 241780 - DNA, 942 bp, Homo Sapiens
ttgggatgaaatcaataaaaatgttatgtcagcgtttggcttaacagatgatcaggtttcagggccacccagtgctcctgcagaagatcgttcaggaacacccgacagcattgcttcctcctcctcagcagctcacccaccaggcgttcagccacagcagccaccatatacaggagctcagactcaagcaggtcagatgtaccaacagtaccagcaacaggccggctatggtgcacagcagccgcaggctccacctcagcagcctcaacagtatggtattcagtattcagcaagctatagtcagcagactggacctcaacaacctcagcagttccagggatatggccagcaaccaacttcccaggcaccagctcctgccttttctggtcagcctcaacaactgcctgctcagccgccacagcagtaccaggcgagcaattatcctgcacaaacttacactgcccaaacttctcagcctactaattatactgtggctcctgcctctcaacctggaatggctccaagccaacctggggcctatcaaccaagaccaggttttacttcacttcctggaagtaccatgacccctcctccaagtgggcctaatccttatgcgcgtaaccgtcctccctttggtcagggctatacccaacctggacctggttatcgataaggaggctcctctacaccaattaatgtagctgctagctattggcctcccaaaagactccagtactattttaatttgtattgaagaagttcagaaatttaaaagcagaccattttttatgatatcatttgttggtgttaattgaaagtataatttgctggaacacaaagaccaaaatgaaagttttttcctccctgctttaaaaatgtaacagcttcttagttactttggaacactactcttacatgtagaaaagtgattgacttgacttt

SEQ ID NO: 241781 - DNA, 1749 bp, Homo Sapiens
tacaaaaaagttgggaaaatataagatgaatccaaggcagtggagccatatctctgaaagtgccaaagacctagtacgtcgcatgctgatgctggatccagctgaaaggatcactgtttatgaagcactgaatcacccatggcttaaggagcgggatcgttacgcctacaagattcatcttccagaaacagtagagcagctgaggaaattcaatgcaaggaggaaactaaagggtgcagtactagccgctgtgtcaagtcacaaattcaactcattctatggggatccccctgaagagttaccagatttctccgaagaccctacctcctcaggagcagtctcacaggtgctggacagcctggaagagattcatgcgcttacagactgcagtgaaaaggacctagattttctacacagtgttttccaggatcagcatcttcacacactactagatctgtatgacaaaattaacacaaagtcttcaccacaaatcaggaatcctccaagcgatgcagtacagagagccaaagaggtattggaagaaatttcatgttaccctgagaataacgacgcaaaggaactaaagcgtattttaacacaacctcatttcatggccttacttcagactcacgacgtagtggcacatgaagtttacagtgatgaagcattgagggtcacacctcctcccacctctccctatttaaacggcgattctccagaaagtgctaacggagacatggatatggagaatgtgaccagagttcggctggtacagtttcaaaagaacacagatgaaccaatgggaatcactttaaaaatgaatgaactaaatcattgtattgttgcaagaattatgcatgggggcatgattcacaggcaaggtacacttcatgttggtgatgaaattcgagaaatcaatggcatcagtgtggctaaccaaacagtggaacaactgcaaaaaatgcttagggaaatgcgggggagtattaccttcaagattgtgccaagttaccgcactcagtcttcgtcctgtgagagagattccccttccacttccagacagtccccagctaatggtcatagcagcactaacaattctgtttcggacttgccatcaactacccaaccaaaaggacgacagatctatgtaagagcacaatttgaatatgatccagccaaggatgacctcatcccctgtaaagaagctggcattcgattcagagttggtgacatcatccagattattagtaaggatgatcataattggtggcagggtaaactggaaaactccaaaaatggaactgcaggtctcattccttctcctgaacttcaggaatggcgagtagcttgcattgccatggagaagaccaaacaggagcagcaggccagctgtacttggtttggcaagaaaaagaagcagtacaaagataaatatttggcaaagcacaatgcagtgtttgatcaattagatcttgtcacatatgaagaagtagtaaaactgccagcattcaagaggaaaacactagtcttattaggcgcacatggtgttgggagaagacacataaaaaacactctcatcacaaagcacccagaccggtttgcgtaccctattccacatacaaccagacctccaaagaaagacgaagaaaatggaaagaattattactttgtatctcatgaccaaatgatgcaagacatctctaataacgagtacttggagtacggcagccacgaggatgcgatgtatgg

SEQ ID NO: 241782 - DNA, 909 bp, Homo Sapiens
ggggaaaacttttggaaatatacttttaattttgaaagaaaattaaccaaacaaaaatcaaatcccttaaaatgagtatttccatttattaattgggtaaaactgatgatgaaagaagaaaaagtactttcggatagaaataaagcattatagatcagtgctatttataatttattacttatcaaagtaactccagctttcttatagcaattcaataagccctctcctagaactcaggggcttttaaatttatgtttttattaagaaaacctttttaaaaaaaatcctaagctatatgtttttaaaacatttaaaattgattttttaaattttgaaagtgaaattataaccatcttcaaaacatacagtaaaatgtattacgtagacaagtatcaattatttcaaacagcatgacaatttaactacaaataatttcaaatcctaacaaatataattacctaatgtttaagtaattttataaataaattaccaaattagaagacagtattggttgactacattttacaaactataagaatatatcccacacttcatatattttaacaccctggggtatttttctgcattaataaaattcattttattataaattttcaggaattctttctgatgtaccaagatttcatatgaaaaagcagaagctatttttttatttctgatataaaacagtaagtatgaacccaatgtagaaatctgaagttagacaattccctttggcagaaaacaattataaacaggtcttaatataaatagaatccataagcccataaaaagggaagtacacaaccctgtgtttcttaacaccgaaagaatcatcagtacacagatttaaaatcatttttatctctcgacagcttgcaacacaaaattacccaacttttttgtaca

SEQ ID NO: 241783 - DNA, 676 bp, Homo Sapiens
  misc_feature (249)..(311): n is a, c, g, or t
tttttaattttttgaaagaaaaattaaaccaaacaaaaatcaaatcccctaaaactgagtattcccatttactaactggctaaaactgatgatgaaagaagaaaaagtaccttccgatagaaataaagcattatagatcagtgctatttataatttattacttatcaaagtaactccagctttcttatagcaattcaataagccctctcctagaactcaggggcttttaaatttatgtttttactaagnnnnnnnnnnnnnnnnnnnnnnnnnnnnnnnnnnnnnnnnnnnnnnnnnnnnnnnnnnnnnnnaattttgaaagtgaaattataaccatcttcaaaacatacagtaaaatgtattacgtagacaagtatcaattatttcaaacagcatgacaatttaactacaaataatttcaaatcctaacaaatataattacctaatgtttaagtaattttataaataaattaccaaattagaagacagtattggttgactacattttacaaactataagaatatatcccacacttcatatattttaacaccctggggtatttttctgcattaataaaattcattctattataaattttcaggaattctttctgatgtaccaagatttcatatgaaaaagcagaagctatttttttatttctgccaacttttttgt

SEQ ID NO: 241784 - DNA, 1976 bp, Homo Sapiens
  misc_feature (424)..(432): n is a, c, g, or t
  misc_feature (1353)..(1389): n is a, c, g, or t
  misc_feature (1692)..(1715): n is a, c, g, or t
ccctaaccagtaagtacaaacagggcattgtacacccatttttaaaagctgaatcacaggattaatgtttagaagtatttgcaggatttatccaaagaaatgtttagcagacaaatgcaatagaaaaaaatcaagcatttcccaaaatggtgtttgtattagaaagtttaaacttttgtcttcattgtaaaggtatcactttattttatttttaaaaggccatgattaaccatttaataacttacatacctttacaaaaataaaactaacagcttgctgggcacaaaatttactcaaatctttctgtatttttaaaatcagtaagtgatgtatcttactagcgctttattctcacagtggtatttttttaaaagcctgaacagtgtaattatttaatctgatgttttaaattatacttgatatnnnnnnnnngtctacccaaaccatcaccaaaatttcaattcaatctaatgtagaagaaacctgagtttggatgtagaaataattcattcaattttttttctgacatcatacatcatgccttcaaccaaaatagaagtgaagcttcaaacaggactctatggctttatctgaattttctgagtattaagtaaatcttaaatttaaagcagctgttggaggttaaatgttctcaaagcaatgtaaactagttataaaatgtctcatcaaagacatcagcagctcttgtgagtcacatgaaattaacaatgaaagaaggatcatcagttatactgtacactgagagtacataaaacacttgtgcctcacctctagtatcaaagccatcttcatatattccttttataagaatattgatatgtattctttatgaacttcaggctcattccttttgttaagcatgtatttactggctgtatatagtatatgcattgaatttcccatgacttgaaataactatagatcaaagatctatgcaaatacaaattacaaacatgtagattacaagaaatccgaggtgatagtttatgaatctggatttgcccttttataacttcacttcaaatagaaacatcttgtaccctcaagtccaggcaaaaatccaattttaaaatctcattcttaacctttgaaagtagagcctttggaaacagaatgaacttcactttaaagcactgcctttaagaactgtaacatctatttccagagatgtgacccaggaaacaattcatcaatagtttatccattccactggcaaaagttttaacaattctgatgatttcatcatatgtgcagtgaataccatccgtatcatttcacaacaggatcagcagacacagtgctgtcagacaggtctccattgcttgttttagnnnnnnnnnnnnnnnnnnnnnnnnnnnnnnnnnnnnnagccgcagtcttgtctgctctgaagaaaattcttgcactgctcagtgagaaatacagcaattcaaattcctgtagatagacatccagtcgcttctgagtgagattcatggtttgtaagagtttttcatcttgactggctgactgtacattctgttgcttagcaactgctcttatctccttcaggtatttctctctaacagactggaaccagtgaagtgaatcaaactcccgatactgatccaaaagctttagaatgtaagccacacccatggcaaagccatcatcagtaaaggcagctccaannnnnnnnnnnnnnnnnnnnnnnnccttgcaactaatggaatgctctacaaagttgagggtcagagggggaacaattatatagaaatttcggagatgtatattctttggccttcgaaattctggagcaaaaacgtctacaagcattttgaaatattctgtgccttcggcagaatttcgtgtgtgatcactgaggactgaatccaaatgccttgctgcttttaatgtttcttctgcaagaccttcttcttttactagttcttcaaaatttacaatatcttcaccaa

SEQ ID NO: 241785 - DNA, 1966 bp, Homo Sapiens
  misc_feature (819)..(983): n is a, c, g, or t
  misc_feature (1680)..(1688): n is a, c, g, or t
ttggctttcttgtgataagcacacacttttattgcaacataatgatctgctcacatttccttgcctgggggctgtaaaaccttacagaacagaaatccttgcctctttcaccagccacacctgccataccaggggtacagctttgtactattgaagacacagacaggatttttaaatgtaaatctatttttgtaactttgttgcgggatatagttctctttatgtagcactgaactttgtacaatatatttttagaaactcatttttctactaaaacaaacacagtttactttagagagactgcaatagaatcaaaatttgaaactgaaatctttgtttaaaagggttaagttgaggcaagaggaaagccctttctctctcttataaaaaggcacaacctcattggggagctaagctaggtcattgtcatggtgaagaagagaagcatcgtttttatatttaggaaattttaaaagatgatggaaagcacatttagcttggtctgaggcaggttctgttggggcagtgttaatggaaagggctcactgttgttactactagaaaaatccagttgcatgccatactctcatcatctgccagtgtaaccctgtacatgtaagaaaagcaataacatagcactttgttggtttatatatataatgtgacttcaatgcaaattttatttttatatttacaattgatatgcatttaccagtataaactagacatgtctggagagcctaataatgttcagcacactttggttagttcaccaacagtcttaccaagcctgggcccagccaccctagagaagttatnnnnnnnnnnnnnnnnnnnnnnnnnnnnnnnnnnnnnnnnnnnnnnnnnnnnnnnnnnnnnnnnnnnnnnnnnnnnnnnnnnnnnnnnnnnnnnnnnnnnnnnnnnnnnnnnnnnnnnnnnnnnnnnnnnnnnnnnnnnnnnnnnnnnnnnnnnnnnnnnnnnnngcctagggattagccacaaggacatggacttggaggcaaattctgcaggtgtatgtgattctcaggcctagagagctaagacacaaagacctccacatctgtcgctgagagtcaagaacctgaacagagtttccatgaaggttctccaagcactagaagggagagtgtctaaacaatggttgaaaagcaaaggaaatataaaacagacacctctttccatttcctaaggtttctctctttattaagggtggactagtaataaaatataatattcttgctgcttatgcagctgacattgttgccctccctaaagcaaccaagtagcctttatttcccacagtgaaagaaaacgctggcctatcagttacattacaaaaggcagatttcaagaggattgagtaagtagttggatggctttcataaaaacaagaattcaagaagaggattcatgctttaagaaacatttgttatacattcctcacaaattatacctgggataaaaactatgtagcaggcagtgtgttttccttccatgtctctctgcactacctgcagtgtgtcctctgaggctgcaagtctgtcctatctgaattcccagcagaagcactaagaagctccaccctatcacctagcagataaaactatggggaaaacttaaatctgtgcatacatttctggatgcatttacttatctttnnnnnnnnnggaatcctatgacctgatttggccacaaaaataatcttgctgtacaatacaatctcttggaaattaagagatcctatggatttgatgactggtattagaggtgacaatgtaaccgattaacaacagacagcaataacttcgttttagaaacattcaagcaatagctttatagcttcaacatatggtacgttttaaccttgaaagttttgcaatgatgaaagcagtatttgtacaaatgaaaagcagactctcttttatatgggtttatactgttgatc

SEQ ID NO: 241786 - DNA, 891 bp, Homo Sapiens
ttggaacgtgctcggccgggtaaaaggccggaccgggctgagggtggtggtcaaggctgtggaccccacatcggggcagctgtatggcctggccagagaactctcggatgagatccaagtccaggtgtttgagaagctgcagctgctcaaccctgaaatagaagcagaacaaatattaatgtcgcccaactcatatataaagctgcagacaaacagggatggtgcagcctctctgagctaccgcgtcctggatggacccgaaaaggttccagttgtgcatgttgatgagaaaggctttctagcatcagggtctatgatcgggacatccaccatcgaagtgattgcacaagagccctttggggccaaccaaaccatcattgttgctgtaaaggtatcccctgtttcctacctgagggtttccatgagccctgtcctgcacacccagaacaaggaggccctggtggccgtgcctttgggaatgaccgtgaccttcactgtccacttccacgacaactctggagatgtcttccatgctcacagttcggtcctcaactttgccactaacagagacgactttgtgcagatcgggaagggccccaccaacaacacctgcgttgtccgcacagtcagcgtgggcctgacactgctccgtgtgtgggacgcagagcacccgggcctctcggacttcatgcccctgcctgtcctacaggccatctccccagagctgtctggggccatggtggtgggggacgtgctctgtctggccactgttctgaccagcctggaaggcctctcagaacctggagctcctcagccaacagcatcctccacatcgaccccaagacgggtgtggctgtggcccgggccgtgggatccgtgacggtttactat

SEQ ID NO: 241787 - DNA, 1179 bp, Homo Sapiens
taggtatcagagtaatcattgatcgctttcaaaaccctgctcctttctaggtgcaatgaagaatttttattttattgaaaagttatcttaagatgtaagacttgtgaatgatagtaaagatttagtagacccaatgtattctcagataaatgtaaaataagcaagatatgaattaaaggataaatatagagtttaacagcatagatcttaaaatccattatcataaggtagaaggatgtataatttatcatgattaaaatatactaaatattcatatcacagcattctgatttctgatatctacaatttaggtgacatatatacatgtgtgtatatatatataactgtattatttgatattttaaaagataaaagagttatatattcaaataccagtatagatgttgctctgaaagtattgttagatgagattaacatgaaaatcagtaatttctgagaaaagcagattattttccaaaatattgtagggctcatccagtcaattgattatattaaaagactgagatccctcaaggaaataattctgcctgcagattgcctttcgacttgagactgtaacatcaacttttctctaggtctcttgcttgctagcctaccctgccaattttttatacattaaaaaatatttttctcaaatattgtagttctgctatttccagaaacgcttgaggattgtacttccaagttcttttaaagttgatcatcgtcatgaaactcatcatcaaatggcatttgagccaaatctttattaattaaacatgagtggaagtttaaaggccaaagcacaactcactcaggcattgtgaactatgtgtgcagacagatcacaactcatccttggtctctgggtgtgtctgcgtctattactgacttaccctggatatgtaaaatgaataagaaaaactttttgtgttagccactgggatttttggtttgtgtattactttagcatattatctcattgaatgctatagtttaggacactagtttaaactactgaagttaaaatgttctccttatttcagaggagagaaggatcttacagtgacagacatccattagtaagaattaatttctagagataaagtgaattcagtaaccacagtgtcagtagagtcagcatggtcaaaatagtctacatgggaaatgtttggccaa

SEQ ID NO: 241788 - DNA, 1244 bp, Homo Sapiens
ttggctcaaaggccctaatactctgccttcaccctggagagaccgtcccatggaggagtcactgctgctctttgaggcaatgcgcaagggcaagttttcagagggcgaggccacactacggatgaagctggtgatggaggatggcaagatggaccctgtagcctatcgagtcaagtatacaccacaccaccgcacaggggacaaatggtgcatctatcccacctacgactacacacactgcctctgtgactccatcgagcacatcactcactcactctgcaccaaggaattccaggcccgacgctcttcctacttctggctttgcaatgcactggacgtctattgccctgtgcagtgggagtatggccgcctcaacctgcactatgctgttgtctctaagaggaagatcctccagcttgtagcaactggtgctgtgcgggactgggatgacccacggctctttacactcacggccctgcgacggcggggcttcccacctgaggccatcaacaacttctgtgcccgggtgggagtgactgtggcacaaaccacaatggagccacatcttctagaagcctgtgtgcgtgatgtgctgaatgacacagccccacgagccatggctgtgctggagtcactacgggtcatcatcaccaactttcctgctgccaagtccttggacatccaggtgcccaacttcccagctgatgagaccaaaagcttccatcaagttctctttgcactcattgtcttcattgagaggactgacttccccgaggagccagagccaggatttaagcgcctggcttggggccagcctgtgggcctgaggcatacaggctacgtcattgagctgcagcatgttgtcaagggccccagtggttgtgtagagagtctggaggtgacctgcagacgggcagatgctggagagaagccaaaggcctttattcactgggtgtcacagcctttgatgtgtgaggttcgcctctatgagcgactattccagcacaagaaccctgaagatcctactgaggtgcctggtggatttttaagtgacctgaacctggctttactacacgtggtggatgcagcattagtggactgctctgtggccctggcaaaacccttcgacaagttccagtttgagcgtcttggatatttctccgtggatccagacagccatcagggaaagcttgtctttaaccgaactgacacactgaaggaagacccttaagaggtgtgagctg

SEQ ID NO: 241789 - DNA, 1199 bp, Homo Sapiens
ttggctcatttcaaacctgctttgcagggctcccctatgtattcggggggcccacggcacactcaggctggagatccttcctcactgcgctcaagatggcctcagccagacaccagttacccagctgaaagtcacaatccctcccagaagtctcccaacactagtgctgaccagaggtggggctctcaggctaggagtttcacacacaatgacaggctgctgggggacattgcaggaccccttttcctctcctctccatgctagaagccagccctaggcagctgcagttactccctgtgactcagcagcaggctgattcaacacagctgcccacacaaagccagtggctaatacatctgtttacctttccctatcacccagacacaagcccctttcccaggtcaaaccacaggccgatgcatctccagtttgacagtcaaatcactacttccattgctactttagatcagccaaagtggtgactgctgcagtgtgtggctatccctacaaggcccacccaagggatgcccaaagcccaaccttctccagggctgcagcccagagcaaccccaccagcctaagtccagcagaggacctcccacccaatgtcttgttctaattagaaggggaagttagccacagaaaatcaacttatctataattacaaaattctcttgactcaccttaaagttcctattgacatctactgcttttaaacctatttgaaaactctgatactaaaacaaatgacactctaagaaagtttgggagccccatgctgagaaccatttctgtgcagtgaggatgtttccagaagctacttacctacatgtgaatgtgccattttctttccttttgtagagaaaatcccctttactttttggaacagtaatggcagcttctagtacagccattacagtttcatatgagaaaaattaagaataactataaaattgttaaaatatccaataatggataatgatggccagaagatttaacatacaaagtaattctcaatgtaaagctattcagctcttccaggttgaatgccctgtaacccaccctgaccttccacatcatcttcaaaaagcagtttctctgttccccatgattctcctataaggtaactctttagtcctccatttagcacattttaaatcctccaaagaataagtatcatgtgattattttagctttac

SEQ ID NO: 241790 - DNA, 1603 bp, Homo Sapiens
ttggctacaggaggttttgacggctggatgctgcagggcatcccctcgcctggaggaggttcacttgtggccaggttcccagcacacccacttgctcactggggccctggggacaccgccacactcgagcccatcctacggcctcaatccttaccagtccccaggccatggactgccacactgtaggtcttcaatcaaggttcagtggagtttcgaatgtacacacaccctgaaagacagcgaggccacctcagaaaacaacgcgcgcccagctggctcccctccgacagggcccacggctactgggtcggcctcctccggaccctgagcacagcctggtatgcgtgcgggctcggaatacggatctgagcagaagaaatgcgagtggagagcggttctgcgcaggaaagaggaattttgttggaaagcctgtcgacgttgctagaaaagaccacagcatctcacgaggggcgtgcgccgggaaaccgggagttgacggacctcctgccccccgaggtctgcagtctcctgaacccagcagccatctacgccaacaacgagatcagcctgcgtgacgttgaggtctacggctttgactacgactacaccctggcccagtatgcagacgcactgcaccccgagatcttcagaaccgcccgtgacatcctgatcgagcactacaagtacccagaagggattcggaagtatgactacaaccccagctttgccatccgtggcctccactatgacattcagaagagccttctgatgaagattgacgccttccactacgtgcagctggggacagcctacaggggcctccagcctgtgccagacgaggaggtgattgagctgtatgggggtacccagcacatcccactataccagatgagtggcttctatggcaagggtccctccattaagcagttcatggacatcttctcgctaccggagatggctctgctgtcctgtgtggtggactactttctgggccacagcctggagtttgaccaagcacatctctacaaggacgtgacggacgccatccgagacgtgcatgtgaagggcctcatgtaccagtggatcgagcaggacatggagaagtacatcctgagaggggatgagacgtttgctgtcctgagccgcctggtggcccatgggaaacagctgttcctcatcaccaacagtcctttcagcttcgtagacaaggggatgcggcacatggtgggtcccgattggcgccagctcttcgatgtggtcattgtccaggcagacaagcccagcttcttcactgaccggcgcaagcctttcagaaaactcgatgagaagggctcacttcagtgggaccggatcacccgcttggaaaagggcaagatctatcggcagggaaacctgtttgacttcttacgcttgacggaatggcgtggcccccgcgtgctctacttcggggaccacctctatagtgatctggcggatctcatgctgcggcacggctggcgcacaggcgccatcatccccgagctggagcgtgagatccgcatcatcaacacggagcagtacatgcactcgctgacgtggcagcagcgctcaggggcctgctgga

SEQ ID NO: 241791 - DNA, 401 bp, Homo Sapiens
  misc_feature (264)..(288): n is a, c, g, or t
ttggcagagacttcggcttcacgacgtttctctttttgcccgatctctcccggagctggctgggcttcggccggccagaggcccacagcgacgacgtgatccgtcgtgagcgggtcccagggtttcctcggcggcccttttttctctcccctcggtcgtcccccttgcaggctgtcgcggctggcctgagcggtgacctggcgggtcgcgcctgcgctctgccctgtttcctgcctggctggtggcggcggccattttgttcannnnnnnnnnnnnnnnnnnnnnnnnggttggagcgcagtgtccggagcgggctggggggagagagcccgagagcagggttcggtgccttttcctctgtccccagccggtgcccagagcccccctccccttcctcccca

SEQ ID NO: 241792 - DNA, 924 bp, Homo Sapiens
tattgagttgtaccgagaagaaactgcaaaaatgaaggaacacaaagccatttgtaaagctgcagggaaagaggtaataagagagtacagtaagttacagtatcaataaagggaattcccaaggagaaaaaccattgttttgggatttattaactaagatcaggatatgcaataaatggaatagaatctttccaactcactatattagaagaaattgaggaagtgtgggaagaagggaacttggtcttaatgaaagcgaaggaaaggaaattacagattgaggtgattattgtcttgagtagaaacccacgttctatgttggtttgggaggcagggtaaccatttcagatttctagataaaatacattgtccaagctcattcatgagtactatagaaactaacaggtttgataattcttttacactctgtcagttttttagggtctcttttttcccttttcaaaattataaaatacagttaccactctgtctataacaagtgctacctaagtctcagttttttttaatgacttgatttaataatttcttcataggttccacttcccagcaaccccatcctaatggcttatggcagtatctcagtgagtaaaatgtctaacggttttcctttgtttattaaaaggttacttacaaggacaagaaaggaagtagaggcattatgatttggggatggattattgggaatactttgtcttcaaaagtctcttttgaatcttggcattctctaggatattttgtatttcaaaaggaccactttagtgtgacttcccaagccagcctttttggttggactggactggcattcttctgttttctagtgcctgtttatgttcagtgtccaaagccctctgaagattctgttaatctaaattaacttttgaatcagccccaactttttgtaca

SEQ ID NO: 241793 - DNA, 1055 bp, Homo Sapiens
ttggagatggcagataaggttctacctcagcgaatccgggagcttgttccagagtctcaggcgtacatggatctcttggcttttgagcggaagctggaccagaccattgctcgcaagcggatggagatccaggaggccatcaaaaagcctctgacacaaaagcgaaagcttcggatctacatttccaatacgttcagtcccagcaaggcggaaggcgatagtgcaggaactgcagggacccctgggggaaccccagcaggggacaaggtggcttcctgggaactccgagtggaaggaaaactgctggatgatcctagcaaacagaagaggaagttttcttcattctttaagagcctcgtcattgagctggacaaggagctgtacgggcctgacaatcacctggtggagtggcaccggatgcccaccacccaggagacagatggcttccaagtaaaacggcctggagacctcaacgtcaagtgcaccctcctgctcatgctggatcatcagcctccccagtacaaattggacccccgattggcaaggctgctgggagtgcacacgcagacgagggccgccatcatgcaggccctgtggctttacatcaagcacaaccagctgcaggatgggcacgagcgggagtacatcaactgcaaccgttacttccgccagatcttcagttgtggccgactccgtttctccgagattcccatgaagctggcagggttgctgcagcatccagaccccattgtcatcaaccatgtcattagtgtcgaccctaacgaccagaagaagacagcctgttacgacatcgatgtggaggtggacgacccactgaaggcccaaatgagcaattttctggcctctaccaccaatcagcaggagatcgcctcccttgatgtcaagatccatgagaccattgagtccatcaaccagctgaagacccagagagatttcatgctcagttttagcaccgacccccaggacttcatccaggaatggctccgttcccagcgccgagacctcaagatcatcactgatgtgattggaaatcc

SEQ ID NO: 241794 - DNA, 1639 bp, Homo Sapiens
ctttgtacaaaaaagttggtttaagagcctcgtcattgagctggacaaggagctgtacgggcctgacaatcacctggtggagtggcaccggatgcccaccacccaggagacagatggcttccaagtaaaacggcctggagacctcaacgtcaagtgcaccctcctgctcatgctggatcatcagcctccccagtacaaattggacccccgattggcaaggctgctgggagtgcacacgcagacgagggccgccatcatgcaggccctgtggctttacatcaagcacaaccagctgcaggatgggcacgagcgggagtacatcaactgcaaccgttacttccgccagatcttcagttgtggccgactccgtttctccgagattcccatgaagctggcagggttgctgcagcatccagaccccattgtcatcaaccatgtcattagtgtcgaccctaacgaccagaagaagacagcctgttacgacatcgatgtggaggtggacgacccactgaaggcccaaatgagcaattttctggcctctaccaccaatcagcaggagatcgcctcccttgatgtcaagatccatgagaccattgagtccatcaaccagctgaagacccagagagatttcatgctcagttttagcaccgacccccaggacttcatccaggaatggctccgttcccagcgccgagacctcaagatcatcactgatgtgattggaaatcctgaggaggagagacgagctgctttctaccaccagccctgggcccaggaagcagtaggcaggcacatctttgccaaggtgcagcagcgaaggcaggaactggaacaggtgctgggaattcgcctgacctaactgctcagggatctttcttcccagccctggagcctggagggagaccaccctctgggtccttgctggggccgcagacacgtaggctggggtgaggagtgtctgctgtcaccctctactctccagctttagttttataaatgtagtgataggattccttgttgcttggtccccaaagccttatactttttgcattggctttaattgggttcagcagatgcctcctctgcccccctgcaggcaggcccaagtaggactgctggaggctgtgctttgacattgtaagacatttccgaaccaaaggctgctgggtttgcatgtttacagactccccctggggcgagggtcagagctggctctggggagctgggctaggaagaggaggtgcagcccagactcttcctagcctttctaaaccaaagttctttgccattcctacaagcccagccttgctgctggttttttcctttcctttgggtatttgcactattttgggagcaagttttctatgtgggagccactttttttgtacaggggtaagttgggggttttcagggagcctgttaggtgcctccttcttttctttcctcaatctatgcaagcggctctggccgccatcatctcctgggatgccagagggctgcctctccagcggcttgggccggggaggggacactccagttctctagcatggcctgaggtatggggtatgtgcatgtggaggccagggtaaggtgaatggggaggctgggaggactggtgttgccctttggagcttggtga

SEQ ID NO: 241795 - DNA, 824 bp, Homo Sapiens
ctttgtacaaaaaagttggcctggtggtttatcatgagctgatccagaggatgtacactcgcctggagcccctgctcatgcagctggactacagcatgaaggcagaagccaatgccctgcatcacaaacacgacaagaggaagcgtcaggggaagaatgcacccccaggaggtgatgagccactggcagagacagagagtgaaagcgaggcagagctggctggcttctccccagtggtggatgtgaagaaaacagcattggccttggccattacagactcagagctgtcagatgaggaggcttctatcttggagagtggtggcttctccgtatcccgggccacaactccgcagctgactgatgtctccgaggatttggaccagcagagcctgccaagtgaaccagaggagaccctaagccgggacctaggggagggagaggagggagagctggcccctcccgaagacctactaggccgtcctcaagctctgtcaaggcaagccctggactcggaggaagaggaagaggatgtggcagctaaggaaaccttgttgcggctctcatcccccctccactttgtgaacacgcacttcaatggggcagggtccccccaagatggagtgaaatgctcccctggaggaccagtggagacactgagccccgagacagactcaccccagcccctgcctgcccctgaggaagaagaggcactcaccactgaggactttgagttgctggatcagggggagctggagcagctgaatgcagagctgggcttggagccagagacaccgccaaaactccctgatgctccacccctgggg

SEQ ID NO: 241796 - DNA, 1313 bp, Homo Sapiens
caccgagtatattctgtctattgttttatgatttacacagaaaatgatgggctggggttatagaacaataaaccaacccattacatttagacctgggcttttgaaaaacttgcattccattttaacaattcgtatgtatctaacaaatacataaatccagatcacaaataatcttaagagttaaacaattaagaaacacaaagaataccacatagatctacctttaaatatcagcattcatattataagaaataagaaaatgttaaaaaaataaaattaggttaagtcacaacataaaatagagaaataagataaatgctattttattaatattcatacttatttctaatttaccttcatatagtcttaactttttcaaaaggatccaagatatgatcaaataatattttagtatctgaacttgccagccttagcttataccagagcttgttaccatgaaaatcctaaaacctcaattttctttatcttttttaaaatttaagccaactcttattcaacttttcttcttcacagcagctgtttatagatagtagggagccaagaatgaaggacagtaacagatggaaagcaaaaagtacaacagctatcttaagttcagctctcaacattgctggttgagtttggaaccaaaacctcttaacaactggcagataatagctaaatcttaacagacaaagaagaaatattttctttgggacagctgctatctagaagaaaaccaaggtcccttaatatagtctaaatataatgtgtggcttattatagagaaatctttagcaacgtaagtttaaccagtaagtgtcacaactgatcaacagtacttaaaaggaaacaaacaaaaatcacactagccacaaatttccaccatatacacatgaaattaattttaatctgttttgactccttgacactaactgatcattaatgaaatatgatatggaaagatcacagagtagaaaacaagcaaagattagtttatacaacagtgactatatacatcagagggaaaacatgctagctaatgcaacattaaggcctgaatgtaagcatttcccaagtcacagaagccccaaagaactcctaaattacaaattcatcacattacatgcatgcaatgttcacttttgttttacccataaaaggatacacagtattttgctgtaaataccagacacatttacaatatatgcaaaaattagaatgcaagtgttatgttccttatatttaagcctcatatgtgccaacagtgaaaattcatttatttttaagaatgccaacttttttgtacaaag

SEQ ID NO: 241797 - DNA, 948 bp, Homo Sapiens
acacacattaacgagggtgaaaagacagtcttgcagtgactgcactgccctttccctcaaccccaggcagtgcagtgcagagaatgtgtccacctcttgcaggagggacaaggaagggtccgtgggactttgccttggagcccagtgccagctctgctatagtaaaggacaacactgggcagaaccccatggcctttcgttccaggctagtgcccatagatacagcatttagacacgacctggtctaaaagggaatccactaccctggtgggacaaacctgagtcctgacttgcttcaccaccagctgattcaagtggcctcaggccccaaataaatttcagtggcaggcaggccagagtcactttggtccttgggtgagctccaacaaccaacaatgtgctggtctgggaggctgtgggcttcctatgtgacatcagctgcagtggccagagggctgcctgtgttaccccaatcccaactccaggcagtgcagtgcagagagaattccttccctatgcgagaaagaggagaacccagtatcagccctactacagtggacacagtgtcaggcagaatactgtggccctgatcctaggcaggagctcccagacacctacagacccccctgcagggagaagggattctgccaccctggcgggatggacccaaacccaggccagcttcatcaccagcagactaacctggcttagaaacctaaataagtcagcagcagtcaggcaatatagtggccacaggactcagataaaccccagtgctgctctggtctgggaggctgtgggcttcaggtgtgttgcgccagctgcagtggccatgagagtgcctaaatcacatgagagtgcccagattcacaaagcttggtgcccagattccttgcaaggggaagaagatggacgtgaaagaagaactttgtctgggaacccagccaa

SEQ ID NO: 241798 - DNA, 1064 bp, Homo Sapiens
ttggctgcagctttcctttaaactaggaagacttgttcctataccccagtaacgatacactgtacactaagcaaatagcagtcaaacccaaatgaaatttttacagatgttctgtgttattttattttgtttatgttgtctcccccacccccaccagttcacctgccatttatttcatattcattcaacgtctttttgtgtaaaaagagacaaaaaacattaaacttttttccttcgttaattcctccctaccacccatttacaagtttagcccatacattttattagatgtcttttatgtttttctttttctagatttagtggctgttttgtgtccgaaaggtccacttcgtatgctggttgaaacagctcaggagagaaatgaaacgctttttccagctctcatttactcctcaacaatggtgtggttggtgaatatggcagaaggagacccggaagctcaaaggagagtatccaaaaattccaagtataatgcagaaagcacagaaagggagtcacaagacactgttgcagagaatgatgatggcgggttcagtgaggaatgggaagcccagagggacagtcatctagggcctcatcgctctacacctgagtcacgagctgctgtccaggaactttccagcagtatcctcgctggtgaagacccagaggaaaggggagtaaaacttggattgggagatttcattttctacagtgttctggttggtaaagcctcagcaacagccagtggagactggaacacaaccatagcctgtttcgtagccatattaattggtttgtgccttacattattactccttgccattttcaagaaagcattgccagctcttccaatctccatcacctttgggcttgttttctactttgccacagattatcttgtacagccttttatggaccaattagcattccatcaattttatatctagcatatttgcggttagaatcccatggatgtttcttctttgactataacaaaatctggggaggacaaaggtgattttcctgtgtccacatctaacaaagtcaagattctcggctgg

SEQ ID NO: 241799 - DNA, 944 bp, Homo Sapiens
ctttgtacaaaaaagttggcgccctctgcggtgaaggagagaccacactgccatgcctccctctgggccccgaggaaccctccttctgttgccgctgctgctgctgctcctgcttcgcgccgtgctggctgtccccctggagcgaggggcgcccaacaaggaggagacccctgcgactgagagtcccgacacaggcctgtactaccaccggtacctccaggaggtcatcgatgtactggagacggatgggcatttccgagagaagctgcaggctgccaatgcggaggacatcaagagcgggaagctgagccgagagctggactttgtcagccaccacgtccgcaccaagctggatgagctcaagcgacaggaggtgtcacggctgcggatgctgctcaaggccaagatggacgccgagcaggatcccaatgtacaggtggatcatctgaatctcctgaaacagtttgaacacctggaccctcagaaccagcatacattcgaggcccgcgacctggagctgctgatccagacggccacccgggaccttgcccagtacgacgcagcccatcatgaagagttcaagcgctacgagatgcttaaggaacacgagagacggcgttatctggagtcactgggagaggagcagagaaaggaggcggagaggaagctggaagagcaacagcgccggcaccgcgagcaccctaaagtcaacgtgcctggcagccaagcccagttgaaggaggtgtgggaggagctggatggactggaccccaacaggtttaaccccaagaccttcttcatactgcatgatatcaacagtgatggtgtcctggatgagcaggagctggaggcactcttcaccaaggagctggagaaagtgtacgacccaaagaatgagaggacgacatgcgggagatggaggaggagcgactgcgcatgcggga

SEQ ID NO: 241800 - DNA, 1927 bp, Homo Sapiens
  misc_feature (1774)..(1815): n is a, c, g, or t
aaagagaagtgatcatttacaaatggggaatattgaggagaactgatgggaagttttgtataggacacaccctgactggaaggaataaggaaggaaaagatgcctaaaatagggacactgggcaaaggcattttgccaccctctaagagaaattctcctttccccaatgggaaatattatgtcatacttcaaccccactaagtgccctccaacatcatgggagattcaagccactcgcacccccatttctttcttagaaaggcttcaaagaaataaagtgctctttagttaactgccctatcttgcccctttacttcagcctcactggacttcttcaatgaactctcatatataacccccttccaaaaaaaggaaaggggtggatgaaagaaaaaagcaggagagcggaacgccaaacctcttggaaattatgggtaaataaaataatatgcatgaaaagcagaaatcacaaagaaagtggccttgtctattccatacattttgtcccacagcttttcagcaagtgaaataaggacagaagtaaaattgttcttccctctcgtaactaaaattcaacaatcaacattaaatatacactgagtactttgcaacagtaagtcatggccaccccttgtaaaagagatgagttagctccatacctttttctgggggtcccccttggccctcactgaactcttgcctctagattatttactctcctccaccaatctccttcacccctcaaagcctacttgcaaaagcttcagccagatgatctggattccaagagaagcatctgcctatatatttaaagaactaaaatattccctatccatttctttgccagctcttttttcctctccccatcctcctaccaccaacactaaaggtttggctctgctatgagaggtgggaatgagattcccatcatgtctcagggcacgacgaaactcagagtgataatgggttactttttctttcttgagaatcccagaaaatgagggaagaaaaaagatgggtggaagatttgggcaaacaattaaaggaggacaaactaatatttgctgaatgggaaaaagggatgggaagatcattcgtaaatgcaaataagagccacaattaattttcagagaaaattatgtttaaaaagccaaaatagttaagttggaatcatctccaagaagctaaaaccatgctgaatagttgtcctcatgccctaccatagaagcagagtttgggctaaaaccaatcctatcttcttagagaacaggctcaaaacaagccaatggacactgatgtaacatggcagtgtacactcagtttcacactgacttatattccatcccttccaatggtctccaattccactaggattttattgtcaccctcctgcaccaccatcatcactttcacccttgataggaaatacagactggcagaagtaaggattgaaggtataaagggacaaggaagacctcagaggacagaattagcaccattttaaaacctccaaattcttggctgccaagtaatgtttcagaccctttctacttggtaatgtggcctctccagtcctggcctgaaactgatgggaacaaaaaacaatttagagacaaaaggtgggattagcattgagtttctccaagagaaaggtaaactggagtctaaaacctttctctgtagctatcatggcttcatctttcagtctgacgatgttaaattagcaaaatgtggacatgatccatgatgtagggacaggagactatggacagtnnnnnnnnnnnnnnnnnnnnnnnnnnnnnnnnnnnnnnnnnnaagaactaggaaaaaacaggaaggaagagagaagaatgaggcaggaaagagagggttatcttcggcagcatcttgcagtggcttctctgacagagaaagaacaaaaagccaa

SEQ ID NO: 241801 - DNA, 1452 bp, Homo Sapiens
  misc_feature (690)..(699): n is a, c, g, or t
  misc_feature (751)..(786): n is a, c, g, or t
  misc_feature (1019)..(1058): n is a, c, g, or t
cctcattaatttatcatttaatataaatgctgacagaaagcagataaagaccttgtagacattttcatatatttacaatccaaaaggtgaatcacctccttctacttgttaaaataaatcattttatctgcaactcatgggagccttaaacactaattaggagcaacatgaggctgagtcagtttccaaggtaataaaggaaatagcattttaacaaaatgggcatctttgatataaacatgcacacaaataatacaaaattgagaaagatggccctagtactctcaaaaatcggcaacaagtgggaacatgacttatttagacccagagttctgctgccctaaacatcttcctactactatttctttttttccaccacacttgttttgaaagctgcttaaaaatcagaaatattaaacagattaaaaacaagagaaaaacggtctatttcaaatagggttctttttcctactccaaaagaactctcaggagataaggtcttcaaataagacttcacggtttgccagatcctaaggaattattcacagcctgtgaaattccaatccatttgtcttcaccattccaacctatttgtcttcacttctctttttaaagttggaaacacttggaaaaagtaaaatttcacaaaattcagcaattaaaaaatcagctgtcactttaaggctcaannnnnnnnnncctgaacaggggggtggaggcaggcaagaaagaatagggagctgtggcaatnnnnnnnnnnnnnnnnnnnnnnnnnnnnnnnnnnnnggtaagtctaccactgatttataagagcaggagtataaattctatccaaaagtgtaagtgatttcacttacaacctgactcaaatctcatgggctcctttattaaccaagattatttttgtcttgttaaatatacctctgcagggcacaatcacttacaatcaatacgattggtaaattacacaagctctatcccaagcaaatatgcaccaatgttaaaaagttatttttttnnnnnnnnnnnnnnnnnnnnnnnnnnnnnnnnnnnnnnnnggtgataatgactgcagaatgtctcggggagactgatatgagcctaaagaccaaattaccatagtcagagaaaaagggcagaaggggtaacaaggggaagacaccacaaacacgaagaggaatctcaaaactggaaaatgtttaagtgggtgaaaggttttgttcattaccttaattcactttttccattgttcttgtaccaaaaagtcatagattaatcataaagaaagataatgagacctgtggactaattaatttttttaaaaaagttccttttattcccaggaagcagggaagaggaaaaaggatgaacaggggagaagtgtgaaaatttaggccaacgatccatctggaaaaaataactctcaagacagtgtcttagttgaatagccaa

SEQ ID NO: 241802 - DNA, 2196 bp, Homo Sapiens
  misc_feature (128)..(156): n is a, c, g, or t
  misc_feature (695)..(716): n is a, c, g, or t
tacccaagattatttttgtctgttaaatatacctctgcagggcacaatcacttacaatcaatacgattgtaaattacacaagctctatcccaagcaaatatgcaccaatgttaaacagttattttttnnnnnnnnnnnnnnnnnnnnnnnnnnnnnccacccaaaagggtgataatgactgcagaatgtctcggggagactgatatgagcctaaagaccaaattaccatagtcagagaaaaagggcagaaggggtaacaaggggaagacaccacaaacacgaagaggaatctcaaaactggaaaatgtttaagtgggtgaaaggttttgttcattaccttaattcactttttccattgttcttgtaccaaaaagtcatagattaatcataaagaaagataatgagacctgtggactaattaatttttttaaaaaagttccttttattcccaggaagcagggaagaggaaaaaggatgaacaggggagaagtgtgaaaatttaggccaacgatccatctggaaaaaataactctcaagacagtgtcttagttgaatagaggatgtaaaaacgataagcaaaagctaaatgcctttaagtcagagaattattttatggggtagttcagatattataagaatgacagccaatcaatggagaaagattacacaaataaatggtgattaaaaaaaggcannnnnnnnnnnnnnnnnnnnnngagcaaccaattattcacccaatagtttgtttccaatctttttcttgactctttcatacactcactggggtgggggaccacctgacagtttccagttataagatgactctgagtgtacaacctaaaatggatgccaaagacttgtgagctctgtctgcttagagttagaacagaaacaaaaacaaatctgaaacagtaagacctcaatacaagaaaacaagtcaccttatctagtataaaataaacattaggataacaaactccacaggattttatttttctaaatacacatttttggacacgatattatgttgaggtttaagttcttcccccttattgtgccttattttcttgtgaaaataaagttcgttctctagggatgtttcagggataaagtttaggagaaattcagtgtttggctgaaaatccagaggctctgaaaacaaggattccagtggtgaggtaagtccctttattacaataagatttcaaagggctctttacccactttgttcagtgcagtattgaaaacatacctattaggaatagatttattattaaaaggtgttacttattcctggtggtgatagtcttactctttattaacactatagctagtattacttatcaattataatctattacttgtggaaagatctttagtgaacacagaaataaaatcttaaaaattcaaatcttaagatttacttgctacaattaatagtaccttttgacaaaaacagctttcttcttgaagtggctcagaaaagctaaattgagaaaatgtttaatagtaactataatcaacctacaactcccaataagtcatttcagcaggaaaatttcataaacctgagctgaagcaacaaataaatataaaaatcatagctgtccaaggtagaaaggtatgaatgtggatcagcaaaatgggcactcaggtaaaatgatgacagtagtagactgcttgcttgtttaggtgctaatgatgaaagtaaaatttgctttagtttagtaggtctaatttttcttaaaaggataggcagatttttcaggggaagagatcaccttgcaacactgtaaccatatcatcagttaaaaatttaacacacttagactcttattagggggaaaaaatctaagtaaacactgcagttaatttccaggtaggttattaatctctcctaaaaagtaactgggccattcctttcaatgacatataaatcgttacaggtgctttttacagatagattttacaaataaaacctttactcaattatttaaaacgagcaaaaagagagtagaaaaatggtgagactgctacccaccaccatttgtatataagtgacagcaactgaatacttctttactgagacgaatccttttttttagtgaaagtattttgtcttgaattttaacaatctgtacatgtactgactatagttagttatttctcaccagtcacatactcaagaattcccaa

SEQ ID NO: 241803 - DNA, 1310 bp, Homo Sapiens
ttggccatcagcaggccctgcaggagtacatcctgatgtgctgccagtgccctgcgggggggcttctggataaacctggcaagtcgcgtgatttctaccacacctgctactgcctgagcggcctgtccatagcccagcacttcggcagcggagccatgttgcatgatgtggtcctgggtgtgcccgaaaacgctctgcagcccactcacccagtgtacaacattggaccagacaaggtgatccaggccactacatactttctacagaagccagtcccaggttttgaggagcttaaggatgagacatcggcagagcctgcaaccgactagaggacctgggtcccggcagctctttgctcacccatctccccagtcagacaaggtttatacgtttcaatacatactgcattctgtgctacacaagccttagcctcagtggagctgtggttctcttggtactttcttgtcaaacaaaaccaatggctctgggtttggagaacacagtggctggttttaaaaattctttccacacctgtcaaaccaaaaatctatcagcccacgtggtgtggttggtgaacagtgcatgccaggaggaagcagtccctcctcaccagctctccagccaggacgatcacacagagatgaatggcatctgagtattacggcatccagagccactgctgactcccacttgcacgccaccattcagtcaccagactgggtgccctccgatgggtggaataagtctgcttcatgccaaggctgggctttgggtcccaccaagatgagttctctgtaagactgtggtggagttgcaccaggaggtgcctctgcctctcgacttgcaccctggtcatttgtaagggaaaagagctggaggtggggagagaaagatctccttcagttgggagtccttccacttcaacactggagaactgagccttgcatctctccagggtccaaggccacgcttggtgcacaggcaagacttgcttcagccccaggtgtggtgacttagacctaggaaaccaattatgagtggaaagtgaccctctagttcaactgtgccagaggaaacagccctccagtgcccacctgcctcactcctccctatcatgtaccgtgaaaaccccctctgatggcctcaaggcagtgcctgcaaccgaggcccttctgggggtttctttcttccttccaccagactccaagcccactctcctccaagactgtgttgtcttttctcaccaagagtattaacactactaagtctttcaccttaacttatgactcggatttattcacgtcctgccc

SEQ ID NO: 241804 - DNA, 710 bp, Homo Sapiens
gaatgtctcaaggttttaattatataaattcagggaaaaaatatgatgtcaagtttacctgagactcctgccgttttttaatagcatgcttatataatttatgtaattttcttgcatcaaattcagtaaacttagatacaaaaatccacaggtttctagaagaatttaaaaaaaggcaaattaagttagtctggtggaaaatatttagtttttttcatggaactccttccctccaggcacaaacacatatacacatacacagccctctatggaacaaactcttaaggatattaattttcctatgcattttttcaaaacttcatatatgactaagactccagtgaaactaaacattaaattttacttctcttccaaatcgcttcattttatagtctttagggtgaaaagcagtacaatcctaatttgaaatgcaccaaagacataaattaaatcaggaagtgactcagattcatattgtgatcctgattatgcatataagggacaggtatgttaataactggagtggaaataccatcagataatatgaattatgcttgtaaagaattgtcttaaataatgcattaaaaagttaactgtcacttaataatggtaatgtaatggtcccaagagtaacacaaccaaacaccataaatgaggtacagtttgctatctcttcccatcccaagggaggcatcagtaattaatcccaa

SEQ ID NO: 241805 - DNA, 1515 bp, Homo Sapiens
  misc_feature (1069)..(1086): n is a, c, g, or t
  misc_feature (1195)..(1211): n is a, c, g, or t
ttggagaaagggttgctagccttaacttcagctggtgcaaaacatctgactgtagccgaacttcagccatcagatccttcaaagtggaactttggattgtttttacagacaacatcgagtaatggcttgtaaatgtgaattttgccagaggtggtttttgaacaggaaaatcataattcatatcattggagaagtatttattttcaaatatcaaattgaagaaaaactcaatcctcccatgaaaatcagttcgcctggcctccaagtcgtgaggaaatgggtatgcaaggctgagatttctacagcaataaaggagacacacactgggccagagaggcctgccttctgcctgctctcctgcactgaccctttggagggggtctctgtgtgctgaagctaactcaagatggaaagtgaaaccacatgtgccgtgacctttaggttttatgagtagacagtgttcatttgattttctacagaaataatataaattattctttaggtttaaaaaagagcactcataatgcaatatgtgaataatcagtgaggttgatttttcttttttcctaccgtttcatagtctttgtctaactgctagtaaccctaccgagttttatatatgagtgggatactcaatctggccttaaaaagatacacaaagatgggctgtgggtccctggaaagggggagagttgccctttacagaatcactcgagccctttccagcactgttggtctgatgaacaaggttgttttaccttattttctcttggaacatatctgaaaaccttccccacaaataacttgtcacaccttttgtttcattctgagtctttagttttagtcatgggctttcttcacctgctctaggtgcaaaggcatgttgggaaagagatggatgttggggaggaagagaggagatggatttcagttgggagttaggaggagagtaggtgagatgatcagacaccggagttcaacgtcccagcagtcttggtaaaaggagggagcctgctgagccaggagggagaaaagaagattgaccagcttgctagaaaaatacttagcnnnnnnnnnnnnnnnnnngtggaggggggacggagaggaacaaggatggggaggtaggaatgaggtatagaaaagagatagcatcttctttggcacaagactagtggcttaccgcttaccttagagnnnnnnnnnnnnnnnnncaaacccatcaaaatctacttatttatgaatccaaggggtggcagcatcactctgttctagcattctttgtggagatggtctggtgcctagctgggagtgagcagcagcccatcccctgttcactttctctagcccatcattacctgtgaactgcagtggggcagtcatggcaaatagaattgggctggggtttctccttcttttcagttcattgtttgccctgctaggaattagaagacagacaccatgtcccaggacagtgttacttcttctgcatgatgtgtggtagactccctttgctgg

SEQ ID NO: 241806 - DNA, 550 bp, Homo Sapiens
  misc_feature (481)..(503): n is a, c, g, or t
tcctcccgcagctgggccagagtttccagcagctacagaggacacccagttagatagtgccagcccatccccagcccaccctggcgcccgccctttcttacctcactgacgaagacattccccaaggcattgcgggcagaaggtctgttcatcagaatctcagtgatccctgtaaggagtcagggcagccacgggaaagcagctggctctgcctaatcctgggctgcgggctggggactggaggcaggaggcctgggatctggggagcctctgccctagatgaccagagtgacttgccacaagtcacacactcaggcaggcctcaattttcccaaccataaaatggagagaaaaacccttgctctttctgcctcagagagaaagtggaaggacttgtaaactgtgaagcaaaatggggagaggaacaacagtgactaccacagtagcccttgcctgcttttgctgttgttagacagacagnnnnnnnnnnnnnnnnnnnnnnntgcacccatgtaccttctttaattttacaactccctccatattcatc

SEQ ID NO: 241807 - DNA, 391 bp, Homo Sapiens
cagtaaatacattttttattatcaaaaaagagtagtgtatggttggcgtattctgtgtagaatgtattttattgatgtctcctatttttataatttctgagttaagtactttttaattaatgctttttagttttgggcagattcagttgactaaagcacctcatttcccagatacatgaaataaaatatttggcttcttttccaatttcacactgatgttattttgtgaaaatcagtgctttaagataaatcgttatacgttaagataaacatgagaaacttgatctaatatttaatatttattcagttctacactttattaacttctacaccagcagatttagacattatgtaaccatctcaagaagtttcacttggatgtaatgcttca

SEQ ID NO: 241808 - DNA, 1164 bp, Homo Sapiens
  misc_feature (1018)..(1037): n is a, c, g, or t
ttggcttgggagaacatgataacaatatccgtaggttgatagacgtctgatggataaaattgtgcctagttgttttgtagagaagaatgtcaaactcttattcttcttgaataggctctattatttgaatctctggagttattaccagctcattgcttcaaaattaagttgaggaattcaagaataatttattttagtaaattctatttaagatgttgtaagaatttgaactgccaaaaatctttcctctccacagaggttgtttctttaatattaacacaaagtaagtgaccttcaggtcttattggaaactcagagtaatatggccttgcctggaattgcaaatttccttagttttgaaattttcatagatgtctttggttcttggttgtaactgttgactgagaagagccatttacattttttgataccaacagggcaaagctttttacttaattacctctaccaggctttaagggaaatctgatacttcagcatgtgttaaactataaaatacctactccaagtatctgcccagttccttgtcccctctccccaggcccttaaaggaagttctcgatacatatttgtagaataactgaatgttttcaggattcctgtactttgctgagttaaaatggatatggtacccttgctgattggttgagcccctaagagggggcagaatattaaatattccatatcagatatgcttttacaggtttgactttagaaaagtcttagcatgtgaagcctgttggataaagggctgtgtttgcatttaatctgtcacttttgtatctcctgtcctggctggccattttgatctcatgctgttctttttttcttttgaacttgtaggtcaccatgtacttgacaagatttcatttacttaagtgccatgttgatgataataaaacaattcgtactccccaatggtggatttattactattaaagaaaccagggaaaatattaattttaatattataacaacctgaaaataatggaaaagaggnnnnnnnnnnnnnnnnnnnnaaataaacaccttcttaagtgcatgagatggtttgatgggtttgctgcattaaaggtatttgggcaaacaaaattgggagggcagtgactgcagttttgagatcaggttttgaccttgatgattttt

SEQ ID NO: 241809 - DNA, 1658 bp, Homo Sapiens
  misc_feature (75)..(85): n is a, c, g, or t
  misc_feature (447)..(455): n is a, c, g, or t
  misc_feature (898)..(906): n is a, c, g, or t
  misc_feature (1439)..(1453): n is a, c, g, or t
agctaataaatttcagataaattataagccacaattctttacattgtgtcttatagttgatcagaatcataaacnnnnnnnnnnngctaggaattatataagagatttgtttgtacctttacagtaagatcaaagctctcttaggtttgattgaatagaaattactacagaattactgccatcaaggcaatctactactaactactatgatatactgaaagtgacaatgattaagagctgtgtcgtgatcaggttaaagagaaaaaaataattaaatttgtgtgtatgtttaattaggtaagtcaattatgcattaaaacaatacattttcagtgggtccttaatgtgacgtgaatggtgtttcaacattaaatgctaaagatgaaaaaaagagtaggaaaattagatattctcttaacctactcataactacatgtacttccaagnnnnnnnnnttcaaatattttttatctgcatgctctgcactaatgattagttaccacaactattatgattaggtgacgtgatttaagatgcattaaaatgatttattctaaattcagatacaaaaaattatatgttgttaaacatgtaagattttgcagggaattctgtgccttctatattaaataattacattttcaaatacagcaaaaaatgaactagcaaattaaaactatcttcacgggttatggaaaaagaggaaaagtgaaatctggaaaaacaattggaagtaaaaaaatatgttcaacgaatacatacagaactaaaaaaaatcagttataaatagaacaagatagatttgtatttttagtcttgtgtatttgaaaaggaaattgcataattacatttttacaaaacaagtaagatgtttaaattacgtaactaatagaggggnnnnnnnnnctcttagtttttcggatttatgaaataatttgttgacatgctctacaggagtgaccttaacatacctaatggtaactaaaactgttctctttaattacaaaattcccagcatctatcctactatgatactatctgaagataggcaccaataatacaaatgtttatccaaattttttgctcaaagttatacttatcctaaagcttgaagggctaagcactagagtatgagagtttgtggaaatgtacttaacgtgctttaacaacaacagaaaagtaacacctaaattaattgttccatttgaaattattttctgacagataagtgaatatttccttgaatgacacagtctggggtatcagatatttattatatacagtatatgtacacatataaacatacacacattatatagccaaaagattacacttcaaaattaactggaaatggtatttcgagtatttttagcacaaactaactagaggatgtgctctagctgtccaagcagcaataatcataaactctgaacttggcnnnnnnnnnnnnnnngagattctattcatagaatcattcttcgaatgccacattcacagcaaaatttggcccattctacagggtatttagtcccacactcatggcagaattttggtaagtttccaggtgaatgtccttcaatgcctttaatatttccaccattaagggaagatgcacagtccccatctggcctggctatgtagctctcagtatatgccaa

SEQ ID NO: 241810 - DNA, 1190 bp, Homo Sapiens
ttggctgtgatacaattgctgattttattctattattgtgtacatgtacacaaaatgctgatcgtagcttactagtccgttatatgactagaatgtgaaaaaacactgttctggagtgtaatctgtcatcggttttgttctctattttatctccaacctctagtctagggtagatgctcaacacatgtttgattttgaacaaaagatacaggttagaggcagtggaaaagttgaagatgttatgcttatcagatttacttaatgaatttaaacctcaacccctcattagctgtaatggccttgagcgtgttaacttctgtattttcatctttgaaagggggaattatacctacccttgcagaggggacaagtttgcagtacagcacctaagcagctcttcaacaaatgtaggttcccttctactactatccatatttatggtgccaggcacttgggagttgccctagacatccacctttcttcacattccacacaactttgttgcttcccttgtcttaaaaaaggttctggaggaaaattcttggttctccccttccccaccctcagccatgactattgtgaaaaggttccttttccgaggattaaattcaaacttctgcttggctcatgtggtctcatgcccaccccagcccatctttctagattcagtcatgctactctcctgctacaaggaaccctcctcattccttatctctgctgcctccagtatctggcccttgctctctgccaggcaaattctactcttgtatgatccaacccacatgtcaccaccttagctttccagggctctcttctcccttcccaagtattcattcaatttgtgaatgtttattaagctactttttcacgttcagcactgggatagagaaaatgagcaggctcagttctgcctacctggaactcactggcaattaagcatgtattcattctgccctttttgaggatctgctctgaggcaggcacttgggggtattccataaacagtactcacctcaaagttgtttacaggctggtgcctctcccccacctccattttgatcttgcctctttttcagcacgtactctcaatgtactgtaattaattgtggctttctctagctcctgcagacctgaagtgcaagagcctgctctaccttactgatttttagatttctaacttctggggctgg

SEQ ID NO: 241811 - DNA, 987 bp, Homo Sapiens
ttggcaatcagctcccccgggcactggtcaggaagttgtcatccagaagtcagagcagagtgcgcaatattgctagtcgtgccaaggagaaacaggaagccaacaagcagaaagttccaaaccccagcaatggggcaggagtggttcttagaaacaaaccctcagcacccacccctgcagtgaatcgccactccaccggctcctacatcgcaggctacctgaagaacacgaaagggggtggccttgaaggccggggcatcccagagggggcatgcacggctcttcactatggccacgttgaccagttttgttcagataattctgttttgcagactgagccaagcagtgatgataaaccagaaatttattttcttttgagactgtgaattatttaaaactgcattcttaaggttttcaaggtattctgtagaatgtcagagttttcagtaaataagttccttggctttggaatgattttcaaatgtatttttaaacttgtatttgggtctccctttgacttcatgtgttctccctgttaatgcgtttgtatatagatttggtgacatttcccatgtacctattatgatctttctcccttgagttgttgtaaactgtatcagtatgaaatatgtgcatgccctagatgtgaaactcctcagcagctcgggttataatgtgtgtgtgtttcaccaagatgtcctttactgtgtcctcagattgcagtcacaaatgtagtcatttttactctctaactgttgagttgattaagagactttgcaaacgacaaagggatgaattccttactttaatctgttatcatttttcctatgtttccctctttgttcagaagcccagatgcattttataactcagttttaaaaactttaaaatagttaccttgccttttaagatgttcttatcccacccataatgagagttgaaaggggatggatagctgctccccatgcccttcccactttttggaat

SEQ ID NO: 241812 - DNA, 2941 bp, Homo Sapiens
  misc_feature (799)..(861): n is a, c, g, or t
  misc_feature (912)..(1228): n is a, c, g, or t
  misc_feature (1569)..(1820): n is a, c, g, or t
  misc_feature (2271)..(2327): n is a, c, g, or t
atcaaaactcttttactttcttgccctactatagatagcatcagtaatgtttatacagagtagcaccatcggacaaactactttcccttctcccatcatagagtataaggctgtctgtattatggcttaaaacattagcaatgacttaatagttttcaacatacagctgattttgttggagaaaggtgttacagtatagtcttgttaagaactttatgttttactgaggaaaatgtcaacatataatcagtgaaagtggtctacatatgatgtaataattgttcataattctttttaaacaacaaatgggggtaaatatgaatgaaagaagtaaaacacatctggaacctcgcgttgttcagggtttttgaggcaattcagagctaactgcaagattatgctatgaaactgaagccatttctatatcatagtgagaattctaatgtaccagaaacaggcagaaagccatcttcagagaatgaagactcaaagataaacaacggcacagcaaactgaagagagaattagaccccagggaaattttcacttttcattagtagagggcagtagaagacactgaacttggggactgaatactggttctgcaggttagtgctgaccctgggcataacagtcaatctttttgaatgacaatttcctcgtctataaattaggtacagtgagatccaccagcttgttttatgactcagagccatgaaaagcgaagataataatgcacttaatatcattttgtacactataaagggctactcttagaaaatgaagatttgataacttnnnnnnnnnnnnnnnnnnnnnnnnnnnnnnnnnnnnnnnnnnnnnnnnnnnnnnnnnnnnnnnaaaatccaggataggtatttattcaatagtagctgctgtaggtctgcttcnnnnnnnnnnnnnnnnnnnnnnnnnnnnnnnnnnnnnnnnnnnnnnnnnnnnnnnnnnnnnnnnnnnnnnnnnnnnnnnnnnnnnnnnnnnnnnnnnnnnnnnnnnnnnnnnnnnnnnnnnnnnnnnnnnnnnnnnnnnnnnnnnnnnnnnnnnnnnnnnnnnnnnnnnnnnnnnnnnnnnnnnnnnnnnnnnnnnnnnnnnnnnnnnnnnnnnnnnnnnnnnnnnnnnnnnnnnnnnnnnnnnnnnnnnnnnnnnnnnnnnnnnnnnnnnnnnnnnnnnnnnnnnnnnnnnnnnnnnnnnnnnnnnnnnnnnnnnnaaatgggaaaatgtagactggtttactactttatcttatgatacaatgttattgtagtataatatactatagactacccattaaagaaccaggaaggatattccgctagccttaagaagtaaatattgaatataaatataactttctacctcatctataacatattgatacattttattacaaagaaactcacacataaatgatttgtcctatttatcataataggccaccaatcactaggagccaagcttcatcagcttaagtcctaggtagcatgtctcaatgcatacatatttatatgttattaaccgtgtttcttttctttttttcgagacagagtnnnnnnnnnnnnnnnnnnnnnnnnnnnnnnnnnnnnnnnnnnnnnnnnnnnnnnnnnnnnnnnnnnnnnnnnnnnnnnnnnnnnnnnnnnnnnnnnnnnnnnnnnnnnnnnnnnnnnnnnnnnnnnnnnnnnnnnnnnnnnnnnnnnnnnnnnnnnnnnnnnnnnnnnnnnnnnnnnnnnnnnnnnnnnnnnnnnnnnnnnnnnnnnnnnnnnnnnnnnnnnnnnnnnnnnnnnnnnnnnnnnnnnnnnnnnttaaccttgtttctaacttcagcattgcacatctccttagtaaagcagtagccattaacaagtcaggtccaacaaccattttcctctggtcctcaagcagagactcagagccagttacacataaactatttcattataacatgaaaatagcaagccttgggctattgcaaaaggcttttcaaatgttgacctctaacttggagaaaatagagggaagcagaaatatagggtgctaatttgtgctataacctggtctcatgtcgtggtatattcccagttgcaacattttaaatttataagtgagaaagtaaaacaaagcttcatatctgtgaaagtgaaaaattgtccagaagtcttctattcaaagaccaattagctttttcttcccaataacttatcagaaagaaatgggtacttagaaacctaaggggttctttaaataggagtcagnnnnnnnnnnnnnnnnnnnnnnnnnnnnnnnnnnnnnnnnnnnnnnnnnnnnnnnnngttctttaaagatgactgccctctcttgaaagatgagtgctatattaaaagggtagatgtatctctataactcatcgtgtttatatgtaaattctctggcagatataaacccatctttgtcttcatcttctttatcaaaaatatcctccaccaaagcatcatgatgactttcattcaccaccgcaccatgtttttcaaactccttctttaaatatgctttaacctcatctttagagagtttccagtcatcattaagatccatttcttggaatgattcatgggatcttggtccatttcgaatctccaggagatcaatattaaatatcagtgtactttctgggggaattttaccttttccttcttttccatagcccagagcaggaggaatgatgagctttctcttctctcctacacacattcctttcaagccctggtcccaacctttgagagcctccaggatgcccagggtaaaccaaatgggctgaccattgttatgtttgtgagtggagtgaaataaggagccgtccttttctaaatagccttcatagtggaccaacatcaaatcccctcctttggtcttgcgatggcagatgaatggcttctggagaacccaa

SEQ ID NO: 241813 - DNA, 1558 bp, Homo Sapiens
  misc_feature (1441)..(1472): n is a, c, g, or t
tgggtcaaaaatactgtggagaacccatgtatctctttgagaaaactggctacactctgtttatacttgtgtataatatgaatctgttggaatttagaattttgcaattctaaactgtatcagcaagtggtttttgcatctaatcctgtctcagttatggttgctttgggaaagagaaacaatgccgctattaaaaaaataaggctgtcgtattttgagctatttaaatacggaagcttctttacttaggaactttctatttagatttactgataagaacaagcctaaatactggagcaaaagcctgtccctaacagatcatactcccagtggctgcttaatgccaccttggatttataaacaagaggttttacatacagctttttggatcctaacctggttggaaggagaggtgcttctgtaagttgttcaggcagttgagcagggcctcagccgccttttcagcacctctgggcaaattagaaaaaggtgcctctgacgggcaaatacaatctcccaggattgaagaggggcgtatgcattggatttcagcccttttccctccccacgtgtcagcttccttagcttagagtccacatgtagggtataacctctttgcctagcatttaacatgaaaaatgcataaacaggtctctttccagccattctggtttccaggtagcaaacggctgtcaaacaatctcatcagcaagcagaggttagttactaatttcacaattgttcggtaaaaggagcccaatagcatcaagctagaagagtgtgagagaaatccagggattcttgtcagaaacaattagaagacataatagaaaagagcaaagtcatgtggcttcacttcatgactaaccagttcttcttgacttaagggtgggactagttctaccttcttcttattttgattcacgaaggccacacatgaagctaagctaagcaagcctggttcgcttcatggcaagaagagccatgagtgttttactggtgagcatcataaactgagaagccaggttttaagatccagacaccagattgaataagccaatgtgctttggcttaaggcttcctgtggaagcaaatgagcttccagagagggggcaaagtaacagccctctggaagggtgcaagcacccaaggagcttcaaaaataaccataagagctggccaggagactagcacttcttaattatagactgtaatttaggaaggcaaagttaatgcaagtaaagtcatgtgagatgtacagagactttggtctctttttgacctccaaattgggattttgcccccaaagttaggtataattgtaaattatggagcaacactttgataatgagctcataggcactgcagctgttaacagttaacatgtacgccacaaaaggaaggggaaaatgtagaggacaagaaattcacacacgcgcgnnnnnnnnnnnnnnnnnnnnnnnnnnnnnnnngccataaacataaaaaagatccaatcacagtagtgataaagaaattctgttacttttagtccataaaattggaaaagatgttccaa

SEQ ID NO: 241814 - DNA, 1476 bp, Homo Sapiens
acaaaaaagttggagctgtgagaccccactggcttttgccagcatcccaggctgcacagttatgactgacctgaaggatgcaaaggctccacctggttgtctcaccccagagagaattccagaggtccatcacatttcccaagatcctctgcactacagcatcgcgtcagtctctgcttctcagaagatcagagaactagagtctatgatcggcatagacccagggaaccgggggattgggcacctgctctgtaaagatgagctgctgaaggcctctctctcgctgtcccatgcccgctcagtgctcatcaccactgggttccccacacatttcaatcatgagcctccagaagagacagatggcccaccaggagctgttgctctggttgccttcctgcaggccttggagaaggaggtcgccataatcgttgaccagagagcctggaacttgcaccagaagattgttgaagatgctgttgagcaaggaagtgttatcaggcatgagctggaagcctggtgaatctcacctgcctcccgctaccgatcgctctgtgtccctcaaaatgcattcttcagaggtgttctgaagacgcagatcccgatattaacttaccaaggtggatcagtggaagctgctcaggcattcctgtgcaaaaatggggacccgcagacacctagatttgaccacctggtggccatagagcgtgccggaagagctgctgatggcaattactacaatgcaaggaagatgaacatcaagcacttggttgaccccattgacgatctttttcttgctgcgaagaagattcctggaatctcatcaactggagtcggtgatggaggcaacgagcttgggatgggtaaagtcaaggaggctgtgaggaggcacatacggcacggggatgtcatcgcctgcgacgtggaggctgactttgccgtcattgctggtgtttctaactggggaggctatgccctggcctgcgcactctacatcctgtactcatgtgctgtccacagtcagtacctgaggaaagcagtcggaccctccagggcacctggagatcaggcctggactcaggccctcccgtcggtcattaaggaagaaaaaatgctgggcatcttggtgcagcacaaagtccggagtggcgtcacgggcatcgtgggcatggaggtggatgggctgcccttccacaacacccacgccgagatgatccagaagctggtggacgtcaccacggcacaggtgtaaccgtccatgttccgtgtgagcagagtccctaccaacggggcaggtctgcatccggggagaatgcagctgcttctggcgacaatcctgctagtaaacactggtcttcagtgagcaacgaacactcgcctggcctgagaaactgcatgcccactttctgggaaggggtaagtgcaggtgccgtggacaaaggacaacatttctctggggccttttaacttttattccta

SEQ ID NO: 241815 - DNA, 1228 bp, Homo Sapiens
tttaatcctctgacacctggacgtccagggacacccactaatccaggaacaccatctcttcctggcaaaccaggtaatcctctgggaccctctgggcctatcggaccaggtggcccaggaatacccggggagccatgttgggacaggcaatgatcacaatttctaattcttccactctgaagtaagactggtagctgggctcttattacatctgtgcaaacttgtcgaataaattgttctgaaaactctcttccgggcttcccatccaaacctgggggtccctgaggacctggatccccaggttgccccttaggacctgcgggccccatcaagccatccaccccagattctccttttgatccaatggcacctcggacaccaggttctcccttttcacctctctctccttttgcaccatgatggccttgaattccctgttgccctggaattccctgtcttccattttctcccttttgaccctgaatacctttttcaccttgatttcctttgtccccctacaaaaaggcagtttgatctgtatcataatctagcatattctgtacagtttcaaataaacatatatttttctctgctgaagaaaaacaacatctcgtgcaaactccacaagtgcctgtatacacagaagttgactcctaacacaatacttgggaagggagcagaaccacattatgtcaaaatgatattgtaaaagaacacttttgtatgctcctacatttgaaagaaatttcaccacaatctttaatttcccagaaaggagaaaacttctacatggttcacagttttaggttagacaaactaacaagagaggacttattttgacaaatgttgttttatgaaatcaaactgaaaatcttccattaagctattagtagccacaagtttataggaaacaatgataaagtaaagcataacgtttaagtgctattttagaaaacatatatttcaaaagtgagcttttggaagaaaaattatattccataaaaataagttttatagattatcagctagaagggaaattagaaaccaacttatacaatgcccttgtttttatagataatgaaacagccagttaagcacctgcccaaagctaaacttggacacggtttccaaatttcctttctattaatacttcaccgtactatctaaacatagagtacagttttgcatttcaacaaaaaaatacagattttcttttaaatggcaccaa

SEQ ID NO: 241816 - DNA, 921 bp, Homo Sapiens
ctttgtacaaaaaagttggctcagaattgttttgctctcattccaaaagctccaaaaaaagacgttattaaaatgctggtgaatgataacaaggtgcttcgttatttggctgtactggaatcccccatcccagaagacaaagaccgcagatttgtcttctcttactttctagctaccgacatgatcagtatctttgagcctcctgttcgcaattctggtatcattgggggcaagtaccttggcaggactaaagttgttaaaccatactctacagtggacaaccctgtctactatggccccagtgacttcttcattggtgctgtgattgaagtgtttggtcaccggttcatcatccttgatacagacgagtatgttttgaaatacatggagagcaacgctgcccagtattcaccagaagcactcgcgtcaattcagaaccatgtccgaaagcgagaagcgcctgctccagaagcagaaagcaagcaaactgaaaaggatccaggcgtgcaggaattggaagcattaatagacacaattcagaagcaactgaaagatcactcatgcaaagacaacattcgtgaggcatttcaaatttatgacaaggaagcttcaggatatgtggacagagacatgttctttaaaatctgtgaatcgcttaacgtcccagtggatgactccttggttaaggagttactcaggatgtgctctcatggagaaggcaaaattaactactataactttgttcgtgctttctcaaactgacctgctgatgagaaaatgcaagacaatttttgatactggaactatgctttgaaatacaccttacactcttcatagaggcatttacagggttcctgaagttttatttctgttttggttcttatttcactcctactgaagtcgaaactaaattggatctaa

SEQ ID NO: 241817 - DNA, 1535 bp, Homo Sapiens
actttgtacaaaaaagttgggtcagattgcctcgagtactggcatggtaccctctcgaagctgctgggaagcctgtatgctctgggcatccccaaggcctccaaggagctgcagtcggtggagcaggaggtccgctggcgcatgcggaagctcaagtacaagcacctggccttcctggcagagtcctgtgccaccctctcacaggagcagcactcgcaggagctgctggctgagctgctcacacacctggaaaggcgttggacagaaattgaagattcccacacattagtgaccgtcatgatgaaggtgggacacctctcggagccactaatgaaccgcctggaagacaagtgcctggagttggtggagcactttggccccaatgagctgcggaaggtgctggtgatgctggcagctcagagccggcggtccgtgcccttgctgcgggccatctcctaccacctggtgcagaagcccttctctctgacgaaagatgtgctcttggacgtggcctatgcctatggcaaactcagctttcaccagacccaggtgtcccagcgcctggccaccgacctgctatccctcatgcccagcctgacttctggtgaggtggcccactgtgccaagtccttcgccttactcaagtggctcaccctgcccctgtttgaggcctttgcccaccacgtcctgaacagagcgcaggacatcaccctgccccacctgtgcagcgtacttctggcttttgcgcgtctgaacttccatccagaccaagaggatcagttcttcagcctggtacatgagaagctggggtcagagctgccaggcctggagccagccctgcaggtggacctggtgtgggccctgtgtgtgctgcagcaggcacgggaagcagagctgcaagccgtcctccaccctgaatttcacatccaatttctagggggcaagtctcagaaggatcagaacaccttccagaagctgctccacatcaacgccactgccctgctggagtaccccgagtactcgggtccccttctgcctgcctcggctgtggcccctgggccctcagcccttgacaggaaggtgacccccctgcaaaaggagctgcaggagacgctgaaggggctgctggggagcgccgacaagggcagcctcgaggtggccacgcagtatggctgggtgctggatgctgaggtgctgctggacagtgacggcgagtttctgcccgtaagggactttgtggcacctcaccttgcccagccaactgggagccagtcaccacctccagggtctaagaggctagcgttcttgcggtgggagttccccaacttcaacagccgaagcaaggacttgctgggtcgctttgttctgggcccggcgacacatagtggctgcaggcttcctgatagtggacgtcccattctatgagtggctggaactcaagtctgaatggcagaaaggcgcctacctcaaggacaagatgcgcaaagcggtggctgaggagctggccaagtgacttgtgccagcagcatggactg

SEQ ID NO: 241818 - DNA, 945 bp, Homo Sapiens
gccaactttgtacaaaaaagttgggttagggcgggggatggaggtcagcggtggtgctcgctgcggtttggaatcacttgctaggagtcttgtctctctgccacccaggacatcatggcagctcacctggtaaagcgatgcacgtgcctcctgagagaagctgctcgtcaggcccctgccatggctccagttggccgactgagacttgcctgggtagcccataagactctgacttcctcagccacctcacccatttcccacctcccaggttccttgatggagccggtggagaaggaacgagcatctactccctacatagagaagcaggtggaccacctcatcaagaaggccacaaggccagaggagctcctggagctacttggtggcagtcacgacttggacagcaatcaagcagcaatggtacttatccggctctctcacttgctgtctgagaagccagaagataaaggcttgctcatacaggatgcccactttcatcaacttctctgtctgctcaacagtcagattgcctcggtctggcatggtaccctctcgaagctgctgggaagcctgtatgctctgggcatccccaaggcctccaaggagctgcagtcggtggagcaggaggtccgctggcgcatgcggaagctcaagtacaagcacctggccttcctggcagagtcctgtgccaccctctcacaggagcagcactcgcaggagctgctggctgaactgctcacacacctggaaaggcgttggacagaaattgaagattcccacacattagtgaccgtcatgatgaaggtgggacacctctcggagccactaatgaaccgcctggaaacaagtgcctggagttggtggagcacttttggccccaatgagctgcggaagtgctggtgatgctggcagctcagagccggcggtccgtgcccttgctgcggg

SEQ ID NO: 241819 - DNA, 1192 bp, Homo Sapiens
  misc_feature (196)..(205): n is a, c, g, or t
  misc_feature (847)..(861): n is a, c, g, or t
ttggcaaacattgatactgaaaaaacccccaaaaagtctcgtgtgaggttcagtaatatcatggagattcgacagcttccgtcaagtcatgcattggaagcaaagttgtctcgcatgtcatatcctgtgaaagaacaagaatccatactgaaaactgtggggaaacttactgcaactcaagtagcgaaaattagcnnnnnnnnnngctttgtgtggtttttggcaaatttgtcatatcaagaagcactttcagacacacaagttgctatagttaatattttatcttcaacttccggactttttaccttaatccttgctgcagtatttccaagtaacagtggagatagatttaccctttctaaactattagctgtaattttaagcattggaggcgttgtactggtaaacctggcagggtctgaaaaacctgctggaagagacacagtaggttccatttggtctcttgctggagccatgctctatgctgtctatattgttatgattaagagaaaagtagatagagaagacaagttggatattccaatgttctttggttttgtaggtttgtttaatctgctgctcttatggccaggtttctttttacttcattatactggatttgaggacttcgagtttcccaataaagtagtattaatgtgcattatcattaatggccttattggaacagtactctcagagttcctgtggttgtggggctgctttcttacctcatcattgataggcacacttgcactaagccttacaatacctctgtccataatagctgacatgtgtatgcaaaaggtgcagttttcttggttattttttgcaggagctatccctgtannnnnnnnnnnnnnnattgtaactctcctatgccattataataattgggatcctgtgatggtgggaatcagaagaatatttgcttttatatgcagaaaacatcgaattcagagagttccagaagacagcgaacagtgtgagagtctcatttctatgcacagtgtttctcaggaggatggagctagttagctgtctgttgtctgtagcccagcttgataatggaactatacagcgaagagacaatctctggcaagtttttgtagaaaaaatgtttcagtgcctagtctgaaaaataacagtttgagttctttgaaactctaaaatatattttttctcatacctgttt

SEQ ID NO: 241820 - DNA, 1333 bp, Homo Sapiens
  misc_feature (520)..(536): n is a, c, g, or t
gggattagtttccacaagtacaaagttgaatttccttttatttgtcctaaaatgcttactttcaaacttgaagggacttcaattattccatgtagttttcgataacattcttttatcttttcagaccagagtcaaaatattcgtacagtattcatactgcagcaccttccacccaccctttgggtcgcttgaactgcccttctttggttctttttccgctttcagatctttcttgaagtgtagtaagcagaactgtactgggtattccagctgcagtttggtcttaaataaaagaaggatgtttgtcagtttggttttctttattcttctctgtggtatacaggattttgttagttgaactggatgtagcagcttactgggccaaattttcaagagaataatacaatagttcccaggtctttcccctgggttgtaacttaacagctcatactctatgtagcacctttcctctctcactgaagcattatctctcatttttcttcttgcttacttggcttcnnnnnnnnnnnnnnnnntgcagagagatcttaagtaaaaggagaggtgaagtgtgtcagccctcatttgagtgttgatataaccattctatttatcattgagcccagtcatacacagtaggtaaactcagtaagtgggggactcaactacatcacccaaaactaacataaaacactatgtaaagatcctcatcaagtatcagtaggatccaaactaccatgggttcaactgtaatatagtccttttgaagctgttaggtgtgtcgctttaggaacaacatataagattctcaatagtccaagtctaaaaataagttgacacaagtaaaaataaaaatgaaattaggccttctagttctatacagaaaatgaacaatttcaatgagctatctcctcaatctacttctctcaaattatagtctgtaaaacaaacaaaacccccccaaaactaagggaccaggcctgggcttaaatcctggctctgccttacagtcttttctttgtgcctcagtttccttatctgtgatatggggaaaataaaagtatctttctcataaggttttgtgaagagtaagtgagttaacacatagccttttcaagtgtctggcacatcatgaatacttaataaattagctataattgtcataaagtagatagaattcaaaccacaaaatacctaacctacttccccaaagaggttatcacttaatattagttgctcatcaacattcaatttaaaatgatttaaaatcatgtcataaacgttaagccctaatgcgtcttgtttacaagagggagagcagaattactgccaa

SEQ ID NO: 241821 - DNA, 2211 bp, Homo Sapiens
  misc_feature (1948)..(1964): n is a, c, g, or t
tttgactctaagtaaattctagatcccattatatcaatgtactatctccatgaaaataaagctataaaaacacttccccattggattaaacaacaaacatggtaacaaaagatgaaacaagtgaaaaattatgggctgtaactaggatctgacacttgctgtgtgatcttgggcaagttcaaacaaaatttctaaaataaaatacaaacaataatacctccatttcacacctcccttgaaaatatacctctgctatattttcaaaattgctacaaattaaaagcttaaattccacttccagatttttagttaattttatatggaaagttttaagtatgtggcaaaaaagacgacaaaaatcaaatgtgatgaaatcaatgtataggtaaagaaacatcatatcctaataagaaactaaggaatccaaaacattttgtgatactataaaagttatttattcgctatacacagaacatgtcccctataaaatgtacatgtaaatcactaaaaagtataatttggtgaacattttctcaattacagaacatactaaatcagttaggataacagctctctgtctgcctcaaaataatctaattatagcacccagtctcctttatacctaatgcaaagttaaatacttattttgggggttatatcctagcatgtgtttggtgaggcagagtaaacaatttattataactctagtatattacagtcactgcacaataaaccagtttattacagattaaatcattttttcattatttataataatgtgatcaaatactggatacttttaaatggcagataaccacacaattacttatccttgatcgtatattgtgttctataattacattgatacgaatggtgtaaaatattgttatgaataacacacctcaaacaaaacaatgaggccatactgtaatgattcactagattgtgctcagtagacatttactgaataagggaattatctatttttctcaattatccagtacaatgatttgcccacagtaagggctcaataaatatttgctgaatatactgactaggaaagaggtgagaagagatgggccctcttagctggatgtcaaatataattagaatttacctgggaaggagtagttaagacagatgtaaactgcatgtggtgtacaagtaaataaacacagatgccaacaaagcaaatgattaagcagaaaacactggcaccaaaataaacaaaggcaagatttgccaataatggcaaaaatggaacttttatattggaccataccttttcccacccaattcagtttgagacagaccaacagaggcactgtaagagactatggctgtcttccttgatattcagacatcctagtttccaataatttattatggacctgttacccatgaatcaatataaacctattcatatttagggattagtttccacaagtacaaagttgaatttccttttatttgtcctaaaatgcttactttcaaacttgaagggacttcaattattccatgtagttttcgataacattcttttatcttttcagaccagagtcaaaatattcgtacagtattcatactgcagcaccttccacccaccctttggtcgcttgaactgcccttctttggttctttttccgctttcagatctttcttgaagtgtagtaagcagaactgtactgggtattccagctgcagtttggtcttaaataaaagaaggatgtttgtcagtttggttttctttattcttctctgtggtatacaggattttgttagttgaactggatgtagcagcttactgggccaaattttcaagagaataatacaatagttcccaggtctttcccctgggatgtaacttaacagctcatactctatgtagcacctttcctctctcactgaagcattatctctcatttttcttcttgcttacttggcttcnnnnnnnnnnnnnnnnntgcagagagatcttaagtaaaaggagaggtgaagtgtgtcagccctcatttgagtgttgatataaccattctatttatcattgagcccagtcatacacagtaggtaaactcagtaagtggaggactcaactacatcacccaaaactaacataaaacactacgtaaagatcctcatcaagtatcagtaggatccaaactaccatgggttcaactgtaatatagtccttttgaaggggttaggtgccaa

SEQ ID NO: 241822 - DNA, 1230 bp, Homo Sapiens
gtacaaaaaagttggttcatccctcctcttaacacagaacagctgtggtgcaagctgtctttgggcgacagcgtgccatcatgctgctggagggccagaaggtgatcccacagcgaacactggccactggctaccagtattccttcccagagctaggggctgccttaaaggaaattgtagcctaagtaggtcgtggcaagggcctgaggcctgttcctcacaggcttccaggttaggcactgtgaataggctcagctcctctagagagctgaagccatctggttcttagattcctctcccagtcctctttcccattgttctgttgctccaccttattgtctcaaggccgtaatctcatcaggttgggacattaatcttttcaactccttgtaagatttcccagtttggtttctctacatgtcctgcagctgccccacttctcctttacgctgtgtagagaatgctctgcagtttaggcaataaaaataaattgtctcactaaccttggctcatctctttggcctagattctcctgggatttacttcaaggaatgtcaccctagatgattcttccccaaagacggggttttgaaagttataatgggcagtctctctcatcaccgtttcccttcttggtccttcagttgccaaaagaacttgtcacaagtttgggacatcaggttatgataaagatagacactagaagagagaatgatgatccatttccaatgggccctgtagtcaccctggatgctgtcagagtgccattaggatgccagtagaggaagaggtaaggcccaggtgtaggatagccttcagtctgtgtcaccaaatggcaagtgcattactaaccacacagtggtcccagtttatcaggctgcagcagaacaaagtcaacatccctgtctataagaagcttaggacttgcctctcatctgactggggccactcagtcaaccagggcccttagcacaaaagggcagaagacacttttggtctactgcacacccaccatcactgaaagtgaaaatggcaagaaaccaatcaagaagtataaacaaccctatcaggaaaaaaagaaactccaaggttttcatctaggaccctttttacctacctaaagctgtgacatctgccataacttgaccagacacagttcccccagccaccagttcaggccatactaaccaatctcttctcagggaccgctgggttatctcttaatcccaa

SEQ ID NO: 241823 - DNA, 1032 bp, Homo Sapiens
ttggctcccaggttactacagtgcagggctggaggccattcagctggacggggagatcttttttgcactcctgcgccgggcctccccgctggcgcatcgccacctgcggcggcagcgcattgaccctgtgctctacatgacggagtggttcatgtgcatcttcgcccgcaccctgccctgggcgtcggtgctgcgtgtctgggacatgtttttctgtgaaggggttaagatcatcttccgggtggccctggtcctgctgcgccacacgctgggctcagtggagaagctgcgctcctgccaaggcatgtatgagaccatggagcagctgcgtaacctgccccagcagtgcatgcaggaagacttcctggtgcatgaggtgaccaatctgccggtgacagaagcactgattgagcgggagaatgcagcccagctcaagaagtggcgggaaacgcggggggagctgcagtatcggccctcacggcgactgcatgggtcccgggccatccacgaggagcgccggcggcaacagccacccctgggcccctcctccagcctcctcagcctccctggcctcaagagccgaggctcccgggcagctggaggggccccgtccccgccgccccccgtccgcagagccagtgctgggcctgccccagggcctgtggtcactgctgagggactgcatccatcccttccctcacccactggcaatagcacccccttgggttccagcaaggagacccggaagcaggagaaggagcggcagaaacaggagaaggagcggcagaaacaggagaaggagcgggagaaggagcggcagaagcaggagaaagagcgagagaagcaggaaaaggagcgagagaagcatgagaaggagcggcagagcaggagaagaaagctcaaggccggaagctttcgctgcgtcgaaaggcagatgggcccccaggcccccatgatggtggggacaggccctcagccgaggcccggcaggacgcttacttctgacctctgccctggggctggactgcatgg

SEQ ID NO: 241824 - DNA, 950 bp, Homo Sapiens
taaaatcactttccaatatgcttgacagaaacaagctatcattttcatttgtgttccactgaagacattactgaaatctgtccaatggtttatttccaagtggtccactatggaattcttcggaatgttttaagattggctgtagctagagttctgacttccatttggaccgtgctctccttcactgtttggaggtggttttggttttggcatcttactaagaatggttgccatctcttttctctcatcgaaattcttccactgctcatatagttttaaaataaccctgattatttccaaaatcttttccatatccacagaaagctcagcaaaccattgcctggcatctttctgctgtacaacacaggctacatgtaggcaagctgaaatgaaaatgagagacaactgtccatgtttaactgcaaacacagaatatatgatctaacaaagatttttcactatttcctgtgtattttccaacactctttaaaaaacattaaacagctacatatgagagttaccactgaccatctcatcaatgtaatccgagacagaaaaaattactagattacatcaagttcttgacatctggtcctcactgcgtgctagtcatggtgcagttgccttgagagtcaggcacgttaaagaggaaaaacatccaatgaggagagcagaaaagggaagttatccctgagtagtgtacaaagtagccgttaaactgcacccagaagtcagtgtgacaaaacaaaacaaacaaaaatgttaattaatatactaggttttaacaatgttgactatgtttccacatttcagttaaaagcagtgttgcctggccttttttcttccttttcattattagcacatgatcaagttatgtgaaagctgggcacatccttacagaattcagtgttgtaatcaaataaaggttagaaaataaatgtaatatccaa

SEQ ID NO: 241825 - DNA, 1486 bp, Homo Sapiens
cataaaaagaactttgtacaaaaaagttgggttttatactaggaagtcaacatttaataagccatcatccacaattgattaaaaatgtttaatccttaaattgtgcatcaatatcctatgactccaaattttatttatcactctccttcaagtctgaagaaaatgattaatttgctaagttccacagacagtacagtcccactgacataacatttagtatgatgtcctactctcatattagaattaaggacagccagtatcaaactggcctgaaacctgattgtgttcctggttcagaatacctgtagtaaatctgtaaatccacaccaagacacaacattaaactagggtgtgtatatcttataaaaaccttttcacagtaaaaatcaacattaaaattttaccaaattccaacattatggtttttgaatccaattaagctttcaaaatgcctgattagctgtgaattaattataaataacttcatgtagtttgcccagcatttcaaaatggttatggactatcatgtttaaaatgtcaaagtatgctatacatattgcacttttctgctaggctgggctagtatcttccatggcaagatcctcaaactactgaataaaatacacttttaaatcaatataggtacttgattaatttccctgaaattatcaacatcattaccaaaatcttccaggattttgtaagatttgattccttaaatacagttttaaagttaaacttatggagggaaaaaaaccctcatagattgactgtaaattttacgtccttttttggtccctcaatgaccaaagagaattttaaacaaattatgcttcatgtttcctggcttaataaaaagctacaatttttattatccaaattaagaaatattatactaatcaaaagctattaattttgaaatgtctatgtatgtctgtctgtaggtccccttagaacctttccaaacatttataatcaagagattttaatcaattatgtactagaatcatattaaagaaaaacttattttgcaaaaataaaatcactttccaatatgcttgacagaaacaagctattcattttcatttgtgttccactgaagacattactgaaatctgtccaatggtttatttccaagtggtccactatggaattcttcggaatgttttaagattggctgtagctagagttctgacttccatttggaccctgctctccttcactgttcaaatggggaagaaagagattttataccaattaaaagatccatttttacaccctgataagcctactgacttttaaattcattattctgtggcacaactatacaaaacaaagacattcctcattataagacacgtgaaaaattaaaatccagaagactaacaaacattggttttatgtttttattcttatataactttgtgccctcacatataacaagcattctggaagttagtgtccatccaacttttttgtacaaagt

SEQ ID NO: 241826 - DNA, 1619 bp, Homo Sapiens
tccctttgaataaaatgatggtgactcccacacgcaggaaagaatcatttacttcatttgctcttgatatactcccttatgaatttagaacaagtgatccaggattagctgtaactctgtgcttgaaaaatattttactactactaagtattcagaaatctttgttatcagtaggtggtggtagtgatagggaagggagctttgatcactaatctctcagactgtggccagaatggtgatgcttaagccaagtattaatggctattaacatactgaggttagggaaggagtactgagaagtgctttgcagcaacactcgcagcttgtgtgatgatgcagaagaaaatctgatcatgttcaccctgctttgacaatgagccttgcccattggagaatgttcaatcaatagtagacctaaaaaaaatcaacttgttgctttcatctttttattgatagcacagccagagctaccaaaatgatttactggattctagcaaattaataaatacagtaatttgattgtaaaaggaaacattctacttggacattttagtagaaattgctagagggaaggagctcctggcgtacattctacttggatagaagagaagatagcacaggaggagaactggacagtccaggtatagattgttgagattagggattcagcagaaagcaaagcaaatgttctcattgttcttttgaggtacgaactctgaagagtcaagacattaaaaataaaaagcaattgaaccgggtagccaaacttaggcaaaaggaataaatatttggcaacattttgactttaactgccaatctgagattagtttcttcagaaatttggaagctgcaaaacgttgcctttcttattccatgaaaggcagggcaggcaaaggtaagaaaactgctgagtgggctccttgtaccagcaccaaccagcagcccttgacagcatagatgggatgagtgtaagggctatccttagcataagggaaagacggttataagctgagaagattgaaagaagaatggagccacaaagagaatagcataaataacaagaaggaaacatgaagaacaagcacttaagatattaactttcagtctttctccatttcttgatgtctaatgaggcaaaataactgggcaaggaccaccaagatgaagaagttaaataaaatgtcacaatgaaattgagtgcaataatacaactgttgactgactttccaaaaccacggtgatcggtagagtatcatcaatgttaccgaggattttgtttctgcctcattataactcacttccatgtattttgtcagtatagtacgtatatttaagcactccagtgacaattatgacaatagtttctggaagaaatctatgactatagctttgggaagcacacaatatgaaaagggaatttcccctaaagacaaggaatgcagacaaattcaaacccttaagaacaacaacaaaaaagatttaaaaagactgatgactgtgaggcaggcacattttcctccttttgctgaactggggcatgaggcatttaggttaaccatggcttaactggtgttgggtaagctttatattataaaacatccaacttttttgtacaaagt

SEQ ID NO: 241827 - DNA, 932 bp, Homo Sapiens
gataattgcagcagtcactgttctactaaccgcaggctcttgcttgccagtgcacatgctaccctggtgaacataaatttagtgcgtaccatacccattctgtcagactcttcccttcagaacacagcacactgttgttcaccactctgtgcctttacttttaattccctcctatccaattttagcccatccttcaagaggctgtatttgccagtgccctcaagaagccttaccgtcagccctccctcatctcccactctgacaaacccatacggtactcacacaattgggcaagtcattgtctggcactgtttcagttcagttcagttcggcacatacttaagagttagctatagtgttctcaatcatgtttttaagttctttgaggataggcacattttcttattgcagagtaccctgcaagatgttgagcaccttgacaggtgttcaaaaactgatgaactctgcaagtctgtgtgtgagattcagggatttcatctgggtgactaaacagaccattaccaaactggctgagaaggctattgtcttggatgataagatcagaattcaaaacaacctcaacaaattttaagtgaaatggtaacagaaaaaagcatacaacatggagatcaatagactacaaagaagaaaaacaagttctacaaaaatcaagtacaagaataatcaactaggtataaaggcattggggaaagctatcagagtcctggaagttaccaggtgaacaaaaaaatataacaggttgggctatactgatacaagacattgcaagattctgaagtaaaattcttacttagcttctaacagactttcaggaaaataataaacataatttagttccccacaattaacatgatatttggagaacttaaaggttccaatagagagcaacagaaacttaggtttaaagccaa

SEQ ID NO: 241828 - DNA, 1125 bp, Homo Sapiens
ttgtacaaaaaagttgggtaaataaactgtttatataaaggttttggttgcattattatcattgaaagtgagaggaggcggcctcccagtgcccggccctccccacccacctgcagccccaccgcgggccaggaccaggctctccatctgcttcggatgcacgcaggctgtgaggctctgtcttgccctggatctttgtaaacagggctgtgtacaaagtgctgctgaggtttctgtgctccccgcatcttcgggctgtagagcgctgggcagctaagatctgcataggtcgggattggcatcgagaccctggcaactgcaccggtgccagctgtcttgggggccacaaggccaggtccagaccagggctgggggctgcctgaggactcctatccgggcagcctgctggcgggggttcccctcttcagtggccaggtcacagggatggagctgcgctgtgcatagggtgccacctcaggtgtctgtcccttgtgtcctcaggaggcagccttgctaccacccgtggcaaacgccaggtgctttttctgggagagcccacagccgtggccctccagggcttccccgacccttagcgccaggtggagggccctgggcagcctgtgtatggaattcttcgtcctgaggccgcctgagtgtggtctgtcctggggaggctgtgcgcctcagcagccgtcctgacgctgagccctctgcaaaggttgggccggccaggcctcttggggctgcctgagccactgcaggaagtggcctggctgggaagttgggtgccggtcacctcccagcaggaaggcacagtggacagagatgggaagccctgggggacacagcccggtgctcccagccctccaacctctggctcccaacccagtctccccatcctggcgagcttggccctcctcagtttcgtttcaagccttggggctggagctggccctgctgccctggcaccccccggtggctggagctgggtccccgtggcccaagtgcagggtcccaagagggcaggggcggggctcccccaaggagcaaagaatgcagggagggcggtccaggcccctgggaaagggagctcggcacccttcaagtccgtgtgggaccccagcc

SEQ ID NO: 241829 - DNA, 1562 bp, Homo Sapiens
ttggctgggcgggagtgagaggagccgcggggtgacagtggccttgaagcttacccacccgtacaacaagctctggagcctgggccaggacgacatggccatccccagcaagcccccagctgcctcccctgagaagccctcggccctgctcgggaactccctggccctgcctcgaaggccccagaaccgggacagcatcctgaaccccagtgacaaggaggaggtgcccacccctactctgggcagcatcaccatcccccggccccaaggcaggaagaccccagagctgggcatcgtgcctccaccgcccattccccgcccggccaagctccaggctgccggcgccgcacttggtgacgtctcagagcggctgcagacggatcgggacaggcgagctgccctgagtccagggctcctgcctggtgttgtcccccaaggccccactgaactgctccagccgctcagccctggccccggggctgcaggcacgagcagtgacgccctgctcgccctcctggacccgctcagcacagcctggtcaggcagcaccctcccgtcacgccccgccaccccgaatgtagccaccccattcaccccccaattcagcttcccccctgcagggacacccaccccattcccacagccaccactcaacccctttgtcccatccatgccagcagccccacccaccctgcccctggtctccacaccagccgggcctttcggggcccctccagcttccctggggccggcttttgcgtccggcctcctgctgtccagtgctggcttctgtgcccctcacaggtctcagcccaacctctccgccctctccatgcccaacctctttggccagatgcccatgggcacccacacgagccccctacagccgctgggtcccccagcagttgccccgtcgaggatccgaacgttgcccctggcccgctcaagtgccagggctgctgagaccaagcaggggctggccctgaggcctggagaccccccgcttctgcctcccaggccccctcaaggcctggagccaacactgcagccctctgctcctcaacaggccagagacccctttgaggatttgttacagaaaaccaagcaagacgtgagcccgagtccggccctggccccggccccagactcggtggagcagctcaggaagcagtgggagaccttcgagtgagccgggccctgagggtgggggatgcaccgaggcccgagggtccgtccactgctgcggttccgaggctcccccgccactctctctctgcccaggttctgctggtgggaagggatgggacccctctctgctgccccctcctcccctccacactgcccatctctgatgtctggccctggggaatggcaccagttccagcctgggaatcaacccagttcctgagtgcccatcccaccccgcggttgcctctcctcggcacccttgattgggttttgcactaaagaggtcagctgggccaatgatattgctccagacccgagtcctacccaccttcccccggaagtgtcccaagaggctccgaaagcctcccctccga

SEQ ID NO: 241830 - DNA, 973 bp, Homo Sapiens
ttgggcgcgttgttgcttaacgaagcagagtcctacacactgtctgctgctctcctgatcatggcttctccgagttctttcacctactattgccctccatcttcctcccccgtctggtcagagccgctgtacagtctgaggcccgagcacgcgcgagagcggttgcaggacgactcggtggaaacagtcacgtccatagaacaggcaaaagtagaagaaaagatccaagaggtcttcagttcttacaagttcaaccaccttgtaccaaggcttgttttgcagagggagaagcacttccattatctgaaaagaggccttcgacaactgacagatgcctatgagtgtctggatgccagccgcccatggctctgctattggatcctgcacagcttggaactgctagatgaacccatcccccagatagtggctacagatgtgtgtcagttcctggagctgtgtcagagcccagaaggtggctttggaggaggacccggtcagtatccacaccttgcacccacatatgcagcagtcaatgcattgtgcatcattggcaccgaggaggcctatgacatcattaacagagagaagcttcttcagtatttgtactccctgaagcaacctgacggctcctttctcatgcatgtcggaggtgaggtggatgtgagaagcgcatactgtgctgcctccgtagcctcgctgaccaacatcatcactccagacctctttgagggcactgctgaatggatagcaaggtgtcagaactgggaaggtggcattggcggggtaccagggatggaagcccatggtggctataccttctgtggcctggccgcgctggtaatcctcaagagggaacgttccttgaacttgaagagcttattacaatgggtgacaagccggcagatgcgaattgaaaggaggattttctaggccgctgcaacaagctggtggatggctgctactccttctggca

SEQ ID NO: 241831 - DNA, 875 bp, Homo Sapiens
ctttgtacaaaaaagttggcacttgtggaacgatcatgtgcctggccaggtttcgaattttctattaaaaggtttgaaaataatttctgtctctagcccacatctcttcttggtgtgacctctgggctcattcatctggctgtctccctgacattcctacttcagcctctctccagcatctccaacctaatgcagctcaaatgggactcgtgagttccccagctgagctccaatcggggcaccagctgcttaagcccaaaatggacattgacctcagcttttatgcatcaaatgtatcaggaagtctccagtttgtttttacgtctggaaatatatctgaaatccatgtgcccaccctaccccctcatagctttctgccaccagacaaatccaaggctcctttgtctgtccccattttactcctgcccctccagaaatttctcctcacggctgttcaaagaaaatctagactcctcagcacagccaacctgtctctccctccctcacccacgtggcctttgaagacatggagccatagaggagaaccaagtgctggatgtgggctttttcatgggcatctgttttgaggagaaaagttgtaaatgtttttgtcttattttcatagcattgggaatggtaccacctcccgaaaatgtcagaatgaattctgttaatttcaagaacattctacagtgggagtcacctgcttttgccgaagggaacctgactttcacagctcagtacctaagttataggatattccaagataaatgcatgaatactaccttgacggaatgtgatttctcaagtctttccaagtatggtgaccacaccttgagagtcaggctgaatttgcagatgagcattcagactgg

SEQ ID NO: 241832 - DNA, 1050 bp, Homo Sapiens
  misc_feature (46)..(76): n is a, c, g, or t
ttggcttaagcgctcctttcacacacgcgcgcgctcgctgggccgnnnnnnnnnnnnnnnnnnnnnnnnnnnnnnnggtccttgctaacgctgccgtcggggaggattgatgtcccttcagcatcatgcagccgccgccgaggaaggtgaaagttacacaagaactgaaaaacattcaagttgagcagatgacaaaacttcaagccaaacatcaagcagaatgtgatttgcttgaagatatgaggacattcagtcagaagaaggctgctattgaaagagagtatgcacagggtatgcagaagttggctagtcaatacctgaagagagattggcctggagtaaaagctgatgatcggaatgattacaggagcatgtatcccgtttggaaatcttttctcgagggaacaatgcaggtagcccagtctcggatgaatatatgtgaaaactataaaaacttcatttctgagcctgcaaggacagtgagaagcttaaaagaacagcaactaaaaaggtgtgtggaccagttgacaaagatccaaactgaattacaagagacagtgaaagatttagctaaaggcaaaaagaaatactttgagactgaacagatggctcatgcagtacgagagaaagctgacatcgaggcaaaatctaaacttagtctttttcaatcaagaatcagtttacagaaggcaagtgtaaagttaaaagcccggcgatctgagtgtaattccaaagctacccacgcaaggaatgattatcttcttaccctagcggcagcaaatgcacatcaggatcgctactatcaaacagatttagttaacattatgaaggctcttgatggaaatgtgtatgatcatctcaaggattatttaatagccttcagccggactgagctagaaacatgccaagctgtgcagaacacattccagtttttattagaaaactccagcaaggtggtccgggactacaatcttcagctgtttttgcaagaaaacgctgtatttcacaaaccccagcccttccagttccagccttgtgacagtgatacta

SEQ ID NO: 241833 - DNA, 1046 bp, Homo Sapiens
  misc_feature (83)..(91): n is a, c, g, or t
  misc_feature (441)..(509): n is a, c, g, or t
  misc_feature (560)..(588): n is a, c, g, or t
ttggatcttttaaatagaaaaaaaaggcctagaaacaatgatcaatgcaacagcaaataagaatctctagaacctaaataccnnnnnnnnngctagactcagccaatttttcaagaaaccctattaccttttaatgtttccttcaatgagatcaagagctaatactttttctttgttcaatttcagagatcaatagctattcaaaagtagcacaccaaaaaggcgacagggtttcctgaaaaattagccagttctaggtgtaatggttagaaatgtacaaattaatcctagaatgacttgtcttaccatatagcaaagaagtcactaaggattaattgatcaaagatgagacaatttgagcatcaataagaaaaataactacaatggactgaaacacataccttttaaatccacagctcattaagaatgggactaaaaagnnnnnnnnnnnnnnnnnnnnnnnnnnnnnnnnnnnnnnnnnnnnnnnnnnnnnnnnnnnnnnnnnnnnnccaggagtttgagcctaacctgatcaacataacaagaccctgtctctattnnnnnnnnnnnnnnnnnnnnnnnnnnnnnccaattttttttaattataaaagctaattctgccagctacttatagtcataaaaggtgaatcaactaattcaacatgttctctttagtagtcaatttttaaaaagcaagtattaatgggtagtttaaacacttctgaatacattaccattgtaaagaacaatgtttaaaatttacttttcaaactaatgcatgcagtttctcccctttgaaaaacctaacagtattatatgtggtttagaacaatgtagataactttaagccaagcaacaaatatttgggcatttgcatggtctatgaaataaaatgttgtagtaactcttgaaaaattaaaaaggactggttttcttaataaaatataagcatttaatcaacataattttttgtgcaagaccaattttgtaaactggtattttatgtaacatatattatactaaacgttcttttgaataacatccaa

SEQ ID NO: 241834 - DNA, 1379 bp, Homo Sapiens
tagaagctattaccgtgatccaggtaagagatgtgaataactacaatgatggaaagaaggcagagttcttagagatgggagtaggagagatgagggaactccagattgggaagatgatgttcaagtttctggcttaggccacagggtgagtggcaattcccttcactgagatggggcatcctggaaaaggtgttgcctttctgtgtgggtatcctgggccccttaggggccactggtggcctgggacctggtaaaccttccctgcacaagcagaattggtcaagcaggtttttaggacatctttaccctgcctcaactcttgtctggcccagggtcaaccggatgcacatcagtcccaacaatcgaaacgccatccaccctggggaccgcatcctggagatcaatgggacccccgtccgcacacttcgagtggaggaggtggaggatgcaattagccagacgagccagacacttcagctgttgattgaacatgaccccgtctcccaacgcctggaccagctgcggctggaggcccggctcgctcctcacatgcagaatgccggacacccccacgccctcagcaccctggacaccaaggagaatctggaggggacactgaggagacgttccctaaggcgcagtaacagtatctccaagtcccctggccccagctccccaaaggagcccctgctgttcagccgtgacatcagccgctcagaatcccttcgttgttccagcagctattcacagcagatcttccggccctgtgacctaatccatggggaggtcctggggaagggcttctttgggcaggctatcaaggtgacacacaaagccacgggcaaagtgatggtcatgaaagagttaattcgatgtgatgaggagacccagaaaacttttctgactgaggtgaaagtgatgcgcagcctggaccaccccaatgtgctcaagttcattggtgtgctgtacaaggataagaagctgaacctgctgacagagtacattgaggggggcacactgaaggactttctgcgcagtatggatccgttcccctggcagcagaaggtcaggtttgccaaaggaatcgcctccggaatggcctatttgcactctatgtgcatcatccaccgggatctgaactcgcacaactgcctcatcaagttggacaagactgtggtggtggcagactttgggctgtcacggctcatagtggaagagaggaaaagggcccccatggagaaggccaccaccaagaaacgcaccttgcgcaagaacgaccgcaagaagcgctacacggtggtgggaaacccctactggatggcccctgagatgctgaacggaaagagctatgatgagacggtggatatcttctcctttgg

SEQ ID NO: 241835 - DNA, 1589 bp, Homo Sapiens
  misc_feature (841)..(869): n is a, c, g, or t
  misc_feature (1439)..(1494): n is a, c, g, or t
aagaactttgtcaacctctgtcttagggcgccttgtcacaggcttcgggtcagacggattcaaccttgcatcagccatttgttagccaggtcactctgttctttgtctgtaaatgagattgatcgttgttcccactgagagtgtcagctccttcccgtagagcaggcatgatgattgtactcacctctgacaccattgtgagtgccacattccttcccacgtccttgtcactgtaagagatgcccacctgagcaccaaccccaggttatcttcccctttgtcttccagccccccagaaacagctacgactcaacctacccaatcatttcatcatcagattgccactgtctctagttcaggtctcttgggactggcactcagaaatctcataataaatcctcttgaggcttctcatacactcatcttcttccaatcttctttccctcaaaatctcatattttggttccacttcacccaccgtcattctccatatcactcccaggagttaggcaaaaagccccttccgttcttccgtatgttaaacttagaatcactctgttccctgctctgcgtttctattttttgtttttcctccatttactagtagcttaacactttctaacagtgttcttattattgatacgtatctatctcttccataagcttataaggtcacggataatacttctcattgtagtacgtaaatgacgtgggctagatatgagttgaataaacagttatacctgtaaattcttacagagtgaaaataaattgttatactttacaatttgtttctctctttagaccatttccaggacttgtgattaataaccgtgagtannnnnnnnnnnnnnnnnnnnnnnnnnnnncctggggtctgacgtgtgtgcgtgtgagtgtgtatacatgcttaacgtatatcacgttacttcacctatgtcagtaaccaggccaaatacttgttttagccctcagtaaaaacaccaggcacttcctagttgtaaaattattcaagcttcttaacttcctatcctcgatgcacttaatcataaaatggtaataatagcaccgattttgggggagtcgttccagtagatggaaagcatctggaacaggtgtcagcaagctcctgccgacgtgtatgcataaagttttattgaaaccaccatcgtgtccatttgtttatggcagaactgagagatggcagcagcaagtgtgtgcctgcaaaacctaaaatatttactaattggctctgcaagaaaagagtttgcatccccctaacctagaacagtgtctagcctctagtatgtgtttagcctacagtatgtgctcagcgaatacaatctatatttattactgcttttatgactgttataattactgtgcttggatttcgttacaaagtaagtcacaatgtgcctgcttctgttagtatttcnnnnnnnnnnnnnnnnnnnnnnnnnnnnnnnnnnnnnnnnnnnnnnnnnnnnnnnngtcctttcaattccttaacgttgatgtcattttcaatagtattttgagccaaacttaattttgcgagtgtgttttgttttcttaactttattatt

SEQ ID NO: 241836 - DNA, 1328 bp, Homo Sapiens
  misc_feature (262)..(281): n is a, c, g, or t
  misc_feature (756)..(774): n is a, c, g, or t
agaggggatattttcctttggtggggagaaggggaaaggggaggaggaaaccaggccctcagattgcacaactgcactgaccaaaccaggtacttctacagacgctcctataatagtcacgtgcacagacaccatcctggtgcatttttctttaaatacatagaaaattattttaagtgtcacgtgcacagtcaatgatctaaaacaagaaaagccctgaggattcagttacaatgagtaagttccagcacaagcgctgccnnnnnnnnnnnnnnnnnnnntgaaggaaagatttgaatacagaagttggtttttcacaatggccagtgcaaatggagagctagcaaaccctcccttgccacctatgattctagaagggattcctcggtcacatcaactaaagtagttaagctactgtaatgatttgaaagtttgttatgagagaattatgctttgtcaagccaactataaggcagctttctacaacagttttgcaaaatgtttccaccacactgagcaaagctgacactagacactagctacacgtgggaataggaagatgggccaggctcagagccgccgcaaaggatgaagtccactcagatttgaggcaatcctggggcaaagcactgagcaaagcaacttttctggtaatctcctcctcagccattctctacccaggatttcagaacacagaacagaagaaactgcaaaagccctgcaggatatatcacagctgttaacattctgactttnnnnnnnnnnnnnnnnnnncaagtaacctttgaaactggctcaaagaaccttctggcatccagccccacaaaccactgactacatagcatcaaactttggacggggtagtctggaagctcaacaaccaggattaatatgtactaactcactcaccctcagtctcacccactggtattaattccagtacccagaagtcaagtgggtttgtgacttaacataaaacacgtttcctgacagcctgtggcccctgggaagcacctgcagcattgtgtagtttgcaagcatgagatccctattccctattccaggagcatgaggaggaaggaacacccaggcttgctcgagtgacaggcaaagtgcctcattaagagaacactggagtgcttacccaccactgccgccacagaagccagagcgggagaggaggggagcgccaagagaaatcacaggcaggaagaactcacctccttctctgagatgctctattttcccaaatgggtcactaacagtcccacctgtttgcccagagacaaaggtacaagtatgctcgtgtgtgcatgcatgcatgccaa

SEQ ID NO: 241837 - DNA, 1550 bp, Homo Sapiens
  misc_feature (445)..(464): n is a, c, g, or t
  misc_feature (939)..(956): n is a, c, g, or t
ccttttcaccagcactacatttgaaaaaaagatttttgttttgtcaacagacaaaaaaaatttatcaaagagaaaggcccctggtgccctccagaaagcagaaaggaatgtctcatgttgagtctacacaatccaaagaggaattacaggtggtaatcattcagtaaactgaactacgaaatcattaagagggatattttcctttggtggggagaaggggaaaggggaggaggaaacaaggccctcagattgcacaactgcactgaccaaaccaggtacttctacagacgctcctctaatagtcacgtgcacagacaccatcctggtgcatttttctttaaatacatagaaaattatttaagtgtcacgcacagtccatgatctaaaacaagaaaagccctgaggattcagttacaatgagtaagttccagcacaagcgctgccnnnnnnnnnnnnnnnnnnnntgaaggaaagatttgaatacagaagctggtttttcacaatggccagtgcaaatggagagctagcaaaccctcccttgccacctattcttctagaagggattcctcggtcacatcaactaaagtagctaagctactgtaatgatttgaaagtttgttatgagagaattatgctttgtcaagccaactataaggcagctttctacaacagttctgcaaaatgtttccaccacactgagcaaagctgacactagacactagctacacgtgggaataggaagatgggccaggctcagagccgccgcaaaggatgaagtccactcagatttgaggcaatcctggggcaaagcactgagcaaagcaacttctctggtaatctcctcctcagccattctctacccaggatttcagaacacagaacagaagaaactgcaaaagccctgcaggatatatcacagctgttaacattctgactttnnnnnnnnnnnnnnnnnncaagtaacctttgaaactggctcaaagaaccttctggcatccagccccacaaaccactgactacatagcatcaaactttggacggggtagtctggaagctcaacaaccaggattaatatgtactaactcactcaccctcagtctcacccactggtattaattccagtacccagaagtcaagtgggtttgtgacttaacataaaacacgtttcctgacagcctgtggcccctgggaagcacctgcagcattgtgtagtttgcaagcatgagatccctattccctattccaggagcatgaggaggaaggaacacccaggcttgctcgagtgacaggcaaagtgcctcattaagagaacactggagtgcttacccaccactgccgccacagaagccagagcgggagaggaggggagcgccaagagaaatcacaggcaggaagaactcacctccttctctgagatgctctattttcccaaatgggtcactaacagtcccacctgtttgcccagagacaaaggtacaagtatgctcgtgtgtgcatgcatgcatgtgtgtgtaattaacattttcaatgagtcagtgaaaacatttaaa

SEQ ID NO: 241838 - DNA, 1100 bp, Homo Sapiens
ttggcacataatagagaggctgatgaagagtctttacaattaggtaattttcctgagccactatttgatgtatgtaaaaaaagttccgtgtccaaattatctaatccaaaagaacgtgtgtcaagacgctttgggcggagttttacctgtgatagctgtggatttggctttagctgtgaaaaattattacatgagcatgtgctaacctgtactaacagacatttataccaaaacacaagatcttaccatagaatagtagatattagagatggaaaagacagtaacatcaaagctgaatttggtgaaaaagattcttccaaaacattttctgcacagacggacaaatacagaggagacacaagccaggctgctgatgattcagcttcaaccactggaagcagaaaaagtagcacagtggagtctgaaatagcaagcgaagagaaaagcagagctgctgagaggaaaaggattattattaagatggagccagaagatattcctacagatgaactgaaagactttaacattattaaagttactgataaagactgtaatgaatccactgacaatgatgaattagaagatgaacctgaagagccattttatagatactatgttgaagaagatgtcagcataaaaaaaagtggtaggaaaactctaaaacctcgaatgtcagtaagtgctgatgaaagaggtggtttagagaatatgaggccccctaacaacagcagtccagtacaagaggatgctgaaaatgcatcttgtgagctgtgtggacttacaataaccgaggaggacctgtcatctcattacttagccaaacacattgaaaatatctgtgcatgtggtaaatgtggacaaatacttgtaaagggtaggcagcttcaggaacatgctcaacgatgtggcgagccccaagatctgaccatgaatgggttaggaaatactgaggagaaaatggacttggaagagaatcctgatgagcagtccgaaataagagatatgtttgttgaaatgctggatgattttaggggacaatcattaccagataaacagtatccaaaaaaagcagttatttaaacattctgcctgcccttttc

SEQ ID NO: 241839 - DNA, 840 bp, Homo Sapiens
gactccatcgatttgcagagttacattgtcgagagtcacagccgactgctcaggcacgttgatgacaatttccttgagactctgcacatatcggatccggtctaacacagggatgaggatgttcaaaccctggaaagaggagtcatgggtcctcagaaggctgggaactattgggttgggacctaagctagtcctggagtatgtagggagtcaacacatggaacatgcccagaaaagcagcagctcctaccaagaaataagtcctcagaaggctgaggtgtcactggtaagaaaacccaagagaacaggaatgcaagactaggcccctgaatggaggggagagtcatgagaatcggagccagcagaatagccatctctatgcagactgagaggtagggctgagagtgggcaggggagattcccaagaatggggcctgtgagatgcataggaaaaggtggtaacatggggatgatggtcagcagcctgggccctgtcaggtctggcctacagagtcgggagctaacagtgcgggcaggcccaaaggaagtcctcccgacattgcatgtcgtgagggattggtcatctggctggcccagggtgggcagaagaggtttctcacaggctccaggatccggtggaatcggcccattcgctccaccacccaggcctcctgctgcggcacgaacagtaccacggtgtttcggggcaatccagaggaggcgcggcgcggagcgcggccagaagccagtagagagcccctcagcaaaagggccccagtgccccgcgccgcgcgcgccagcatttcccaccgccgcagcgacctccggaaccaacgccaa

SEQ ID NO: 241840 - DNA, 634 bp, Homo Sapiens
gaaaccagctccaagggtggctttgtgaatcttgacccaggactcctgtccctagattggtggccttccacacatagacgctaacccccatcccacaaacctggcaccaaaggctctgggagcataagtgccccagccaggaggtggaggccaccccggaagcttccggctgtcccgcccacaccatgcacggtgggcctgggggcgtggctgctgtgagggtctggagactaaccagcacactccctgcaccagcccagccgccagcccccagccccacactctgagagtctgggagttgccgagaagttaaaatgacccaaagaccttcctagaaaccaaaagtgcaccaaataaagtagcaatgcctcttcctttgtcaccgactacagaagcacatcattctcccaggtttttgctctcatccaagttaagagtaaggccactgtggatccgcaatagagggatgtgaggagggggctttatcctctgccgtccccaggaccctccacctgggcaggaggccagcagctctgcaatggccagagaggctgcaacgtgcaaggcaggccctgggcccccccacacaggcagacgacgattgcggctcgcaaatgatttcggattttgccaa

SEQ ID NO: 241841 - DNA, 944 bp, Homo Sapiens
ttggcggggtcgcgcgagagccgcaagcggagttggtgggcgctatgctatcacccgaggcagagcgagtgctgcggtaccttgtagaagtggaggagctcgccgaggaggtgctggcggacaagcggcagattgtggacctggacactaaaaggaatcagaatcgagagggcctgagggccctgcagaaggatctcagcctctctgaagatgtgatggtttgcttcgggaacatgtttatcaagatgcctcaccctgagacaaaggaaatgattgaaaaagatcaagatcatctggataaagaaatagaaaaactgcggaagcaacttaaagtgaaggtcaaccgcctttttgaggcccaaggcaaaccggagctgaagggttttaacttgaaccccctcaaccaggatgagcttaaagctctcaaggtcatcttgaaaggatgagactcaagaaccaagatgggggaccagcaaccccccagggtcatggaggacccaggaccctccaaccttgacacctgtaaggacaggatctgccctgtaaggggccagccgtcaggaatctggccatgaaaacctctttgtagtgcttggctactctgtgatggcaggagggaaccttcagcctgtctggctgctggacctggacaccagggctcggtggacacaagatctattgacgggccttggtagccaccagtgggtgtgtggggcagtggctgtgggggtgtaagaatgactgcaacaggcacttcccaacaatggcctgctgttcacatggaccctgagcaaggaagagggagggaggggcagagtggagtgtcattccagcattcctctcaaaagggagagaggttttcaaggctggtgccatgcgattggaataaaagcagagctcatgggtggttgctgaatgaagaacagaatcttggtgctttgtgg

SEQ ID NO: 241842 - DNA, 1242 bp, Homo Sapiens
  misc_feature (300)..(319): n is a, c, g, or t
ttggcccttctgaggcttcacttattattagaataaaactcatcctcaccaaggcttgcatcctacaacataacctgacttagtaggtctatttcctcctttgctctctgtattggtccatttacattgctgtaaataaatgcctgagactgggtagttcatcaggaaaagaggtttatttggctcacagttctgcaggctgtacacaaagcatcgtgccagcatctgcttctggtgagggattcaggaagcttataatcatggcgggatgtaaaggagagccagcacatcacatggatnnnnnnnnnnnnnnnnnnnncagtgccaggctttttgaaacaaccagatcttgtgtgaactcagagaataagaactcactcattactgccgagacattcatgagggatctgcccccatgacccaaacacctctcactaggcccacttctaacactgaagctcacatttcaacatgagatttggaggggacaaccatccaaaccctatcaccctccatgatccattctttctgcttctcaaatatgccatgtttagggctgctgttcctctgccttgagcgttcctgttagtgcttcaggtcttaactcgaatgtcaacccctcagagtgacttttgctactccctatggaatgctcacctcccacccccgccatcagcatttatttcgacttctttcctaccacttagcacagtgagctccaggagggcaggcttttgtctggcatgctccctgcacattctccagcaccaagcacagacctggcacacaatgaatgttcactgaaagaatgaagttgatctcagactctccacccagctccaggctgccaaaataagcccctaattgccttccctgcttctccttttgttcctgccccatctgtctcctagggagaattgtctcagctagaccagtcctgggctcttcacacatcagagttagagagttgacagggaattaatagaagatagaacctgaaaggcttaggaggggtaagacttggagaaatctgttgtcagtcaaaaataataaagtacagaggtgtatgtgaggaggtaggggagggagtacaggaaggggaaagaaatctatatagtccaggtgtaagtgagaaagttctttcagcatttgtcaaacttgagtttgggagagggtgtgggaaataaataactgagaagagtaaatgggattgcagcatagatgaggattctgaattagggc

SEQ ID NO: 241843 - DNA, 1359 bp, Homo Sapiens
  misc_feature (1187)..(1201): n is a, c, g, or t
ttttacagtttgcatctgttaccagccagtgcccaggagactgtcaggcacacatggatagatgaagagtctcacctcttgacagaaaacctcatatgaatacccaaaccacttgaaagtatgtgctcaactgaaataattaatctttgtgtttttctctttggcactggacctttctcctggtcagttggaggcaggcatattgctctgaggagaattggaattgttatagcggaaatgttcaaagaaagtcaacattcagcttttgacttcctcagttggtctttgaaatccacagaaaggcaagtctggagattagggctttctcaagcgaaaaacatggtctaaatctcaaaggtatccttaaaaggtggacttaagcatcaaaagctactaggactagatgagaactcattctaaaacctgacagaagcctccagcacatagcaagaggaagtgagaggctttcatgattcagaagaaggaagatgtagggcaaagaggacaaatgcctacattctgagactgaaagttgaaggaggtgagattcagacaagtaaagggaagtccaggaagatcaagccttttatgcttgcctgtaaagtctgcaacatcttagagaagcttggatttagtgtggtggcagctgagtggaggcttagcaggcagtggtaagccatggctctcctgaaggggcaaggtgactccacagcagggccagatgagaaaagagctgggcctatgaggaatgtgctaagccagcaagaaatggaagttagcaaagtcccagcactctgcagtgctgaagctgaaagaatagataaattcacaagccaaagacttaaatatgagatgatagcaacgggggtctatgaccaggcataactaacaagggactggtgtatggccagtgaggacctggagaaagaaacctccttcccacagctaccatgtacatacagtaagcttctgccttcccagctgctgtctggttagtggaactaacaatttccttgatggaaattgaataaggtaatccaaaaagaaggctcttttagatgaaaaaacatggatagattattaagcgccaagttttctcttcaacctactgctcaccagtgctccctcctcagctccaaggctgtggagggctcatgaagtcacaatgttctactgagaatttagcnnnnnnnnnnnnnnnggagtgggtataccattttgtaattccacttgataatggcatctgattatttgatcatgacatcattatttgtatacaatgcagcaagaattttgtttttaatgtaggcttttaaatgggctttgatggaacttggttccatagaaggaatcccccaa

SEQ ID NO: 241844 - DNA, 1501 bp, Homo Sapiens
  misc_feature (131)..(152): n is a, c, g, or t
ttggccactttttaatgcactaagcaatcggttgctaggagcccatcctgggtcagaggccgatccgcagaaccagaacgttttcccctcctggactgttagtaacttagtctccctcctcccctaaccannnnnnnnnnnnnnnnnnnnnngcagtaataaaggcccctgaacgtgtatgttggtctcccgggagctgcttgctgaagatccgcgcccctgtcgccgtctggtaggagctgtttgcagggtcctaactcaatcggcttgttgtgatgcgtatccccgtagatgccagcacgagccgccgcttcacgccgccttccaccgcgctgagcccaggcaagatgagcgaggcgttgccgctgggcgccccggacgccggcgctgccctggccggcaagctgaggagcggcgaccgcagcatggtggaggtgctggccgaccacccgggcgagctggtgcgcaccgacagccccaacttcctctgctccgtgctgcctacgcactggcgctgcaacaagaccctgcccatcgctttcaaggtggtggccctaggggatgttccagatggcactctggtcactgtgatggctggcaatgatgaaaactactcggctgagctgagaaatgctaccgcagccatgaagaaccaggttgcaagatttaatgacctcaggtttgtcggtcgaagtggaagagggaaaagcttcactctgaccatcactgtcttcacaaacccaccgcaagtcgccacctaccacagagccatcaaaatcacagtggatgggccccgagaacctcgaaatacaaggcagatccaaccatccccaccgtggctacgatcagtcctaccaatacctgggatccattgcctctccttctgtgcacccagcaacgcccatttcacctggacgtgccagcggcatgacaaccctctctgcagaactttccagtcgactctcaacggcacccgacctgacagcgttcagcgacccgcgccagttccccgcgctgccctccatctccgacccccgcatgcactatccaggcgccttcacctactccccgacgccggtcacctcgggcatcggcatcggcatgtcggccatgggctcggccacgcgctaccacacctacctgccgccgccctaccccggctcgtcgcaagcgcagggaggcccgttccaagccagctcgccctcctaccacctgtactacggcgcctcggccggctcctaccagttctccatggtgggcggcgagcgctcgccgccgcgcatcctgccgccctgcaccaacgcctccaccggctccgcgctgctcaaccccagcctcccgaaccagagcgacgtggtggaggccgagggcagccacagcaactcccccaccaacatggcgccctccgcgcgcctggaggaggccgtgtggaggcccctactgaggcgccaggcctggcccggctgggccacgcgggccgcccgccttcgcctccgggcgc

SEQ ID NO: 241845 - DNA, 902 bp, Homo Sapiens
cccactttgtacaaaaaagttgggtgagttgcctgttgtgtgaggatcccggggccgccgcgtcgctcgggccccgccatggccgtcaccatcacgctcaaaacgctgcagcagcagaccttcaagatccgcatggagcctgacgagacggtgaaggtgctaaaggagaagatagaagctgagaagggtcgtgatgccttccccgtggctggacagaaactcatctatgccggcaagatcttgagtgacgatgtccctatcagggactatcgcatcgatgagaagaactttgtggtcgtcatggtgaccaagaccaaagccggccagggtacctcagcacccccagaggcctcacccacagctgccccagagtcctctacatccttcccgcctgcccccacctcaggcatgtcccatcccccacctgccgccagagaggacaagagcccatcagaggaatccgcccccacgacgtccccagagtctgtgtcaggctctgttccctcttcaggtagcagcgggcgagaggaagacgcggcctccacgctagtgacgggctctgagtatgagacgatgctgacggagatcatgtccatgggctatgagcgagagcgggtcgtggccgccctgagagccagctacaacaacccccaccgagccgtggagtatctgctcacgggaattcctgggagccccgagccggaacacggttctgtccaggagagccaggtatcggagcagccggccacggaagcagcagagagaaccccctggagttcctgcgggaccagccccagttccagaacatgcggcaggtgattcagcagaaccctgcgctgctgcccgccctgctccagcagctgggccaggagaaccctcagcttttacagcaaatcagccgg

SEQ ID NO: 241846 - DNA, 1188 bp, Homo Sapiens
actttgtacaaaaaagttggcgtcgctcggcgccccgccatggccgtcaccatcacgctcaaaacgctgcagcagcagaccttcaagatccgcatggagcctgacgagacggtgaaggtgctaaaggagaagatagaagctgagaagggtcgtgatgccttccccgtggctggacagaaactcatctatgccggcaagatcttgagtgacgatgtccctatcagggactatcgcatcgatgagaagaactttgtggtcgtcatggtgaccaagaccaaagccggccagggtacctcagcacccccagaggcctcacccacagctgccccagagtcctctacatccttcccgcctgcccccacctcaggcatgtcccatcccccacctgccgccagagaggacaagagcccatcagaggaatccgcccccacgacgtccccagagtctgtgtcaggctctgttccctcttcaggtagcagcgggcgagaggaagacgcggcctccacgctagtgacgggctctgagtatgagacgatgctgacggagatcatgtccatgggctatgagcgagagcgggtcgtggccgccctgagagccagctacaacaacccccaccgagccgtggagtatctgctcacgggaattcctgggagccccgagccggaacacggttctgtccaggagagccaggtatcggagcagccggccacggaagcagcaggagagaaccccctggagttcctgcgggaccagccccagttccagaacatgcggcaggtgattcagcagaaccctgcgctgctgcccgccctgctccagcagctgggccaggagaaccctcagcttttacagcaaatcagccggcaccaggagcagttcatccagatgctgaacgagccccctggggagctggcggacatctcagatgtggagggggaggtgggcgccatatgagaggaggccccgcagatgaactacatccaggtgacgccgcaggagaaagaagctatagagaggttggaaagccctgggcttcccagagagcctggtcatccaggcctatttcgcgtgtgaaaaaaatgaaactttggctgccacttcctcctgaatcagaactttgatgacgattgatgccaggaagccaggccacctagccccccaccctaacctttattccatgaaagtttt

SEQ ID NO: 241847 - DNA, 957 bp, Homo Sapiens
ttggcttttgtattactctaggccctgcaggaatcagtgcctctctccctcttctttccctagtcttttcccagattacagtctctcctgaaagggcacagggccctgctgattgtactttcccctcctgagccccgactcacaaatccaagttcttaaaacatttctcttcagtggcccaacagggtttctctggggcacatggacatgactccagagagccacagtgccaaactcctccagggcagcaactggccctcctgtccctcaccccagccacaacaaaccctgggttctagggcagggatactcctgccacacagcccgagttagaaatctccttgctaggagcatttgcttccacatatatttagagcaaagaaggatcccatccttttcccagaaatctccacctaatgtttttggtttgtatggtcacgtgaccataggcaaccacgtggaaaccctctgtgaccacttttccagggacttaggggaaggtacctttcttccaatgtgtcttcctaggcagcccctgaggaggagggctgaatagatccctgaggttttggagagacccccatcactgactcctgctccctaaccctaccctcactttcgtccccgctcttcccagtgaaggatggtatgtagactcctgtacagacatagtggcttgcagaccctgacccagcccctgtggtcttagacaaatgtttttatttttgtcaccagccacccctgtcctgccgccttctctcgactccagagacctgttgcctcatctcttttggggaagagccggcagctcctcctcatcccctgccttaagtccagttctttgcctcacgggtctcgtttccttggccttccagggtccccaccccttttctccctgcctgattctctgagctctgggctccgtctgtattgggttgaggggcaaggattactgcc

SEQ ID NO: 241848 - DNA, 1213 bp, Homo Sapiens
ttggaacaaaacagaactgccctcatgctaggttgcgaatatggttgcagagatgcagtagaagtcttaattaaaaatggtgctgatataagcttgctggatgcgcttggccatgatagttcttactatgcaagaattggtgacaatctggacattctaaccttgttgaagactgcatcggaaaataccaacaaagggagagaactttggaagaaagggccatctttgcaacagcgaaatttgacacacatgcaagatgaagtaaatgtgaagtcacatcagagggagcatcaaaatattcaggatttggagattgaaaatgaagatttgaaagagaggttgagaaaaattcagcaagaacaaagaatacttttggataaagtcaatggtttacagttacagctgaatgaggaagttatggttgctgatgatctggaaagcgagagagaaaagctgaagtcccttttggcagctaaagaaaagcaacatgaagaaagcttaaggactattgaggctctgaaaaatagatttaaatattttgagagtgatcatttaggatcaggaagtcatttcagtaaccgaaaagaagatatgcttcttaaacaaggtcagatgtatatggcagactcacagtgtacttccccaggtataccagcccatatgcaaagcagatctatgttaagacctctggaactatctttacccagtcaaacgtcatactctgaaaatgaaattttaaagaaagagttagaagcaatgcgaactttctgtgagtcagcaaaacaagaccgactgaagctccaaaatgaactggcacacaaagtggcagaatgcaaagctttagcattagaatgtgaaagggtcaaggaggattcagatgaacagataaagcaattagaagatgcattaaaagatgtgcagaagaggatgtatgagtcagaaggtaaagttaaacaaatgcagacccattttcttgcccttaaagaacacttaacaagtgaagcagcctcagggaatcacagactaaccgaggaactgaaggatcagttgaaagacttgaaagtaaaatatgaaggtgcttcagcagaagtggggaaattaagaaaccaaatcaaacaaaatgagatgatagtagaagagtttaagagggatgaacggcaagctgatagaagaaaataagcgattacagaaggaacttagtatgtgtgaaatg

SEQ ID NO: 241849 - DNA, 1410 bp, Homo Sapiens
  misc_feature (551)..(560): n is a, c, g, or t
ttggcaagagcccctgcggccgggcgcgaaaatggcggcggcggcgacggccgggcgctcctgaagcagcagttatggagcttccctcagggccggggccggagcggctctttgactcgcaccggcttccgggtgactgcttcctactgctcgtgctgctgctctacgcgccagtcgggttctgcctcctcgtcctgcgcctctttctcgggatccacgtcttcctggtcagctgcgcgctgccagacagcgtccttcgcagattcgtagtgcggaccatgtgtgcggtgctagggctcgtggcccggcaggaggactccggactccgggatcacagtgtcagggtcctcatttccaaccatgtgacacctttcgaccacaacatagtcaatttgcttaccacctgtagcaccgtgagtgagagcgaggccgagagcgccacggggcggttccctggggcccagctgaaggcccccctgtccccactcgcgttccccatggaggatactgagccttacccctaaccccgatcctctacccaacatgtcagnnnnnnnnnncattttcctcaatatttttcttcttgctttctcttctcctggttcccagcctctactcaatagtccccccagctttgtgtgctggtctcggggcttcatggagatgaatgggcggggggagttggtggagtcactcaagagattctgtgcttccacgaggcttccccccactcctctgctgctattccctgaggaagaggccaccaatggccgggaggggctcctgcgcttcagttcctggccattttctatccaagatgtggtacaacctcttaccctgcaagttcagagacccctggtctctgtgacggtgtcagatgcctcctgggtctcagaactgctgtggtcacttttcgtccctttcacggtgtatcaagtaaggtggcttcgtcctgttcatcgccaactaggggaagcgaatgaggagtttgcactccgtgtacaacagctggtggccaaggaattgggccagacagggacacggctcactccagctgacaaagcagagcacatgaagcgacaaagacaccccagattgcgcccccagtcagcccagtcttctttccctccctcccctggtccttctcctgatgtgcaactggcaactctggctcagagagtcaaggaagttttgccccatgtgccattgggtgtcatctagagagacctggccaagactggctgtgtagacttgactatcactaatctgcttgagggggccgtagctttcatgcctgaagacatcaccaaggaaactcagtccctacccacagcctctgcctccaagtttcccagctctggcccggtgacccctcagcaacagccctaacatttgccaagtcttcctggg

SEQ ID NO: 241850 - DNA, 1319 bp, Homo Sapiens
tttactcatctgtctcgacactatataagcattttgtactgtgggcggattcacacaggaggtgtctctgcatgttggccttcctgtccatctgctattaatgcatgttacattactagctccatccattttgtaatatgttgcacaagtgtaagtcacttgctcacccgccttatacacatccttcttctctcccatgggtatggcattttcaaagctaggtaaactgagacaatctgtttctgaaataggaaaaatatgtatttgttccgcaaatctttaaaaataggttacatacaatacatgtaatggattctaaaatagcgatatatagaatcaatgaatactgtacaacatttttcttataacttgagaaaatatattagccattttgtcttaattacattaaattcttctaaatctattaaaaatacaagatagaaatgatattagaagactgaagaaatattggtagccgtagcaattgagattacacatttttttgttcacattatttttgtccatacttgccacctgatatggttaggctttgtgtcctcacccaaatctcatcttgaataataatctccaggtgttgagagagagacctggtgggaagtgattggatcatggtggcagtttcccacatgctgttctcacgatggtgagtgagttctcacaagatatgatgatttaataactgtttagaagttcctccttcactcactcctctctctcctgccaccttgtgaagaaggtgcctgcttccccttcagcggtaatggtaagtttcatgacacctcctcagtcatgaggaactgtgatcaattaaaattttttcttttataaattacccagtctcaggaaggtctttacagcagtgtgaaaacggaataatacaccacctatattgtgtgtgcatttccaaattttttgcttctatcaaatgtgaaatacttataatgattttttaaaatatttcagaaaatgtacttataggcagattgttgataaactgacagaagattgaataatgtggagattgatgagtagaggcagctgtgccctaagaacagagatgagaagtctgagaatatacatcagaggatgcttaaagttcacacaagatgatgtgaaaatgaactaatttggcttataatgtcaaatgttttaattactacagctataatttcccacagcagtccagaatattcaagaaaaccttatgaatttctagagtccctgtttactttcttattggtaccacttacactttgaatgaagaatatttatcatacatataataaaattcaatccaa

SEQ ID NO: 241851 - DNA, 886 bp, Homo Sapiens
ttgggcacccggcaggggctgacagcatggcctcgcccgacccgcccgccaccagctacgccccgtccgacgtgccctcgggggtcgcgctgttcctcaccatccctttcgccttcttcctgcccgagctgatatttgggttcttggtctggaccatggtagccgccacccacatagtataccccttgctgcaaggatgggtgatgtatgtctcgctcacctcgtttctcatctccttgatgttcctgttgtcttacttgtttggattttacaaaagatttgaatcctggagagttctggacagcctgtaccacgggaccactggcatcctgtacatgagcgctgccgtcctacaagtacatgccacgattgtttctgagaaactgctggacccaagaatttactacattaattcggcagcctcgttcttcgccttcatcgccacgctgctctacattctccatgccttcagcatctattaccactgatgcacaggcgccaggccaagggggaaatgctctttgaaagctccaattattggtccccaaaagcagcttccaacgtttgccatctggatgacaaacggaagatccactaaaacgtccacgggattaacagaacgtccttgcagactgagcgatgacaccacactttgtttggacatttaaattcactctgctgaataggaggaagcttttctttttcctgggaaaacaactgtctcttggaattatctgaccatgaacttgctcttctagacaactcacatcaaagccctcactccactaatggagaatcctagccccactaatgccaagtctgtttggggattttgcctcagctatgggcttccctagagtagtctaggggaatactcagtctgatc

SEQ ID NO: 241852 - DNA, 1531 bp, Homo Sapiens
  misc_feature (257)..(266): n is a, c, g, or t
  misc_feature (567)..(604): n is a, c, g, or t
  misc_feature (936)..(963): n is a, c, g, or t
ttggctttcagtgcatttgtagacatgttcttttcctttgtagcagtcctccctcaccctgaaatgttggtgttctaaccgatttctaatgctaatttcaactggaagcactttttcaagcccagctatcaaaccacaccagacatgtatggattcgggttgcccaataaagcgttgctattatgtaagcatccctcacgcatacagcatcaccagttttgaaagcttgaactattctgcttacttcaaggtacagnnnnnnnnnntgtacttaaactgtgcagaaaagatgaaatcactggataatatgtattataaaataagcttcatgtgagtgacactggtttaagttgaaataaaatggtgaaagcattgatatcaatcattgtgactttatctcaaaacaatattgacacacatagatgtttttcttcctttatggtaagattacagcctttattgtcttaaatctcttatactcttcaatattttcaaagaaaacattctagtctcagaaatagtccatctctttgcaaaacagggctggccaattatcaaggacccatnnnnnnnnnnnnnnnnnnnnnnnnnnnnnnnnnnnnnntaattttcacatgattgctttaggaattttgaagtatccattcttttcactatggagtgttgaatatagaagattttttaatgaacaggcttgccctttgatgccaaaggcaaaaaataataataataacatttgcacgtgtgatcacagagcagctgtgaggcatcccgggggagcgcacgcagtggggatgtgattgctccactcaactattttatcacaaagtgttgtaaacatgggagatgaaagcttaactctctctacacccagctacagacccgcaatggccctaaaaatctggggtattcattgggtgggctgccatggaggannnnnnnnnnnnnnnnnnnnnnnnnnnngttgttctgtttacaaatcaggagagcccctgtttttatatgctaggaaggtccttgggataggccgaagaggtgtgcaaacgagcagtggaaggcccgggccctgtctctcaggaccacggcggcctgccccacacacagttctgcttctccctatctagaacgaggttttcctggcagattcctgccagactctgagtggagcccccccatgaccctataaaaggggctgtttgtcctcctcccaccctcctgtgctcttcctccctccccttgagggcacatggccgctggtaccacatgttggagcggccgcccccgagcccgggaatgccctaacaacacccatgcttgtgttgctgggagctgacattcaagaaaagtgcattaaaaattccttgagaaacatattcttttgagagccgtaaatgaaaagtgcattcacggagaacatgctcctttgttgtgagaggaaagaaaggactgttgttgcctttaaggaacacgtttcccagttccccggaatgtcaaggtcacatgaggaatgggtgagcacttagggccaaga

SEQ ID NO: 241853 - DNA, 980 bp, Homo Sapiens
ttggcttgctctttgttttgggcggctcggcctctgcagagatgtgggcagctggtcaggatggccattcgggctcagcacagcaacgcagcccagactcagactggggaagcaaacaggggctggacaggccaggagagcctgtcggacagtgatcctgagatgtgggagttgctgcagagggagaaggacaggcagtgtcgtggcctggagctcattgcctcagagaacttctgcagccgagctgcgctggaggccctggggtcctgtctgaacaacaagtactcggagggttatcctggcaagagatactatgggggagcagaggtggtggatgaaattgagctgctgtgccagcgccgggccttggaagcctttgacctggatcctgcacagtggggagtcaatgtccagccctactccgggtccccagccaacctggccgtctacacagcccttctgcaacctcacgaccggatcatggggctggacctgcccgatgggggccatctcacccacggctacatgtctgacgtcaagcggatatcagccacgtccatcttcttcgagtctatgccctataagctcaaccccaaaactggcctcattgactacaaccagctggcactgactgctcgacttttccggccacggctcatcatagctggcaccagcgcctatgctcgcctcattgactacgcccgcatgagagaggtgtgtgatgaagtcaaagcacacctgctggcagacatggcccacatcagtggcctggtggctgccaaggtgattccctcgcctttcaagcacgcggacatcgtcaccaccactactcacaagactcttcgaggggccaggtcagggctcatcttctaccggaaaggggtgaaggctgtggaccccaagactggccgggagatcccttacacatttgaggaccgaatcaactttgccgtgttcccatccctgcaaggggcccccac

SEQ ID NO: 241854 - DNA, 899 bp, Homo Sapiens
  misc_feature (43)..(68): n is a, c, g, or t
  misc_feature (794)..(824): n is a, c, g, or t
ttggatttgtgtttaaaatgcagagctcaactgaatatttccnnnnnnnnnnnnnnnnnnnnnnnnnnaagaagtaggttgttttcctgaaccgtaaacttgtatcattttaacttgcacaaaggaagtctgttcttggtattgctcttgcacttgggttttttgttattgttttgtgtggattttttaaagcttttctgttcaccctcctgccaggaaaatcccagaaagcttaatgataccccaaaatgattacacccagggaggaaaaaaggagcgctttctagggtcagaatcgtggagagaatactcagaaatgaacctctttaaagccttgcaggaatgagtcactcttacttaatgaaatgttaaagccaattaaaaagcatgctgtgatgcccagcttccctttccacagggtgcatgcgtctcctgctggtgaatcacatgcggcaagaggcaactggctccacagcctgggatgctgccgtaccaagaggaaagaagcagcaaaatgcctttacgttgttctaaacccccgacgcataaagtgtagaggagggatggccaagggtgggtggtagaaagtgtgttcaggctgacactggcaatgagtacagataatttcactttcctcttccaggggcaaaagctgatggcctctacctttgtatccaggagaaactgcagagcagccctgtgactttacaaaatatgctacctcaaagtgctaccgataaacctttctaattgtaagtgcccttactaagggcacatgtcttaatcaaagttannnnnnnnnnnnnnnnnnnnnnnnnnnnnnngtatattgatgaatgagatcttacctattaaatatattattgggattatggttcctgaaggtcattaaagtttga

SEQ ID NO: 241855 - DNA, 959 bp, Homo Sapiens
  misc_feature (150)..(175): n is a, c, g, or t
tttccttgcaggagggtgaacagaaaagctttaaaaatccacacaaacattacaaaaaccccaagtgcaagagcaataccaagaacagacttcctttgtgcaagttaaaatgatacaagtttacggttcaggaaaacaacctacttcttnnnnnnnnnnnnnnnnnnnnnnnnnnggaaatattcagttgagctctgcattttaaacacaaatatacagtcaaaagaggctaaggattaaagctgcaaaaatggtcccaacagcctcagacttttgctgcaggaaaattttttgcccaatggtcacagattaaagggatatctaatccccaagagcccttttgtcccaatatacttcctgtttgaaagtttaacccttacaagtaattgatatataagtgaataaaaatagcacatgtccaggcaaaaaagggcatgagctgggcctgagttgccacttaaaactgtcattcaatatcatagaaaatcctcaaaggctgcccagaaacagggccccaggcactgctgaacatgccagccaccaagtcaactgccacccgacccaactgagcattaaacttcaagtatccaaggtgctacaatagctggtcctctaaagacctcaggctgactctcagaagcccccactccaccccaccccattatacaaaaagtaaaaacattgctcatggtcattacaaaatacgggggtggaaagtgaggaataagagatctgctctctgaatacaccagccttacaaatacaaacaacgtctttaacattttgtacaactagaaggtgcatgaagctggtatccaagcaataatttcaaacgctttcttttctccccattctgtatcaaactggaaaatggttccgttgggttaacagtgtcattttaaaatgccataaattaaataagttagttcacattttttttcccccagcacttaagccaa

SEQ ID NO: 241856 - DNA, 1336 bp, Homo Sapiens
gtgcccagctgggtacaggatggatggcaagcggcggccaggcccagggcccggggtgcccccaaagcgggcccgtgggggcctctgggatgatgatgatgcacctcggccatcccaattcgaggaggacctggcactgatggaggagatggaggcagaacacaggctgcaggagcaggaggaggaggagctgcagtcagtcctggagggggttgcagacgggcaggtcccaccatcagccatagatcctcgctggcttcggcccacaccaccagcgctggacccccagacagagcccctcatcttccaacagttggagattgaccattatgtgggcccagcgcagcctgtgcctggggggcccccaccatcccgcggctccgtgcctgtgctccgcgccttcggggtcaccgatgaggggttctctgtctgctgccacatccacggcttcgctccctacttctacaccccagcgccccctggtttcgggcccgagcacatgggtgacctgcaacgggagctgaacttggccatcagccgggacagtcgcggggggagggagctgactgggccggccgtgctggctgtggaactgtgctcccgagagagcatgtttgggtaccacgggcacggcccctccccgttcctgcgcatcaccgtggcgctgccgcgcctcgtggccccggcccgccgtctcctggaacagggcatccgtgtggcaggcctgggcacgcccagcttcgcgccctacgaggccaacgtcgactttgagatccggttcatggtggacacggacatcgtcggctgcaactggctggagctcccagctgggaaatacgccctgaggctgaaggagaaggctacgcagtgccagctggaggcggacgtgctgtggtctgacgtggtcagtcacccaccggaagggccatggcagcgcattgcgcccttgcgcgtgctcagcttcgatatcgagtgcgccggccgcaaaggcatcttccctgagcctgagcgggaccctgtcatccagatctgctcgctgggcctgcgctggggggagccggagcccttcctacgcctggcgctcaccctgcggccctgtgcccccatcctgggtgccaaggtgcagagctacgagaaggaggaggacctgctgcacgcctggtccacctttcatccgtatcatggaccccgacgtgatcaccggttacaacatccagaactttcgaccttccgtacctcatctctcgggcccagaccctcaaagtacaaacattctctttcctgggccgtgtggccggcctttgctctacatccgggactcttcattccagtccaa

SEQ ID NO: 241857 - DNA, 1642 bp, Homo Sapiens
  misc_feature (258)..(273): n is a, c, g, or t
atgacggccaaacccagacgcagtctctccgcataggactgggccctagaaggacaaagggaaatggtgaaactgacaggaagaaatcccacgcatcactacggcatcattttttaaccataaaatgaaaatatttaacgtttcagggacatacaaaggcattatttatataaatgagaatgtgaggcccaggccagcatgtaaatgactcaaagggcacgtgagttagggtttgggattgtatctgattctagacannnnnnnnnnnnnnnngagacaaggtctcactgtcacccaggctggagataaagctgtgtgtggcatgggacatgacaacgatggaggggttaacatgagagccagtgggctttcaaaggccacgagtgacagcctctggattccaaagcagctcattctgacttcgggagcactcaggagggatcaggacccatgtctagcttacttacctctttgcagcatcaggagacttagctacaatgactgcatttctgtaatttggaatctagatttgaaggaaaaatagaaaatactgaaaagttatcagaaaataacacctggatgctggtattcaagttttccctcttataatgatccaaactagtcatcaaatatgctagaattttagtcacaagttttagatttttcaatatttatcaattaacatcactggaaaaagcactcctacgtcaagaattttttaaaaataattcttaaaacattcattttagaaaacataagcaaattgctaaagatacgtagaaaaaaaatctgtttttagtgtcttttaaagctatgatcgtccacgactaaagctgaccctgtctgctgcctcaggcattgtgacttaagggagagctcatttgatgtgccccaatatcgaaatctgataccagagaaaaactaaataagatctcttttgaggacaatggggtgtttgctggtggttcctcacttcttcctggatatactgaagcaggaaaggtgaggctctaaggttgtccacaggaaagctgaaaaagccttgtatttccttttgatgaagatccatagtgataatgtgagttaaacctgctttcgccagcatggatgctagcagcttgcacacaatggaacccctcttcctcatcttgctctgcttgctgtaggggaagtaggggatgaccccaataatgttcctggcacaggcagtcttcagtgcgtaagccatgatgagcaactccatcacagctgtattcacatctctgggtattgtctgtataatgaaaatatcttggccacgaacagattcttttatttcaactcttgtttctccattggtctcttgatatacaacagacttccccaattcagcaccaaggcgctctgtgatgcgcttggccagctccgtgcaggcggccgtggagttggccgagaagactcggtagccggtgcgagcggcgttcatggccggcgggggaacggggcgggcgcgcgggacgcggaaagccgaggacgcggagggcgggggcaacagcagcagcttcttgggcatcgtccggcccgcggcgcggttacgaccggccccgcgcggggctgcactctgagtgcttccgactgcgagaccccggtttgggtgggccaa

SEQ ID NO: 241858 - DNA, 925 bp, Homo Sapiens
ttggcaaggctttttcagctttcctgtggacaaccttagagcctcacctttcctgcttcagtatatccaggaagaaattccaaattacagaaatgcagtcattgtagctaagtctcctgatgctgcaaagagggcccagtcctatgcggagagactgcgtctgggtttggccgtcattcacggggaagctcagtgcacggaactggacatggacgatggtcgtcactccccgcctatggtcaaaaatgctactgtgcacccaggcctggagttgccattgatgatggccaaagagaagccaccgataactgtagttggagatgttggaggccgcatcgcaatcatcgtggatgacattattgacgatgtggagagttttgttgctgccgcggagatcctgaaagagagaggcgcctataagatctatgttatggccacccacggcatcctgtctgcagaggcccctcgcctgattgaggagtcctccgtagacgaggtggtggtgacgaatactgtccctcatgaggttcagaagctgcaatgtcccaagataaagactgtggatatcagtttgattctttctgaagccattcggagaatccacaatggagagtccatggcctaccttttccgaaacatcactgtggatgactagctttcacgagggtctcgaccctggacctcctgagggaaacatggaaaaagcagtgccatgagtgatacagtgtttccttgcaagggaggactcgaaacagcctggagttagatatcttcttttgcccggattgatggggaggagggattaaaagagtcaggaagaagacagagctaatggataaatatcataacatggccttacatgtctgctgtcatcagccctgttccttaaaagttctagctgctttcttaaaataatctgaaaatc

SEQ ID NO: 241859 - DNA, 916 bp, Homo Sapiens
  misc_feature (438)..(489): n is a, c, g, or t
  misc_feature (491)..(767): n is a, c, g, or t
ttgggacccaggtatattgtcctttgagtcccagattaactaactatagcagctaagcatttgaatcagacttctcatagcaatgttatgggctgtctgatatattcaggatttgttgagcagataagctgtgtgtgatcttactcattctcagccatgccgcagacatacccatttccctttagtaattttttaatacagagaatgctattaactgttactggatatcaaataattttatttttctaatagtattttccaaatatttcttaaaattcttaaaatttaggttaaagtttgctggtctcttacattaataaagctgggacttgaagacttaccatagttttcaactgcctttgcaagttcataaacttctaagggtaaaaagtgaataagataaattcagagttttaaggtaaaggctttatattagcnnnnnnnnnnnnnnnnnnnnnnnnnnnnnnnnnnnnnnnnnnnnnnnnnnnngnnnnnnnnnnnnnnnnnnnnnnnnnnnnnnnnnnnnnnnnnnnnnnnnnnnnnnnnnnnnnnnnnnnnnnnnnnnnnnnnnnnnnnnnnnnnnnnnnnnnnnnnnnnnnnnnnnnnnnnnnnnnnnnnnnnnnnnnnnnnnnnnnnnnnnnnnnnnnnnnnnnnnnnnnnnnnnnnnnnnnnnnnnnnnnnnnnnnnnnnnnnnnnnnnnnnnnnnnnnnnnnnnnnnnnnnnnnnnnnnnnnnnnnnnnnnnnnnnnnnnnnnnnnnnnnnnnnnncctttttaaagtttttaattgacatataattgtacgtatttacagggtaaataatgatgttttgatacatatataatgatcagatcagaacaattagcatatccatcacattgaacatttatcatttatttgtgttgagcctttagttc

SEQ ID NO: 241860 - DNA, 1889 bp, Homo Sapiens
ccatttgtaaagagaatccactgtcatgttttgccttgtcaagtcaaaactcaaatagcttgttttggtaaaattattccagaaacataatccagacaaaatcaataacgtcatcagcttcctaaccatgtttaagaggaataacttcatgaacattttgccctgaactgaagagttctaaatacttgtaaacctttaggaaaaaatgactgctcgcaggcagctgactggtaagagggtacaccagagactccgggtcactcactgtcagaatattcttatacatacaatgagtctccacgcctgtacaatgagtgtacgtgcaacataattggagtaatggcctctaaaattttacaagtaaactttattgtggccacagatgaacaacaaaacatgacagttaaggttcagactctccccacctattttatcatataaattaaatatggagaggtacacacaaactctattcaaaatgagaagttgtttgccaactctcatttcctaggataacacacatcacactgtttaagagtgggggaaagaatagtcatactgttagagcacaatgtttcctgaaaagaaactgatcaaaacgtttgaagcctttttagttgcctcaaagtgtgacagccactcaatactgctcctaacagtctgctttcagataacgtcataaaataaaataactgtgtgaaaagccatggccttcaaaaaactttatttggttatgagccaagctctgataggaaaagcccacctacgaaaaaaaggtgtgggtatttaagctggtctgattcacagagcttgtacattcatgactcaaaataacacaccctcaaacccaaatgattctaaagccatttcaaccttaaatcatgttattcccttagatgtgcttacattagctttaaaaaatgatctacgtgcagagaggagctgcgccttcctcacaattaattgaaacatgaccaaaaaacgggggataggcaaaaaagtgacatttaaatagcgtatgagggtctctcctcctttactcaatgaacacatatccagaatgagattgaaatggaatcaatgcccaggagcctctcaaagagagcatctccctgtagccaacatgatctggatcctcctaacacaaagcaacccaactactccagctacacaaagccagtaggcctacatatgaaacgcaaaggggttgcatcccccatggtttaaacctaacccatgttagctgcaactccactacagtcttgatcacttagctcaggaaacaaacacccagcaacaaccctcgtatctcattaataccaatctgtggccctcactgactcagtggtacttttttataaaaatatctgaagaagtggcaaacggttacaacggatgtcaggtcgaagcaattccaaaagctgagaaaacgcttcatccgctgcttgtcttctccccctattgctacagttctgccaccaaagggggaaaattacgtgaatatgattgttgtgaccaagccttggcaaaagtcaataaataacagaacctgtcaagggcagagcaattttatgggcaacctcttctagttgcaaatgtgggggttgggaaaagtgggagagaggcatgtgtgcaagaaagagataagggtccttttgggaagggtttggtgacccagccccagctcaatgccagcagactaggacccgctaaaacccattattcagacggaaaggggagaagagaagacaccaaaaaatgtagtcagttttgcaatttgcacagttggtatttgttcttcacagcagtaaggacttgaatgagaatcgtgaaacttgtggaacacttatatttttcttcgggatttaagccaacttttttgtacaaag

SEQ ID NO: 241861 - DNA, 880 bp, Homo Sapiens
ttggcttccctctacccgcccggcccgcggcgcgcaccgttggcgctggacgcttcctccttggaagcgcctctccctcagttatggagaaaacttgtatagatgcacttcctcttactatgaattcttcagaaaagcaagagactgtatgtatttttggaactggtgattttggaagatcactgggattgaaaatgctccagtgtggttattctgttgtttttggaagtcgaaacccccaaaagaccaccctactgcccagtggtgcagaagtcttgagctattcagaagcagccaagaagtctggcatcataatcatagcaatccacagagagcattatgattttctcacagaattaactgaggttctcaatggaaaaatattggtagacatcagcaacaacctcaaaatcaatcaatatccagaatctaatgcagagtaccttgctcatttggtgccaggagcccacgtggtaaaagcatttaacaccatctcagcctgggctctccagtcaggagcactggatgcaagtcggcaggtgtttgtgtgtggaaatgacagcaaagccaagcaaagagtgatggatattgttcgtaatcttggacttactccaatggatcaaggatcactcatggcagccaaagaaattgaaaagtaccccctgcagctatttccaatgtggaggttccccttctatttgtctgctgtgctgtgtgtcttcttgtttttctattgtgttataagagacgtaatctacccttatgtttatgaaaagaaagataatacatttcgtatggctatttccattccaaatcgtatctttccaataacagcacttacactgcttgctttggtttacctccctggtgttattgctgc

SEQ ID NO: 241862 - DNA, 1470 bp, Homo Sapiens
  misc_feature (1381)..(1394): n is a, c, g, or t
ttgggccaatgacctcaagtggcagacagcgggtatgttccggcctttcgtggaggtgactatggttggcccacaccaaagtgataagaagaggaagttcacaaccaaatccaaaagcaacaactgggcccccaagtacaatgagacattccacttcctcctgggaaatgaggaggggcccgagtcctatgagttgcagatatgcgtgaaggattactgctttgcccgggaagatcgcgtgctagggctggctgtgatgcctctgagggatgtcacagccaagggcagctgtgcctgctggtgccccttgggccggaagatccatatggatgagacaggcctgaccattctccggattttatctcagaggagcaatgacgaggtggcccgagaatttgtgaaactcaaatcagagtctcgttccacggaggaggggagctgaacaccttcgactcctgtgccaatcaggcagcagcaatttcacaaatcagggccagtgggagttagctgtgtaaccggcttagggtctttgcagtcaagaggctgaccccttcagttaaagatatttaaggaaaaatttggggtggtgataatatggcttttcacagaaagggtcatgaagccctggcccaacaggactgtggtactaggggctgggatgtggggttaccacatggagagattttccattaagagagaaggacaaacatttctgagagtgtcagccattcttggtagacacctctccactcctcatcccacctctacccatctccatgccacaccttatccagttagacacatacataccaatcattagaagaacaagtttagaaggtgtggaacttgtgcctggctggctgggtagtcagctgagcctgttgctgagcccggtggtctggattggagtatggccagggcaggagtacacagaatagaatttagactgtcccttgagtagaatccactgattttctgtggctccagtgagaacaaggctttgaaactgaacaagataacttctagaaatgaactgtactaatccctttccccagattgtatcatgagtagaatcaggttcacgtggtgcttcaaagccctgagaagaatatttctttggaccccaggcactaggggccacctgcctgggagtctccctgcctcactcctctaggcaggggagtgatgcttcaggacgtgacaggctgttctaacatgtgtctacctgagggctagttgaaggatccaggagtattttcttcttgggtgggccctgaacaaagccaaaaattgtagaaaccagtctagaaaaagtcctgctcatctgtggccactgccttctagccgtcctccaccttgcagaaagaatctagcctttggnnnnnnnnnnnnnnatcggggtcatttgctattcccctctgatattcaaccctatagaaaggagcctggactctgatccctctgtacagg

SEQ ID NO: 241863 - DNA, 1644 bp, Homo Sapiens
tcagtgacagcacatgtggcaacggagctggacagaagaccccagagggtgcggcacctgagagagagccctggattgcacaccaaggcagaggggtgcccctgaaggactctgggcaggcaatgacaggatctgagggtgtccagacgcagatctccactgcgtgagggagagtgatcagccagggggagaggccagggactgctacctgcccagaaggcggcagggaggggaagagcagataaggaggtatagggtgtgccctgggcaaggcagcaggggtaaggaagctctcagtgactcctcccagtagccaggggagagcagtgacagtctcaggtggccctgagcatgtgagctgctcatccacatcaggcaaaggcaaagccaggacctgaacttcccaccccaagccctacatccatgcaagccagaccagactgggtcagaggctagaagggagctcacaggattgcctggggaagcctcggcccaaaacctggccctcgctccagcccagagcacccacctgggcatgagactggcggcagccgtaggggtgccctgggtatatgccgggctcccagggtgccatacctgccagccagcccagggagtggtgatgggctgggtgctggctgtccctgcacatagcagtgccccgcggcagtaactacaactgctgcctgcccctcacccctggttatgctcggcctcccctgtgcatttctgtgtccgtaagtgtcccctgtgcatttctgtgtccacaagactactataaaccctgtagacacctcacaaacagcattccacgcaggtgggttcatgtcccaggggcatggggctccctgctgcacagacttgggatgttccatgacagaccctgcatatgcaggcgagctcacaacccaggggtatgcggctccatgacaccaccccatactcaggcgagctcacgacccaggggcatgaggctccatgacaccaccccatacgcaggcaagctcacgacccaggggcatggggctccctgctgcacggcctcaggatgctccatgagcaacccccgcactgggctattcacggatgcacactacctgccattgtcacagggttgccctcgtgtccctcagcccagcagacaaaaggtgcaggagaagcctgcccagggccgaccccagcccagagcccactcgacactaaggaatcacacaggcacagctgctcctctcccaagaactcagctattggtcagaaaaaacctcctagcctcactaccttgaggccgtgcccagaggtggcagaaggcgctgtgcctcctcaggggtcacggctcctgtgcccccttcctcacccaagcccgacaagctactttcagaaatgaacctacagtaaaaatcaagagtctaagccacccaccctgtccccatccctgcctccagcctggcccccagattcacatctatgagatagaggttgaggggttggagcccaagacagggttatgggagggctccccaacccggccaggaccccttggcctcactggaacgcacagacggcacccagcaggtaggcatgttctcaggggtggccagcaagggctctctcagggtacagctgggagaagcggccgagggccaa

SEQ ID NO: 241864 - DNA, 1644 bp, Homo Sapiens
  misc_feature (1391)..(1436): n is a, c, g, or t
ttggcccgagggctcccagagaaggcgtttgagcatctgaccaacctcaattacctgtacttggccaataacaagctgaccttggcaccccgcttcctgccaaacgccctgatcagtgtggactttgctgccaactatctcaccaagatctatgggctcacctttggccagaagccaaacttgaggtctgtgtacctgcacaacaacaagctggcagacgccgggctgccggacaacatgttcaacggctccagcaacgtcgaggtcctcatcctgtccagcaacttcctgcgccacgtgcccaagcacctgccgcctgccctgtacaagctgcacctcaagaacaacaagctggtggagatccccccgggggccttcagcgagctgagcagcctgcgcgagctatacctgcagaacaactacctgactgacgagggcctggacaacgagaccttctggaagctctccagcctggagtacctggatctgtccagcaacaacctgtctcgggtcccagctgggctgccgcgcagcctggtgctgctgcacttggagaagaacgccatccggagcgtggacgcgaatgtgctgacccccatccgcagcctggagtacctgctgctgcacagcaaccagctgcgggagcagggcatccacccactggccttccagggcctcaagcggttgcacacggtgcacctgtacaacaacgcgctggagcgcgtgcccagtggcctgcctcgccgcgtgcgcaccctcatgatcctgcacaaccagatcacaggcattggccgcgaagactttgccaccacctacttcctggaggagctcaacctcagctacaaccgcatcaccagcccacaggtgcaccgcgacgccttccgcaagctgcgcctgctgcgctcgctggacctgtcgggcaaccggctgcacacgctgccacctgggctgcctcgaaatgtccatgtgctgaaggtcaagcgcaatgagctggctgccttggcacgaggggcgctggcgggcatggctcagctgcgtgagctgtacctcaccagcaaccgactgcgcagccgagccctgggcccccgtgcctgggtggacctcgcccatctgcagctgctggacatcgccgggaatcagctcacagagatccccgaggggctccccgagtcacttgagtacctgtacctgcagaacaacaagattagtgcggtgcccgccaatgccttcgactccacgcccaacctcaaggggatctttctcaggtttaacaagctggctgtgggctccgtggtggacagtgccttccggaggctgaagcacctgcaggtcttggacattgaaggcaacttagagtttggtgacatttccaaggaccgtggccgcttggnnnnnnnnnnnnnnnnnnnnnnnnnnnnnnnnnnnnnnnnnnnnnnaacaagatagtgacaaggtgatgcagatgtgacctcgatgatggaccgccggactcttttctgcagcacacgcctgtgtgctgtgagccccccactctgccgtgctcacacagacacacccagctgcacacatgaaggcatcccacatgacacgggctgacacagtctcatatccccaccccttccaacggcgtgtcccacggccaga

SEQ ID NO: 241865 - DNA, 1673 bp, Homo Sapiens
  misc_feature (1341)..(1357): n is a, c, g, or t
gttgaatcatgttgctgaattacacttatttctaccattaagttttacttatttatctatagatgtagatattcctaatttgcaagatttcaaatacagaaaattaagaaatcagatcataaaaagtaatttgacccaagtaaaagtatgttttcagtacccttcgttaatactttgacatcccaaactttacaaaaacttacaatgctgcttatctaaaacttttctcccattatgtttttgtttctcatgaatacaaagcaggctcagaaatgcaaaaaacctcaactgcaggcacacgtctttacatgattgttgtaaagtgactgtttaggttaatattctttctcaatatcacaacaatgttaacaatttaagttagtgaaaggattctcttaaacataagcggtagacataattaaccaatttagtcatgtttttgcaatactgcaacagcaatgtcaatcttatccccgtatcttccaacagctggaacttacaataaaaaagtcttatccaatttattcacagccaaaggaacaagtacattctggtgaatgcagatgttctttccaccataggtttgtggtatgacagtatataaataaccttcattaaactaatacactttaatatttactggattgaatactatcctttacaacaactattgagaaagactaatgttaggtaaaagtctagtagcacccaaatcaatattgccctgtgagtgttcaataatatgtagagttcattagtgaactgttttttaaatatcaattcttagtaaatatagaccaagaagagatagaaaaagaatgggagatatttacatacaaaagtattcaaacatgtctcactttcaacctatattacaaagaaaaccagtggcaaaatatgctaagccttacaatatcttcataagatgctataaatatgaagttggttagaaactgctgtcattctttggtggcaccagataaattttttaaataatatataacagaacatatcttttcagtgattttatttcaggggaccctgattcttatgactttgacatcctgggacagaatgcatggtagaggttccctccccagaagtcctagactgatacacattaggccattttatgagaaggaatctgtcaggatcacagtctttctccctcaaatcaaatgaaaaaggtaacaaggctgtcacaaacaacttattaaataatatagctctccaaactttgggtctagagtagaggatttaaggcacatacttcctgaccacaactgaaatcatgatacctttaaaaagatacgactatgaaaatacaaaattgcacgcaannnnnnnnnnnnnnnnnaaaaaatataatgtatagggctagttttacaaccaccatcgcaggtgggaaaggagcggggctaacatcaaggactatgctgggtgttctatcttcaggttggagtcattgattgtgttctatcctcaggtacctgcagtgttcctccacccccaaccctgcttgctccagagcagctcttgtcttccagcatttaaagcatccacttctccacaatactgagaacgccctagggtggggaccatggtgtatagaccattgaagtgctagaatgttgtagtatctactaccaacagatggtcaataaataagccaa

SEQ ID NO: 241866 - DNA, 1105 bp, Homo Sapiens
  misc_feature (124)..(154): n is a, c, g, or t
tacaaaaaagttgggagagccggtgctgtcaccttggcctgagtatgctgaagacattaattccggttcccaagcaaaactgttagcaattcgagggctgggctcttgcctagatatcatctcnnnnnnnnnnnnnnnnnnnnnnnnnnnnnnngacatttgcccaagggtcatagctgtagaggggcaaatgtggtttgaacccagggcgtctggttcctctctggaagcaaccaaagtgcctgtgattggggtagtgacaaagcactctgagccgctgcatggcagatgctgtgaagagtcatctttgcctgtcccatatctattcccattttttctgattgtaacaccttgtttttttgtgtgtggtgggggaaccatgccctttcaaccaagctatgtggtgttcataagggtagcccctcctccgaccccaggagtggcagttcacagccctgactgatcacagtgttccgtggcctagctgtaaccaccccagggagtgagactgaactcaggggttcattggacctatcaggaaagagagacctttcttgtttctggacttggagctgtgatgaagtaagtgggtcaggggccaacacatagacagcgttggcctacaaatgcagcccaggcagaggacggtgcggccaagccacacagagagacaacttcctagtgacacgctgtgaacacctgcatccacccctgcctgaactggagcttttcctcttcagctcttcagttatgtgaggcaagatgttgccttttttgcttaatgctgtgagttgagtgtacagcagttacaatcaaagaatcctaaataatgctgcaagcatggtgactatctacatgggaatatgcagtactccagtgaaaacaaaacataaattaattttggaatctgatgaccataatctaaaaacattcatagaggtatataaaaattataacaaaatttaaagtagcatatctcctcatgaagcaggttaagtgtatacacaaagaaggaggaggaaaaggtgagaaagaatctgcccttgtggggaagtgacagaggcagaagaggctgatgcagtcctgcatccaaggcccagctctg

SEQ ID NO: 241867 - DNA, 1565 bp, Homo Sapiens
tttcccaaggctctagagcctattctccggctttccttagaggctccttttctgaacagccccaaatcgctggctcatctgcctaccaaagactcgctaaaaacccatattacaagcaattcaaagcatgaaatgaaaattgatgctttcaactcttgtaacgatgaaaacgggaagctgccggaaactctatgctcctttattttccaagaatatagatagccttccaagaatatagatagtcagttttcaagaatagagatagcagcatgttatatgagataagaacttgctctaagggtgaagcattcctccctaaatttgaccccattaaggtggagcgtttgcattcaaaggcaagtctggtaggggtgtattaataacaaaaagaaaaaatgctaccttcagaatcaacactgaccaaagatgacaaactactccccatatgtaaaaggcacattaaaacaatgagtgactatgcccttcagtgtgaatcaaatcacatttttcaatctaggcaatgtagatgaaagtctcactactctaatggtgagatgggcagttcaaattctatctctgtgcaggttaagtatctgtaaaatgagaggattgaacagaaataacatctctgagttctcttgcaatattatgttctatagttctaggacttaaggaagtacaaagggcaatgtactgtctgtcattctctactaaaataaaagttccccaagggaaagaagtgttaattattgtacccttggtaccttgcagagtgcttggcatatacaacatgctcaataaatttttattgaacgaatgatgaatgatagtagagtcaggataagtttgcctggctccatcatttgattatcgggttccgtaattaagaaataaatatttatatacctaaattgtgacttcacaacagacgctaggaacacaaaaatgtatgagacactgaagttatccttaaacttatattctagatagtgaaacaagaaatgttagcttaagaagagaaccatctaggaagtaaagagttttctaatgttgttaggttcagagcagggataggtcagagtaaacagtttacagtatgcatggacggcttcctgcagtatgtggacagaaaactggggagacaggaaacttgaatagttgaaaatgatttaaaatgatggcaagaaggattcatttccttacaatggggcagtgaaataaggtgcttctatatttttatatattaacaagatactatgaaaacagattcaaacttaaacacgctgttttggacaatcacttaggccactcccaggcttatagatcccacactctgctggacagcccacttgcatgccccttgtgactttcccgtctactaagtcacccttcctaggaccatgcatgtcatcttggacctcttcctctcccttgcacttcctgctccagtattcaccaagtcctttctctccctaaatatttatttattgggtatctcccctgtcttccttgccttagcttgggctttttcactttgaccgtagcttccttgtttgtacaaagtt

SEQ ID NO: 241868 - DNA, 1348 bp, Homo Sapiens
  misc_feature (707)..(828): n is a, c, g, or t
actttgtacaaaaaagttggcaaagtacccaaatcagcaccatttttcattccaacaattcctggccttgtacccagatatgctgcacctgaacaaaataatgatccccagcagtctaaagtggtaaatcttggagttttggctcaaaaatcagatttctgcttgaaacttgaagaaggactggtaaataataagtatgacactgctctcaaccttctgaaagaatcaggcccatcaggaattgaaacagagctgcgaagcttgtctcctgattgtggtgggtccatagaagttatgcagagcttcttgaaaatgattgggatgatgctggacagaaagcgtgattttgagttagcccaggcataccttgcattgtttctaaagttacaccttaaaatgcttccttcagagccagtactcctagaagaaataacaaatttgtcatcccaggtggaagaaaactggacccatttgcaatcactcttcaatcaaagcatgtgtattttaaattatctcaaaagtgctttgttggtaaaaataaatttgtgactaaacaaagactttcatattaaatgggttcaattgaactcatttcttattttccaagtgtcaatgtgaaaagaaaataaatgctagcactactgactagtcagtatatctccactttaaatgctaaatactttcttgaaataaaatcgcacctcccnnnnnnnnnnnnnnnnnnnnnnnnnnnnnnnnnnnnnnnnnnnnnnnnnnnnnnnnnnnnnnnnnnnnnnnnnnnnnnnnnnnnnnnnnnnnnnnnnnnnnnnnnnnnnnnnnnnnnnnnnncaaaaagttaaaaaaataaattacacctgccttttgttttgaagacttaaagaatctgctcaaatgatttattttctgagtctcttcacattaacttttatatgatttttaaaaaattattacctgcttatattttttgagtatctgtttcatataaagagatgctgcatgttcactgtgaagtattgctgaattaaattgaaaatgtcagataaaactgatacatgatgtagttataaaaatgctgttatgaagaaaaaaggaatgcttttttcctcggtggcctttgataaaaatatgaatgattgactctcagagttggaggataaactaatcatcttctagcacagccctgttgtgttgcaggagaggaatcaggctaaagtctgctggtatttcagtgacagattaaaactttctaacagtggcctagtgctttctccattgtaatgtactgaaaggaagttgttcatggatcagaaatgtgggaggcccttccttgcccaagcaagtcgctgta

SEQ ID NO: 241869 - DNA, 782 bp, Homo Sapiens
tctttattatccattcccgggggcactcctggctgcccaactcaggggtgcagatgtctccctgcaccatgccaggtgtggtgcagaatgggaggcagggggatggagcagagagaggcctgggactgcctgtggcctttgtcgagtcactgcccttctgtaggctctgctctggaaatgctggggtcagaggcaggtgttggggagcagccctgtctccctctgtcctccaggggagcagctgggcctgaggaggaagcacccctgccccagggtcccgaaggccccagaggacccatatccccctggggcagttggttgcccctccctgaccttgggctctggaaggtcagagcagcagagcagactgcccgttttcccccatctcagggcctggctgaggcagggcaggcaggagagaggcccctgagggcgggtttcaggccctgggccaggcactcagatggggtgcacgaactggtagacgaggcgctgggagatgtctggcttccggatgatgcccttcttgtaatactggcggatggagcggctcagcttgtcgtagttcatggcgggacggttcttgcggatgccccacagccgggccacctgggctgagtcctcaattttgaagatgcctagagcaggagggccccgagagagccagtggtatgagtgaggtggcaagaaggagaaagacgcagaccaccaggtcagcctcgtggcgaaccaagggaccccgtgcagaggcctccccctgctcgggtggggcggggtgccaa

SEQ ID NO: 241870 - DNA, 574 bp, Homo Sapiens
actttgtacaaaaaagttggctctctaagaagcctgacatcccggtggactctttatagtcatgtacacttgattccagatgagctctggtcttatctggatgctcagataagaggtttctatctgagcatccagatgttccctcaggttccaagacatttcaccccaggccctgggttcactctggaattcgtaggcttcacgtctctctagaaatgacgtgtaaaatttaagaccagacctcagccatcagcgtccagaccatcctagaagtctttcccaatctcacagagaaagccctagtatttcccagtgaccccaggattccacgttggggtggccaaagaaataggtctctcagggctttgccacagcctccagcccatccttcagaggcacacacagcacctctcggctgctccagctctgtaggatagcctcccctggggtccgtgggacgcgggccacagtgttgaggtagacaaggaggatcagtgagaggcctcttccctctccacagagactggattgtcattgttccttcatttatatcgtagggcttaacatttcactc

SEQ ID NO: 241871 - DNA, 1277 bp, Homo Sapiens
  misc_feature (62)..(72): n is a, c, g, or t
  misc_feature (918)..(940): n is a, c, g, or t
gaaactttttaaatgtaaaatctcctgacatttcaatgttggcaaccaatatgatttaaatnnnnnnnnnnnctgcaccaaacaaaataagtctgcaggccagactgcacccatgggctgccagttgtgatctccaaattcttggctgatcatactactttataatctcttaaactcttccttctttctaggcaccactcccttatgtcattcctaatcctgtattctcaccactgaatacattccagtttgataggcaggcctacagaaataaatgttcagagtatagaatatcttgctggcgagcatttttattctcattttcagatttattctttactatctctactctttttccttagaagattttcttgttgtccataaacaaatgcatgatccacgactataccttatgtgctaattatttttatttattttgataacaaggttaggacacagagggaaatgttcagtgacagaaaacacacctaaattttcggctaaccacatgagtgtgatcagcgtttcaacacactttaaatatttaggggcatttattgactaatgtatggtgtgtaatagtttcactccaccttatacttaagcatgatcattattgcaatctactttattcccacagatctatttctataagccaatttatattttgctattatgttacatttaaacaaaagtcaggttcacatgactaaactcacgcacatcagtcagtgacctggagattcatgagtgtagctttgcacctaccttggtgtgatcacagagtataattagagtgatacaggttaccatttgctgagtgcctataacatgtttcatgtgttaggtaatttaatcgtcaaaagtcccttcctttatcaaatgagggaaataagactcagaaaggtcaaataacannnnnnnnnnnnnnnnnnnnnnnaacttttctaggtgtccacacagctcatcagtggagggctgggattttaactcagttctactggactttggagcccatgtttgtttccaaacctgctcatttaatttgaggataataatggctgttctcacagatgttttttttctccgcctcactaatgtttaaagcattgcagatttttcttttggttcataagctcacatcaataacactctattcttatgtatatattaattatgaacaaaatttatcatcttttccccagaaaaccaaagtctctggagtacacatcttccttcctaaattgagaaatatgcttaaaaaattaaatatccaa

SEQ ID NO: 241872 - DNA, 1547 bp, Homo Sapiens
  misc_feature (482)..(508): n is a, c, g, or t
  misc_feature (890)..(900): n is a, c, g, or t
  misc_feature (1122)..(1131): n is a, c, g, or t
ttggttcaaaaacaaaaaggcaggcagacagaaataatgatgttttcttgcactaagaaggtactacttgtacacatatatcaaaacctcattctgcaaagtttttgaaggtttcaatgggaaatttgattttattacaaaataaaacattttttaatgttaaagtttatatattccatgcttgttttctcattcactggcatggatgatcaggagctgcctatatatgaaggcagaatcagactatcaggaaaggagctggccagggccatagccagtcaagatctctgagcaacttagagacattggtgtcattatatgaagcttgcatttaatacatttatacataatacatttgtacatttaattcataacgtctcttggtcacagatgccttatatataaaataagttgccagatctctaagattgcctagtacacctttgtatctcatttgatgtgatacccagaagagatcattnnnnnnnnnnnnnnnnnnnnnnnnnnncaagaagatccttcgtgatcaccatgctgttctcatggtaagaactggagttatgtttttaaatttggaaatatgacattttatgtagcactttataaaaagtgaaagcgacaaattccaccgctgcttaatactgctttgcttctttttattgacatgatagataaatatgtatctacacagagtaataataataaaacacagtaaacattctatttctctatggtctacagcatgctagtaaataatatgtaggaccaataataaattatcaattacacatttttgtgttaactaattaaaagcatagtgtataagtgagtacactctaattaacttgcttctgttgcactttagttttctacctgcatatggactgcannnnnnnnnnnaacacagtcagtatgtagaatgggatgtattcttctgctgctgcttattaaataaagaaagcctgagtgttcttagatggggttattctgagatgagggtcttagcctacagttctttttgaaatgaaaggtgctttgttttttaattatattcatcttttcagggtaaatttgtttttctgagtttctcgtaatgctcatttttacatgctgctactagcnnnnnnnnnnaaaaaaagtaaaagttgctgctttctaaaatattaattgccttatatttgaaagtgccattgcaatcgtaagtagactatgtatttcctataatgatgtctgatatttaaataggaaatcagacaaacaatattcagaaagtttaagcatataaactttttatttttaacttgcctaaatccctgtattccaaaacctgctgcatcataataaatatatctatatatatttagcataagacgtgatatttttaatttcttttttaaaaaattatatttgtctcttagagttaaaattttctttatataatattgtcatatgtcatagttttaatacaattcacatgatttctatgtttcttaatgatatttgggtgtgtaaaattgatcggattgattaaaaacaattctctggaa

SEQ ID NO: 241873 - DNA, 1050 bp, Homo Sapiens
  misc_feature (850)..(858): n is a, c, g, or t
tgagcaggatgacttaaacctgatcaattctactccaaaacagcaactatcattaagtcaggggtgtcaaggaggactctgtgaaggcaaagactagactgggatgtgtgcgagagtgggataagaaggcccatccctagcagactgcaggagtgactctggcatagaattcatggccagccctaactagtgtgatgggtggcagggaggaggcatctgctcagtgttcaaacaaaatccttacaagttctggggctggacctctgtgtcactcctgaatcccaatgtatccgttacctttacaagaaactggtgtggttcttgtctgctaagggcaagacctgttttctgaatttactttctgataataaagtaacaccatggaaaagaagaacctcagaaaaatatggggtcaccacatgggctttcccagtgctagctgcctgttttggaaagctgcaatgtaggctacagagggcagtctgaaaagagtccttctgctttcgcttcctggagcttaagaagaaaagaggaattaccaaggttgtggtgggttatttactctggaaatatcttggtcacactgtccgtggcaaaagcggaaagcctagcttatgtggatagttgaaggtgactgtgtgggccatcattatctacaatagaaatgactcaagccctagcatgtaatctcttagggacttaacaagttaaaaagaaacaaaaaatcatattggaaatggcctcttggtttaatataaacttggttacaacattcaaatttatctttacggaaatttcacactgctcctaggagcccttatagcatctgattctaagttattctgaaggnnnnnnnnnttattctgaaatataccttattaggatgatcactggaattctaccagatataagtaaaaggctaaatgggttttaaataaatacaagctaaattaccttcttctggggttaacaattagaatcccaaataccccaacatctcaactagaaaggccttcacagtaattctatgaaattgtaaatgatgccaaa

SEQ ID NO: 241874 - DNA, 1219 bp, Homo Sapiens
  misc_feature (190)..(198): n is a, c, g, or t
  misc_feature (391)..(512): n is a, c, g, or t
  misc_feature (514)..(660): n is a, c, g, or t
  misc_feature (953)..(967): n is a, c, g, or t
gaaatgactcaagccctagcatgtaatctcttagggacttaacaagtttaaaagaaacaaaaaatcatatgggaaatcgcctcttggtttaatataaacttgggttacaacattcaaatttatctttacggaaatttcacactgctcctaggagcccttatagcatctgattctaagttattctgaaggnnnnnnnnnttattctgaaatataccttattaggatgatcactggaattctaccagatataagtaaaaggctaaatgggttttaaataaatacaagctaaattaccttcttctggggttaacaattagaatcccaaataccccaacatctcaactagaaaggccttcacagtaattctatgaaattgtaaatgatgccaaannnnnnnnnnnnnnnnnnnnnnnnnnnnnnnnnnnnnnnnnnnnnnnnnnnnnnnnnnnnnnnnnnnnnnnnnnnnnnnnnnnnnnnnnnnnnnnnnnnnnnnnnnnnnnnnnnnnnnnnnncnnnnnnnnnnnnnnnnnnnnnnnnnnnnnnnnnnnnnnnnnnnnnnnnnnnnnnnnnnnnnnnnnnnnnnnnnnnnnnnnnnnnnnnnnnnnnnnnnnnnnnnnnnnnnnnnnnnnnnnnnnnnnnnnnnnnnnnnnnnnnnnnnnnctttaatttcaaaaaaatagctgctgcttctttaaagagtttaaaaattgatcggttcaatggcaaagctacacaacaactctggagtagaaggaaagaactctctttatagtacaacctctttccagcatactgccatcagctagtagaggcaactgcaaacaaatggtaggagttgcccaggaaggtatttgggctggacaaagtgatagcaaccctccagaccctggctccttataaatgtatagcaattcattcatacaaactgcacagaggttaaacaaaacctactnnnnnnnnnnnnnnntcccacaaaatccccaacccagaaaacgtttcctggctctctactaacagtaaaatgtgctgagcccaaattttctgctctaacatgggtcccacggacctatcagtctgctctggggtgctgacctgctgggtcctgagcagggtctttccctaagcatcactgtgggtttggagacagctgtaatgtgtgcagctgtcagcagaaagtacaatgccactgggctacatatgtccatatcatccaccccaa

SEQ ID NO: 241875 - DNA, 1427 bp, Homo Sapiens
  misc_feature (452)..(742): n is a, c, g, or t
  misc_feature (865)..(1007): n is a, c, g, or t
  misc_feature (1026)..(1053): n is a, c, g, or t
gactctgtaatcagactccccaggatctaaatcccggctctgtatcttcccacgttcacctttttatgcctcaatttccttacagtaaaataaggaaatatgagtactacctgggcttcatagggtggctggaaaaaagtaaatgagcacacagaacagagctttgcacacaataagtgctcagtaagtgtcagctgcttttattgtttcatcctttaaagagaaattctgcatcaggccccttccaatcaacagatattttatcaacatcttatataatctcactaaaatagcgaatgaaaccactgtgacttatgactcttctcctttcgaccctgaggcatagctcaggcaagtatcttcattacactcacattgcttcagtagttattaaggcaatattttctgacttacacagtgacttccaattcctcatctcataggttgctagnnnnnnnnnnnnnnnnnnnnnnnnnnnnnnnnnnnnnnnnnnnnnnnnnnnnnnnnnnnnnnnnnnnnnnnnnnnnnnnnnnnnnnnnnnnnnnnnnnnnnnnnnnnnnnnnnnnnnnnnnnnnnnnnnnnnnnnnnnnnnnnnnnnnnnnnnnnnnnnnnnnnnnnnnnnnnnnnnnnnnnnnnnnnnnnnnnnnnnnnnnnnnnnnnnnnnnnnnnnnnnnnnnnnnnnnnnnnnnnnnnnnnnnnnnnnnnnnnnnnnnnnnnnnnnnnnnnnnnnnnnnnnnnnnnntcaggtcgctagttttagaaatgaaatctaagtggttttttttggtaaaattaaggtagaaaatgcatgacttggatgctttaaagaggaagaggggtaaagtccttccaaaatgtactagannnnnnnnnnnnnnnnnnnnnnnnnnnnnnnnnnnnnnnnnnnnnnnnnnnnnnnnnnnnnnnnnnnnnnnnnnnnnnnnnnnnnnnnnnnnnnnnnnnnnnnnnnnnnnnnnnnnnnnnnnnnnnnnnnnnnnnnnnnnnnnagagtgaaactccatctcnnnnnnnnnnnnnnnnnnnnnnnnnnnntataatcacacaaccttttgttctccaaatttcccatggaaagttttatacagacgaaaacaagtctgaacaccaattacttccatgacaggaaagtaatattttaatcttaaggagctctaataaatataaacattgacatgaaggcaaagtctgaaattggtgaattggtaacaaagggctgactagcattgctctaagaaactacctgcaggacccagaatgcctctcgcagccaggctagaggccaacattctctcccacccgagaagtgtgtgccaccccttgctccgtggagggtgtctgctgatgctttctatgaaactcagccctgtccacaggggttatttggagaattatccactgtgactgct

SEQ ID NO: 241876 - DNA, 2246 bp, Homo Sapiens
ttggatccggacggggagcaaccggggcaggccgtgccggctgaggaggtcctgaggctacagagctgccgcggctggcacacgagcgcctcggcactaaccgagtgttcgcgggggctgtgaggggagggccccgggcgccattgctggcggtgggagcgccgcccggtctcagcccgccctcggctgctctcctcctccggctgggaggggccgtagctcggggccgtcgccagccccggcccgggctcgagaatcaagggcctcggccgccgtcccgcagctcagtccatcgcccttgccgggcagcccgggcagagaccatgtttgacaagacgcggctgccgtacgtggccctcgatgtgctctgcgtgttgctggctggattgccttttgcaattcttacttcaaggcatacccccttccaacgaggagtattctgtaatgatgagtccatcaagtacccttacaaagaagacaccataccttatgcgttattaggtggaataatcattccattcagtattatcgttattattcttggagaaaccctgtctgtttactgtaaccttttgcactcaaattcctttatcaggaataactacatagccactatttacaaagccattggaacctttttatttggtgcagctgctagtcagtccctgactgacattgccaagtattcaataggcagactgcggcctcacttcttggatgtttgtgatccagattggtcaaaaatcaactgcagcgatggttacattgaatactacatatgtcgagggaatgcagaaagagttaaggaaggcaggttgtccttctattcaggccactcttcgttttccatgtactgcatgctgtttgtggcactttatcttcaagccaggatgaagggagactgggcaagactcttacgccccacactgcaatttggtcttgttgccgtatccatttatgtgggcctttctcgagtttctgattataaacaccactggagcgatgtgttgactggactcattcagggagctctggttgcaatattagttgctgtatatgtatcggatttcttcaaagaaagaacttcttttaaagaaagaaaagaggaggactctcatacaactctgcatgaaacaccaacaactgggaatcactatccgagcaatcaccagccttgaaaggcagcagggtgcccaggtgaagctggcctgttttctaaaggaaaatgattgccacaaggcaagaggatgcatctttcttcctggtgtacaagcctttaaagacttctgctgctgctatgcctcttggatgcacactttgtgtgtacatagttacctttaactcagtggttatctaatagctctaaactcattaaaaaaactccaagccttccaccaaaacagtgccccacctgtatacatttttattaaaaaaatgtaatgcttatgtataaacatgtatgtaatatgctttctatgaatgatgtttgatttaaatataatacatattaaaatgtatgggagaaccaaatccacacttgcaggcatttgtagtcaactgtaatcaaacaggtggtcaataatttaaaatctcacattcctttagctgactctacaagtagaggctggcagcaaacacaatatctctcttgattttggtgattcctaagagaaaagaaagtaaggtttaaactttcaagaccacaaaacacctaacttgcctctaccgaaattttaaagccagtataccaaccctgattcaactggtaagcgagcagcctagaaagtcaaacaccttgctgaacacctagaggaatttgcagccacctctgtgaggtggaaaacatacaagccagacccctgttcttttgactctgaaatactccatgggggctggccaggaaagaggtgtctagaactgtttaaaaagataaatgctaggtcgggcgcagtagctcatgcctgtaatcccagcccataaaaattttgatattcagcatgatttgaagaattacgagatttgaccatagtgggcccattatatctccatagccacatgagatgagctgagcagggctgtttcacgtagaagtgctaccatctctcggtatcaccacagtttccactcctttctgttatctgtctggtccctgcataatctcggatctaaggtgatgtcatttgggcttttcagttatgacaggtatggttagttaggatgcctaagtatatttactatctccccaa

SEQ ID NO: 241877 - DNA, 1192 bp, Homo Sapiens
ggtggggcttggaagcccagtgctgttccaagtgcacacagactctacaagaggccaaggaggacactggtatccgtgcgccatggcagctgcaccccagggggtgagccatgggccagagggcacccaaatactcaccggggggtccagcactattagctgaaaatcaagcaaaggaaaaaatgttgagcattttgattatccaaaagggagttggacaattcatttatgaaccaaagaccaaaacctaacagagctagattcaaagaaaacccactgtggattaattttaattttaagtagttagatgaaataattgcaaaataaaatattaccaaatctaatctaaaagcatgtaacaaggaattgtcccacgatcaagtaaggttgtttggggaatgcaaggatcgttcggcattagaaagctgattgataacattcatcctatcagaagtcaaagagaaaaagggaaatccattctctacatgctgaaaatgcctttgccaaaatccaaggtgttatttctgataatacctcttagaaacagaaggaaactgtgttaacatgataaagatgatcttttcaagccaagagccatcatccttcccttaacagtcaggaacgagggccagttctctgtccccaggaccagccagttaccaacaactccacagaatggacagcttccctgtgcagagcctgatacaccaaccaagcctctcactggacatcaaaaatctgaatcaacataagcaagggcaggcaaaacattgtccagatgttagtcttcccgtaagttaacacaaaaatttaatgcaatttcaactgaaatctccatggtgtttttgtaaggaatttgtccaatgacttagaagattacttggaagaattaaatgcttgagaatagcaaagaatcttttttaaaaggaggcagaataagggatggaatgtgttcaccaaacagtgactatctcatatgacaccactaatgagagagagtggactgatgctggacagacaggaatggagcagaatgcccagaaagaactcgagtgcaaagacacaggcttccatttgataaagtctgagatcagtgagaaaatgaaggattcaacaaataatggggagaaatgttacatctcaatctaatatctatcaaaacaaattctaggccaggcacggtggctcacac

SEQ ID NO: 241878 - DNA, 2015 bp, Homo Sapiens
acaagtaacatcacaaatgatcacatcttcacatgctcttaaagtattatttgtactcagtgtaaggctattatcgtttttcatacataaaattttctagctctgtaacacaatgcaatttttaatccattcaagtaagttcaaccccaaagttgccgcttcccagcattaagacatgcacccacccctattctaagattttctaaaacttgtatttcggggagaaagacctcttttaaaaaataatcccaattagtgggagagtaaatggctgacattagtagcaaaaccttagttatctgaaaataacatattggaaatgagacattattaggattttaaacaaacaatagcatttagacataaagtaggaagcaaaatacagtaaacagaaatagtgtagccaaatatgcattctcttcagctacactagagtggaccttgcttagtacccttaagtaaaagacaaaacatttacctcatgtaaaaatgaaggtaaaacgaaagaggcaaaaataaatattgctagtttctaggatggctgaatgttttctaaaccagaaatggttagaaaggaactttattgcaccaagtcaatcataagcaagtttgcagttcacaggcattttaattcaaccttgagtcacaaaggaaacaacacgctgcaagaatacagtctgcattaaataagatatatcagcattgtggtctgggaaaacctatgcttgccaggacaaggcagggtctgagcttaggtctgccatgaaaatgaatttgtgggttatcagtaaacagtatgaggactacacagatgccagcatcctgctgccaaggagacatggggcaagagttgaagatttgagaggaaatgaagagacatacacaacaccaaagggaaaagggggctggaatcaagttcagccaaagcacctaacacaaaaaacaggtgagctttggtcagtctgttcttcaaaatatgtatgatcataatatggtgaagtttcataatttccaactcaaaaatacaaatgatcctcagttctatacttttgcctctattctcttataaagaaatatgtcaacataacagtatgacataacagttaaaatgaaggacaaaagcttgcttatccttagtttgacctcagcataaggcaaaatcccctggactaatacatttaaaaacaaacttaaaggaaaaaaagcgaaaccaaccttcatgcaaagattaattttaaaactatcaaaagtcagttcttttattccagaggtcactaagaaaagtaccatctgctaaaattctctttcaagcacttcttccatcatatcctagaggtgagatatgggaaacagaaagcaaatcagtgtttccttcaggagctatattctgttactcaattgaggtaagacaaagtgacaatgaagatatgagtagtatttccttccaatttttaaacattttcagaagctgagatccaaccccagtcaataaaatgcaggacactagaagcaacaacttattttggactcctgagatcaaacacattgaactttcaaatctggtgtttgtatcaaaatgtgattttcattaaaatcaggtaagctagtcctacataaaaaagcatgagctgaaagtggaggaccctctatcttctcattccttaactgagccaccgatgttaagaaaaaaatggcttaagcggtaccttcaacaactattctagttaagaaggtgacaacaaattcctttcaataggttctctcaagaaaagttttccacacaaccatcccagtctttacaattttttacctagcaccatcataataaaatgttatctttcaaagtgctctctaaaatcctgttacattatctaaatgctaatcactactcaaatcagcagttacacagacgttaggtaattaaaacagcacagaggtaaataaccattattacagtacagtggcgattcactagcccaactggcatccaaacattcccataggttatcagccaa

SEQ ID NO: 241879 - DNA, 1208 bp, Homo Sapiens
  misc_feature (913)..(942): n is a, c, g, or t
ttggctcctcccctttcctgcttctgcgagaactccctccctccctccagctccgccagcccaggcgccccttccctggaagccgagcggcttcgctcgcatttcaccgccgccgcctctcgcaatattgcaatataggggaaaagcagaccatggtgaatccgggcagcagctcgcagccgcccccggtgacggccggctccctctcctggaagcggtgcgcaggctgcgggggcaagattgcggaccgctttctgctctatgccatggacagctattggcacagccggtgcctcaagtgctcctgctgccaggcgcagctgggcgacatcggcacgtcctgttacaccaaaagtggcatgatcctttgcagaaatgactacattaggttatttggaaatagcggtgcttgcagcgcttgcggacagtcgattcctgcgagtgaactcgtcatgagggcgcaaggcaatgtgtatcatcttaagtgttttacatgctctacctgccggaatcgcctggtcccgggagatcggtttcactacatcaatggcagtttattttgtgaacatgatagacctacagctctcatcaatggccatttgaattcacttcagagcaatccactactgccagaccagaaggtctgctaaaaggtcagagtaatgcagaatgcgtgccttcatctcagatttgttcatcacaggtggatcccatgtgtcttcagtagacaagtcacctttgtagctagcaccagtgccagctccatgccattgcaccttctttagtcttgattgcccttcccgcatttattggtgtattaaaatgactgaatatgaacattaaggactccatgaacctgggctaatgggagactgtagagaaaatgaaaaaagatccaccagaggacatcttnnnnnnnnnnnnnnnnnnnnnnnnnnnnnnaatgactaatgaacctaattaaaagaagcattcaaatctgctttctaccctcattaacaattagcagggcactggccagagtttgtaccctgtgttttaccttaacaacattctatttgctctttgtatatctaactgttataatgaaatttttttcccatcgtgtgaaaccatgatagaaaggaaaaagaggtggcttttgtgatattctatcccaaacacttattggatctctgtagaaaacaatgtatggatgcctgtaaatg

SEQ ID NO: 241880 - DNA, 1238 bp, Homo Sapiens
ctttgtacaaaaaagttgggccgtcgccccgctggagggaggactcaggccccgctggccgcgggctcggtacccggtgggtcggtggagcgtctgttgggtccgggccgccggcttcgccctcgccatggcgccctggctgcagctcctgtcgctgctggggctgctcccgggcgcagtggccgcccccgcccagccccgagccgccagctttcaggcctgggggccgccgtccccggagctgctggcgcccacccgcttcgcgctggagatgttcaaccgcggccgggctgcggggacgcgggccgtgctgggccttgtgcgcggccgcgtccgccgggcgggtcaggggtcgctgtactccctggaggccaccctggaggagccaccctgcaacgaccccatgggtgccggctccccgtgtccaagaaaaccctgctctgcagcttccaagtcctggatgagctcggaagacacgtgctgctgcggaaggactgtggcccagtggacaccaaggttccaggtgctggggagcccaagtcagccttcactcagggctcagccatgatttcttctctgtcccaaaaccatccagacaacagaaacgagactttcagctcagtcatttccctgttgaatgaggatcccctgtcccaggacttgcctgtgaagatggcttcaatcttcaagaactttgtcattacctataaccggacatatgagtcaaaggaagaagcccggtggcgcctgtccgtctttgtcaataacatggtgcgagcacagaagatccaggccctggaccgtggcacagctcagtatggagtcaccaagttcagtgatctcacagaggaggagttccgcactatctacctgaatactctcctgagaaaagagcctggcaacaagatgaagcaagccaagtctgtgggtgacctcgccccacctgaatgggactggaggagtaagggggctgtcacaaaagtcaaagaccagggcatgtgtggctcctgctgggccttctcagtcacaggcaatgtggagggccagtggtttctcaaccaggggaccctgctctccctctctgaacaggagctcttggactgtgacaagatggacaaggcctgcatgggcggcttgccctccaatgcctactcggccataaagaatttgggagggctggagacagaggatgactacagctaccagggtcacatgcagtcctgcaacttctcagcaga

SEQ ID NO: 241881 - DNA, 1632 bp, Homo Sapiens
  misc_feature (933)..(1029): n is a, c, g, or t
ttggctctcgtcctagcaacaggagacctgacagatgccaaaacaaaggaacagttgggatccaggcagcatgaggtagaatggcaaacctaccagggtattctgaagaagacaagagtcatggaaaaaaccaagtggctggatatcaaaggaaatcatgatgcattcaatattccaagtctggacagcatcaagaattattacaggaaatattctgctgtacgtagagatggctctttccattatgtccacagtactccctttggcaactattcgttcatctgtgtagatgccactgtaaatccagggcctaagagaccctataatttctttggaattttagataagaaaaagatggaggagctcttattactggccaaggaaagcagtcggagcaaccatacaatttggtttggacactttacaacatccactattctttctccatcaccaggaatccggtcaataatgagttcggctatagcttatttgtgtggacatctccatacacttggtggactgatgcctgttttgcacactcgtcacttccagggcactttggaacttgaggtgggagactggaaggataataggaggagctgccatactgttttccatggtggctgcaccattttacattcccaccagcagtgtatcagagtcttggccttttccttatcctccattacttctgtcacagttaagattgatggagttcatttaggccaggctgttcatgtgtctggtcccattttcgtactgaagtggaatcctagaaactacagtagtgggacacataacatagaagtaatcgtccaggattctgctggaagaagtaagagtgttcaccacatattttctgttcaagagaataatcatctcagttttgatcccctggcatcatttattctccgtactgatcactacatcatnnnnnnnnnnnnnnnnnnnnnnnnnnnnnnnnnnnnnnnnnnnnnnnnnnnnnnnnnnnnnnnnnnnnnnnnnnnnnnnnnnnnnnnnnnnnnnnnntgaatcactgtgcctagacttctcattgctcattaacatccttttctttcagactgaagaacttcctttaacatttcttataggacaggtctggtgttgatgaaatccctcagctttgtttgtttgggaaagtcagctttgtttgtttgggaaagtctttatttctccttcatgtttgaaggatatttttgctgaacataatattctaagataaaattattttccttctgaatatgtcatgccactttctcctagccttaaggtttccactgagaagtctgctgccagacatattggagctcctttgcatgttatttgtttcttctctcttgttgcttttaagatcctttccttatcattgccctttgggaatttggttaataaatgccgttaggtagtcttatttgggttaaaacttcttggtgttctatgaccttcttgtacctgaatattgatatatttctttaggttaaaaaagttctctattattattttttgaataactttcctactctgatctctctctgtacctcctctttaaggcaatactcttagatttgtcctgttgaggctgttttctagatcttgtagtgtgcttcattc

SEQ ID NO: 241882 - DNA, 1447 bp, Homo Sapiens
ttgggggagaagtgaccaggccccaactctctttccagcctcgcctgattctctaagacttgccagcccttctcctgacccctgcaccgcctcctccaccttcgttcattcagcaagaatgaactgggctggggtgaaggaactctgcaggggcaggaggagaggacaaaggaaggaaaccaacttcatcagtgttactccagtggcttctgacacacagaaggggactgtcatagtcatgcttgatctcatgctcattcttttaccccctagtgcctccatactgagaggtacacacgggtgaacacgcacacacagacatgaacaggacacgaaagcaaagcacaggaacaagctctggctcattcacagaatcatttattcacaaatgtattgagtgccatgcaccaggcatgttttagggctgaggagatggcactgaacacaatggttatggcccctgtcctcatgaagtttatagtctgatgcagaaaccaataaacaaggaggcacccaataaatacattcttagaaagtgtaatatgtgctttgtaggaaagcaatgggggtagtgtaattgagattcatgggggagagctgtttagataggatgatcagagaaggggtctttaatgccgcaaaggatgaggagagagccaaataacgcagagaagagtgtttggggtacagaaaacagtcagtgcaagggcactgcagtaggaggggcttgcacatttgaggaacaggttggtggtccctgtggccagagcaaattgagaagagtgccgaggaagagatgtgcttggaaagggtcagattcatgccactgggatgggaagaggtaagtggaggttcacaggaggtttcctgaagaaatcagctcctggaggaagtgagggaagaaaaaaagggccagggagtgccatggcaaccaattctgagaggtgagaggtcatgggatgccggggagggtgatcagcagacaggcctggctggagtggaagggcgtgatctggaggtcccagccctgtcattgccttgggagaaagaaaacggccacaggtctaagggctccaaggcaaggctgatgggatagagctatggtgggtgaaatggggtgacagtgaggcaggggacacaagccgttccattgtctttctgtctctccacagcgccgcccctggctgggggcacccctgcaggtgggactggtgggcttctgcctggtatttgcaacccccctgtgctgtgccctattcccccagaagaggtaagtgctgtccctgggctgggtgggggactctggattggactctgcatctctggaccagctgacctagggtcttccagggtgttcaggaggaggcctggcaggcactccactgattctgggagtgggggaatgacagtgagccagtccttctggcagtagaaagagaggattttt

SEQ ID NO: 241883 - DNA, 939 bp, Homo Sapiens
tacaaaaaagttggccatgacggattgaggcacctcctttccctgctgaaggacaaaccttgtttccctgtggccctcattcttgtgctccctgaagctttcctaatattgctgtgctccccaccacccccatggcagtccctccgcagccccagtccctggccacgcccaagggaagagggaggtgaggacttgactttcctcccagagctcagcccatgtcaccctccaggccccagaatccagagtggcctcatttcctagacttgctgagaactcagcacttgtttgagaaccagtgcttatgtggtgtgcccttggcttctgggggagagcttggggcagcagaggcccctgggcagcccagccaggggagccacagccccgaggatggtcttgctctgggaattaggtgaccttcctggggaggccccaggagagtgaatcagggactcttgagaaattcctaaccagcctcctgtgacccagggagcagggtcgctaaggtcctgcccactgaggggacagccttctgggcagggacctcggggggcttcaagggctctgcacggctgtggggccctgtgcctttgtctccttgtgtctcctttcccccgaagtagatgaaacagtctcacatacccaactgctcatcaacagagcagagctgatggcatgagtgagggctgggcggggtggggcctccagagctttgcagggaaccctggaaccctaggaacaaggagcctttgttccaacagagcagagaaggaggttctctatgttcagaccactggagaggatagagaggtaaaaaggtggcgacagtttcccttaggggtctgcctggcaggagccacagctcaggaaagttgtgagggatgggacagaagctggcgaccaggcgaggcctaggccaggctcgggagaacttttctg

SEQ ID NO: 241884 - DNA, 547 bp, Homo Sapiens
ctataaagccaactttgtacaaaaaagttgggctacgctgtgcgcggcggacgtcggaggcagcggggagcggagcggggccgccggggcctctccagggccgcagcggcagcagttgggccccccgccccggccggcggaccgaataacgcaggaagggggccggggggacccgcccccgggcggctgcagccatgaactccaacgtggagaacctacccccgcacatcatccgcctggtgtacaaggaggtgacgacactgaccgcagacccacccgatggcatcaaggtctttcccaacgaggaggacctcaccgacctccaggtcaccatcgaggtccctgaggggaccccatatgctggaggtctgttccgcatgaaactcctgctggggaaggacttccctgcctccccaccctagggctacttcctgaccatgatcttccacccgaacgtgggcgccaatggctagatctgcgtcaacttgttccagagggactggacggcagagctgggcatcctacacttactgctgaccttcaagtg

SEQ ID NO: 241885 - DNA, 1089 bp, Homo Sapiens
aaaggactccccacaccagtgcgaatgctgccacagtgactcgggcattgggtaccagccgcggggcggccagtgctaatcggcttttatttcttaccaaaagctcaaaacccagcccaatttttatacagaaagttcaacgtcaaaaagtctaaaaagtagtaaatgtccagactgattttgggaaaaaaaataatactttggcattctgaataatagcataataaattttaaaacattaccctattatccagttttatattcagagtatgaaatcacttttacagtcctcaaaaccaacaaatttcacgaaaagtctctttgaaccgatggcacagggctacgaccctacccacccacccgccaaccccaacacacacacaaaaccataaagctcaccatacgaagtatgtgctttttctatatatttattacaggtacaacagaggtcttcataaatagttgcataaaatgttaaagccacaacattgcacatgatatgaagtaaaaccaaaaaacccccaatgagtgcatttacagtattttcatctgactgtgtactgctccacaatctgattgacggcttggggcaggaacagggggaggggcagtggggcaggacccaacctgatgtcttcatgtgatgggaagaccctcggacccccagaggaagccccaggtggtgggtggggggtgggtaggggaggcaggtgggaaaatgacagaccgaaggcaggaacagtcttatatacaagtaaggcctacatttcatcagagcaaaacgattcattctattttatgcaaaagtttgaggttgaatgcacgtttcagaagccacgtcgggcgtgagatgcacacagacgaggcgcctggaagctcagagccgagtggtctctgagtcctagacaaggccatgggagtggccgccacctaggtgcgtcttccccagagacgcacagtatctttgttcattaacaccagtggttgaacataggcattttgtttccttgaataaatcttgaaaacgttaaatttgcaaaattctattcatgtttgtttaaaaaagccaacttttttgtacaaagttgg

SEQ ID NO: 241886 - DNA, 960 bp, Homo Sapiens
  misc_feature (806)..(820): n is a, c, g, or t
caaggttaataaacagctttatttgccttgtacagcatcaattttcttacattctcagttaattggccattaaagtgctggaaattttcttaatcatgataacatttgttaaaaagaaatcagaactaatatcaggaacatggcggcatgaaggaaacagttcccttacaaaacacagaaaatggaagcccctcatgttgagggggtgggttggacaatttgcaaacagattctaatttcctctcaccgtcagcaccaaactggctgggaccaccacccctgggtgaaagaaacaacactaaagaaccctaaaaacacccacacaccctgactaccaccacctctgggccatctgtgggcgtttgctgtttgaacagatccagtctcaggaaagaggaagacctgacctccgtctgcaacccatcaccccacccacccttactaacaaaagcccccaaagtcattacaatgaaaaagtgggtttccattaccccaaaactaacaatgttcagtaaaaatgaggataataaacacaaaagcttgcttagtaaacaggagctctcagcagtcaatgcaaaaaaatatatatatatgaaatcttaaggcaaatactgttgactttgcacatgggctggacgaacttggaactctttacctatctgtatagttccaggagcctacaggcggtcggtttttcagcgcttgccaccgggccaggcaaggtctttgcatgattgctgaggcagtcggtgtgtttccctttggagtttatataggaacacaccacccaaggctgatgttttgtnnnnnnnnnnnnnnngtacacacatacaaaggcctgctactctttctttgtggaaactgacagctccacctcgggaagctggatgccaaccttattcccactgtcattgctagaagaggaggacagtcgggacttcttagaggccagggacccaa

SEQ ID NO: 241887 - DNA, 1544 bp, Homo Sapiens
  misc_feature (178)..(192): n is a, c, g, or t
gggctggacgaacttggaactctttacctatctgtatagttccaggagcctacaggcggtcggtttttcagcgcttgccaccgggccaggcaaggtctttgcatgattgctgaggcagtcggtgtgtttccctttggagtttatataggaacacaccacccaaggctgatgttttgtnnnnnnnnnnnnnnngtacacacatacaaaggcctgctactctttcttgtggaaactgacagctccacctcgggaagctggatgccaaccttattcccactgtcattgctagaagaggaggacagtcgggacttcttagaggccagggacaccccactcccctgtaacttgcctgtctcatcatcgctcccagtcacctcataatgacctttgctctttgaccccaatccaccaaaggtaccgaatttcagcttcccgtgtttccctttaactttcccaccttccagagacacttccccaccttcaaactccagcgtccccgtcggggtggaaggtccagagaactctctttcatcactgaatgaatttgagcggtgccgtggcttcttacttttaaataaggagaatttgcctttcggtgaagaggcttcggcctctgcctctccttccagagagcccaggctggcctttgaacttttcaggtcacctttggacccagaaattgatgcttctggtgagccagtgacaccacctttccctttaggtttggaaaaattaaacttgggcattttgatcttggactttttcagtttgacttcagactcttcccactcgccgtctccagcaccagcttggatgctggcctctgctttagggaagtgaacatccacccccatttctctgccaaccagctcacggccagagaaggtaaatttggggatcttcattttagggaatgttacttttccagatccactttccaagtgaccttgaggcccagacacactcagcccaggagcctggagtccaatctgacctcctttcacacctccttccacctttggtcctgagaaatgaaggcccccagcaaacttagatgtgtccaagttgagagcagaggagacttggggtcccttccactcacccccggaacctttaacactcaaatgcccttcaccaaggctgatgtctggggcactgacaccccctgaaacatccgcacctcctttgatttttgggcccttcaagttgatgccaaaatctgactcaggagatgccatattaaaggcaggccccttcacactgatatcaggagcagccccatggaaacctacttctgaacctttcagaccacctttgatttcaggcccagaaatctgcccagttgggagtttcacattcacgcctggcaggttcacatcacatccagaggacttaattccaggcatctggaggtttccttctaggccttgaacaccaatgcctggaagacctcctccgacagtggggcctttgatctcaccagtggccccaaggctccctttcacttttggtccttccaagttaaagtccacattcggtgccaa

SEQ ID NO: 241888 - DNA, 1414 bp, Homo Sapiens
ttggctcagcttagcagcatgccagtgtggagagcgcctcttcccaccagtcctcagccaccttctccacggcagcgacctccgtctcaagttccgcatcctcaggcgtcagcctgtccagtagcatgaacaccgcgaacagcctctgtctgggtgggacccccgcgagtgcatccagcagcagtagcagggccgcgcccttggtgacctcaggcaaagcacccccaaacttacctcagggggtgcctcccctgctgcacaaccagtacctcgtaggtcccggaggactgcttcctgcctacccgatctatggctatgacgagctccagatgctgcagtcacggctgccagtggactactatggaattccctttgctgcacccacagcgcttgccagccgagatgggagcctagctaataatccatatccaggtgatgtcacaaagtttggccgtggggactctgcatcccctgcacccgctaccacaccagctcagccacagcagagccaatcacagacccaccacacagcccagcagcccttcgtgaatcctgcactgccacctggctatagctacactggtcttccctactacacaggcatgcccagtgccttccagtatggccccaccatgtttgtccctccagcctcagccaagcaacatggggtgaacctcagcactcccacacctcccttccagcaggccagtggttatggccagcacggctacagtacaggttatgacgacctgacccaggggacagcagcaggagactactccaaaggtggctatgctggatcatcgcaggcaccaaacaagtctgcaggttctgggcctggcaaaggagtatcagtgtcttcaagcaccactggtctacctgatatgactggttctgtctacaataagacacagacttttgacaagcagggatttcatgcagggacgcctccacctttcagcctgccctcggtcttgggctccactgggcccctggcctcgggagcggcccctggctatgcacccccaccattcctacacatcttgccagcccaccagcagccccactcacagctgctgcaccaccaccttccgcaggatgcacagagtggctcgggtcagcgcagccagcccagctccctgcagcccaagtctcaagcctccaaacctgcctacggcaactctccatactggacaaactaaacccagaagagaggggtgggctggggcaaggcttatcctgagcaggagagaacacacgagcacgtatttgggagcccagtgccctttcctagaattcccgacatgtgtcagccatgcctctgtggggagtctgcctcccagactggctactgtatgtaatgtatttatgtatgtatttgtaaatgtgatagaagtctgggggggagttgggg

SEQ ID NO: 241889 - DNA, 1075 bp, Homo Sapiens
actttgtacaaaaaagttggtctctgtcttcctcctgcattgtttttcttataccatacaggtttttcattggccttgactttttgttgttaactcattcttctttgggtttattttcatttgtttctgctgaatattatttgtttcaaactaaaaataacattccacattttaattgatgtgcggactcttaatctacttaaaatgtgggctgaagttccatgattccagctagtctggaataggtcatttaactggatgttaattcacctacattgttccctaagtgacatgtgggtcccattctgctgacatatttgtgggtcctggtaacaaccatttgggtagatttgctgattcctcttttctccttagtggaagagaaagccaatacccacctcctcttgggcatgtgcttagacgcctgtgctcgctaccttctgttctccaagcagccgtcacaggcacaaaggatgtatgaaaaagctctgcagatttctgaagaaatacaaggagaaagacacccacagaccattgtgctgatgagtgacctggctactaccctggatgcacagggccgctttgatgaggcctatatttatatgcaaagggcatcagatctggcaagacagataaatcatcctgagctacacatggtactcagtaatctagctgcagttttgatgcacagagaacgatatacacaagcaaaagagatctaccaggaagcactgaagcaagcaaagctgaaaaaagatgaaatttctgtacaacacatcagggaagagttggctgagctgtcaaagaaaagtagacctttgacaaattctgtcaagctctaaatccatttttgtgtagggagaataatgtctagtaatgtggaagaatagctatcattcctgtctctgtggcacccgatcaatggcttaaatctgtcgttttgatatcaggtttcctcaatttagccttagtgaaggaggggttgtacacactgccatttttgtattttaaaggaaaaatgactttcattcccaactgattatgacctttcagatgtcgtcaagtgatgctttca

SEQ ID NO: 241890 - DNA, 677 bp, Homo Sapiens
gaatttaaggtaaaatttaaacaagctaatcattcagagaagaagaataaagcttacaatgatatagcacctctcaacacattcaagaattgactatacgatgtctgaaaaaaaacaagcttaaaatacctaatgccatgtaagaagaattggagacacagatctagagaacggtaacctatatcaacctgggtaagacttctaaaagatgatacaaataatgtagaaatggtcataagcaagattatatggaaattctgccaacaactcagcaggaggtaactgttcacacaataaaagactagaaaaagaggttaccttagataatcttaggttcagttgggtttatttaccagcaaagctgtcgttcatatcaagccctttcccttctatgtcttcagttttcagaaatcttacaagtggcatagagtttaaggaagactatgttactaaaatgagacttttcttttttaataccttcccatttagaaaaaaagtgcagcttgcttctatatcgcttacctaattttacataaatatactctttgaggctggagcaaatctgattttcaatgtgaaaataaactattaaaagtgttcttggagttatttctacagagaactaacaccagaatcgtctgtatcatcagactcgtctatttctgaaaaatcgccaa

SEQ ID NO: 241891 - DNA, 1615 bp, Homo Sapiens
cccacccgcagggcatccacacttgcatcaatgaggtttcttggcctgggcagcagtgaccacattgcctccaatgacttggagattagggtatttgtctttgatgtacttgatcatattgatctggaagatggaatttccctgggaagagtccaaaaccactacatccacaccagcctgggcgagcaagtccagcctatacttgtcatcctcatgagtgccaatggctgccccacacagcagctgtttcttggcatctttggaggctagtgggtagtcccgattcttcttcaggtctgtccgggcaatgatggccacaagctcatcatcttcatttacaatgggcaactttcccttcttgctgcgctgcagaatttcatttgcctccttcagtgtgatgcctgcaggggctaccaccaagtcttccctctttgtcattatctcttccaagaaacagtcatgttcctcctctttgagaaaatcaatgtccctggaggagatgatgcccaccaagcggctccccatccggcctgtgtctgtgattgggataccgcagaaaccatgccgggccttggcctcaaaaacatcccgcacgcgatccttggggctgaggaccacagggtctgtgatgaatccctgttcatatttctggaaagggatggtgagaaagggcatcgcatctttgaactactttcatcaggctcttgatctgaagcatggggtctctgcttatcgatccctttggcagtgccacaagaccaaatcacaccaacacatcttagagacatgggtaggctggaggcactgtacacctggtctattgctgctgctttaagaaacagaatctcagggtcttctcagtaactgaaccccatggtgggaagaaagaatactaaattagaataaacccctactcccaccccaccccacctcagtgcaattcccaggagcgcttgctaatgatcgttgcccttctgaccttcactttccgaacttcattggcctggaattcaggtgtacagttgtggtggatgaagccaataccgcctgtaagctacaggataaaaagagactactactaagtgacaagaagcaggactgaatgcctttggggaaaggcgatggagtccttgctccttcccccacaccccatggggctcaccgccattgctatggccatcccagcctctgtgactgtgtccatgggagaggaaaccagtggggtcttaagagtgattttcttggtcagagcagaagtcaggtcctgaggagacaaacgtcaaccagtgtgggaaagcatcccttacacctcaaggtgttactgagtcccccacaaaaaggcacttttgtatgacctgcatgctaacaagcaacatgatcctataaaatccacccccaagcccaatctggtgagttagcccagagaccaggtgatagtagcaccttagctcaccttgatgttcaggacccaattcctgatcatactcaccacctggtctgcagtgaagtcgatgtactcagggagaatgagaaagtcactgcgagggaaggagtgaattgggagtaaagctctcagcttagggcagcatgagactccatccccatgtaacaatca

SEQ ID NO: 241892 - DNA, 1475 bp, Homo Sapiens
gagcaccacccccaaaccatggtctgtgtatcagttggccttgcccacccatcagcaccacaaaccccgggagctacagctacgtcaaccaagcagccgggcagtgggcagctgggccgggccagtgggccgggctggacttactatagcaacccgtgacagtagaagggcatttggggctgtgggactttatgtctggagggatcttgggagccactaaataaaacaaacagaccagagtttagagaaggtgcagagcaggagcaagaaggccaggctaggcaagggagtggcaggtgatggatgacaagaccttgtcttgcttccagccatgtcacccatccaagaggccaatttggccccagggttgcccctattggagggctctattgtccccataagagtgcttggttccaaggtatgtggggcctgaaactggggtctctgtgggccctatcaaagtatattcttaccttcctgcgtaatgcagatggagccacttcccatgcccacccgcagggcatccacacctgcatcaatgaggttcttggcctgggcagcagtgaccacattgcctccaatgacttggagattagggtatttgtctttgatgtacttgatcatattgatctggaagatggaatttccctgggaagagtccaaaaccactacatccacaccagcctgggcgagcaagtccagcctatacttgtcatcctcatgagtgccaatggctgccccacacagcagctgtttcttggcatctttggaggctagtgggtagtcccgattcttcttcaggtctgtccgggcaatgatggccacaagctcatcatcttcatttacaatgggcaactttcctgtggtcagggcaggacatgaatcaggaccctaggcattagttccaggccctttcccagctctaggacttacccttcttgctgcgctgcagaatttcatttgcctccttcagtgtgatgcctgcaggggctaccaccaagtcttccctctttgtcattatctcttccaagaaacagtcatgttcctcctctttgagaaaatcaatgtccctggaggagatgatgcccaccaagcggctccccatccggcctgtgtctgtgattgggataccgcagaaaccatgccgggccttggcctcaaaaacatcccgcacgcgatccttggggctgaggaccacagggtctgtgatgaatccctgttcatatttctggaaagggatggtgagaaagggcatcgcatctttgaactactttcatcaggctcttgatctgaagcatggggtctctgcttatcgatccctttggcagtgccacaagaccaaatcacaccaacacatcttagagacatgggtaggctggaggcactgtacacctggtctattgctgctgctttaagaaacagaatctcagggtcttctcagtaactgaaccccatggtgggaagaaagaatccaa

SEQ ID NO: 241893 - DNA, 894 bp, Homo Sapiens
actttgtacaaaaaagttggcggagacacgcggcggtgtcctgtgttggccatggccgactacctgattagtgggggcacgtcctacgtgccagacgacggactcacagcacagcagctcttcaactgcggagacggcctcacctacaatgactttctcattctccctgggtacatcgacttcactgcagaccaggtggacctgacttctgctctgaccaagaaaatcactcttaagaccccactggtttcctctcccatggacacagtcacagaggctgggatggccatagcaatggcgcttacaggcggtattggcttcatccaccacaactgtacacctgaattccaggccaatgaagttcggaaagtgaagaaatatgaacagggattcatcacagaccctgtggtcctcagccccaaggatcgcgtgcgggatgtttttgaggccaaggcccggcatggtttctgcggtatcccaatcacagacacaggccggatggggagccgcttggtgggcatcatctcctccagggacattgattttctcaaagaggaggaacatgactgtttcttggaagagataatgacaaagagggaagacttggtggtagcccctgcaggcatcacactgaaggaggcaaatgaaattctgcagcgcagcaagaagggaaagttgcccattgtaaatgaagatgatgagcttgtggccatcattgcccggacagacctgaagaagaatcgggactacccactagcctccaaagatgccaagaaacagctgctgtgtggggcagccattggcactcatgaggatgacaagtataggctggacttgctcgcccaggctggtgtggatgtagtggttttggactcttcccagggaaattccatc

SEQ ID NO: 241894 - DNA, 1732 bp, Homo Sapiens
ttggatcacgaccacatttgtcatgatgacagtgacaagatatctcccggggccaattcagcatctctacctggccatcctaacaaggtgatttgtgaaaggagtgaagatagtccaagtcctaagagacagcgcctctctcattcagtctttgattatacatcagcatcaccagctccctcaccaccaatgcgaccatgggagatgacatcaaataggcagcccccttcagttcgaccaagccaacatcacttctcaggggaacgatgcaacacacctgcacgcaacagaagaagtcctcctgtcaggcgccagagaggaagaagggatcgtctgtctcgacataattccattagtcaagatgaaaactatcaccatctcccttacgcacagcagcaagcaatagaggagcctcgagccttccaccctccgaatgtatctccccgtctgctacatcctgctgctcatccaccccagcagaatgcagtcatggttgacatacatgatcagctccatcaaggaacagtccctgtttcttacacagtaacaacagtggcaccacatgggattccactctgcacaggccagcacatccctgcttgtagtacacagcaggtcccaggatgctctgtggttttcagtggacagcacctccctgtctgtagtgtgcctcctccaatgcttcaggcatgttcagttcagcacttaccagtaccatatgctgcattcccaccccttatttctagtgatccatttcttatacatcctcctcacctttctccccatcatcctcctcatttgccaccaccaggccagtttgtccctttccaaacacagcaatcacgatcgcctctgcaaaggatagaaaatgaagtggaactcttaggagaacatcttccagtaggaggttttacttaccctccatcagcccaccccccaacattacctccatcagctcccttgcagttcttaacacatgatcctttgcatcaggaggtgtcctttggagtaccttatcctccatttatgcctcggaggcttacaggacgtagtagataccgatcccagcagccaataccacctcccccttatcatcccagcttactgccatatgtgttatcaatgcttccagtgccacctgcagtgggcccaactttcagctttgaattagatgtagaagatggagaagtagaaaattacgaggccctgttaaacctggcagagcgactgggagaggcaaagcctcgtggactgactaaagcagatattgaacaacttccttcttatcggttcaatcctaacaaccaccagtcagaacagactttgtgtgtagtatgcatgtgtgattttgagtcaaggcagctacttagagtcttaccctgtaaccacgagttccatgccaagtgtgttgacaaatggcttaaggcaaatcgtacttgcccaatttgccgagctgatgcttcagaagtgcatcgggattcagaatgaccaacctaagaagcacaaatttagtttgggtgttcctcatcacatgtatatacggactatccattgaacttaatctgtgtggcttccagccctccctttaccaaaagggtcaatgggacctttctttgcactgtgtgacttaatcaactataaaagcttacaattagtcttcacagttatgggattgttatactaaaccgtgtgattggaactccaaaggactttttcctttagcttaattttg

SEQ ID NO: 241895 - DNA, 1525 bp, Homo Sapiens
ttggctccagaaatagaaccatgtgctgagaatagattagacaccaaggaagaaaagagtgtagaatatgaaggagatctgaaatcagggactgcagaaacagaacctgtagagcaagattcttcacagccttccttacctttagtgagagcagatgatcctttaagacttgaccaggagttgcagcagccccaaactcaggagaaaacaagtaattcattaacagaagactcaaaaatggctaatgcaaagcagctaagctcagatgcagaggcccagaagctggggaagccctctgcccatgcctcacaaagcttctgtgaaagttctagtgaaaccccatttcatttcactttgcctaaagaaggtgatatcatcccaccattgactggtgcaaccccacctcttattgggcacctaaaattggagcccaagagacacagtactcctattgtcagtgctgggaggtaacaatcatgccgtctggagtctcctgctacctatgcctgatgctggcagatgtgggttggctgagggctcatgcagcatcctttgtccagatgcagaagtggaactgaatcctgttgctcctcttaagaccaggtattagcaactatccagaaagcaccatagcaaccagtgatgtcatggctgaaagcatggtggagacccatgatcccatacttgggagtggaaaaggggattctggggctgccccagacgtggatgataaattatgtctaagaatgaaactggttagtcctgagactgaggcgagtgaagagtctttgcagttcaacctggaaaagcctgcaactggtgaaagaaaaaatggatctactgctgttgctgagtctgttgccagtccccagaagaccatgtctgtgttgagctgtatctgtgaagccaggcaagagaatgaggctcgaagtgaggatccccccaccacacccatcagggggaacttgctccactttccaagttctcaaggagaagaggagaaagaaaaattggagggtgaccatacaatcaggcagagtcaacagcctatgaagcccattagtcctgtcaaggaccctgtttctcctgcttcccagaagatggtcatacaagggccatccagtcctcaaggagaggcaatggtgacagatgtgctagaagaccagaaagaaggacggagtactaatcaggaaaatcctagtaaggccttgattgaaaggcccagccaaaataacataggaatccaaaccatggagtgttccttgagggtcccagaaactgtttcagcagcaacccagactataaagaatgtgtgtgagcaggggaccagtacagtggaccagaactttggaaagcaagatgccacagttcagactgagagggggagtggtgagaaaccagtcagtgctcctggggatgatacagagtcgctccatagccagggagaagaagagtttgatatgcctcagcctccacatggccatgtcttacatcgtcacatgagaacaatccgggaagtacgcac

SEQ ID NO: 241896 - DNA, 1695 bp, Homo Sapiens
actttgtacaaaaaagttggccgcttcgcagagcggctaggagcacggcggcggcggcactttccccggcaggagctggagctgggctctggtgcgcgcgcggctgtgccgcccgagccggagggactggttggttgagagagagagaggaagggaatcccgggctgccgaaccgcacgttcagcccgctccgctcctgcagggcagcctttcggctctctgcgcgcgaagccgagtcccgggcgggtggggcgggggtccactgagaccgctaccggcccctcggcgctgacgggaccgcgcggggcgcacccgctgaaggcagccccggggcccgcggcccggacttggtcctgcgcagcgggcgcggggcagcgcagcgggaggaagcgagaggtgctgccctccccccggagttggaagcgcgttacccgggtccaaaatgcccaagaagaagccgacgcccatccagctgaacccggcccccgacggctctgcagttaacgggaccagctctgcggagaccaacttggaggccttgcagaagaagctggaggagctagagcttgatgagcagcagcgaaagcgccttgaggcctttcttacccagaagcagaaggtgggagaactgaaggatgacgactttgagaagatcagtgagctgggggctggcaatggcggtgtggtgttcaaggtctcccacaagccttctggcctggtcatggccagaaagctaattcatctggagatcaacccgcaatccggaaccagatcataaagggagctgcaggttctgcatgagtgcaactctccgtacatcgtgggcttctatggtgcgttctacagcgatggcgagatcagtatctgcatggagcacatggatggaggttctctggatcaagtcctgaagaaagctggaagaattcctgaacaaattttaggaaaagttagcattgctgtaataaaaggcctgacatatctgagggagaagcacaagatcatgcacagagatgtcaagccctccaacatcctagtcaactcccgtggggagatcaagctctgtgactttggggtcagcgggcagctcatcgactccatggccaactccttcgtgggcacaaggtcctacatgtcgccagaaagactccaggggactcattactctgtgcagtcagacatctggagcatgggactgtctctggtagagatggcggttgggaggtatcccatccctcctccagatgccaaggagctggagctgatgtttgggtgccaggtggaaggagatgcggctgagaccccacccaggccaaggacccccgggaggccccttagctcatacggaatggacagccgacctcccatggcaatttttgagttgttggattacatagtcaacgagcctcctccaaaactgcccagtggagtgttcagtctggaatttcaagattttgtgaataaatgcttaataaaaaaccccgcagagagagcagatttgaagcaactcatggttcatgcttttatcaagagatctgatgctgacgaagtggattttgcaagttggctctgctccaccatcggccttaaccagcccagcacaccaacccatgctgctggcgtctaagtgtttgggaagcaacaaagagcgagtcccctgcccggtggtttgccatgtcgcttttgggcctccttcca

SEQ ID NO: 241897 - DNA, 1256 bp, Homo Sapiens
ttgggtggctgcaccagtcacggcagctaccacggtaacccacatcacagcctttgaccctgacagcacggggcagcaggtgtggcaggatctacttcaggatggacagctggactctcccactggtgatggggggtctgactgggagatggtgggaagagaggttgtccctgtcttgggaccaggggtgggaggcctggtaataagtaggccttgtttccatgttagggatccctatccctggggctgaaggggctcctgtcctgaattctcttgtgtttctctcaggccaaagcacccctacgcagaaaggagtaggcattgctggagctgtgtgtgtttccagcaagttgcgacctcgaggccagtgccgcctggagttttcactggcttgggacatgcccaggatcatgtttggagctaaaggccaagtccactacaggcggtatacaaggttctttggccaggatggagatgcagcacctgccctcagccactatgcactgtgccgatacgcagagtgggaagagaggatctcagcttggcagagcccggtattggatgacagatcactgcctgcctggtacaaatctgcgctgttcaatgaactatacttcctggctgatggaggcacagtgtggctggaagttcttgaggactccctaccagaggagctgggcagaaacatgtgtcacctccgccccaccctacgggactacggtcgatttggctaccttgagggccaggagtaccgcatgtacaacacatatgatgtccacttttatgcttcctttgccctcatcatgctctggcccaaacttgagctcagcctacagtatgacatggctctggccactctcagggaggacctgacacggcgacggtacctgatgagtggggtgatggcacctgtgaaaaggaggaacgtcatcccccatgatattggggacccagatgatgaaccatggctccgcgtcaatgcatatttaatccatgatactgctgattggaaggacctgaacctgaagtttgtgctgcaggtttatcgggactattacctcacgggtgatcaaaacttcctgaagacatgtggcctgtgtgtctagctgtgatggaatctgaaatgaagtttgacaaggaccatgatggactcattgaaaatggaggctatgcagaccagacctatgatggatgggtgaccacaggccccagtgcttactgtggagggctgtggctggcagctgtggctgtgatgg

SEQ ID NO: 241898 - DNA, 1199 bp, Homo Sapiens
ttggctttagaaatgcatcatccagtgactcaaagtacatttttagggacaaagctacatgatagaaatataacttgccagcaggaaaaaatgaaagaaattaattctgaagaagtgaaaattaatgatattacagtagaaattaataaaaccacagaaagggctcctgaaaattgtcatttggccaatgagataaaaccttctgacccaccattggataatcagatgaaacattcttttgattcagcatcaaataagaatttcagccaatgtttggaatccaagctagaaaacagtccagtggaaaatgttactgctgcttcgactctgctcagtcaagcaaaaattgatacaggagagaataaatttccaggttcagctccccaacagcatagtattctcagtaaccagacatctaaaagcagtgataacagggagacaccacgaaatcattctttgcctaagtgtaattcccatttggagataacaattccaaaggacttgaaactaaaagaagcagagaaaactgatgaaaaacagttgattatagatgcaggacaaaaaagatttggagcagtttcttgtaatgtttgtggaatgctgtatacagcttcaaatccagaagatgaaacacagcatctgcttttccacaaccagtttataagtgctgttaaatatgtgggctggaagaaagaaagaattctggctgaataccctgatggcaggataataatggttcttcctgaagacccaaagtatgccctgaaaaaggttgacgagattagagagatggttgacaatgatttaggttttcaacaggctccactaatgtgctattccagaactaaaacacttctcttcatttccaatgacaaaaaagtagttggctgcctaattgcggaacatatccaatggggctacagagttatagaagagaaacttccagttatcaggtcagaagaagaaaaagtcagatttgaaaggcaaaaagcctggtgctgctcaacattaccagagcctgcaatctgcgggatcagtcgaatatgggtattcagcatgatgcgtcggaagaaaattgcttctcgcatgattgaatgcctaacgagtaactttatatatggctcatatttgagcaaagaagaaattgctttctcagatcccactcctgatggaaagctgtttgcaacacagtactgtgg

SEQ ID NO: 241899 - DNA, 1652 bp, Homo Sapiens
ttggattagtttctttttatgtgtgtatgtatatacaatccccctagtttttgtttagtctcacatcatcctaaagacatttaaaaaaacccttgtaaacaagttgtattagcttccttttccccattccatagaattgttttagtatggatgctgtacaaagagttcatgcctgggggactaaaggaaagttctcaagttcttttaattttgatttgcatcaaaaagtccgcttaatttcaggtttcacctccaggagtcaatcattatggacttaaagctatagtaacttttgaagatcgtttgtaattcgctgtctttgctaggttttcttttctaagcaggctcatttctgtagttcagaaacttagcacccactagtcgggtacccctggagagtcctggtaccgcccacctggggcgcctacgaatcctaggcctttgcgtgttgatggacggattcgcgctgcaagaagcctcgccgctgtcaccactgggcattggcaattggttcagggggaacggcgcggaaccaatgggagcggtggctcgggagagaccttggagcgcgcgggaaagagaccaatataaactgtggcgggatagttttcgggtccttgtccagtgaaacaccctcggctgggaagtcagttcgttctctcctctcctctcttcttgtttgaacatggtgcggactaaagcagacagtgttccaggcacttacagaaaagtggtggctgctcgagcccccagaaaggtgcttggttcttccacctctgccactaattcgacatcagtttcatcgaggaaagctgaaaataaatatgcaggagggaaccccgtttgcgtgcgcccaactcccaagtggcaaaaaggaattggagaattctttaggttgtcccctaaagattctgaaaaagagaatcagattcctgaagaggcaggaagcagtggcttaggaaaagcaaagagaaaagcatgtcctttgcaacctgatcacacaaatgatgaaaaagaatagaactttctcattcatctttgaataacgtctccttgtttaccctggtattctagaatgtaaatttacataaatgtgtttgttccaattagctttgttgaacaggcatttaattaaaaaatttaggtttaaatttagatgttcaaaagtagttgtgaaatttgagaatttgtaagactaattatggtaacttagcttagtattcaatataatgcattgtttggtttcttttaccaaattaagtgtctagttcttgctaaaatcaagtcattgcattgtgttctaattacaagtatgttgtatttgagatttgcttagattgttgtactgctgccatttttattggtgtttgattattggaatggtgccatattgtcactccttctacttgctttaaaaagcagagttagatttttgcacattaaaaaattcagtattaattaaacattacttattctaccctcttttttggcaaggaggacaaatacgcaatgttggaaaaccttggatggatatcttctctttaaaaaaatgtaaagataatttggtcttgagggtttaaacggttgataatgcctctacaacaacaagaaaaaagataaaatactaggatagaatcatggtgggcacagtg

SEQ ID NO: 241900 - DNA, 1355 bp, Homo Sapiens
gtgtgagccactgcacccggcctaatatctgatttttaaaaggcaataattagctttgatgacaggtagtttgtctgattttgagactggacaatgacaaggttaaatttcaacaatggaagcatgtacccaagtgttttgtcagatactttgcatggaaatgcctgcagtttgggagactggtgtgtattgaatgcttcttttagcacatttcagttggactgcgatgcagttcttcagctcttcattgaaacgctgctccacaacacaaatgccggccaaggccagggagatgcaagcatggactctgcaaagcggcggcatcccaaactcctggccaaagcccttgagatggttcctttactgacgagcacaaaagatttggtcatcagtcttagtggaatactacataagttggatccttatgactatgaaatgattgaagttgtcttgaaagttatagaacgagctgatgaaaagacaaccaatattaatattaatcaggcattgagtattctgaaacatttgaagtcatacagaagaatttctcctcccgtggatctagaatatcagtatatgttggaacatgtcataactttgccatcagctgcccaaactagactgccttttcacctgatattctttggcacagcacagaacttctggaaaattctctctacagaactcagtgaagaatctttcccaacattgctcttaatttcgaaattaatgaagttctctctggacactctgtacgtgtctacagcaaaacacgttttcgaaaaaaaactgaagccaaagctcctgaagttaacacaagctaaatcctcaacactgattaacaaggaaataactaagatcacgcagaccatcgaatcctgcttactctctatagtcaacccagagtgggctgtagctattgccatcagccttgcccaggatatccctgaaggttccttcaagatatctgctttgaaattctgcctttatttagctgagagatggctacagaatatcccatcgcaggacgaaaaacgtgaaaaagccgaggctttgttgaagaagcttcatatccagtaccggcgatcgggcacagaagctgtgctcatagcccacaagctgaacactgaggaatatttaagagtgatcggaaagccagcacatcttattgtcagtctctacgaacatcctagcatcaatcaaagaattcagaattcatctggcacagattatcctgatattcatgcagcagctaaagaaatagccgaagtcaatgaaattaatttggaaaaagtctgggacatgttgttggaaaaatggctatgcccttcaacaaaacctggtgaaaaaccatc

SEQ ID NO: 241901 - DNA, 1391 bp, Homo Sapiens
ttggctggttttgaagtcgcggccgctgttcctgggacgtccggttgaccgcgcgtctgctgcagagaccatgtctgccgacggggcagaggctgatggcagcacccaggtgacagtggaagaaccggtacagcagcccagtgtggtggaccgtgtggccagcatgcctctgatcagctccacctgcgacatggtgtccgcagcctatgcctccaccaaggagagctacccgcacgtcaagactgtctgcgacgcagcagagaagggagtgaggaccctcacggcggctgctgtcagcggggctcagccgatcctctccaagctggagccccagattgcatcagccagcgaatacgcccacagggggctggacaagttggaggagaacctccccatcctgcagcagcccacggagaaggtcctggcggacaccaaggagcttgtgtcgtctaaggtgtcgggggcccaagagatggtgtctagcgccaaggacacggtggccacccaattgtcggaggcggtggacgcgacccgcggtgctgtgcagagcggcgtggacaagacaaagtccgtagtgaccggcggcgtccaatcggtcatgggctcccgcttgggccagatggtgctgagtggggtcgacacggtgctggggaagtcggaggagtgggcggacaaccacctgccccttacggatgccgaactggcccgcatcgccacatccctggatggctttgacgtcgcgtccgtgcagcagcagcggcaggaacagagctacttcgtacgtctgggctccctgtcggagaggctgcggcagcacgcctatgagcactcgctgggcaagcttcgagccaccaagcagagggcacaggaggctctgctgcagctgtcgcaggtcctaagcctgatggaaactgtcaagcaaggcgttgatcagaagctggtggaaggccaggagaagctgcaccagatgtggctcagctggaaccagaagcagctccagggccccgagaaggagccgcccaagccagagcaggtcgagtcccgggcgctcaccatgttccgggacattgcccagcaactgcaggccacctgtacctccctggggtccagcattcagggcctccccaccaatgtgaaggaccaggtgcagcaggcccgccgccaggtggaggacctccagggccacgttttccagcatccactccttccaggacctgtccagcagcattctggcccagagccgtgagcgtgtcgccagcgcccgcgaggccctggaccacatggtggaatatgtggcccagaacacacctgtcacgtgggctcgtggggaccctttgcccctgggaatcactgagaaagccccggaggagaagaagtagggggagaggaga

SEQ ID NO: 241902 - DNA, 1317 bp, Homo Sapiens
  misc_feature (101)..(116): n is a, c, g, or t
  misc_feature (1250)..(1272): n is a, c, g, or t
ttggtgatgcttttgaaaatgtttatgccacagaatttgctaatatattgtaatcacattccttaggaggactttggtaattggttttatgcattgatggnnnnnnnnnnnnnnnngccaaattgactgtcacgcggcagcttcagggagctcgcattctcttgtgttcgtgttgccctcgtgcccatcaagtgcagtcgggacctcccaggacaagcacgaggcctcaggtcggccctgtggcgggtaggcaggaaggactgtcccagacgaggggcttcctctagagtctcactgctggggaggagaggactgggcctgatggaagttaacccggagctaagtcacccagagcacaggagctgccatgtcagatgggaaatctgcctatgtcataccgtgacagcccgcaggatcaggtgacttctagcagagaccctggtttttttcctgtgcccactccggcttgtcctcatctctacccatcccctgatgcccaggtcaccgggagggctgctgggagcctctcctgtccccgccgggcagtgtcactgagtccttgaaatcctcccctgccccgcgggtctctggattgggacgcacagtgcagttgaggtctgcgtcgggcttggcttttcacaaaggctgatgtcttaactgtcacccatatggtccctgggccaccgggcagcctggggcggtgtgtgtgccatgtcacagcatggcctctcggccttgggaaggaaggcagtgcctgctctgctgtgagccgccaggaaccctcctcctgtcaatgggggtgtagtatttttgccaaaatatcatgttcaatttcagtagtttgatcagttgaaggctagaagtgtgaagtgcagatgagtgtgtgttcttccccaaggtccccccacagctccaggacaccgctgtcctggcatttgtggccactcactttgtaggaaactcatctccttcctgaggagccgggaggctggaccagtcccgtcgtgcagtcaggtgggcggtgtgtctttccagaaggtcacgtggaaatgtctcgggacttgggtcccggagtgcccgtgaagcgtgtttttgctcctgaggtgcattttttcatcatccttgctttaccacaatgagcaatgaggtcgggttttatatgcaacttattgtatctgaattcctgtagcacacctcataggtatgatttttttaaattaaagaattcagaataaacattttttgatccnnnnnnnnnnnnnnnnnnnnnnnccaacttttttgtacaaagttggctattataaaaaagcattgctc

SEQ ID NO: 241903 - DNA, 740 bp, Homo Sapiens
ttgggtcctgagcacccaacacaccagcccagacagctgcaagtcaccatggacgctgaaggcctggcgctgctgctgccgcccgtcaccctggcagccctggtggacagctggctccgagaggactgcccagggctcaactacgcagccttggtcagcggggcaggcccctcgcaggcggcgctgtgggccaaatcccctggggtactggcagggcagcctttcttcgatgccatatttacccaactcaactgccaagtctcctggttcctccccgagggatcgaagctggtgccggtggccagagtggccgaggtccggggccctgcccactgcctgctgctgggggaacgggtggccctcaacacgctggcccgctgcagtggcattgccagtgctgccgccgctgcagtggaggccgccaggggggccggctggactgggcacgtggcaggcacgaggaagaccacgccaggcttccggctggtggagaagtatgggctcctggtgggcggggccgcctcgcaccgctacgacctgggagggctggtgatggtgaaggataaccatgtggtggccgccggtggcgtggagaatgcggtgcgggcggccagacaggcggctgacttcgctctgaaggtggaagtggaatgcatcagcctgcaggaggccgtgcaggcagctgaggctggtgccgaccttgtcctgctggacaacttaagccagaagagctgcacccc

SEQ ID NO: 241904 - DNA, 1180 bp, Homo Sapiens
ttggactgaatatgtatggtttccgtaaagtagtacatatcgactctggaattgtaaagcaagaaagagatggtcctgtagaatttcagcatccttacttcaaacaaggacaggatgacttgttggagaacattaaaaggaaggtttcatcttcaaaaccagaagaaaataaaattcgtcaggaagatttaacaaaaattataagtagtgctcagaaggttcagataaaacaggaaactattgagtccaggctttctgaattaaaaagtgagaatgagtccctttggaaggaggtgtcagaattacgagcaaagcatgcacaacagcaacaagttattcgaaagattgtccagtttattgttacattggttcaaaataaccaacttgtgagtttaaaacgtaaaaggcctctacttctaaacactaatggagcccaaaagaagaacctgtttcagcacatagtcaaagaaccaactgataatcatcatcataaagttccacacagtaggactgaaggtttaaagccaagggagaggatttcagatgacatcattatttatgatgttactgatgataatgcagatgaagaaaatatcccagttattccagaaactaatgaggatgttatatctgatccctccaactgtagccagtaccctgatattgtcatcgttgaagatgacaatgaagatgagtatgcacctgtcattcagagtggagagcagaatgaaccagccagagaatccctaagttcaggcagtgatggcagcagccctctcatgtctagtgctgtccagctaaatggctcatccagtctgacctcagaagatccagtgaccatgatggattccattttgaatgataacatcaatcttttgggaaaggttgagctgttggattatcttgacagtattgactgcagtttagaggacttccaggccatgctatcaggaagacaatttagcatagacccagatctcctggttgattctgagaataaaggattagaaactaccaagaacaatgtagttcagccagtttcggaagagggaagaaaatctaaatccaaaccagataagcagcttatccagtataccgcctttccacttcttgcattcctcgatgggaaaccctgcttcttctgttgaacagcgagtacaacagcatcatcagaagtttt

SEQ ID NO: 241905 - DNA, 765 bp, Homo Sapiens
  misc_feature (462)..(486): n is a, c, g, or t
aaattctaaagacttttttccccaggttctcagcctggggtattaagctgctaataacacgcctacatactcaggtggttttgttcttggtctgttgcaatggttctcaggagacatttcatttgtgtctgggacatgggaatgtcctgaactaatcttgcttaagaaaaaacaaccagaacactcccctagagatgtagcctgctcaacagctctgagttcctaccctggaccacatctgtttatgctcttcaaatggaatccagccttcagatgaaccactgcaataaaccctactctctgcttgcctctagactgggatccccagggacaggacacttagggaagagcagagaggacatggcctggtcaggtaggaggaaggggatagagctggaagggcaggggctaagagggggacagttggggagaggcaggagattagaaaaagcagcttttacnnnnnnnnnnnnnnnnnnnnnnnnncattaaagatgcataaagtgacccttgcacttccgttgtctcttcttgcaaatagaggtggtgctgctagggaactgctccagcaccggtgtaagacttgagtagttgcatacaatgtgtgactccagatttggatgggctgcaggctttaccagtgtgggggcacgtagctgtacgcaggggttccttgggccctatatgttggcatggagacagggtgtgccccaatcgccgtgtgctggggtgtagtcagcagggtacctgctgacattgccccaa

SEQ ID NO: 241906 - DNA, 1637 bp, Homo Sapiens
  misc_feature (550)..(564): n is a, c, g, or t
caaattttaattactttttattgaaaactgcactgaacgctaaatgtccacctttacaataaacaaatacagtaacggtaactcacactaaaacaaaacatacttttgatagccattatttttctgtttgggacaattttaaagtttttcttttgtcacaaaaacaggaatgtacctatacaaaggctcaaaataggccatctttttaaacaaaaaggcaatgattcacaaaagactatgaatagaacatgtaactagttgatacaaatctaataggatttgttaaaatcagtcacatctaatacatctgaagtgttcttgtataaaatatcacgtgaagaaaagaagactttatcaatgtctaaaaaagtgggtttgttcatagacaatctgacaagttaccataaaaagtgtttcctgagacataaggaaatgcaacattattcttcttgaacccttttagctcaagactttccactcaataaaatagcagaggatctgaaactgagaaaatatatttgagtacaaacagcttgtgaaacttaatacnnnnnnnnnnnnnnngcatcatcagagggttttactgaacttacaaccgacttgcccgctcagtatgcagttcagatgtgagaggcgcttctctgtacagcagcctgtactgtcttcaatcctatgcgtgcaggtgtctaccacaggcaaacagttttctccccattttgtagtaatgtgattttcctattagcaaaaagaggtcaccagcccctgtagacttaagggactcaagtcacaggatggggatttcctcttaatattttttattttgttgtttgaactcttgatgcaacattgtagagcagggtgttcaggacctgctgtgcccaagggactgataaaggaaaaagctctatttattctttttgtgatttgatgcacagatgaaaaacttaacacacaataacagaagttggtcgttaataaatcacatcctagtctttcagcgcttccgtaagcagacgacatcttcagttttctagctcttgtagtttcaacactgcaacatcaatgatgcatatgtccagaatcagttacaaagaccatccgattctttttctcttagttcatctatttttcactgtctcttggtcccaagtgtatctgagtgattaccttctggcattctctgctattgctcgttggggtgctctcgattgtccccgtgttttgtgggctggttgggagagggcgcttgggaaggatgtgccactgtcgggaggttgtgagtcactgggatgcctccagggatgatcccttccatggctgcaggaagtcctcctggagccacacccacgatgcctggcggatatctgtatgtggcaccattgagctcaggatgaattgcttgctggtctattactgaccaaggcgctgatgtgacaaagaattccttgttcacacaatttcttaagctttctgggatgcgacctgtgatggctcggcggatctcggtggcagctgcctccctcatctccagtgacgcctgctcactgtaccaggcagtgtgaggagtgcagatgagattcggggcatctttcaacggaccctgagcaaagctagaaaaatgtagaaaaaacagccaa

SEQ ID NO: 241907 - DNA, 1225 bp, Homo Sapiens
ttgggtcagctctgccccgtgctgtgatcaggcaccccgactatgatgaggaaggcctctatggggccatcctgccccaagtggtgactgccggcaccatcactcgccgggctgtggagcccacatggctcaccgccagcaatgcccgggctgcacagcctttgggtggatgacactgcagggcaggaagagcaggggcactgatctacacagtaagacagccactactgtgggcatcagccgtgagcatgccaaaatcttcaactacggccgcatctatggtgctgggcagccctttgctgagcgcttactaatgcagtttaaccaccggctcacacagcaggaggcagctgagaaggcccagcagatgtacgctgccaccaagggcctccgctggtatcggctgtcggatgagggcgagtggctggtgagggagttgaacctcccagtggacaggactgagggtggctggatttccctgcaggatctgcgcaaggtccagagagaaactgcaaggaagtcacagtggaagaagtgggaggtggttgctgaacgggcatggaaggggggcacagagtcagaaatgttcaataagcttgagagcattgctacgtctgacataccacgtaccccggtgctgggctgctgcatcagccgagccctggagccctcggctgtccaggaagagtttatgaccagccgtgtgaattgggtggtacagagctctgctgttgactacttacacctcatgcttgtggccatgaagtggctgtttgaagagtttgccatagatgggcgcttctgcatcagcatccatgacgaggttcgctacctggtgcgggaggaggaccgctaccgcgctgccctggccttgcagatcaccaacctcttgaccaggtgcatgtttgcctacaagctgggtctgaatgacttgccccagtcagtcgcctttttcagtgcagtcgatattgaccggtgcctcaggaaggaagtgaccatggattgtaaaaccccttccaacccaactgggatggaaaggagatacgggattccccagggtgaagcgctggatattctaccagataattgaactcaccaaaggctccttggaaaaacgaagccagcctggaccatagcactgcctggaggctctgtatttgctcccgtggagcttcatcggggtgggtgcaggctcccaaactcaagctttcagctgtgctttttg

SEQ ID NO: 241908 - DNA, 1596 bp, Homo Sapiens
  misc_feature (1112)..(1209): n is a, c, g, or t
  misc_feature (1283)..(1300): n is a, c, g, or t
ggaaatgttcaaataactttgaaaaacacccccattagagatgtgatatacataatttctacaatggaaaaaagtaagtctagatcaatctaatggtatttatctacccaatgaacactctaatatttttgtggctacaaaactcagcattgtgcaaagttccagtataatggcattatcatatgtaacaaacagaagtgcaggaaagggtatttgggaacagtgagcagcaagatctacagcacaaagatgaaaacaagcaaacaaaaaacccagcattcggtgtttgaggatcctacaggcagttcatgttgctggagtgtaaaatgtgcttatgcaagtggtaagagattgagctggagagggaggtgggggcctgataaagaaggttgttagatgtcacataaagtttagatcttattctgtaaccattggggaaacactaacagattttaaacagtgagataaacaagtctagaactattaagaagtaatggcaggacataaactaaactaaatggcaggagcttgaactaaaggcaggtggtagagtcacagggttggaaataaggatggattcaatatatattaaaggaaaaacaagattaagtttgtgcttagacacataccactggttagatacatacatactggttttgcatttgtaagatccaaagtctttaaatttatgaaatgccaaaggataggactgtgcttaaaattttagaaatttaatccaatattttccatgtgatagtaagtcaatgcaatagactacattgtttgaatttctatagcaactccaaaaattacaggcattcagggaaaaacagaatctgaggagacaaagcaatcattaaaccagcctcaggtacgacactcagttcaaatgttaaaactgtatgaaataaaataacaatgattaatatggttaaaggggttgatggaaaagatataaaacgtttaagatcgaataggtaatttcagtgaagagattatgagaaagaatcaaagagaaatcctagaaatatacaaacatagtaacagaaataaaaaacgcttttgatgctatgatcagcagtcttcaaacagttaaggaaagaatacgtggnnnnnnnnnnnnnnnnnnnnnnnnnnnnnnnnnnnnnnnnnnnnnnnnnnnnnnnnnnnnnnnnnnnnnnnnnnnnnnnnnnnnnnnnnnnnnnnnnntgggtggtcaaggctgcaatgagccatggctgcactgcactacagcctaggtgacagaccaagaccccgtctcnnnnnnnnnnnnnnnnnncccacaaagaaaaccccccaaaattgcataattcaaatgcaattcatgcaaagaaccaaaatctcatgctcatttttaaaaaatattgacagctgtcagtaagaaacatggcacctaaagggcaggtaggaaatctcttcctaaggatttattcacacctattcagagccaacagtttcattcttagtaactctggttgatgcaaatctctgtatctaaaatacataggatatataaaagcttctaagttacctatgcttttgatagatttcatttgataggataaacatacccaa

SEQ ID NO: 241909 - DNA, 1665 bp, Homo Sapiens
taacttgtttctccattgctttgaatattcaaataattcacaatttttaaagctttcaatttcaatctgaacatgtagatcattataataattgagtagttaaaacaatattttttataaaaggttttgtatcaagtttaaacccttgtttccatccactgattctatatgaagatccattttcaaagtttctcatgtacaacaaggtgtgacatcttgctaaaggctttctaacactctttaaaatcagcatatttccaaggttcaacaaaaccttaaatttagttaacaaatttcccacattaacttcactcatgagatttatcttctgaatgagttttcacatgtttggttagggatgcattttgtttgaaagttttcccacattcattacattcatagggtttttctccagtgtgggatcgctgatgtataacaagctgtgattttgcattaaaggctttttcacattcgttacattcataaggtttctccccagtatgagttctctgatgtacaatgaggtgagacttttggctaaaggctttcccacattcattacactcatacggtttctctccagtatgaactctctgatgttgagtaaggccttcaatttgtttaaagcctttcccacattgattacattcaaagggactttcacctgtatgagttctcatatggtaagtaagagatgagctatgtccaaaggcttttccacactcattacatttataaggtttctccttagtatgagttctttgatgtataatgaggtgtgacttcttgctgaaagctttcccacattcattacattcaaagggtttctcacctgtatgaattctcatgtgtttagtaagggatgagctatacttaaaggcttttccacattcattgcattcatatggtatttcacctgtatgtgttctcacatgttcggtaagagatgagttatacctaaaagacttcccacattccttacattcatatggcttctcacctgtgtgagatctcacatgttgaataaggtttgagctgtgtctgaaggttttcccacattcagcacattcatagggcttttctccagtatgaattcttagatggtcagtgagtgcatgtttatgaccatgggctttgccacactgaatacattcatatggtttttctccggtgtgagttctctgatgtacaacaaggtgtgacttttggctaaaggctatcccacattcattacattcatatggtttctccccagtatgaactctctgatggtcaatgagtccttgtttatggctgagaacctttccacattgattacattcatagggtttcacacaagcttgaggtttttcatgcttagtagatgagctaaggctgggtgatttctcatgtttctctccagtttgaattttgtcctgtttaatatgggatgaactatgacagcataatttgtcatgttttttgccagttttgttacacttatcagatgagctatggctggataatttctcatgtttctttccagtttgctttttgcctttccttgtatcagataagctatggttgaatgacttcttgtgttctttagctgcatcagatttcctttttacacagtttcttgagtgatcaggtaaatctaaattctgtttcaaaatttttccccaa

SEQ ID NO: 241910 - DNA, 1246 bp, Homo Sapiens
gacagtcttgattaaatatttccatacttatctgcagccactattcttatcctttcttcccaggaggagaatgaagtgagactaggcatttacctggcacttgcgtgcactatcattcattggcactaatgattaggatgcttgaaccatgcagttttgtttctatttcaacaatatgacactgaagtagccattatcttttgatatttaagcgtaagtaatagtatattcttcatgccaagttttgacagctcaataatttgtattctagaggggaaaaatgatatttttgctattatttaaaaagaaaatcaaaaatgccagcttaatgccccattaaaagctaaattcacctgaacttattaatgatgcttgctgaagacaaagtgatttcaaaaccccaaaactgtgtttagtatttacaagaagtagaaaaagtatatatttttctgttaagaatataattctctatcatttacaaatataatttggtaatttatatttcaaagctatcctatggtcctatatggattatcaacttctaattgccaattctaaatgttataatcatctatattgggccttggccaaccacctgcaagttatccttaactccaccatgaagagggtgcaagagatatgtttatgaaatgcctcaatataattctagtttttcaaaacctcaaggtaataagctaaccagcagattatttgtaaacccacactactgaaattacagtgacacccttttatatggttgaattgtataaaatatgaccagggaactacaccgtattaggtgttacttcatgaaattatgtgttatagcagtttcctaaatggtagtacacatatataccactagatggccctgagatgattttaagttaagtggtacgtggataaacaatttttaatagttttactttaatatttattataaaaatataaaagcacataaaacatggaatatgattgctcaaaacaagactaaggttacaaaaggctaaaaatatattttttaaaataaccatgatatagaatatgtgagagttcaggaaggcggcattacatttaggaatcactgtctcaaggaatgatttgacttagccagcatcatttctgaatgcttgtaataataagccacatcataaaggggtttcctttcctactgtaaattctgggaagtttttgtaccccagaataaatacctggaaacaaaattcacatttattttaagacccaa

SEQ ID NO: 241911 - DNA, 2141 bp, Homo Sapiens
cagtctcagatttctgccaaacaccagtaggtattcaaaagtgtggtccctttaaaacagcaggccggatatcacctttctgtcttcaaagattcaaaccagactcccaatctgggatttctctacagagggttggctgcttcccagttaatgtgagttttgcaaagtttgcatttcatgaaaacagtgttgtgtaaacatatattgtgtcactttacctactatttactaaaatcagagagtttagcctttgaaatttatggttctctggagctatcataaatcaatcagtcatacgaatggactagctgtagactcaggatatcaataaaactaggcagtgaaatttgcctataattatactatatttagattaatagttatcaaaaacatttttccccaaaaaatacctcaagggtaaaacagaatggtaaagtttttttcaggataatgaattttcaaacatttccaagaccataaccagccattttaagtactgtaaactctgttatatttcatttggataagtatctaataagcaattattacatatcctctcatttaaattaccactgaaaactagaaataatctttatttaatacgactgttttaacaccatatggaacgggaaataactaaatgaaaattgttcacgtaaatgtgatgggagtgggggggtggggagcagtatttcttgacatgtggcatgtcactcaggaaagtaaaaggcccatcatatccaaaatgccagcttggatattcccttgccacccacttgacgaacagacataccacatggcattaaatgctgcaacctttcctaaaaatgccacttggattggtccgctgtggtgagtatataagaactcttggtctgtctcttgagtctgtgagttcaaagggaagaatctagtaaataacaccggctaaattttgccctcagatgtttggcataaatgatttgtgaggatattggaacctttggctgttttcacaccaatgaaataaattatgctacttgaaaaaaattctacagaacataatgctacacagtcacagtcgactttttgcaaaagtaccagagaatatcttttagaaacagtgcttataaagccccatatactccttagatatttcccaaggatttcttctcttggctagcaggaaaacaatcttaatattttatttattcttcataaatacaatgtatataatataaaacactttgtgcacatgtttccaacaatttcattttctatgcatctttacataaggtagtagctaataactctttctgtggacacgtattttccagttttctaaggtttatgtgttcaagcattgtaaaaacatatttaaaaattgaattaccagtaaaaatattgaatgtacaggtcattatgctcccacaaatacaaaatacattgaaaaattatatcaacagataattacatatgaaatatgaggcatatattttcttctattatttattttctccctaaagagttctaattgattaaatctcaagagacaaaatgtaattttataaaacaactgtattgttcagatttaggagacaacctaagaagatgattctgagtaggtaggatttttgctattactgttatgtgaaaaagactgctcaattaaatgacagattgttacatatctccctaacaagaggggcgaactgatactacaagcagccagaacaacataattagaatagaattccaaggttatattaatagagtaataagttaattaaaaccaagatcaactgagcttctatttacaccagttcagacagcccaagaggaaaagaactctattttagagacatatgtgactctttgagcttctgtcatccaggtgccatttctgatgcagcacatgtgcactgaacagttggcaaagaaggaaaaagattatggtagatgtatgtgcagatagtctctctaatgatgtaaaatacgtccagaaagaaagcagggctttgttgtaaaataaaaaatttcccatgactttttgttctttctgaatgtgatttgagcatgtttctgtaaataagaatatatactaacttatgatgtatatagaacaaaggatagacttacccaacttttttgtacaaagttgg

SEQ ID NO: 241912 - DNA, 947 bp, Homo Sapiens
ttggcaccctttgggagtaggggtgtgcggctggcttgtcccgcccctgcccctgagtgacagaaccgtggacagcaacatttcccacaggacacgaagtttgtcggcccttgccttggcagagctgagtaagaaaaatcaccaagaatattatttttggtatttggaattgaatttgccaggaatgcaagcactgctacctaactaaagaccttggctttggaaacatcttaccccttggcagctctccagagtttagacttggcagcatcaaagacacaacgcaagcaggcattttggagatcaaagatgggtagaaaagatgctgctactataaaacttcctgttgatcagtacagaaaacaaattggtaaacaggattataaaaaaactaaacctattttacgagcaaccaaattaaaagcagaagcaaagaaaacagcaataggcataaagactcaccacggatgttgaccctgatctggaccaagatgaagattagctaagcaacaatcaatgcatgaaagagaaataactttacgaaagcaccttttgggaccaaaactttcaatactgaaactgtaacatctttaattctttctgctaatattttcagtttgcagacatatgatttttgatagttgcataggatgtcaggaaaagaaccttacctagcaatgcagtatagtatgtgctactggatacttttatatatctttctgctttgacagccaccctatacatggtacatttagatgaaatgggaaccagatcctaaatttttcaaatgtcattgccaatttatgtgtataattccatcacttcctgatgagtaagtctatttttgttctatatacatcataagttagtatatatttcttatttacagaaacattgctcaaatcacattcagaaagaacaaaaagtcatggggaaatttttatttt

SEQ ID NO: 241913 - DNA, 2039 bp, Homo Sapiens
  misc_feature (237)..(245): n is a, c, g, or t
  misc_feature (828)..(838): n is a, c, g, or t
  misc_feature (893)..(901): n is a, c, g, or t
caatttgagaaaacatatttaataaatcattgtcaatttttataatgtttcaagcccattctttgttgatagcctccacatttatatggttaagtcattgttgctgtgtttcttacctatgacattatttttatatcccttcatttgtggatcttaagatgttgcagaaggttcattcctgtaccccaatacagattcacttcctttagctgccttttctagcaccaatatgctttnnnnnnnnntgcgcaaacaacaagcagtgacagcggccaattcctcgaatgtccagattaataactgtagcatgctaaagaaaggtgtgtgtaaatagctggagatggtatatggtccagagtccagcataaaattatttcctttctgagcattccctccattcccctaacccgaatacatgcattagaatgtagcaaaacccttcggaaacctctcttagccaactgcaaacttatctgttgccacaagtgcaaaggggtaggatgtgaaccagtatatcacaaagctctttagccacttcagttggtgacagaacacaaaaggaaaaaattcctacgtatacacatcagtctgtctccactttttataaaactggaataaaacgggaaagtgccatctttattaatcctaattgaattttaaatgtccttttgacacaaaaaggtatatacatgacacagctacacaaccttttttcaactggacaacaagtgtcaaaaccctgtggatgtatagggtaaaacaagattggtcaggaaaagagaattgttcctataactggtaatctgacacaatgtcctattgccattnnnnnnnnnnnggtccattttcagtttattcaagtttattttcatggtgttttatccctcttgatnnnnnnnnnttcagacttttgtaatttgtgtatgctgatcttcatcaaaaggttcattctctggatcagagtcagtggtgtcagaatatctataatgatcaggttcattgtcactaacatctggtgttacagaagttgaactgctagcctctggatttgacggctcctctactgtttttgtgaagtacagcttcaccttaaaatttggagaaaagtatcggttggctttgtctttatttgctttgtcaagatcattttttgttaaagtaagtactagatattccttgtcattatctgcacgctctatactgcaaatgctatcgatttcttgatcacatagacttccattttctactttttctgaggtttcctctggtcctggtatgaagaatgtatttacccaaaagtgaaacattttgtccttttttagcatcttgttctgtttgtggaagaactctactttgatatcaccacacacaggtaacggctgagggaactcaaagtacatgaacttgtcttcccgtcgtgtgggtcctgaattggaggaatatatcttcacctttagctggcagaccacaaactgaggattgcaagttccgccactgaacattggaatagtttcaaacatcatcttgtgaaacaacagtgccactggtctataatccagatgattctttaacaggtagctataataatacacatagcgcctctgactgggaatagttactccctttttgtctctggtccttacttccccatagaaatctagggcctcttgtgcctttaaaaatttgccccgatgtaataaatatgcacatatcattacaccagttcgtccctttccagctttacagtgaattgctgcaacatgattgtcatcttcacttagccattggtcaagatcttcacaaaagggtttgataagttctagctgtggtgggttatggtcttcaaaaggatattgtgcaactctgcaattaaatttggcggtgtcataatgtctttcagcacaaagattgtatatcttgtaatggtttttatgctttgaatccaaaaaccttactacatcatcaatattgttcctgtatacgccttcaagtctttctgcaggattttcacgtagcaataccaacttttttgtacaaag

SEQ ID NO: 241914 - DNA, 691 bp, Homo Sapiens
aactttgtacaaaaaagttgggtggcttctgcgccgctctagggtgagctctgcccggctgcagggatggcggggaggggtaagctcatcgcagtgatcggagacgaggacacggtgactggtttcctgctgggcggcataggggagcttaacaagaaccgccatcccaatttcctggtggtggagaaggatacaaccatcaatgagatcgaagacactttccggcaatttctaaaccgggatgacattggcatcatcctcatcaaccagtacatcgcagagatggtgcggcatgccctggacgcccaccagcagtccatccccgctgtcctggagatcccctccaaggagcacccatatgacgccgccaaggactccatcctgcgcagggccaggggcatgttcactgccgaagacctgcgctaggggactcctcatagccctcagcccttccctcgtttccaggcctctccccaggcttgccatcagccttctttactttttgagcctctgatttccaattccctgctccttcccactccattaagaggctaggtgaggcgcttctaggttgctggggctctgctggttaaggaacaggaagcctgaccatctccctccactacctcttccctgtgctgttacacagtgtcattgttgatgttaaattaaagtcatattcttgcttctc

SEQ ID NO: 241915 - DNA, 1412 bp, Homo Sapiens
ttggcaagaaaatagatttccagtgggttcaaggagatgtgtgtgaagttcagctgatggtatataacccaatgccgtttgaacttcgagttgaaaacatggggctgctcaccagcggagtggagttcgagtctctccctgcggcgctttctcttccggctgaatctggtctgtacccagtgacgctcgtcggggtcccgcagacgactggaacgattactgtgaacggttaccataccacggtcttcggtgtgttcagtgactgtttgctggataacctgccgggaataaaaaccagtggctccacagtggaagtcattcccgcgttgccaagactgcagatcagcacctctctgcccagatctgcacattcattgcaaccttcttctggtgatgaaatatctactaatgtatctgtccagctttacaatggagaaagtcagcaactaatcattaaattggaaaatattggaatggaaccattggagaaactggaggtcacctcgaaagttctcaccactaaagaaaaattgtatggcgacttcttgagctggaagctagaggaaacccttgcccagttccctttgcagcctgggaaggtggccacgttcacaatcaacatcaaagtgaagctggatttctcctgccaggagaatctcctgcaggatctcagtgatgatggaatcagtgtgagtggctttcccctgtccagtccttttcggcaggtcgttcggccccgagtggagggcaaacctgtgaacccacccgagagcaacaaagcaggcgactacagccacgtgaagaccctggaagctgtcctgaatttcaaatactctggaggcccgggccacactgaaggatattacaggaatctctccctggggctgcatgtagaagtcgagccgtctgtatttttcacccgagtcagcaccctcccagcaaccagtacccggcagtgtcacctgctcctggatgtcttcaactccaccgagcatgagctgaccgtcagcaccaggagcagcgaggcactcatcctgcacgccggcgagtgccagcgaatggctattcaagtggacaagttcaactttgagagtttcccggagtcccctggggagaaggggcaatttgcaaaccccaagcagctggaggaagagcggcgggaagcccgaggcctggagatccacagcaagctgggcatctgctggagaatcccctccctgaagcgcagtggcgaggcgagtgtggaaggactcctgaaccagctcgtcctggagcacctgcagctggcgcctctgcagtgggatgtgctggtggacggacagccatgtgaccgcgaggctgtggcggcctgccaggtgggcgaccccgtgcgcctggaggtgcggctgaccaaccggagcccgcgcagcgta

SEQ ID NO: 241916 - DNA, 1304 bp, Homo Sapiens
  misc_feature (188)..(250): n is a, c, g, or t
gggaaggattagttttttaatgtcccctcttgaacaggaaagttgtgccaggcacaggtacatcttacatggtactaaggcgagcagtcattcgttcaaaactatttaccaggtgcccaagcactatagagtactgggtaatagtaacaggtaactctggccacattccctccctcatgggtgttacnnnnnnnnnnnnnnnnnnnnnnnnnnnnnnnnnnnnnnnnnnnnnnnnnnnnnnnnnnnnnnngaattcatgaggtcattctggtatatggacaataaaggagagggcccactcttaccctgggtcaggggctggattgataatctctggcgagtgaagagaaccatattttttaaggggccaccagtagctttgtgagcttgatgataggatttgagctcagccaggggaatgaaacgtttcatcatccgaacaaactgtacatccacctatgtgacaacagtgtacatgacagaaagacgtgtctaggctgactgtgcccactgtatttttaaccgcccacaggaagctcctatctcagtatcacctcatctgagtaagtgctgggccgtgtaccttgacctacagtcaccccaaccgtcttcttcccctggttcatccttcccctgtcatgaaatagaaagcatagtctttaccatggaccacttagggttgtcctctttgctagatgggtcataatggggattgtttttctcaaactgtgtgtggtctgggtaagcctctttcacgatcttcatgagtcctgcgatgcctggctctttgcagttgctatggtagaagaaggcttcttctcccagcttcatggctctaaggaagttccgagcctggtagttacgaacaccatcccagcatgttgtctgtttgggctgtgctttgagatcctcaatgctgaacttcacatctacacctttctctaggcggctctctggctctgacttcatcagccagtggctgcttagattcttcaaacagtttttagtggctgaagtcttctgagggttggagtcctccactttagctaatgcctcacctgagttctcagttttggtgcgttttcctgatagtcccttgtctgcaataggagaagcaaaaagaaaagatcatgcttgttaaaggcaatgtttcataatggaaaaagcttagctttggagtcagacctggattcaaatcatggatccattaccagctgtaggaacttaatcttactgttaagaagctttccttatctataaaaattagacaagaatacctaccttacagggtatcttctggccaa

SEQ ID NO: 241917 - DNA, 1723 bp, Homo Sapiens
  misc_feature (1043)..(1081): n is a, c, g, or t
  misc_feature (1212)..(1224): n is a, c, g, or t
ctatcctccctattcccctaactgatattaataatcctcctatcaatcattgcaaggtaacttcaatgtcattaagtattaacattctaaatatgtaaagctatagaaggaaggtcctgctattctctttgcccctctcaaatcattctagtctggtttaccaaacagaaccaccagctaggaggataaaaatacattcccatgttcactagccattaaatgaacatagccacttgtgcaggaagcctaacatttttaggatttcctaactttttaaaacttaaggataagtccatttctacaagctaattttacagctccttaatattcttaatctggacagttaattttgcagactttgttggtgtctgccttttcaattgttttacccaaaaagaggccttgaaaaaactttcaaattcaggaaacccctaaacccctgcagagaaccctcatggtatgtgagtgtgagcactaagttgaagaatactcttatttcacagaaatctaggactgtcagactagggctgagttcattctcttccttcagagacaaaatttcaagctgagcagattcagagacaagggttcctcataggttatatactagtgctgggaaaaggagagaaaatgctatttcattgggtcttgtggttcctccagccgggttagaacaagatttgagagttgcaccctttattttcaaggccaagtggctgcagaaacatttcaagaattcctctggcaaggtggcaagtcagtttccttttagatctaagagtcttgtcgctttaagaaaaatttttttccccagaacctttcagagacttgtccatttgttcatgtgatgaaaaacgtctgcaaaataggctactttctgtagtcatttttcatttccaaagcactcagcaaaagctggctgttttattgtaagtactctggcaattcacctttcaattcaaatatcctgtagagaacgcttcctctgagaagccactggatgtctgtatggtgcaggaggtttatgtgctgtctgtccaggnnnnnnnnnnnnnnnnnnnnnnnnnnnnnnnnnnnnnnngcataaatgggtctttgatacaggtaaccagttttgtaacattattcagaacttcactgtatcttcaagtttttgatatcagcatctctgtggagaaagcagtgtgctataatgtcaacatcaggatttcnnnnnnnnnnnnnaataacgcaaaatgacttatggagacaaccactgatggggcaccaggagtgtagataccagacctctggttatcagatatgatgtcacaacattatataatggcctttgttctggcaggctcctagcaatagaaaaagttttctttgaatttcatcatttacaaatattacaaatgctacagcatgacaaatattagtgaaacctgttgactcatcatcctggatagagaagctgctacttttcagttaatgacacaaaaccttttttgcatcatatgacatatcatcagtaaatcaacttattgagaataaagtctcttcaactttgtactgcatcttgccccagcattttaatgttattagattctcaccaaccatgcatattttcctttcctgagataagttctgctactaaataatttgcttcttaaaccttttgactaaaggtgatttctgaacaaaagcctggggtgtttttgatccaacttttttgtacaaa

SEQ ID NO: 241918 - DNA, 1421 bp, Homo Sapiens
  misc_feature (42)..(64): n is a, c, g, or t
  misc_feature (1001)..(1009): n is a, c, g, or t
agaaatagaagccactgttgtctttataaaacacagaattgnnnnnnnnnnnnnnnnnnnnnnnatgttgcttgcttcagaaggaactgtacattacagctgctgggataatttcacaatggactggacaaggtacagctcaaagcaggacacaaacacaaatctcaaagggaaacaaatgcaaacaagtacacagctgtggggatccagagacatttccccatccatgctggacttgagagggataaaaagtttagaaactaaagtgaaaaccagagtagtcacacatgcccaccacatggctgctaagtgcaacatcacataccaattaggctggactgtgtgcacaggaaagtaatttcatttttccttattgctactacaccaagggactcagtgcattcaacaaatgtctttacttgcacaattcttggagggtttcctattttcctctgtaaagaagaaaatctccctttcccacctcattctgttttgtttttagctcattccttcccctccctttcttggatgcccaaacagcagccagaggctctaagtcagtatgagtagagtaagggagagcaccaacccagcctctctccctgcccagggagaaggcaagtcctattaagtcggaggaaagcgaaaaccagaaaatacctccttcccaatctgcttagaaggccaaatagtaaaaagtgccctgcatatccctgccatgatcagattttaagaaggaaggtattccagctaccatcctggattggcctaggccccatatataaataaaaataacgtcccccaatgtagccaaaactgccttttggctagtttgagatgatttttctaccctgatggggaagaaacgtccaaccttgttagttacacatgattccaggtccaaaactgtcccaccagccttacagatatcctatgggccagctaatagtcagtgcacccttggctgcccatcttgagtgctggccttattcacaaacagnnnnnnnnngtatccaaaaacactgctgcttagctaaataggaggccacagagaagctatctagcaggtgggcattaggagctttttagggaagtttcaaatttctaggtaccttcttcggctttatgttaagcctaagttcccagcaacagtagccccaggcttatccctggaggccagtgtagcacctcgatccctaatggatcaggttggactggataaacaatcaaagaacagtgctctcctttcccaccttttattcaaattctctccattctcttctcatcactctttttcctttatgtccatcccctaacactcaaacccaggatacccaaatagctcaaccctaagacaatctcagaaaagccaggccccaggtaaagagaaaaagaacctagataaaaggaaaaagcaccaa

SEQ ID NO: 241919 - DNA, 955 bp, Homo Sapiens
  misc_feature (132)..(140): n is a, c, g, or t
  misc_feature (788)..(846): n is a, c, g, or t
ccaaccttgttagttacacatgattccaggtccaaaactgtcccaccagccttacagatatcctatgggccagctaatagtcagtgcacccttggctgcccatcttgagtgctggccttattcacaaacagnnnnnnnnngtatccaaaaacactgctgcttagctaaataggaggccacagagaagctatctagcaggtgggcattaggagctttttagggaagtttcaaatttctaggtaccttcttcggctttatgttaagcctaagttcccagcaacagtagccccaggcttatccctggaggccagtgtagcacctcgatccctaatggatcaggttggactggataaacaatcaaagaacagtgctctcctttcccaccttttattcaaattctctccattctcttctcatcactctttttcctttatgtccatcccctaacactcaaacccaggatacccaaatagctcaaccctaagacaatctcagaaaagccaggccccaggtaaagagaaaaagaaccagatttagaaaaagcaatgagagaaaccagctccaaggagtggacaggtgtggaaaatgccagaaaccctcctgacttcacacaagttgggcaggtcagttgctcttctctagtataagcttgagggcagtccagcccaggtggacatctctgggcttggggaacaggttcttggtcttctgcagtcaaggagctaagcctgaccctgccagctaacagtgggatcattgcagccatgcagagatttcatcatcacatnnnnnnnnnnnnnnnnnnnnnnnnnnnnnnnnnnnnnnnnnnnnnnnnnnnnnnnnnnngtgaatagaagaaaagggaaaggaagccaggcaaagagagaaggggaaaaggaagccaacttttttgtacaaagttggcttttatgtaaagcattgctcatcaatttgt

SEQ ID NO: 241920 - DNA, 1585 bp, Homo Sapiens
ttgggtgtttagatattgatgaatgccgaaccatccccgaggcctgccgaggagacatgatgtgtgttaaccaaaatggcgggtatttatgcattccccggacaaaccctgtgtatcgagggccctactcgaacccctactcgaccccctactcaggtccgtacccagcagctgccccaccactctcagctccaaactatcccacgatctccaggcctcttatatgccgctttggataccagatggatgaaagcaaccaatgtgtggatgtggacgagtgtgcaacagattcccaccagtgcaaccccacccagatctgcatcaatactgaaggcgggtacacctgctcctgcaccgacggatattggcttctggaaggccagtgcttagacattgatgaatgtcgctatggttactgccagcagctctgtgcgaatgttcctggatcctattcttgtacatgcaaccctggttttaccctcaatgaggatggaaggtcttgccaagatgtgaacgagtgtgccaccgagaacccctgcgtgcaaacctgcgtcaacacctacggctctttcatctgccgctgtgacccaggatatgaacttgaggaagatggcgttcattgcagtgatatggacgagtgcagcttctctgagttcctctgccaacatgagtgtgtgaaccagcccggcacatacttctgctcctgccctccaggctacatcctgctggatgacaaccgaagctgccaagacatcaacgaatgtgagcacaggaaccacacgtgcaacctgcagcagacgtgctacaatttacaagggggcttcaaatgcatcgaccccatccgctgtgaggagccttatctgaggatcagtgataaccgctgtatgtgtcctgctgagaaccctggctgcagagaccagccctttaccatcttgtaccgggacatggacgtggtgtcaggacgctccgttcccgctgacatcttccaaatgcaagccacgacccgctaccctggggcctattacattttccagatcaaatctgggaatgagggcagagaattttacatgcggcaaacgggccccatcagtgccaccctggtgatgacacgccccatcaaagggccccgggaaatccagctggacttggaaatgatcactgtcaacactgtcatcaacttcagaggcagctccgtgatccgactgcggatatatgtgtcgcagtacccattctgagcctcgggctggagcctccgacgctgcctctcattggcaccaagggacaggagaagagaggaaataacagagagaatgagagcgacacagacgttaggcatttcctgctgaacgtttccccgaagagtcagccccgacttcctgactctcacctgtactattgcagacctgtcaccctgcagacttgccacccccagttcctatgacacagttatcaaaaagtattatcattgctcccctgatagaagattgttggtgaattttcaaagccttcagtttatttccactattttcaaagaaaatagattaaggtttgcgggggtctgagtctatgttcaaaagactgtgaa

SEQ ID NO: 241921 - DNA, 973 bp, Homo Sapiens
ttgggtaaaaccggggaagttcaatcattccgcagcgagccgcggcggccgcactgggcatgctcagtctccgggctccgctcggcaggcgagaggcgtcctccggctctgggctccggtcggtgggtgcctcggctcggctttccccggcgctggctgggctcagcggcccctgagcccaagcgacacacgccccgcggtccccgatccggcccctgggagagccgcgccgttctggaacccgggagcccccaacttcgcgccaagttcggagccgccttctgagggagacatgaaaaagatgagcaggaatgttttgctacaaatggaggaggaggaggacgacgacgatggggatatcgtgttggaaaaccttggacagacaattgtccccgatttgggatcactggaaagtcagcatgattttcgaaccccggagtttgaagaatttaatggaaaacctgactccctcttttttaatgatggccagcgaagaattgactttgttctagtatatgaggatgaaagcagaaaagagaccaataaaaagggtacaaatgaaaaacaaaggaggaaaagacaagcatacgaatctaaccttatctgtcatggcctgcagttagaagcaacaagatcagtattggatgacaagcttgtatttgtaaaagtacacgcaccatgggaggtgttatgtacgtatgctgagataatgcacatcaaattgcctctgaaacccaatgatctgaaaaaccggtcctcagcctttggtacactcaactggtttaccaaagtcctcagtgtagacgaaagcatcatcaagccagagcaagagtttttcactgccccatttgagaagaaccggatgaatgatttttacatagttgatagagatgctttcttcaatccagccaccagaagccgcattgtttacttcatcctctctcgggtcaagtatcaaagtgataaacaatgt

SEQ ID NO: 241922 - DNA, 306 bp, Homo Sapiens
tatatgaatataatattaaaaagtgtagcaaacttacgttttaaaaaaataccattacctccttccaaagggctatttctaattgtgccgtgacacaacttttggaagtcacacagcatctgttccatatgtggcagcacatgactgacacataatgatgaagccacatatgtaatgtcctcaaatattttgtttcttctataggtagaaaataacaggacaaaaagcacaaaacataaggctcacattcgttgtgcttgttatggtaggaagagattgtggcaaaacctggaaacacagccccaa

SEQ ID NO: 241923 - DNA, 1712 bp, Homo Sapiens
  misc_feature (1531)..(1567): n is a, c, g, or t
ttggcaagaattttaatttattcatcttgcttcaaagtgttgatcattgttgtcttggtattgcaaactttaaaattgtttcttaccatattgcctcttctctttgagctctgtgggatcacctttaacattcagagatgatagagtggttccccactgagaagccaaaacaaggcccttaataaccccttaagttcaccatatgaatcagaaggagaacactaaagtggagagacttttaagagatcatgatagtgaaagccttaatataatcagaattgtaccataaccttgaatctatatttgttcaaaacatccctttgacttttctaagtgtttgcttaagcagagtgtaagaatatgtggttacctttggttgagatcctttccattctttttgactctctgcttcagattttttcagtagtgtgagtcaccaaaacatttactaagagtaattgggtttaggatgttggaaatttttagcttgggggaaaaaacattcttatgaaggagataggttctcttctgagtttgtcataatatagattggtgtctttggaaaatggccacaattttaagaattcaattatgcatataaaatgataattattggaattccacagtaacagatttaaacagtcttaaattgtttatctcctttactgtaatgtattgaaatttttagagaaattttagttgttaacattttattaagtgccagtgtcagaatataacaaattatagtttcttatgaatgacaggcctacagttattattctggattatttgatggaggacaaacttacctgtatttgttagtcaagctgtgaaaataaggtggattacaaaagatgtgaaaaaaattttagtctgtagactcagtaattttctataatttactgttaatctcatttgaacatggattaggtacaatttataaattaattcaagtcagggtctttaggtatcaggtgccagagagatatttaacagatttccctacctaaatttatgtatatgtactgtctaaaacaatacttttttaaaaaaaaggaacagttgggagaaaataaatataatgaaaaattcccagaggctagcacttggattctaacacgtatgctattgtattatccattagttctgtaatatttaattttagattcttttatttttttaattggcaaagcacaaggtgctgtataacagtgtcatttagagttttatagaaagcttcaacctgagttctgcgttataaagcctggagaaagctaagcttagaacataacttgctgaagtataattatctttttgtagcaggaatttatgtgccagaggtgagagtctttctggtactgattttttgagaccaaggataaaaggatcgttttgtaagacatgccatggcaatggctggttgggggacagtttccgcccaagcttggcctattttatttttcctcgtacctactttcaaagtcatttaggtatttgaagccttatttcccacgtagtaacactttctggnnnnnnnnnnnnnnnnnnnnnnnnnnnnnnnnnnnnngcatggaatggggatcaaacaacccgaagaagaacacattttgatcaagcaaaatgtttgcttcaaatttcagaagtttattttacagaaattaaattaagtagtttgacatccttttctctgtttcacacatatattaggttgg

SEQ ID NO: 241924 - DNA, 1259 bp, Homo Sapiens
  misc_feature (974)..(984): n is a, c, g, or t
ttggctccagcaactggcatgctgaagaagaattgattcacggggtataaatgttggggattggaagtggggatgaaatggcacttgttgatacaggagcagagaggtgaggccgactgctgaagacagctcgccaccctccttgcctccactccaatccaggggctggggccacattctttgccttcatttatcctcagatcaggtgagatcgacaggaggtgttgatggcagtgccagcaattattgctaatccgtttgcatccttatgcatagatctgaattcagactttgtgaatttccagaggtgtgggtaatataatagaattcagtgagtgggcatggctgatcttgtgcaaattaaaagttatggggcataagaatagcaaaagttgaacttcttttaaaaaggaaagtaccctgagagccagtattggttgaggctcttcagtatgcccaggttggcagcactgagaaccgcaggaacggcctgttgttacaaaaaggagattgactcagctgcccttggtgcatctgactgactatgactgctgagagattccaaggacccttaatgccagggctaacctctccatgtgcagtgagacctctggaggaagtgtcatcctctggctttgtgtggtactcattatggtgcagtgcgggcatgaaatgaagacacccaaataggcttacagatacgatatgttttaaatgttcgtatttaacaaaaacatactgacactgtttggaaatggcaacaggaagatagcaaaatgaatactaacattacgaaaagatgaacaggtacatgttccaaggcaggtggctgtgaacttcctctgagtgaaggcatcccctccagcacctttcagcctgctagttaggacgacccgccgccaccctccaggacctccagccctgcactgcctttcctctcttttaaataattcttcattgagttctaatatgtnnnnnnnnnnngtttactgtaaagtttgcaaataaggaaattttttttaaaagtcctcagtaatcttaccagtaacaattgttatgggcacatttgcttttggaagatttcttttgtatgcatgggataagtacatttttaaacaaaaatgggattatgccataaattctattttgtgactttaatatatagtgaacaccttttttaatgatgacaggatgttcccttgcatggctgtatcaatttaaacaatcttgtttcaatgggcatacagggtattttctag

SEQ ID NO: 241925 - DNA, 444 bp, Homo Sapiens
agccaccgcacccagcctggattgttgaattcaatgcttgggtcacctccagattcattttcacagtctttcatgttttggtcatatgacattgtattttgctgccatatgactgatctttttttgttaaatgtgagatacttgttaaaaaatgtttagcaatgaattgaggcctagtagcatgttatcttgctgcagaagagatgggagtctacttctgggggatggtcaggggtcctccatacaggctgcaattgaggtcgtcggtgcaggctcagtccctacaaaggccagggtatttcctgtccacctttattctgatgcatgactcttctgggtctcaaccagagccagtggacttcagtatgggtcgctttcattggcagaccctcaatccacttgttttccatctaatcccacgcatgtgtgcaaaagctgctccaa

SEQ ID NO: 241926 - DNA, 1420 bp, Homo Sapiens
ttggctctgtcctcaggaatgcccatgtgcttcccctgtggtttggaatgaactctgcgcaactctgtaagttcagttattcagtaatagactaaaatgtctgatgtgtgtcccatgcttagcagccgaatagagtgatgactaggaccaggctcttgtcccagatcagggcaggcaaaatacaaacaaaccacatcctgaggccttctcatatatggctgcattgtataccaatggtctcagaggcaaatgtgtgttttcttggatctgtgtgaggcttttgagccttggcaaaatctggcagaagcattagagtaaaccagtgatggcagtatatagaatgaggggagagagagaacaaggcaaatgcattgcatcatttagggaaggcagttggggtattgactgagcttttagccttgagcaattgttaaacttgtttttattttttaacttttatgtaagttaaatagctgcttattaaatgtacaagccgtagagaaagttgaagttcacactcacacagaccattgaagaataacagctgccttgattttatgcgtttctctaagattttgtagagttagtagaactcagggaatgccagctgatgtctagatgctactagcttaggaaagtgttctatttctcagggtaatggatatttaccatacttttaatgtaaatctgggaaaccttacttagtctaaagtgaaaatctgtgttgggtcattttattttcaagggatgtgccttgcagttttttgttttgctcttttctttaactggagctatatgatttcccgtttcgtttcgtactgaagtgtttgaggctttttcctcccccgcccaaacacagaagcaaggagatcaagccacgagtattcttatcttattggcagtgactcacctattttggctcagtcctaaaaggaattctggtggtttatttggggttgatttttccttggcttatgttctctgcacaatagctaggaatttaacttgagtctagtgcagacctgtctcctcgcccacctggagtttgtgttgtgacgtctctgtgccaccaccacctggagaattgaggccttgggacaagtaagttgtatgggttcctccgcacccccagattcaaatgatattacagagaggagaatactgatgcagagaattttctgtcagccaggaaaactaactgggggtatctttttttgtcccttattgtcaccaagcacagaaccttagagaaatcttggttccttagagctgccagcttcattagggattaacttgtctatttcacttcatagcacaagccctgtctatggccctgagggagggtgctttgtttcagacattgcaggacaggaattttcactaatccctctttgagaattatgttgctgctcagcaggtg

SEQ ID NO: 241927 - DNA, 1237 bp, Homo Sapiens
ttcccatttttgagacccacttgctagaatgtattaaagattataattgaaaatacgttggcaaaatctcccaaaattgtctctcaaaataacagtatatacagtgtaacatacacaacatctgttatactaatgaaaaaatctaagaaaaactctataggatgatatttagatattacagtcactatattaactattaggataatgtgccactaattcccaatcgtcactgctttcatgtagtgcttgctccatattgtcttaatgttaatccttaacatacacagcctaacatatttattgatgtgaaagtttttgttttattttcaacaacacggtctcaaccaggggtgattttcactaccagggacaatttgtcaatgtttagagacaattttagtttttactgctgtaggtagtggagtgtgctattcacatccggtaagtttagggcaggaaaactggtaaacctcctataatatgaggctagagcccagaacaaaattatcaggtccaaaaatgtcaatagtattgaaggtgagacaatttctagggagatattacaccttgatattctcatttaatatgctggtaatgtaatccagcatttttccaaaaatgagaatagcctggtggccttaaatgtcattgttttactcttacttacattggactaaagaatgagatcaaatgcagctgaataatttggatatttaaagcaataacatttttcactaacgcgcataggcttaatgcctgggtgacaaaataatctgtatacctatttacctataggtttacctatataacaaacctgcacatatacccctgaactgaaaataaaagttaataaataaagtaattacatttgtttagaaataaaataaatttagaaatggaaaatattgttgaaaatattctaagaattttaaatttatacatcaaaataaaaataatctgaatattattactaacagaaaatctttgtcttgatctcaaattccaagtagaatacctttagactatctctagcaatagctaacagaataagatttacaaatcttgatagatcatttttcatgcctgtgtcattttaaaatgaattgatggctgttaaaacttaatttagtttgagtctcttccggatcatatacatagttttacagacagccatgttcaatgaaattataatatgtaacacaagaaatatgccagatgtaaagtaagaatctcccaa

SEQ ID NO: 241928 - DNA, 932 bp, Homo Sapiens
actttgtacaaaaaagttggcaccagacaagcttcagtggccggcccttcacatccagacttgcctgagaggacccacctctgagtgtccagtggtcagttgccccaggatggggaccacagccagagcagccttggtcttgacctatttggctgttgcttctgctgcctctgagggaggcttcacggctacaggacagaggcagctgaggccagagcactttcaagaagttggctacgcagctcccccctccccacccctatcccgaagcctccccatggatcaccctgactcctctcagcatggccctccctttgagggacagagtcaagtgcagccccctccctctcaggaggccacccctctccaacaggaaaagctgctacctgcccaactccctgctgaaaaggaagtgggtccccctctccctcaggaagctgtccccctccaaaaagagctgccctctctccagcaccccaatgaacagaaggaaggaacgccagctccatttggggaccagagccatccagaacctgagtcctggaatgcagcccagcactgccaacaggaccggtcccaagggggctggggccaccggctggatggcttcccccctgggcggccttctccagacaatctgaaccaaatctgccttcctaaccgtcagcatgtggtatatggtccctggaacctaccacagtccagctactcccacctcactcgccagggtgagaccctcaatttcctggagattggatattcccgctgctgccactgccgcagccacacaaaccgcctagagtgtgccaaacttgtgtgggaggaagcaatgagccgattctgtgaggccgagttctcggtcaagacccgaccccactggtgctgcacgcggcaggggaggctcggttctcctgcttccaggaggaagctcc

SEQ ID NO: 241929 - DNA, 855 bp, Homo Sapiens
ggaaagtgcgcctccttccaccaggcttagttcagttcgtttaacttgagagggctggaggcagtgaggctctcgggaagggccgggctccagagcggcggggccgctcctagcggtctggcccaggctgcccccgcggcgcgtgctggacgcctcggagcccgtgccctccagcagcttggcgacgaagcccacgcccgccgagcgcagcaggccgccgccggcgcacgcgtacagcacggggttcacgctgctgctcaggaaggcgagtgcgatgagcacgttgcgggccaggctcagccgcttccccacgagccctaacccggcggcctggccggccagcgcgcggcccgcctcagccaggttcaccacgtggtagggcagccagaaggcggcgaaggtcaggatgatgagcaccaccaggcggccggtgcggcggctgcggcggaagcgccgggcctgtagccgacgccctatgtccgagtagctggccaccacagccaggaagggcagcaggaagcccgtgacagcctcgaagattagatggaaggcccggtgcccttcgctggggtaccgcgggaagcacaggctcatgttcgttttccagggcactactgtgcggtacgcgaggacgggtgtggccagcagaaaggacaacacccagatgcctgccagcacccgccgggccatcgccttggtgcgtagcttctgggacacaaaggggcgggccaccgccagtgagcggtctagactcatggccgtgataagcaggacgctggcgtacatgctgactccgcagacatagtgacacaggcggcaaccagccagtccaaaactccaggtgccttgggccaa

SEQ ID NO: 241930 - DNA, 980 bp, Homo Sapiens
gaaaaaactcttgcaataacacggattaaaggggaataatcctctctttctctacataattcaagaatttcatataccttctcttctgttaagtaagtcacatctttaaaatcaattctagcgcctttcttgttcatttttatctcagagcaggagttgttgggggcacctttcgagttctcaaggtaagctgagcttgctcctttcttggagagatgaggatcacagagttttgcattaatcttataaagctcgagggctttaatagctgctgcattattatccatacgaagaaaagttggacaggaagcacaaaactcattcgtgcaggcttcatttccacagccctcagttaactggtggtagtagcgttctattagatgctttgcagctgctcgcttcattcggctagcttcaatgtcgtcagactgaggttctcctgatctgtcgtcgcccccgcgcctgggctgcggcggccgcctcactggtcgtagtcgccctcgcccgccgcctccgcccgccaccgcctcgttctctttcgctgccgccaccgccggggctcatgcgggacccgcgcttccttatccggaaaacgaggccgggaaagggagcgccggggccgccgaaatcccggcgttcgtcgccagccgccgctgcctgtccacaccggggggctgaggggccctcctgccaggggctacaggccgcgagctattccgaggaggagccgaaggaggcgccgccgcccgcagccgagcgcgccgggtcggcagaggtgaagcgtaagtaggcggcggatggcgggcgcccgcgctggcggatggctacgcggcggaggggtgcgcgagcgagcgaagcctggtgtgtcgggtcctggcgaagggaaaaggccccgtcgtctcctgtagtcaccccgagcccagcgccaccatcttgggagacacacggatctcgcggccgcggcgcaagacgggagccaa

SEQ ID NO: 241931 - DNA, 1240 bp, Homo Sapiens
  misc_feature (883)..(894): n is a, c, g, or t
gaataggatcaagatgtataaactgttgtttaattacgtgagaaacatcttcagtggccaaggaaactgtccatttctctcagaaagcaaatgaaatgctgcagctatacccagaccttttataggtaatgaagcagttcaaaacttgaaagaaaacaaaacctgtcctcagaattctgtaaagtttattaagaatgttccttaaagatttaagaagcagtaagcagcatctgaagccacaatctattataaatactttatttcaactagaaggtacaatctctcaggggtttcatagtttaaaaagctacaatcacatcatgttgtaactacataaaaaacagagctgtagatggaactgcttggctttgaccatacacatttctgcacagcccttacagaatctgcacaaagaaatatctccctttgctccagttaattgttcttgtatgtaagttgctttctattccagtatatccagagtggtgaaataacaaggccagccacgtagccaaaggtcgctccaagcgtacaggagatgggccatacctgaggagagaatgtatgagatcaaaaaagaacaaatgttttattattacttgagcacaagtgtaacctaaatatttctatattaaagcttaatgtgctttcttaaagaatgccaaaagtgtaataaggtcataactgcatttatcatgaacactaaaaatgtacacattttagttaatgtgcattaaactgtaacaaggcttctggcaattgtagatttagtttgacgctccccaaagtgcatgagacacatgctaaaattacaaattaaaattttgggtcagactttgccataatgatagactcaatttagctctctgaactagttggtaannnnnnnnnnnnaattcccactttggctgtgtacatcaaatgaaatgagaagtgtgtatgctgaccaaaccacaagaaactttctttaagttgtgttaaagaggaaagacctagaatccaagcgtgttacatgaaaattgtaacagagcagctgcttccacctttcagatatagatgttggaaccacagcagaagttatagagcgacaacttatatacacacctagaatgtaagttaaacaaaataccgggcttccagagaccccttttctccagccatattacatcagctagaagtaattaatgttgatttatttcatctacaagcagttgggtccctaagtgaaaggctctgctgg

SEQ ID NO: 241932 - DNA, 1645 bp, Homo Sapiens
ttggcgaattaagaatagcaggaggagcagtgagggatttattaaatggagtaaagcctcaggatatagattttgccaccactgctacccctactcaaatgaaggagatgtttcagtcggctgggattcggatgataaacaacagaggagaaaagcacggaacaattactgccaggcttcatgaagaaaattttgagattactacactacggattgatgtcaccactgatggaagacatgctgaggtagaatttacaactgactggcagaaagatgcggaacgcagagatctcactataaattctatgtttttaggttttgatggcactttatttgactactttaatggttatgaagatttaaaaaataagaaagttagatttgttggacatgctaaacagagaatacaagaggattatcttagaattttaagatacttcaggttttatgggagaattgtagacaaacctggtgaccatgatcctgagactttggaagcaattgcagaaaatgcaaaaggcttggctggaatatcaggagaaaggatttgggtggaactgaaaaaaattcttgttggtaaccatgtaaatcatttgattcaccttatctatgatcttgatgtggctccttatataggtttacctgctaatgcaagtttagaagaatttgacaaagtcagtaaaaatgttgatggtttttcaccaaagccagtgactcttttggcctcattattcaaagtacaagatgatgtcacaaaattggatttgaggttgaagatcgcgaaagaggagaaaaaccttggcttatttatagttaaaaataggaaagatttaattaaagcaacagatagttcagacccattgaaaccctatcaagacttcattatagattctagggaacctgatgcaactactcgtgtatgtgaactactgaagtaccaaggagagcactgtctcctaaaggaaatgcagcagtggtccattcctccatttcctgtaagtggccatgacatcagaaaagtgggcatttcttcaggaaaagaaattggggctctattacaacagttgcgagaacagtggaaaaaaagtggttaccaaatggaaaaagatgaacttctgagttacataaagaagacctaaaactgatggctactaaaaagcagagcatttctggtaagactaaattttctcccctccctcttaatgaggttttagagactacaccagaataaaagacagtttaggggacctctgtagaacaacaagggtcttattttgtgaattatatatttcaagaactaaacagagatccacctttctggatctgatttatatcactgaaatgtacagttcttttggaatagtttcacctgagaaaacatagttggctattatctatcttaacctgttcaggcttttaaaaaaaactgtttttgcatagggtagtactaagatcttaaaaagtggtaactgtcttgaagaaaaaacgtttattgtttgtttgcaattgaaataacagggttaccttaacaatgactgtctatgatgtgtcagttcttatctgaattccaaaataaacctgtgcttaaaaaagaaataattgaccaagtaagtttgcataaaatgtgaatactaaatgtgtcccc

SEQ ID NO: 241933 - DNA, 960 bp, Homo Sapiens
aaaaagaaaaatggacatttaaaaagatgacttaaaattgtaggaaagatgacataaagtatatgtgcgttctgggaatgaaaatacaatatgaagtagctaagtaattttcactcataagtcatagggtgctaggtctccactggagacagacatttgggatgtcaccattttgtacactgacctgctgtgggtttcgtatgaccactgttatgctctagtcatgatattaaaactatcattttttatttttaaaaattcttacctgaagtatcttaaaattctaagataatcctcttgtattctctgtttagcatgtccaacaaatctaactttcttattttttaaatcttcataaccattaaagtagtcaaataaagtgccatcaaaacctattcattagaaaaggagggagaaaaatcactattggcaaataagaatttgaaaacacaagaaaatcagctaaacactatcacaaacagtaaaaattcagcagagtgaacagttattaaaacacatacgtattcatacatatcaactatcaaatggaagacaataaaagactgtcttttagtctgtttagctgcatttacaattgcaactaaaaagataatccaagaataaactaaacaagaaatatgcaaaacttgtatgaggtggagtggagccaacaagacaccatacaagctaattttcacaatatgggaaaataatagccaaaataaaatggaaaaaatacgtaacaggattaacagaagaaacgaggaaaatatttttaatcttggaatctttataatcttgaagatctttcaaactcagcaagaaaacagaaaacgcaacacaaaaacaacaggattttcgaagaaataattgaatgacataaaaaatgaaatatgcctgtatggcagaaactactatcacacacaaagtcataagtgacatttttccaacttttttgta

SEQ ID NO: 241934 - DNA, 1817 bp, Homo Sapiens
  misc_feature (1202)..(1214): n is a, c, g, or t
tttatcagaactctgaaaaacagtaaaaagtttatagcaatgaagcaaatgctgagtcaagaacaggcaactttaaaatggcaagaaagctttgtgacatttctgcttgcccttcccccacaagctccctggtgttgcagcagtcttgaaatcagcaactgcattctgtcttggaccctgatccccatttctagaggaagctgagcagaacttacaaattcttgtttaagtctctggtagcctgtctggggctacttaaaggattgacagagcactcatcgtaagcagtaggcaatgcttgaaaaaagtgtaaggtgaactaacaaccgcaaacacctgggtcgaaagactatggtcaagatatccaaaaaaccatctatgttctgtgagaaaaagctgcaaaggagtttctttgggaaattagaatattcaacagcacatacagggagatttagaaaactacgtgcatacacagcaagaagcatgctcagacaagatctgcaaagaccctacgcttttgggcctgattgttaggctcagtacaagcctggctaagtattaatggaaaagcccagcacagaaccaatctacaaagactggaaagactgggagagagatttttctgctagttttaactcctttcaaggaaatctatgtcaaactattaaacacaaactaaggaacagagacttcagtgatgacacacagaaggaatacagtctttgcaaaaatagtttggaaatgactgcacatgtagcaatagactgctacaatcttcaataataaaaataaaactaactctcaggaaggggggaatatctgattttcagggccaccacgttatgatgttcaaacatacagttttcaacaacaaaaagacagcatacaaagacacaggaaagtatggctcattgaaaacaaaataatgaaaaccatccctgaagaaacacagacattggacttactatgcaaagactttaaacaattgtcttaaataagcccaaagagctaaaggaaaacatggacaaagaactaaaggaagaaagagacatatgaacaaaatgagaatatcaataaagacacagacgttataaaaaggaaccaaagataaatcttggagctgaaaagtacagtaactgaaataaattcactagaggagttcaacagttgatctgaacagggagaagaatcaacaaacttgnnnnnnnnnnnnngaagggcaactgcaataatcaagtctgaggaacaaaagagaacacagcctaagaaactggtgagacagcatcaaacagaccaacatatacattaagaatatttcagaaggaaaagaaagaagcagtgaaaaaaattgaagaaataatagccaaatatgtccaaaatttgataaaagacataaatctatgactccaagaaactcaacaaactctaagtgggataaactcagagacccacactgagccgcgttataatcaaactgtcaaaagacaaaagctgagcaaatccgaaaagcaataagacagaactgactcatcaagaatgaggaatcctcaaattttataacatctaatatctcatgagaaaccatgaagtcagaaggtagtgggatgacatatttaaagtgctgaaagaaaaatactgttaccaaaaattcatgtatctggcaaaattatccatcaaaaataagggagaaatcaagacattctcagataaaacaaaagctgagggagtttattacaattagacttgccctgcaagaaatgcataagggaatcctttgggctgaaatggaagggcactagacagtaactcaaatccaa

SEQ ID NO: 241935 - DNA, 915 bp, Homo Sapiens
ttggcttgtttttcccgcgaaactcggcggctgagcgtggaggttcttgtctcccctggtttgtgaagtgcggaaaaccagaggcgcagtcatgtcgggattcgacgatcctggcattttctacagcgacagcttcgggggcgacgcccaggccgacgaggggcaggcccgcaaatcgcagctgcagaggcgcttcaaggagttcctgcggcagtaccgagtgggcaccgaccgcacgggcttcaccttcaaatacagggatgaactcaagcggcattacaacctgggggagtactggattgaggtggagatggaggatctggccagctttgatgaggacctggccgactacttgtacaagcagccagccgagcacctgcagctgctggaggaagctgccaaggaggtagctgatgaggtgacccggccccggccttctggggaggaggtgctccaggacatccaggtcatgctcaagtcggacgccagcccttccagcattcgtagcctgaagtcggacatgatgtcacacctggtgaagatccctggcatcatcatcgcggcctctgcggtccgtgccaaggccacccgcatctctatccagtgccgcagctgccgcaacaccctcaccaacattgccatgcgccctggcctcgagggctatgccctgcccaggaagtgcaacacagatcaggctgggcgccccaaatgcccattggacccgtacttcatcatgcccgacaaatgcaaatgcgtggacttccagaccctgaagctgcaggagctgcctgatgcagtcccccacggggagatgcccagacacatgcagctctactgcgacaggtacctgtgtgacaaggtcgtccctgggaacagggttaccatcatgggcatctactccatcaagaagtttgg

SEQ ID NO: 241936 - DNA, 1566 bp, Homo Sapiens
  misc_feature (472)..(495): n is a, c, g, or t
  misc_feature (1221)..(1261): n is a, c, g, or t
gatttggaaaccaatgtccaatgtatttatagatagtggtcagattactgtcacaactgtccttaaatttgtaggatttaatctattttagttttggaaaccagaaaactaagctagttaaaactatttctaaagcaaggtcagctttgaagaagagcaggcagataatcttaaagtaaattacacgagctttcaagcatgggtatttgacatctgaagcatttatatatttttgctgcccagaagttttagtttgctggttttcttctttaatttcttagtcatagttaaggttttgggtatgtaacctgtaaactaactaaaaaaatgctactttgaaagtagcattattttaaaataccattattttattaggtataaatgagccactgaatattatatagcaatgaaagaattcttgccactactttcttccaactgaatgcataatgatttaactgttttcttaagnnnnnnnnnnnnnnnnnnnnnnnnttctatctaggaaataagttctatgaaaaaatgttaactcatgtaaatgttaaaaacctttttccttttgtgactttaagatttttaaggcatcttaaaataagttatcatgaaaaacttccagtgattttattgaatttaagatatctactgaattcatatccatatttttgttaagattcttctcaatgttaaacttgtcaatgtaggttttgagttaatagaaaaccagtatctactatgatctagcaatagatttttgaacatgactaaagatagtttagttttctaaaactcaactatcttttttctttaaagttctagaaatatgaccgacaatttccattttgaaaatgtaagctatcttataatactcaatagaactcaatactaattttacaaaactgtttttaggaaataaatttcctaatgctttgcatgtttcctcacataagtaaatcatataaaatatactgttggcattcattacacaaaaattaatatatcagtgaaaaaatgaaagcatagtttgaacatctgtgctccatttaggaacatatattgtagatggaaacttctatcattcatcatttattaaatatttattaaatgcagtgagcactgtattaagaatactatagtacgtggtgttaatattaatgaaccacagcgtattcagtatgtattgttactgaagattatatataccacaattaaaagctatcnnnnnnnnnnnnnnnnnnnnnnnnnnnnnnnnnnnnnnnnntgtacaaatagaagatgacatgatttttattttccaaactatggatttctaggcatttgaataattcttactgaactcaaacacatttcattggtaatgatatttctttctgattcaaattgaaatctacctctgtacattaaaaaaaatcaatgcttttacaatcttacctaattgagcatcaatattataataaatgagatttttaaaacaacttgagcctgtgcatataaggcatttacatatgatgaccttgcatcctataatacaagtaattgcatacttaatatctgtaataaacccaa

SEQ ID NO: 241937 - DNA, 967 bp, Homo Sapiens
  misc_feature (903)..(926): n is a, c, g, or t
gaaataatgtttaacatgcttcttaaactttaaaatataccacgcagaatataacaatgttctttcattaatcttcctcattagaaatatgaaccacttagttttctagtgcaacacaatatcctaaaaatttaccaacgtgggtatctgccttactagagataaccccaaatggctacattaaaaaaattgtgaacttttaatttttttggtcacatttaactgtcagcgattacttcttgctttgattaaatatgctggtttttctgttacctttcctacctccctgaatatcaaagttagggtacagcaacaaaactacataaacctttgataaactaatggttctctcaaggacagtcattccttttacccgcacagtttagagaagggtatatattgaacaaggaaggaactgaagaagaaagggagatttggaaaccaatgtccaatgtatttatagatagtggtcagattactgtcacaactgtccttaaatttgtaggatttaatctattttagttttggaaaccagaaaactaagctagttaaaactatttctaaagcaaggtcagctttgaagaagagcaggcagataatcttaaagtaaattacacgagctttcaagcatgggtatttgacatctgaagcatttatatatttttgctgcccagaagttttagtttgctggttttcttctgtaatttcttagtcatagttaaggttttgggtatgtaacctgtaaactaactaaaaaaatgctactttgaaagtagcattattttaaaataccattattttattaggtataaatgagccactgaatattatatagcaatgaaagaattcttgccactactttcttccaactgaatgcataatgatttaactgttttcttaagnnnnnnnnnnnnnnnnnnnnnnnnttctatctgggaaataagttcccaacttttttgtacaaagt

SEQ ID NO: 241938 - DNA, 894 bp, Homo Sapiens
  misc_feature (761)..(776): n is a, c, g, or t
ttgggtgaagcctgggagctgaattccggaagatccccacatcgatgaaagcaaagcgaagccaccaagccatcatcatgtccacgtcgctacgagtcagcccatccatccatggctaccacttcgacacagcctctcgtaagaaagccgtgggcaacatctttgaaaacacagaccaagaatcactagaaaggctcttcagaaactctggagacaagaaagcagaggagagagccaagatcatttttgccatagatcaagatgtggaggagaaaacgcgtgccctgatggccttgaagaagaggacaaaagacaagcttttccagtttctgaaactgcggaaatattccatcaaagttcactgaagagaagaggatggataaggacgttatccaagaatggacattcaaagaccaagtgagtttgtgagattctaacagatgcagcattttgctgctaccttacaagcttctcttctgtcaggactccagaggctggaaagggaccgggactggaaagggaccaggactgaacagactggttacaaagactccaaacaatttcatgccctgtgctgttacagaggagaacaaaatgctttcagcaaggatttgaaaactcttccgtccctgcaggaaaggattgatgctgatagaagagcctggacagatgtaatgagaactaaagaaaacagatggctggagatgacatttatccagggtcactttgtcaggccctaggacttaaatcgaagttgaacnnnnnnnnnnnnnnnnaaccaaatagataggggaagggaggagggagagggaggacagggagagaaaataccatgcataaattgtttactgaatttttatatctgagtgttcaaaatatttccaagcctgagta

SEQ ID NO: 241939 - DNA, 866 bp, Homo Sapiens
  misc_feature (509)..(544): n is a, c, g, or t
  misc_feature (557)..(570): n is a, c, g, or t
caaaagccacaaagtttacaataatgtattagtgtggcatgacatttgccagtaaaataaattatagaaactatagagtctttataaactattttgtatatcatattcacttcctaatgcttactgcagtaactgtatgaaatttaattagattacgttttagcattagtcagaagatttaaaaaatatgtaaaatgttttcacagtactttggatttataaaagaccccattattttaacttttgtgcaacctgtgtgaaatgtataaaaaacctcttacaaaccaaaaggtggcgtaaggttttactgagttgctgaagacatcttactttcttgaatttctacttaacatccatgtggtgcactttttcaggcattgtaataagtgcaaataaataatcaattattgatttctaaaaatctataccaatagacaatactcaggcttggaaatattttgaacactcagatataaaaattcagtaaacaatttatgcatggtattttnnnnnnnnnnnnnnnnnnnnnnnnnnnnnnnnnnnnatctatttggttnnnnnnnnnnnnnngttcaacttcgatttaagtcctagggcctgacaaagtgaccctggataaatgtcatctccagccatctgttttctttagttctcattacatctgtccaggctcttctatcagcatcaatcctttcctgcagggacggaagagttttcaaatccttgctgaaagcattttgttctcctctgtaacagcacagggcatgaaattgtttggagtctttgtaaccagtctgttcagtcctggtccctttccagtcccggtccctttccagcctctggagtcctgacggaagagaagccaa

SEQ ID NO: 241940 - DNA, 948 bp, Homo Sapiens
ttggggctgtccggacggtgcagcggcgaggccggccgcgaagatgccagtggcggtgatggcggaaagcgcctttagtttcaaaaagttgctggatcagtgcgagaaccaggagctcgaggcccctggaggaattgctacacccccagtgtatggtcagcttctagctttatatttgctccataatgacatgaataatgcaagatatctttggaaaagaataccacctgctataaaatctgcaaattctgaacttgggggaatttggtcagtaggacaaagaatctggcagagagatttccctgggatctatacaaccatcaacgctcaccagtggtctgagacggtccagccaattatggaagcacttagagatgcaacaaggagacgcgcctttgccctggtctctcaagcgtatacttcaatcatcgccgatgattttgcagcctttgttggacttcctgtagaagaggctgtgaaaggcatattagaacaaggatggcaagctgattccaccacaagaatggttctgcccagaaagccagttgcaggggccctggatgtttcctttaacaagtttattcccttatcagagcctgctccagttcccccaatacccaatgaacagcagttagccagactgacggattatgtggctttccttgaaaactgatttatcactctgagttcaagattcatcttcagaatcctgtatactgacaaacgtagaaatgtaaagtttgtattttcaatttattggatggcttaagcacctcagcattccttactatgtgataaaatacatatagaatataagatatactatatacattttgtccataaacgttatgctgaatagttgttgaaacagttctcattttgtagtatttaataatctggatggagcctgtcagtattacaggttagttttctagttgactcataaaa

SEQ ID NO: 241941 - DNA, 983 bp, Homo Sapiens
ataaaacatgtcacatctgatgcagttgatgtcaagtgtgcttaagtcattatgaatcaagagactaacaatagtggctgcagaaacaggtttgttgtctgtacaaagacttcaggtaaattatagtacttccatgttagctgtgcatgtccaccacgctttgtctgtaactcgagtagaaaaagatgttgtgttttaattaatcattccttacaattcaagatgaactccacatatttaagaattcttggctgaaagaaaagtcttcaagatactggatgcctctcaccactttgacaataaacacacaagaaaaccattgtgtaaggcactcaaaaggttcttatcaatcacgagagatcagtcacactgacattcattcccatgccaggactcacgtaagggacagcatgcactgctttgggaaattctggagtcataacacgtccattttctccagtacttcctgtaattgacagccttgccttgttcctcatggcatcattcaaggtcatcttaaatgagagaggagggaaagaaagaaaaagaaatcatacgttatggttttcaaatgcatccagaggaaaggcagggttgtttttgaaaagtttacttctatctgaaagcttctagcaaatgaaagcaaacagtgcaaagctgaactacaaataataaagcacaattatggcaggaatctgtccacattcacccaagctactgtgccattaaagaggaaaatagacagttgagctgcaggttagtcaccaactgggaacatggaagaacgtcaacaatacatacaggatgatccattggccaccttccttatttaaaagagcttaaggacgcaacaagaaagctaaacgtgcactaaaaagtttgtattagagcctcgttcctaccccctaaattttaacactttcgatgccatatacgttgtaaccttccttataagttgcaaaattctgtgaattctgcgccaa

SEQ ID NO: 241942 - DNA, 1325 bp, Homo Sapiens
  misc_feature (351)..(368): n is a, c, g, or t
  misc_feature (928)..(983): n is a, c, g, or t
  misc_feature (1004)..(1017): n is a, c, g, or t
gggaggatgaaatccaatcagtccctctccattactcacatgacatttctcaaataaactctgtggcgaggaagcttactagatgaaccttatacactgatagaatcctctgaacaagagaagtcacgattccctaatggcaaatagtctttttaacaaatggaaatgagaatgcctggaagcaagtaatctgtttttatggtgcccttcctcaaatggactctcatagcagaataaggaagcagaggaaaacttggttctatacaaatctataaaaatgttaataatctgatttgctcacagaaacattctgcatgtctgttaagaaaaactgattactttaaaagatcnnnnnnnnnnnnnnnnnnccggactgaaatgacttcaactatatgaaagctcctttgccatctcatgcacctttagggcaataataaagatgtatacttgcatactttgggcctatatggtaacttccttctgaagcatgaggtatcttcaagggtgtgatcaattgtctttgcaatgttgtcaaaagatatgagggggcaataaagggaaaactgaggaacagagagagtttagtaaagtgatgggttgcagtcacccaagtgatgcagaatgacttaaattagggtctcctgatccgctgtttattcagtatttatttatttgagacagggtcttactatcttttgcttagtataaacatgggctagtcacattttagagatatttacatcttgcaatttaaagagggagttaacattcccctaatgccaacttttagcttaatgacaagtactatggtggtggcagcgataacataaacaacagcaataacatcggaaaagagaaagtcacaggtatacaaaatggaaatcaaagaggtttacaaaaatctgcattttggagaatagcttgaacnnnnnnnnnnnnnnnnnnnnnnnnnnnnnnnnnnnnnnnnnnnnnnnnnnnnnnnngaaagagcaagactccatttnnnnnnnnnnnnnnctgcgttttattctgtgtattattgcaaattaacaatatatttttatgtgtgaaaatcctaaaagaacaaatgaaaaactactacatagaatttggtaacataaaggaatacaaaattaacagagagaaatcaggaaccttcatatatacgaacatagcagaaaataagaccttatttacaactgcaactacaaatacctaggaagaaaatgtaaaactatgcaagacatttgaaaaaaaatttctccacattgattaattcaaaatccagaagctatagaggcaaaaaatgtatatttcgctacaat

SEQ ID NO: 241943 - DNA, 938 bp, Homo Sapiens
  misc_feature (219)..(322): n is a, c, g, or t
tctcacacaacactttgagaataagaggaaaggttttttaagttcaattttgtattacatacatttgatttacttataactggcttcataaaaatgaagttcactacaaacatatctcatcagaaattcattctttattcataaatgtttactaaagcaatcactatgaaataagaacatgcagtaaagtttaaaaatttatcgttctttttttcctgnnnnnnnnnnnnnnnnnnnnnnnnnnnnnnnnnnnnnnnnnnnnnnnnnnnnnnnnnnnnnnnnnnnnnnnnnnnnnnnnnnnnnnnnnnnnnnnnnnnnnnnnacagcccagctcaaaaatttgtaattcttaaacttcatataatggtaggaatgatcttctgactctcaatccagtgttcctcccattacatcagaaaatagacaattttctcaaaatgtattttagtagatccacccttcctttatattgtatttctgggttattcttgtgcagtagatgttatctaagaaaaatttaaatgcacttcttaagagtacagaagaccagcattgagttattcccatttttcaagccaggtttcttataaaattcgtaacaaacgatactttgaatactttgttaaaatctttaaaatccacaaaatcagattctgattaacctagctggatattttttaattcctgtgatttgtttccatctatagaccaacaaacatttattaacactgaaatttaaaagttagcctgacaaggatcagcaaaagataccacaactattaggtaaaagatcactggagaacaggctagcattacagtgctaatttatcatgccacagattacttgctgactgcagtgagaaaaatatacctcaccttactcctctcaaccaagcaatcaaacttagtatcacaaataatgggccaacttttttgta

SEQ ID NO: 241944 - DNA, 1244 bp, Homo Sapiens
ccagtggactcctccccctttatatatccatcccccccaaattccccaacaattttctccactgaaatggtatagtgccaaaatttattaaattcaaggtctatctccagacatggcctcccttgggaatgaaaacagaaatatattaagttattcaactcagtaagtttcatctaaagactctagttatgagtcactgtaccttctggtggaatacagagatgaactccctagtccttatcttctaggagcttacagtctagtaaagtagtaaaacagataatgtaattctaattctagactgaaggggtaagttatgaactacgagaaagacaaagtgctctagaacagtttcagaaatgaaggttggaacaggacctcaaacaagagggaaaatgtggaaagtagatgagaatggatttgttcctcactccaaattctggacagatcagccccaaaacggggctactccccattcctgttgaaattttttcttaggaaaaaatatagctcttgtactgatcttttaaaaaattacttacatggcaagagatcagaggaaaggggggattgtagatctcagtggaccttcggggaagacagaaggcacttgaagccaaggaatcacaatgcctggcttatcgggaggaccctcagtgttttagcaaggctggagcatcacttccatgaagagtgggagaaataactcaaaagtaatattaagaccttgatataaacatggcattgccaggcactaaacagggtacacgcctaagaccaaattgctgccccctaggagcttacagttacaacaatacaaggtggaaaaagcaccacaatgtacagaatgcaaaatgctgaagtatttaggagaaattacagctgagtttcagctattaacacattaggatacccaatagctttctgacagctagtagtaaacccatccctgaggggagcacaagttaatgtccttagacaacaagccctggtagagctgggccattaaagacagttctaagaaaattgagaaaacaggggtatgaaaactacagaagcaactgggtgaacatacaaaaagtgataccttccctttttctcctgacaaactttaacagggctgcccttcctacagtgaatctaaactgatgatcaccatattacttctaaaagcagatttgggactctactaaccaattctctctgatcctgggtaaaatgaagccaacttttttgtacaaagt

SEQ ID NO: 241945 - DNA, 850 bp, Homo Sapiens
ctacttcacagagctactttagagttgtcaaggtaagtaggcaacaagctttggtctcttgagccctttataaaacaatgggccagaacatatatctaccaatccctggggctgaggccttgtaacctgctggtgatttgatctcatgctggagcacatggtagagcagcaaaagataaagcatgaatggctattgagaaagacagatattagcagaggttagtttaccggctttggtgctgcctggtggagtctatcagccatagcaacccaaaccagacgaacctacctaggactagccacacagataggcaggtacatttaagcctcagataaaatgggccttggttgaacaagcgaaaaagagaaagctggacctctgtccagcaatcagccagagtgacacacacccacttttaaaggtagaagcaccaccagccacgtaatttgaaaaacatgctggagtaggaagccagtttcagtgatcaaaactagctgcagccttggccaactgttccattctctatccctgcagcaattaagaggggaggcaggctaggggtttaactcaatatcccctcaagggtgaggaacatcctctcctcttgctagtaaaatattgagagaagaaatcacagattaagtaaaaggcagtgtagttaggtgttagcaaatatagagtaggatactaggaagtgaagagcattctggaaaaacttgcttccagtgcttcatctatgcttcagtagctcaatgtatggaaagaggcaaaggtgaggaaatcagcattagctagctgagaatagagctggcggttaagccctgaggggttaggaaggcatatacccaa

SEQ ID NO: 241946 - DNA, 1501 bp, Homo Sapiens
  misc_feature (619)..(679): n is a, c, g, or t
  misc_feature (684)..(752): n is a, c, g, or t
tttcctttaattttatagttaaaatatgttgattgctgcaaagtaggtggattaaatcatctacaaatttcactacaggatagtaatatctatgaactaatacttcagcttaaagtagttgggttaaaaaaatgctcttcagtttaagacttactatgtattcttgtacacacatatttatacacatatcctttcaagcaactccatccacaaaaccacatgtgctttccaaataccgacccacttatagacatgatatatatacccccttggatacaaatgcacacccaggtatgcaaactcataatgaacatttagcatagtcaattcaacaggtggtagacaagtggaaagatacaagactaggtgaactgaagagagaataaatctaaacaaaaaaaagtgaatttagagttataagtgagcaaagaagtaaagcctatgaaaacaactatctaatgctagaataatgatatatattagatgatacaaagaaaactttgcaattagtttcatgaccttaagctatctttttaggccttatctataaaatatggaggctacaaaaaatgattctctaaaaattcactacaatttcaaaatcctttgattccaccgnnnnnnnnnnnnnnnnnnnnnnnnnnnnnnnnnnnnnnnnnnnnnnnnnnnnnnnnnnnnnttatnnnnnnnnnnnnnnnnnnnnnnnnnnnnnnnnnnnnnnnnnnnnnnnnnnnnnnnnnnnnnnnnnnnnnaatcctcctgtcagacctttaaaagcatgagatcttttgtttccttttcctgtgagttaatcttacctggatccagataaagcagataagaaggtctcagagaaagccatttgcagttgatgtttacttcctctacacatgctaatctccctgacaaaaggacagcttttcataggtatttctgtgactgtgttgcctattgcactgcctacatgacttacctggacccctacccagatgttgttggccattgcagtgcctatgtgacatggctgaattcttactcacctttaactctgcttatttttaagaaacaggatgtctgtggtcagaagtttcttcttgggactaaaccagctgaagctggtgaaatccatgatggcagcttacgcaacctctgaaaaacatctaggtttattataatccaatttccatgctaaatagcactcccatcagtgcatgacagttgacaatcactgtgacaatgaacggaagagaccaagaaaggacagaaatgaggtgactccttgattctaggaaaatctccatcccttactaagaaaagcatgaatattcctcaccttgctcattcccttcattaaagatcctctatatttgtaacttcctggttctcagtagctgagaaggtgatttgcaagctatactacttctccaattccatgctatgctcctacttctccaatgccattgaatagagcctgcactgcttgacgctcactcttggccaa

SEQ ID NO: 241947 - DNA, 1100 bp, Homo Sapiens
  misc_feature (853)..(864): n is a, c, g, or t
ttgggtttcagaagagcaagaccaaaatttgaacaggttaatctgttggattctaatgcagttcatcacatcattcatgattttcagccccatgttatagtacattgtgcagcagagagaagaccagatgttgtagaaaatcagccagatgctgcctctcaacttaatgtggatgcttctgggaatttagcaaaggaagcagctgctgttggagcatttctcatctacattagctcagattatgtatttgatggaacaaatccaccttacagagaggaagacataccagctcccctaaatttgtatggcaaaacaaaattagatggagaaaaggctgtcctggagaacaatctgggagctgctgttttgaggattcctattctgtatggggaagttgaaaagctcgaagaaagtgctgtgactgttatgtttgataaagtgcagttcagcaacaagtcagcaaacatggatcactggcagcagaggttccccacacatgtcaaagatgtggccactgtgtgccggcagctagcagagaagagaatgctggatccatcaattaagggaacctttcactggtctggcaatgaacagatgactaagtatgaaatggcatgtgcaattgcagatgccttcaacctccccagcagtcacttaagacctattactgacagccctgtcctaggagcacaacgtccgagaaatgctcagcttgactgctccaaattggagaccttgggcattggccaacgaacaccatttcgaattggaatcaaagaatcactttggcctttcctcattgacaagagatggagacaaacggtctttcattagtttatttgtgttgggttcnnnnnnnnnnnnaaatgaaaagtatagtatgtggcactttttaaagaacaaaggaaatagttttgtatgagtactttaattgtgactcttaggatctttcaggtaaatgatgctcttgcactagtgaatttgtctaaagaaactaaagggcagtcatgccctgtttgcagtaattttttctttttatcattttgtttgtcctggcctaaaccttggagtttgagtatagtaaattatgatcccttaaa

SEQ ID NO: 241948 - DNA, 1516 bp, Homo Sapiens
ttggccatcagtcttgtatacaaccattgtgataaaagtttattacccagctgacccacctccatacattgatggaattcgaattaacagccctcattatttgactaagataaagctgaccacacctggcacccatacctttacattagtggtttctcaatatgaaaaacagaacacaatccattacacggttcgggtatattcagcatgcagctttactttttcaaagattccttcaccatacaccttatcaaaacggattaatggaaagtggagtggtcagagtgctggaggatgtggaaatttccaagagactcacaaaaataaccccatctaccaattccatatagaaaagactgggccgttactgattgagctacgaggaccaaggcaatatagcgttggatttgaggttgtaacagtttctactctaggagatcctggtccccatggctttctgaggaaatctagtggtgactataggtgtgggttttgctacctggaattagaaaatataccttctgggatcttcaatatcattcctagtacctttttgcctaaacaagaaggaccttttttcttggactttaatagtattatccccatcaagatcacacaacttcagtgatggagaaatctcaagttactggcttttatacttaccaaacatcagttcttcaaataaggacgcaaatcttcaggacagtaagcagaacaatcagaatggaattaaatctctaaaaacgtgttacagtggaatctggtgcttgtcagggtgtttggtaagaactgtatatagtcagaattacctaaatcacctagaggtaccgtttacatggttttgtgtatatagagttggcttgcattttaggggccattttgtataaaaagtgcatatgattaaaattagactcagtcatcactgtgagatgcctttgctaagaggataaaggaactgagaccagatgagaaaaagaaaggatatagattccttgagtggaatagtgggctagattaatataccgaaatatttccattgtttcccttttttgcagagcatgtggaagttaaacctgcttgattctactatacatcttgggcaactagttaccaaatgaattgtgccaccataactgattttaattttgcattatttatgattttaaaatatttgttgcccaggtgttatgaaagaataaagcttttaagtatagactaccttagcatgaagatgctcatgcctaagaatgaaaattgttgaggttatctcccattcaatcatgtagcaagaacttaaagaaattcactactgcagtttttatttttaaaaaacagtaattgagatattgaagacattacaatttagtttgtgtggtctttttttaaattgctgtatcgttcagtctcttgtgggcaatagcactttgaagaaaatagagaatttaatatatggtgattgggatatgtagcattcaaaaaagtgaattgccaggatactggtgtcatgtaaattccc

SEQ ID NO: 241949 - DNA, 1185 bp, Homo Sapiens
atcacaaatcaaatatcagacaaattttacatggtaaaggagtctatgaaattgaacagaagctcaggcttcacttttgtggtttacaggtataacttgtacatctttttgagattattcaaagtgcattttcaaaagggcaactcagtatatttaatataaactgataacccaacactgattctgggcaacatttagtctgcttacacctagaaactcaaaatgaatttagactatctgcatattactttaccactattatctgttaattctggaatatttccatgacataaaacacaaatagaaatctacacaaagaaagcaaacaaacaatttcttttacatgaagtatgctgtgttgaaagttcttttcagtggcatttcatgagtttgccttttctgaaccctggaaacagacattactcatctgagacatgattatttctaataggaggccaaactttgaaaagttaaaactaagtatgtctatagggtgccaaagtcacatgacacatgattattttatgacttaattttactgatatctgaattaagctcagcaaaaagcaagtcatatttcttgccagattgacatgatatataggatgtgtttaaaaaacccctgaaaacaagtatagaattagaaacgaatgtaaacttcctaaactaactcagctgaggtaacaggtagccagttaaattggctgattgggaaacttatttcttctttaaaacatacttgtacctgaattggaaacatcagcagtgcatcacaacactagagcattttcatgtaattaaagcaatggatggtgatgtagattctacagctttcatgacattcattagctgcccaaattattgctgagttttgatctgtaaattataggtgtcaaggaggctgtaaaactatattcaaattaaatcagtaatatgcataaagtattctgtgttcactgcaaatatattaaatatacaactcttattgagcataattttcataaaattaacccccaacaaaattataatgccttttgttgtaattttacacctttatgtatttgatagtacatacgagttcagaaacttatgaatcttaagaaatattacatgcaaaaagtctctgaaagcagtttgcacttctaaacaaataactgaaatgttcggtcagtaagttattgccaa

SEQ ID NO: 241950 - DNA, 895 bp, Homo Sapiens
ggaagactctacacccttctcgttattcagattcctctggaataagcagaattgcagatggattcaatggaattttctctgatcattgttacagtgtctgttctatgagacagccagatttaaaatattttgacaacaaagatgatgattctgataccgagacgtcaaatgacttgccaaaatttgcagatggaatcaaggccagaaacagaaatcagaactacctggttcccagtcctgtacttagaattctagaccacactgccttttctacagaaaaatctgctgatattgtaatttgtgatgaagagtgtgactcacctgaatcagtcaaccagcaaacccaagaggagagtcctatagaagttcacactgctgaagatgttccaattgctgtagaagtgcatgcgatttctgaggattatgatatagagacagaaaacaattcctctgagagtctccaagaccaaactgatgaagaaccgccagctaaactttgtaaaattcttgacaagagccaagctttgaatgtgactgcccagcagaaatggcctttactgagagctaatagcagtggcctctataaatgtgaactttgtgagtttaacagcaaatatttttctgacttaaagcagcatatgatcctgaagcataaacgtactgattcaaatgtgtgtcgagtatgcaaggaaagtttctctaccaatatgcttctgatagaacatgccaaactgcatgaagaggatccctacatttgtaaatactgtgattataagacagtaatttttgagaacctcagccagcacattgcagacacccattttagtgatcacctctattggtgtgaacagtgtgatgtacagttctcctcaagcagtgaactctacctacattt

SEQ ID NO: 241951 - DNA, 951 bp, Homo Sapiens
ttggggaactcggtgggaggcggcaacattgtttcaagttggttagattgacaagagcgagaggtatactgcgttccatcccgacccggggccacggtactgggccctgtttccccctcctcggcccccgagagccagggtccgccttctgcagggttcccaggcccccgctccagggccgggctgacccgactcgctggcgcttcatggagaacttccaaaaggtggaaaagatcggagagggcacgtacggagttgtgtacaaagccagaaacaagttgacgggagaggtggtggcgcttaagaaaatccgcctggacactgagactgagggtgtgcccagtactgccatccgagagatctctctgcttaaggagcttaaccatcctaatattgtcaagctgctggatgtcattcacacagaaaataaactctacctggtttttgaatttctgcaccaagatctcaagaaattcatggatgcctctgctctcactggcattcctcttcccctcatcaagagctatctgttccagctgctccagggcctagctttctgccattctcatcgggtcctccaccgagaccttaaacctcagaatctgcttattaacacagagggggccatcaagctagcagactttggactagccagagcttttggagtccctgttcgtacttacacccatgaggtggtgaccctgtggtaccgagctcctgaaatcctcctgggctgcaaatattattccacagctgtggacatctggagcctgggctgcatctttgctgagatggtgactcgccgggccctattccctggagattctgagattgaccagctcttccggatctttcggactctggggaccccagatgaggtggtgtggccaggagttacttctatgcctgattacaagccaagtttccccaagtgggcccggcaagatttta

SEQ ID NO: 241952 - DNA, 1518 bp, Homo Sapiens
caaatttaacaactttatttgaatttgcagaagcattctacagtaatacatttttaaaaatcacatagcactcagtaggtacatgtatacatgtacatttcagaagacaacaaataaaattactctcagaaagctgcaaagatggacacatataatctaagaatgtggtaatggccagagggagtacccaagagaccatattttattatgcttaaggctactactttccacaatacctctgcagttaagactcttaacttacaatcacagaaatgaaaacatgataatacactgctttatacagacatacagatactgggatatagtataatttcttatggcttaaaaaaatttaatttgcttttagagtctatattgctaaacttaactttccacaaaatacaatatatcatgaaagcaaagtattattttttaaaaggccccattatctgacaaaatagatggtgaacatgcactatcccaggatatctattattatccaaagaagtgtttctcaaagtgtggtccatggtactggtccatgaattggttgctaccagtcaatgaagagataaattacttgcatcagagtgtaaatcaatacattgctttagctattaataaaattttgctaaaaaatcaaatcctgtcattgacctaaaaagtatctctagatttaaattcttgtgcatgcttatcttgcctgtggataagtaacagtttgtagactggtgctttgagttgcattgatctagactactatgattgatgttgcagacatgaataaataacaaagaaaagtaagaaaatatgagcaaaaatatggacaagttatggaacgtgaaaagatactgagataaaagtatcaaaaagaacaacatcactgttctgaatgtgtaacaaatgtttaattctgtcctaggtataaaggaggatgcatattattctattgaacagtaaatactccttatatcctaattagaattttcttagttttggagaattgtaaaaacataagtaaagcaggaaacagaaaacaacttagagactaatatgtgatctagaaagcgttaaattgtttgtaccaggcttcctatctacgcaaatctttagaaaagacaagtagttctacacaggcaattacttttatactgtaatttgatgggtagaagcttaacattttgtaattagccctatctggaaactaaaacaaccttaacagaaaagaaaatgttggcataaagtacctgaaagataagatagatgtctttttgtccttaattttactagtgtttatttccacgctttttaattactttgcatacttctcctccaaataatgttccacctttaaagggagtggaagccagcttattcttagaagctaaattaattttgcaatccttcagccagaggtatcgacgacctacagtggcatttcccatggtatgggcagccatcttcacttcatcccaacttttttgtacaaagtcgtttcaatatggtaaaagcattgct

SEQ ID NO: 241953 - DNA, 1130 bp, Homo Sapiens
gactggtgctttgagttgcattgatctagactactatgattgatgttgcagacatgaataaataacaaagaaaagtaagaaaatatgagcaaaaatatggacaagttatggaacgtgaaaagatactgagataaaagtatcaaaaagaacaacatcactgttctgaatgtgtaacaaatgtttaattctgtcctaggtataaaggaggatgcatattattctattgaacagtaaatactccttatatcctaattagaattttcttagttttggagaattgtaaaaacataagtaaagcaggaaacagaaaacaacttagagactaatatgtgatctagaaagcgttaaattgtttgtaccaggcttcctatctacgcaaatctttagaaaagacaagtagttctacacaggcaattacttttatactgtaatttgatgggtagaagcttaacattttgtaattagccctatctggaaactaaaacaaccttaacagaaaagaaaatgttggcataaagtacctgaaagataagatagatgtctttttgtccttaattttactagtgtttatttccacgctttttaattactttgcatacttctcctccaaataatgttccacctttaaagggagtggaagccagcttattcttagaagctaaattaattttgcaatccttcagccagaggtatcgacgacctacagtggcatttcccatggtatgggcagccatcttcacttcatcaaatgcagcttcacaaatatatgaggctgcatcatatgttttgctcagaatcccaagcgcttggtgggtacgactaggatctgagctaagaatctgtgcagcttgactaatgtccgcctgcatagccttagctacaaaggcagtgtgagttgcaatctgcaatgctgatgctgcagcttcatatgctctacagagtgctaagtccaactgctgattgcaagactcagtggaggctgcttgaatacctcctagtggagtggcttcagaaataaaccctaggatttcatcatctacttttggaactgataatatctgtgttgcctccctggaagaaactggatatttgcatgccagtgaaggcagctgcctgtcaacttgctccaa

SEQ ID NO: 241954 - DNA, 1756 bp, Homo Sapiens
ttggcgccgccggagaggacgggcgccgagccggggctgcggacttcggcctgcccctcacctcactcccgctgcttgcacctcccggatggtgctgactgctccctaagcggcggcggcggcgagtcgtgaggacgcgccgcggaggctgttcggggtcgaggcttcccgtcgccggcacttcctcttgcggcgcccgtgcgcggccggcccggcaggcgggatggcggccgcggctccagggaacggccgcgcatcggcgccccggctgcttctgctctttctggttccgctgctgtgggccccggctgcggtccgggccggcccagatgaagaccttagccaccggaacaaagaaccgccggcgccggcccagcagctgcagccgcagcctgtggctgtgcagggccccgagccggcccgggtcgagaaaatatttacaccagcagctccagttcataccaataaagaagatcctgctacccaaactaatttgggatttatccatgcatttgtcgctgccatatcagttattattgtatctgaattgggtgataagacattttttatagcagccatcatggcaatgcgctataaccgcctgaccgtgctggctggtgcaatgcttgccttgggactaatgacatgcttgtcagttttgtttggctatgccaccacagtcatccccagggtctatacatactatgtttcaactgtattatttgccatttttggcattagaatgcttcgggaaggcttaaagatgagccctgatgagggtcaagaggaactggaagaagttcaagctgaattaaagaagaaagatgaagaatttcaacgaaccaaacttttaaatggaccgggagatgttgaaacgggtacaagcataacagtacctcagaaaaagtggttgcattttatttcacccatttttgttcaagctcttacattaacattcttagcagaatggggtgatcgctctcaactaactacaattgtattggcagctagagaggacccctatggtgtagccgtgggtggaactgtggggcactgcctgtgcacgggattggcagtaattggaggaagaatgatagcacagaaaatctctgtcagaactgtgacaatcataggaggcatcgtttttttggcgtttgcattttctgcactatttataagccctgattctggtttttaacaagctgtttgttcatctatatttagtttaaaataggtagtattatctttctgtacatagtgtacattacaactaaaagtgatggaaaaatactgtattttgtagcactgattttgtgagtttgacccattattatgtctgagatataatcattgattctatttgtaacaaggagttttaaaagaaacctgacttctaagtgtgggtttttcttctctccaacataattatgttaatatggtcctcatttttcttttggtgcagaaccgttgtgcagtggggtctaccatgcaattttctttcagcactgacccctttttaaggaatacaaattttctccttcatcacttaggtgtttaaagatgtttaccttaaagtttttcttggggaaagaatgaattaatttctatttcttaaacatttccctgagccagtaaacagtagtttaatcattgagtcttttcaaactagtgttttaataaagatacttatatgatattgctggttaatcatatcatggctcacaagaactgtctgccaggtcattcttctcttttt

SEQ ID NO: 241955 - DNA, 1025 bp, Homo Sapiens
agcgagccaggccagcctcgtcccagggtaccgtcgctctaactccgctgctgcagctttcaccccaagaaatgggtctggagctccacggccactttctcgtggcccgtagaccagcaacagggtgagcaatgcatgttctcgtggctccaggacattggctgcaaaggcctcgaggaaagccggggctgcagcagcttcagccaccaggagtggcagcaccagctgcactcgggtggcctcagtgacatagggcataggtaggatttccacccggctcagtggccgcagcaggctgaccctgcgagccagggcccgccggtgcccacgctgtgtcacacattccaacagcaggtccagggtgtactccatgccccgtgctgggtcgaagcgccgatagccgttgagcagtcgctgcttctggaagcgcaggcggggctgatagcgccgattgagctgctccagggcagtctccaacgcatcacccacgtccgccctgctagccccctgtagtgggcacttgggagccccatctgcacaggagaaggtgtgctgctctgtgaagtagtcccagcccagcacctcaaagcgagagtgtggtgtgaaaggagcagggagcccaacgggccagctcagccctgcctccccttcgggggtcagcacggtcaggttccggatctgagcctgggttggagggaatgcacctcacattagtgccagctccaggatcctacccagctccagctgcctgggctctgagattcaaacagctgagctctgtcctaactccatcaacacttagtgaggggtcccttgctaatcactgaatcccttgtacgttattcttcacctctaaaatgcagatggaataggaatcatactcaccttacacaaatgccatgagaaggaggtggaaaatgtgctttttgcacaggtaaaagtatcttgaaatagaagctcaacaccctttctctcctacacccaaaggactcacatcctcttcataatcacacctttgtttccaa

SEQ ID NO: 241956 - DNA, 897 bp, Homo Sapiens
acaaaaaagttggctgaaggggcccggccggctggcgtcccctttccggccggtccccatggaggcgctggggaagctgaagcagttcgatgcctaccccaagactttggaggacttccgggtcaagacctgcgggggcgccaccgtgaccattgtcagtggccttctcatgctgctactgttcctgtccgagctgcagtattacctcaccacggaggtgcatcctgagctctacgtggacaagtcgcggggagataaactgaagatcaacatcgatgtactttttccgcacatgccttgtgcctatctgagtattgatgccatggatgtggccggagaacagcagctggatgtggaacacaacctgttcaagcaacgactagataaagatggcatccccgtgagctcagaggctgagcggcatgagcttgggaaagtcgaggtgacggtgtttgaccctgactccctggaccctgatcgctgtgagagctgctatggtgctgaggcagaagatatcaagtgctgtaacacctgtgaagatgtgcgggaggcatatcgccgtagaggctgggccttcaagaacccagatactattgagcagtgccggcgagagggcttcagccagaagatgcaggagcagaagaatgaaggctgccaggtgtatggcttcttggaagtcaataaggtggccggaaacttccactttgcccctgggaagagcttccagcagtcccatgtgcacgtccatgacttgcagagctttggccttgacaacatcaacatgacccactacatccagcacctgtcatttggggaggactatccaggcattgtgaaccccctggaccacaccaatgtcactgcgccccaagcctccatgatgttccagtactttgt

SEQ ID NO: 241957 - DNA, 1275 bp, Homo Sapiens
tttgtacaaagaagctgaagcagttcgatgcctaccccaagactttggaggacttccgggtcaagacctgcgggggcgccaccgtgaccattgtcagtggccttctcatgctgctactgttcctgtccgagctgcagtattacctcaccacggaggtgcatcctgagctctacgtggacaagtcgcggggagataaactgaagatcaacatcgatgtactttttccgcacatgccttgtgcctatctgagtattgatgccatggatgtggccggagaacagcagctggatgtggaacacaacctgttcaagcaacgactagataaagatggcatccccgtgagctcagaggctgagcggcatgagcttgggaaagtcgaggtgacggtgtttgaccctgactccctggaccctgatcgctgtgagagctgctatggtgctgaggcagaagatatcaagtgctgtaacacctgtgaagatgtgcgggaggcatatcgccgtagaggctgggccttcaagaacccagatactattgagcagtgccggcgagagggcttcagccagaagatgcaggagcagaagaatgaaggctgccaggtgtatggcttcttggaagtcaataaggtggccggaaacttccactttgcccctgggaagagcttccagcagtcccatgtgcacgtccatgacttgcagagctttggccttgacaacatcaacatgacccactacatccagcacctgtcatttggggaggactatccaggcattgtgaaccccctggaccacaccaatgtcactgcgccccaagcctccatgatgttccagtactttgtgaaggtggtgcccactgtgtacatgaaggtggacggagaggtactgaggacaaatcagttctctgtgaccagacatgagaaggttgccaatgggctgttgggcgaccaaggccttcccggagtcttcgtcctctatgagctctcgcccatgatggtgaagctgacggagaagcacaggtccttcacccacttcctgacaggtgtgtgcgccatcattgggggcatgttcacagtggctggactcatcgattcgctcatctaccactcagcacgagccatccagaagaaaattgatctagggaagacaacgtagtcaccctcggtgcttcctctgtctcctctttctccctggcctgtggttgtcccccagcctctgccaccctccacctcctcggtcagccccagccccaggttgataaatctattgattgattgtgata

SEQ ID NO: 241958 - DNA, 1100 bp, Homo Sapiens
gagagccgcttctctacctttcccattatcgtttacctctttctaggaaaaaagaagagaaaaactcttaaactcattctcctattctcccgtgctatggataaaaccatttagaatttggcctagtctccactgaatacgtggcttgccatcttttgagaatggcccctttgtgatcatgaccccaaacttctgtttttttagtcagctaaagttctccctcaaagcaaaagcaaaagcaaaatcctccctgcccccattccctagaactgtgaaagcccgcatcccattccccgctcctctaactaaaatatttatatacatacaacaaaaattgtcttaacagcaacaaaccaaactttggcttggggtggggggacccttaaaaatggccagtggactgggcagttggtgtccccttattctctgtcttcctccccagagtcagtaataattgcatcgaggcctctagcttccttgacatcgcccctagtttcaggcacagcctctctcccagttacgaggcgagacaggattctgaagggggaaaggatatgtattctacacaacaggtcaacgccctctcagatatatcactctgcttacaaagaatgcttgatgctgtcataggtcagtcattttaattcagggacatgagtcagttatcagtcaagaacatgtgtggaggcaggagttaaaaacaaacccaaaacaaacccataaccagaagctccatgtctctgaattactccctttagcagctgtcccttgggtgaaaggtcaccctagtaccaatgtgactagaccagggagccaaaaagaccgtgcttttctatttcctaatgccttcatttgggaaatgctgtaggacacttgcttttatcagttttatctaacagctagaagagaaacactccctcctaccttgataacatagaaaattacagccagatggcaacggcagtgactcattgcgcgactttttctggtgatatagaagacccttgccatcgcagaccctccttccaatatgggagggcagcaatttcagggcctctgcattttatgtcctgtagtgttaatgtgtacaaagtggccaa

SEQ ID NO: 241959 - DNA, 1336 bp, Homo Sapiens
  misc_feature (217)..(256): n is a, c, g, or t
ttgggttaagttcaatggggtactttttgtttaataatgtagtaaaagtgtcactagaaggtggctaaattaaacatttatagcaaattgataagaaaagctatcttgtttgataataaaatgctagttatattgtatgataataaaactgcctgaaatagttgcttacacactaaaatctgaaaggttagtatagggtttaactcatttgaaatannnnnnnnnnnnnnnnnnnnnnnnnnnnnnnnnnnnnnnnactttttttcatggcaagcacttagaattctttgactactttgaaattatttattggccacctacagagtattttctatatcttcagccattatgtttggagtagattacattccttattcttgaagaactctgatggctagacatgcaaatacagcttgttttataactgatactgtagatttaggtactcaaaactatggggacacaattgaaaagagaaaccaagctaagttgaagtccagaaaagcttcacagatgaggaacatattagtctgctattaaagaataatcgagattttgtcggaaggaagaatgatttggatagaagcaacgtgatgtataggaagaggaactgtaaaagaacaagtgcaacagctggtatatttagatgtactttggaatgtggggttgggtactagaggaggataaaatcgaaagggtttgttggagccatagcatgtgggaagtcttgtataacctgaagaaattacaattttattctgaatgcagaagatttttgacatggaaggtcgatgttgtatttgagaaaggccattatcagcaacgtgaaggatctttttggggaacagattaattttaaagtcataatgggtaattatcttttatgtagaatttgaataaagtctaggaaaataaataaatccattcggatgtttcttgaagtcaggtgaaataatcagctactttctcatttattccttagaatggctacattttatttgattgctattttcaaaggagtcctacattattccttttctgcttatgaatggacctaaatcctttttggttataaatatcagtggttatgtttctgagtaataaatgtcatgctttgcctttcttggtttcaatgttgttaacattatgaacattatctcttaatgcttgcatttcttcaatattgattccattaacattctctagctcagtcatttttggctttaaggattcaatctcctttaaccaaatgggattgctactgaaaaccactagaatgagttgatcaacttaacaatgtgttgatctgtaaggattgaaacctctgtaattttag

SEQ ID NO: 241960 - DNA, 954 bp, Homo Sapiens
  misc_feature (722)..(731): n is a, c, g, or t
  misc_feature (823)..(833): n is a, c, g, or t
  misc_feature (867)..(877): n is a, c, g, or t
ttgggtctgtttttttctcgtgaaacaattcatttcacctgcaacattactagttttcacaagtgcctcccgcactgggtggcgtcctccgagctgggtttggagataaagtaacagatgagacacaggcctcatcttcacagaagtagcacaaacttgtctggggcatggggggtgtccctaaggtcacaaaagatgtgaaagccgcttcaatctgcaggaaaggagatggattaggagtcttcaaagaagaaatgatgccgagcagggactcctgagtggacagtgtgtgcctgctgcatggcacaggccggaacatgtgtggctggggcacaacacttgagatacctggctacaaacagcaacatggggactgcacggtcccacgaaggacacggcaggaggtaggaaaggctctcgttctctacagcaactcttccaagtcctcatctctctctacctcagcaaatgcctccaggctgccaggcgctctggacagtgccactgaaggcttaccgggctcgctgtcgatctgggtcagcacgtcctcgatggagtccccgtcattcctcaggctctcagggtccggtggggtgtagccatgacagcggcaccagtgagcgatgtgcttggttttgaggggagtcaggtggtgaaatctcggattcttctccaggatttcttgtaagacttttcgcattgtcattgctctttgccacttnnnnnnnnnnttttcttttggaaccataatcaaatccttccacttaacacaactacgtatcatgcaaccataaatcaccatcctaacctaacctgttagaannnnnnnnnnnaaagaaaaaaacctggttgtgttactccccattnnnnnnnnnnngtcgaacttccctaatgctaatacaataaaacagcaactcctaggtttggcctttaaggatcttcacctggtcccaa

SEQ ID NO: 241961 - DNA, 889 bp, Homo Sapiens
  misc_feature (259)..(343): n is a, c, g, or t
  misc_feature (463)..(511): n is a, c, g, or t
aaatcagggtttaatatttttccaccagaaaataaatgaagggctattcaagaaactctagataaagcaggttttgtttctggcttttattaacaatgtcaccattttgtatagacccccagtgcgcatctagggtcaacaaaatcaaactcactgccgttgtaaaatatttataggtcaccaagagccagaaacaggtcagggtcttgggcgatttaaataagccacatgggccagtcacgtgtaaccccagtacttnnnnnnnnnnnnnnnnnnnnnnnnnnnnnnnnnnnnnnnnnnnnnnnnnnnnnnnnnnnnnnnnnnnnnnnnnnnnnnnnnnnnnttaaacattagccttgcgtggtgttgcacgcctgtcgtcccagctactcaggaggccaagacaggaggatcgcttgagcccaggaattcgaggttacaagtgagctctgatcgcgccaannnnnnnnnnnnnnnnnnnnnnnnnnnnnnnnnnnnnnnnnnnnnnnnnaattgacaaataagccataggatagctgtgcacggtagagattatcaagacggctcagaaacaaatcgggtgctttctgtgcattgacatggcagggctgtgttcaaagagccatcccaggagtcgaagcatctataaataacacgtctcacacctaatgatgaaggaactaacaagcccaaaggaagaaagcgagggcatcacacatagtgaaaccaattctgggaagacaacacctgaagctttcagagaacaagattttcatgtatcaaggaagctgctaaaaactccttgaagcgaccgcatgttacaatctggaatattttttcacacagagaaaacaaagccaggctttcgaaatcccgagatttgctccaa

SEQ ID NO: 241962 - DNA, 955 bp, Homo Sapiens
actttgtacaaaaaagttggctctgaccaagattgcattgcgctatgtagctttggttcaggagaagaaaaagcaaaattcttttgttgctgaggctatgttgctcatggctactatcctgcatttgggaaaatcctctcttcctaagaagccaattactgatgatgatgtggatcgaatttccctgtgcctcaaggtcttgtctgaatgttcacctttaatgaatgacattttcaataaggaatgcagacagtccctttctcacatgttatctgctaaactagaagaagagaaattatcccaaaagaaagaatctgaaaagaggaatgtgacagtacagcctgatgaccccatttccttcatgcaactaactgctaagaatgaaatgaactgcaaggaagatcagtttcagctgagtttactggcagcaatgggtaacacacagaggaaagaggcagcagatcccctagcatctaaacttaacaaggtcacccaattgacaggtttctcagatcctgtatatgcagaagcttacgttcatgtcaaccaatatgatattgtcctggatgtacttgttgtgaaccaaaccagtgatactttgcagaattgcacattagaactagctacactaggggatctgaaacttgtggaaaagccgtctcctttgactcttgctcctcatgacttcgcaaatattaaagctaacgtcaaagtagcatcaacagaaaatggaataatttttggtaatatagtttatgatgtctctggagcagcaagtgacagaaaattgtgtggttctcagtgatattcacatcgacatcatggactatatccagcctgcaacttgcactgatgcagaattccgtcagatgtgggccgaatttgaatgggaaaacaaagtgacagttaacaccaacatggttgatttaaatgactacttacagcacatattaaa

SEQ ID NO: 241963 - DNA, 2767 bp, Homo Sapiens
ttggcggaatcccgccgcctgcgccccgcgccccgcgccctgcgggccatgggagccggccgccggcagggacgacgcctgtgagacccgcgagcggcctcggggaccatggggagcgatcgggcccgcaagggcggagggggcccgaaggacttcggcgcgggactcaagtacaactcccggcacgagaaagtgaatggcttggaggaaggcgtggagttcctgccagtcaacaacgtcaagaaggtggaaaagcatggcccggggcgctgggtggtgctggcagccgtgctgatcggcctcctcttggtcttgctggggatcggcttcctggtgtggcatttgcagtaccgggacgtgcgtgtccagaaggtcttcaatggctacatgaggatcacaaatgagaattttgtggatgcctacgagaactccaactccactgagtttgtaagcctggccagcaaggtgaaggacgcgctgaagctgctgtacagcggagtcccattcctgggcccctaccacaaggagtcggctgtgacggccttcagcgagggcagcgtcatcgcctactactggtctgagttcagcatcccgcagcacctggtggaggaggccgagcgcgtcatggccgaggagcgcgtagtcatgctgcccccgcgggcgcgctccctgaagtcctttgtggtcacctcagtggtggctttccccacggactccaaaacagtacagaggacccaggacaacagctgcagctttggcctgcacgcccgcggtgtggagctgatgcgcttcaccacgcccggcttccctgacagcccctaccccgctcatgcccgctgccagtgggccctgcggggggacgccgactcagtgctgagcctcaccttccgcagctttgaccttgcgtcctgcgacgagcgcggcagcgacctggtgacggtgtacaacaccctgagccccatggagccccacgccctggtgcagttgtgtggcacctaccctccctcctacaacctgaccttccactcctcccagaacgtcctgctcatcacactgataaccaacactgagcggcggcatcccggctttgaggccaccttcttccagctgcctaggatgagcagctgtggaggccgcttacgtaaagcccaggggacattcaacagcccctactacccaggccactacccacccaacattgactgcacatggaacattgaggtgcccaacaaccagcatgtgaaggtgcgcttcaaattcttctacctgctggagcccggcgtgcctgcgggcacctgccccaaggactacgtggagatcaacggggagaaatactgcggagagaggtcccagttcgtcgtcaccagcaacagcaacaagatcacagttcgcttccactcagatcagtcctacaccgacaccggcttcttagctgaatacctctcctacgactccagtgacccatgcccggggcagttcacgtgccgcacggggcggtgtatccggaaggagctgcgctgtgatggctgggccgactgcaccgaccacagcgatgagctcaactgcagttgcgacgccggccaccagttcacgtgcaagaacaagttctgcaagcccctcttctgggtctgcgacagtgtgaacgactgcggagacaacagcgacgagcaggggtgcagttgtccggcccagaccttcaggtgttccaatgggaagtgcctctcgaaaagccagcagtgcaatgggaaggacgactgtggggacgggtccgacgaggcctcctgccccaaggtgaacgtcgtcacttgtaccaaacacacctaccgctgcctcaatgggctctgcttgagcaagggcaaccctgagtgtgacgggaaggaggactgtagcgacggctcagatgagaaggactgcgactgtgggctgcggtcattcacgagacaggctcgtgttgttgggggcacggatgcggatgagggcgagtggccctggcaggtaagcctgcatgctctgggccagggccacatctgcggtgcttccctcatctctcccaactggctggtctctgccgcacactgctacatcgatgacagaggattcaggtactcagaccccacgcagtggacggccttcctgggcttgcacgaccagagccagcgcagcgcccctggggtgcaggagcgcaggctcaagcgcatcatctcccaccccttcttcaatgacttcaccttcgactatgacatcgcgctgctggagctggagaaaccggcagagtacagctccatggtgcggcccatctgcctgccggacgcctcccatgtcttccctgccggcaaggccatctgggtcacgggctggggacacacccagtatggaggcactggcgcgctgatcctgcaaaagggtgagatccgcgtcatcaaccagaccacctgcgagaacctcctgccgcagcagatcacgccgcgcatgatgtgcgtgggcttcctcagcggcggcgtggactcctgccagggtgattccgggggacccctgtccagcgtggaggcggatgggcggatcttccaggccggtgtggtgagctggggagacggctgcgctcagaggaacaagccaggcgtgtacacaaggctccctctgtttcgggactggatcaaagataacactggggtatatgggccggggccacccaaatgtgtacacctgcggggccacccatcgtcccaccccaatgtgcacgcctgcaagctggagactggaccgctga

SEQ ID NO: 241964 - DNA, 1470 bp, Homo Sapiens
  misc_feature (1041)..(1055): n is a, c, g, or t
ctgaagggaggactaaatgacttgagcagattaactgctccagcactgtggctggctcagagttaactgtaatgaccatttattaaacatggactttcattcagcctttcaaactatttttgattattgttaatttttttcacaattgaaataccattattttaagtacttcactttctgctttggatatttctgttttttaacaacatgcctatataataatgtttataatcagaaaaaagttaaaaagtagaattagggaaaaaacccaccatacacagagtatgggttgagactagaatggttcactttggtttctgtcaaaatctctgatcacttggcagactgagagctggggctggggagacaagtaagaagggaggggcagatttattggtactcactctgatttgcctgggcttcggttctccaagtagacctgtttaagagggaaagatgaggaaaaaataatggaaaggggatgagactgactcttctgatagagaggggaactggcccttcctgtgatcttcagacctgtcatcacctgctaacaggaaaggaccacagaaacccctccctccaagaaagtcttttgtttatttgttttacaaagctcagtgatgttaaggccctaagtgttgtcagttttcatagttcaggacaaaaaagaagaaaatacaatgtattgtaatcttattgtgctattgttcttttgtgcttttgttcaaagacaaaacagaaaaaaaggtcaacttatcttctctttattgagcacctactgcatacacaaatattgcatcttctgcaaaaacacatccaaacagacctgactaatgctacaacaaacataataaaatgtgatcatgtatgagaaagttcttaaaatacaataaaacccttggtaaataggcattatcagttattgctattagagaggtctgttcaagccttctgctaaccaatagttaatcaattctgcttaaaatgtacgtgtttaaaaggaacttcccagccaagaaaatatacagatacttcacnnnnnnnnnnnnnnngatcaattaaacatatgaaaaagatatctgacatcactagtgtcaaagatagggacactgaaatgaggtaccatttgccattgtggaactgggaaaaatgtaagaaaaaaatcccctcagtgaaggcgtagggagaggggtacacttgtatcctactactgtggaaaaatactgcaatatttctaatggccaacttgaacatttaaggccaaaccctcaaaatgtccattacctttaacccagtaaaaaaataattaagcacaggagcaaagttttcattgtaaattgttcactgaaatgaaaaaatgccaacagcctcagtgtccaacactaagaaattttaaaattatacatcatttcttcctataacaggatatgtttaaccattacaatgatattgaaggtaaacatccaa

SEQ ID NO: 241965 - DNA, 1104 bp, Homo Sapiens
aatattaaacttactaatacattgtaatttttagtacttctataattactgcttcataaaaaagtggatttttccagctcccagttcagatgctattaacaggtaatcagatagcactgactaagtagaaatagattaagagtaatactaaatttaatgtattttagcatattgaaatgagtatcatcagtgtatatttcatttatcactttgtctacactttattaggtggccttaatgcttgtcattgacaaatgttaactttcctcacaaaacctacactattcacttttttccagtatttttaccttccttattaaaaatgtttctaccatcaagaatttaaaatagaatcatgacattgcaatccaaacactaccttggcttgccagattagtctacgtgtcactccttggtgtaaagctataattccaacttccagcaaagaagtatctctgaattcaaatgagaatgacatttctatgggaataaatgtgaactgtctcacatttaaccattaagaatttactcatacgtcatcatgataacctaatgttagactgagaatcactgctctagtgtggctccagaagctgtcagtcaggaactactgatacgatttcacttgtccaataattttatacttccatcttgtagtacaaaaacattttaattttggcctgataaatgactaaaacaattgccgggggaattcagagagacacgtttcattattcaattcctaactgaattgaccctcattgatcctcagactaatttagacacttttcaataacattcacagtcaatctcaaagagaatattatttttgaattcttgctattgaagttaacatttacatctaaaagaaaatcatcatccttattggacaagtagaactcaaacaaacaaacaaaaaaactctagtcataataatgaaaatactgagtttctgatgtacaaagagtaaaatattcatatactggaaaaatggtgcagtataaatgggcaaaatttcactctttctagtaggaagtcaataaataattgatgtatcaaaaagtagcggtataatcatacaatttggaaatataaattctccaa

SEQ ID NO: 241966 - DNA, 795 bp, Homo Sapiens
aatattaaacttactaatacattgtaatttttagtacttctataattactgcttcataaaaaagtggatttttccagctctccagttcagatgctattaacaggtaatcagatagcactgactaagtagaaatagattaagagtaatacctaaatttaatgtattttagcatattgaaatgagtatcatcagtgtatatttcatttatcactttgtctacactttattaggtggccttaatgcttgtcattgacaaatgttaactttcctcacaaaacctacactattcacttttttccagtatttttaccttccttattaaaaatgtttctaccatcaagaatttaaaatagaatcatgacattgcaatccaaacactaccttggcttgccagattagtctacgtgtcactccttggtgtaaagctataattcatacttccagcaaagaagtatctctgccaatttgacatttctatgggaataaatgtgaactgtctcacatttaaccattaagaatttactcatacgtcatcatgataacctaatgttagactgagaatcactgctctagtgtggctccagaagctgtcagtcaggaactactgatacgatttcacttgtccaataattttatacttccatcttgtagtacaaaaacattttaattttggcctgataaatgactaaaacaattgccgggggaattcagagagacacgtttcattattcaattcctaactgaattgaccctcattgatcctcagactaatttagacacttttcaataacccaa

SEQ ID NO: 241967 - DNA, 924 bp, Homo Sapiens
ttgggtcctttgccttacatttccatatttaaaactagaaacagctccagcccaaaccttgtttatggggagtctggttggatgtcatttgaggatcattgtgcccctagaggtgccattagcagaatttgccaagatccgagaaaaattttagctttagttctatttcagcagtcacctgacgtccttgtctatggtcttaaaaacaagaaggcacacatttgagaagatgagattaaggttaggagaaaacctcagtcattgcatgctttttagtatgggccaataaaatctcaacacctgtgggagagtaagaactaagggaatgagtttgggcggcccctcataaaggaccttagaggcagggaacagcaatgccaaatttccctctctcgtgagatgggggatcctgtgcaggctgatgaggcacccatgagaaaagccgaaaaagcatgcatcttagaaatagcccctcaattccaggagtcaacatgccgaagaatgaggctggagacaggtagctccgagggaggacttctggcatgagatctcggcacggcaagcccagcatcgcctcagcccagacaggctccaccaggagatcaagcaagggctgcctttcaggagtcacctcctgagccacttcagagttctggaagtgaccacggaccagggtggaggaatagacttctagttcattctgggacacttgagccagagagttgaaagcttggaaagaccagataagaaacctgccctttgtctccctagggacatgagacaccacattccatttgtgctagaaaaacctatccactgatgagtctaactgttccaaacgcctcccacctggtgtgcacagctgcctgggtccattgtcacttgggtgcatcaggttgtcctccgatttttagatgagtttcc

SEQ ID NO: 241968 - DNA, 970 bp, Homo Sapiens
ttgggtaattttcagtgcacaacatcatgtagctcactcccagagagctaataaaactacagtgtaaaaaacattggttttaaaatttcaaattaaatcaaggtaattcactgcttcacaagactggttctatacaccataaactgctactacggtggcaatgaagatcttaacatttattatatattctaggaaaaaatttaaaggaaccaaaatacagcactattttaagttgtggtttaaaaacagaagacaaaaaatagaatgtactacagagggacacacaatacggttctaacatttcagttatcacttggggtaaaaagcaggggaatggatatacaaatgtattgtaagtattacagatagcttaaagtctaacccttcaatatgttttccacttttgagtccagaaccctttcaagattctgatgacaggaacactctccctagaaagatgccagaacacagaagattgcacacaatttcaaggtgatcactgacctcttgaagttatcattgacacaccccagaatcaaatcctctactttacacagtaattaattatgaaccatgggaggggggaatttatgagtttatataaaaaacaaaaggagaaatgagggctatggcttaaagcagaatgctgagtgttgactggtaaacgtagaggaagtgctagcaatggaaaaatcagcattttgcaaccaacatagtaaagattggatcaggcaaggacaatcatggatgttaaatctagggggaaatttttacgggttagtatatttgcatggttttaaaatgtctttccatggattgtttcttagttgcaaggggaaaatattatacagtagaaactaggtaactccttcaccaagtactctctaacatcattcatgttagatggacattgtgtgtctccagatgttatatcctgagaaagacacatcagctatataatattctccaa

SEQ ID NO: 241969 - DNA, 1055 bp, Homo Sapiens
  misc_feature (389)..(452): n is a, c, g, or t
ccagaggacatcgagctgttatctcctttatagcattgattcctactgtcatgacttctccagagttcttgtcggtaacaaaattgtttgccacagtcataagcaatgattgaataatctctgggggtactaggtgatgagatgcttgtgcagcaaacagaaggatcttggttacttctctttggtggggctgcagaaacctttgcaaaaagggatagaaattgaagaggaaaagctcatgaattcccaccaatctggagataaggttcatgagcatcatcttcacttcaaacctctccttacagcactcaagctgctttagtagtttttccgcaaaatcttggggatcatgaatcaagtgaatggctgaaaagttaaacacctctggnnnnnnnnnnnnnnnnnnnnnnnnnnnnnnnnnnnnnnnnnnnnnnnnnnnnnnnnnnnnnnnngaacttttcttccctgtagcatattgtactagcaggtctcttgctgttggtccatcatcctcagattcggagtcactgtcctgtttttcatcttcatctttcccaagaaagaatgtcaaagcggcaactaatatctaaacaccaatgagaaaaaagtcagctacttgattcagcttaaaataaagaataaatccttttgagtatgctttatacatgtgcatgaactaagatctgaagaacaaattcaaagagtggtgggatttttgttcattttttcttaattaaaagttgttttatgttatttctctaataaataattttaaaaactagataaaaactgctaggctctatatagttatccttcaagactgtcgagaatttctacatcccctataagaaaagtgacattgcagttcttctaacagacaaaagtcaaacattgaccttaaatttcttttagcagtgccgaagcccaacggaagtcaagaatcacaggagaaaacagtaaaaaaccactgaggctatcatttattacatagcaatttaaaaactcataattctattgactcttttaaagttcagatgacccaggaaagcagccaa

SEQ ID NO: 241970 - DNA, 2363 bp, Homo Sapiens
  misc_feature (462)..(470): n is a, c, g, or t
ggatttggagagggcagctcacccgcaacgtgaacataggttctgtaacgtgtctcattgttactcagaaagttcagtactcagggccagcacgctcctgctcatgcgggataagccactcagagcagaccagctggaaggatcagggatctgagcaaagccaagtttacttaagctaagccacttgttcctgggtcaagcagtttgttttctaataagcatcattcctgatcattagagcaaagggatgaatgctcctcttggaatgatacaggggatctgccactgggagagtgttgctcagtgttagagtagcagcaatgacagaatgacagcgactctctgagtcaacccagtacttttagtaccccatcactatgtgaataaaggcagctagaaaatggactcaattctgcaagccttcatggcaacagcccatattaagacttctagaacaagttnnnnnnnnntcttccatttccatccatgcatgggaaaagggctttagtatagtttaggatggatgtgtgtataataataaaatgataagatatgcatagtgggggaataaagcctcagagtccttccagtatggggaatccattgtatcttagaaccgagggatttgtttagattgttgatctactaattttttcttcacttatatttgaattttcaatgataggacttattggaaattggggataattctgttgtggtattaaataatattcattatttaaaaactcatcttggtattgagttagtgcattgacttccaatgaattgacataagcccatatttcattttaaccagaaacaaaaactagaaaatgttactccctaaataggcaacaatgtattttataagcactgcagagatttagtaaaaaacatgtatagttactttagaaacaacttctgacacttgagggttacccaatggtctccttcccattctttatatgaggtaaatgcaaaccagggagccaccgaataaacagccctgagtacatttgtaatcttgggctccatgggaatgtccttgattaagatgaaagaggaatggactgatgtttctattacaagatcctataatgctaggacttctacacagcttagaacaatggttggagcttcattctttgagcagaaagactcaaatattatttcagtcacttgtagcaccattggatgtgggtgcacacttggcctaaaataccatttacatcattatcttgtcctgttgaagacctatggcatgcaagaaatttaacattgactcaaaaatacatgtagtatgcccagtaaaatacattggctagcataaaaatcaaaggaaacagtagtttggaatagtgatcaacattactggggttttgaattgtgaaataatcaacaatcctgcccatcttttctcggaagacaaacttgaacttgtcgctggttttcattgtcaagtcactgtagtcaacgttgtcgctggaaatttcaatgctggcaaagctgatcttccgtttaaagctggagatggagctgttgatgatattagtaatactgacttcttctacttcctttgttgtcccctagttcatagacaatgcagttagcttaaaagacttgactcagcaaaataaataagtaggtaatgagctaataaaaagtttagaggcctaagtgttgaataattaggcttaatagagagtggcattgagtgcttcagaaattggccaataagccaggcttgggctcctgttgccctgtttggagacacctatttgtaggtcaccagcatatataacaggaggagtaaacatggcccactgtggatatcctgagcagtgtgccagatgcgaaatgctcaggctttgaagttagtggacctgggttcaaattccattcggcctctcactattgtgaaactttagtcacctcaatccctccaagactttatttcctcgcctgccaaatggtgattggtattgccatcttgagactgatgggaagattaaatggtaaaaaatggaaagcatctggtaggtgtttgatgacttcaattctgttccagggagaaaggagtaactgattacgagagataatagaaatcagctgtgtcttaaaggctttgccaccaaagcagaaatagtgatgctccctgccattgcaaggagttgccattctccaacatggctggggtcaactcccaggaatgtgggagtgtagtgaagtcagagagagtgtggtctggttccttgaccaggccgcttgctaggtgtggggtcttatgggagttaccatatcactgtacaggacaatgaaatgagtaccattaccatcccaattttacccttgagaaatgccaa

SEQ ID NO: 241971 - DNA, 967 bp, Homo Sapiens
  misc_feature (905)..(913): n is a, c, g, or t
taaaaacaatgcttaaggtggggtttcagaaccagatatttccttttaaactttttttaaaaatcacaaatatgattggttcatacaaccacatttcacctcttttcaccagcactcccacccattcccgttagaaatattttgttaaaaaaatcaggtgatcaaactcatagaaactgaattgtgagaagtataatgggaaaaggaatgagaacctgtggctctagggagttacagaagggaaatcatcttttagagccttggtttatttctgacaggaaaggtaaagccgtgcatttattagaacaggaagctaagaaattaaagatggcgagattgtctaaaataactgaggctgaactggaagcctttaccctggcacactcaaaaatcacttttggtactgttggctgagactggccgaggaatgtgcatctctggctggatttggagagggcagctcacccgcaacctgaacataggttctgtaacgtatctcattgttactcagaaagttcagtactcagggccagcacgctcctgctcatgcgggataagccactcatagcagaccagctggaaggatcagggatctgagcaaagccaagtttacttaagctaagccacttgttcctgggtcaagcagtttgttttctaataagcatcattcctgatcattagagcaaagggatgaatgctcctcttggaatgatacaggggatctgccactgggagagtgttgctcagtgttagagtagcagcaatgacagaatgacagcgactctctgagtcaacccagtacttttagtaccccatcactatgtgaataaaggcagctagaaaatggactcaattctgcaagccttcatggcaacagcccatattaagacttctagaacaagttnnnnnnnnntcttccatttccatccatgcgagtgggaaaagggcccaacttttttgtacaaag

SEQ ID NO: 241972 - DNA, 903 bp, Homo Sapiens
  misc_feature (258)..(266): n is a, c, g, or t
ttgttttctaataagcatcattcctgatcattagagcaaagggatgaatgctcctcttggattgatacaggggatctgccactgggagagtgttgctcagtgttagagtagcagcaatgacagaatgacagcgactctctgagtcaacccagtacttttagtaccccatcactatgtgaataaaggcagctagaaaatggactcaattctgcaagccttcatggcaacagcccatattaagacttctagaacaagttnnnnnnnnntcttccatttccatccatgcatgggaaaagggctttagtatagtttaggatggatgtgtgtataataataaaatgataagatatgcatagtgggggaataaagcctcagagtccttccagtatggggaatccattgtatcttagaaccgagggatttgtttagattgttgatctactaattttttcttcacttatatttgaattttcaatgataggacttattggaaattggggataattctgttgtggtattaaataatattcattatttaaaaactcatcttggtattgagttagtgcattgacttccaatgaattgacataagcccatatttcattttaaccagaaacaaaaactagaaaatgttactccctaaataggcaacaatgtattttataagcactgcagagatttagtaaaaaacatgtatagttactttagaaacaacttctgacacttgagggttacccaatggtctccttcccattctttatatgaggtaaatgcaaaccagggagccaccgaataaacagccctgagtacatttgtaatcttgggctccatgggaatgtccttgattaagatgaaagaggaatggactgatgtttctatccaacttttttgtacaaagttggc

SEQ ID NO: 241973 - DNA, 1324 bp, Homo Sapiens
  misc_feature (1184)..(1222): n is a, c, g, or t
acgtagttctcttaaataaatcatcctttagtaattcttagaattatctcctaatttacaaaaactgaaatgaaaaggaactactaaatcattagcaggagtggttgcaatcttattttcttgtaagtaaagggaaaatgataaaaatcaaccagaaaagaaattcatgggcaagaaaagtattttctaaaatctgtctccgtagagaaagatgccagcctgggtcgctccccgtcacccctaggctcggttaaacagtttggtcaaaggaggacagaaaagtccttatgagggcctctgcctgcttgctgtttgctgacttttggaccaggtcagaaggaaagtgttgtttgttcttgagactttggacacaatgtcctatgccttctgatagagatactctagcatttgaaaatctccttgcttctttttaagagctgaaaatgtcaccgttagcagaaagcacgactactgttgtctagaggtgtgggttgagctgttagttgttaaggacgagcagaagcaaaagaataaggaaattgagttttaggcttgggcagaccttgctgaacagctcacacatcctccgtcccctggcattaaaatacacacagttcctttgctggtgaagttctttggggccaacgccaccccccatataggcagatgttcctgccagctcttgtctcctggggtgggtaggctcaggctgctgtgacaagttgggggacggagtccaagggatcctgggagattctaagtgtggctgatggaaccaaccagaatggggagggtggagggctcaggtgctggactctgtgtccccactgtggccctccttttgaagtgggtgcctcccctaacaacacctgcctggcccacctgcatcctaaacccaggacaagaaagacacagctgcagggaggaacagaagctgctggaggcccctcggagaacagactcaggccagggtcccactggtcatacccttggatgtgtggcaggctgtcttgccctgaactcaacctctctcaaaagacagacccaaagaaggggaccatgactgtcagcactctgctcactaaagtcgtgttctgtatgtcagataaataaatatatagagaaaggcctggagggagctctgggtgggaagaaggtggaggatcctttcatgcatgggcagnnnnnnnnnnnnnnnnnnnnnnnnnnnnnnnnnnnnnnncaacagaaaaagcaagctttgaaatccaatggtccctgggttctggccaccctaaactactttgcacagttgggtagcagcatggtaacagaacagacccaa

SEQ ID NO: 241974 - DNA, 1308 bp, Homo Sapiens
tcctcttttattttacccaaatataaatttatcagttaagttgacatttgtcaaattcagtttatagtaactataaataattctctttaagacacagttctgtaactttttaaggatacgagagtaaaccaatattgctccttgcagccaggccaaaagtacatgcagttggtacaatcggggaaaagaaatgaaacttccatgaaagtcaccttcattttctttccctctcaccctacagtcctcctctgctcactcagggcctggggcatgcctatctgtctgctttttaggcaaaggaggtcactccagagtcttctgggactgcctggccaaattccagagatgaggaaggggcgagtgactggggtaggggtggctggagaccacagggacacagccttaggggcagaggagttggttttgatgcctgtacaagaagaatctgtgtgtaagtattttttgaggtggaggaaaagatgaaaaaagtccagagggaggaggaaaaacaagcccaggctggtgttaatgaattctgttggacacaactccaactagaaaacctctaaaattccttccaattctacggttctatgattccagaaggaggcctggaggtctgggtagaaatggagggagagaaaatatggtctctggaggtctagggcaggttcctgggataaggtgcagtgttggtagaaacaggatcattgcctaagccttcccttggaggtgggcccttgaggctacagatggaagggtttctgtagaagcttctgagagagaagttagaaaaagcctacatccaaatccccagatctgtacacgtgtgactgcggatggaggctccagttttctcccaattttgtgctaggcagagaaaagtagaaacaaccagatgatgtccaccctgctagttctaaatcctcttttgggtgcttggtaaggagaggtggagggaagggaatgtgaggaagggtcgtttagggaaataaatactggttgagcaatggggcggtggctctagctgtggtcagcactgcacagagtaggggtctggaaaggagaaagaggcagaagaatctggcttgaagtagatgcaaatacttacaacgaggaaactttctctgccagattcaaaggggcacatggcctttgtaacctggagaatgaggtgaggttagagctgtgtttcccttaccactggcttatcagtgcctggcacagtacctaacacatagtaggcactcaataaatattgctcaaagaatgtttcagaccatgcttgccaacttttttgtacaaagt

SEQ ID NO: 241975 - DNA, 1520 bp, Homo Sapiens
  misc_feature (577)..(627): n is a, c, g, or t
  misc_feature (834)..(855): n is a, c, g, or t
  misc_feature (898)..(907): n is a, c, g, or t
  misc_feature (1123)..(1131): n is a, c, g, or t
tttagaactaatactttcagggttctgacaaccacattctagcttaggggtagggcccacacctgcccccactgaggactgctccttggaccactgtggaggaagcctgggctgtctgaattgtgaattatgactgccagcccaccagagataacagatcccagcaggcagagccagaacccagttttgggtctgcatgccaggaaatgtgaacttcctccaaatgtggccactgtgcctcccaatccaggcctcagcaaggtcattcttgggctttccctacacgagtccttccagtagtccacacataatgctctacatattaaaaacaaaccatttttgtactgtggataagaacagttgtaacaaagtcatagctacatatttttctctacattttgtttattgagacaaactaattaaaaggcacaaacatagggcatgtttacatggacattataacaaacatatacattaaaagtgtaggaatgtgttgccttcctgctaaacagaaagttcctaagcttttatatatacaaaagttgtacaatttaatgtcctaaagtacaaaagatcnnnnnnnnnnnnnnnnnnnnnnnnnnnnnnnnnnnnnnnnnnnnnnnnnnngtagttcaaccccctagaactgttttgtataatgacacacagatacctgtccctgatgtaggaagtctgtctcagatgcaaggtattttgatgcttgaactgacacagtagggtataaatggaaatcatccagtttgatagtcagtcctgcaaacattctgcaagattaacacaactaatttccatttctcttaactgcaatgattnnnnnnnnnnnnnnnnnnnnnncatattgcaacttaaaaaatcacagcatcttggtttagttaannnnnnnnnnaacgcaatgctttaaaaacaatgcgtggcatgatggtgtaaagagtatctgtttccctagcttggtttctactttatgtacagagataaaatatcttgctaagaaataaaaagcacatgtctcaacgtgcataatcattgctgggtttctacagggaatgcagacagctgtctccctgaaaacaccacaaagctgatacaagtgttttctcaaagnnnnnnnnngtgatgtccatatttacaaagttgaacaaatctgcgcaatacttaagaaacggaaggagaaatttaaaaaaagatacactctgcatgttctgaaggggcatacactacctagttagtggttagaataaaaactgtatacaatttaatataagacataaactctagtgagcaactaacacatctgtccctgttgtaatatcaacaggctctgattgggagagagaggggcatatcacatcccagtgcctccagcgtcttccaatttaaagcaatatatttgtactgttccaaagtactccttggctcctaaataggaatcccactggactctgtttattaggagcttgcctgtccacacacttgacccaacttttttgtacaaagttggc

SEQ ID NO: 241976 - DNA, 1156 bp, Homo Sapiens
  misc_feature (24)..(33): n is a, c, g, or t
  misc_feature (251)..(259): n is a, c, g, or t
  misc_feature (673)..(697): n is a, c, g, or t
tcacagcatcttggtttagttaannnnnnnnnnaacgcaatgctttaaaaacaatgcgtggcatgatggtgtaaagagtatctgtttccctagcttttggtttctactttatgtacagagataaaatatcttgctaagaaataaaaagcacatgtctcaacgtgcataatcattgctgggtttctacagggaatgcagacagctgtctccctgaaaacaccacaaagctgatacaagtgttttctcaaagnnnnnnnnngtgatgtccatatttacaaagttgaacaaatctgcgcaatacttaagaaacggaaggagaaatttaaaaaaagatacactctgcatgttctgaaggggcatacactacctagttagtggttagaataaaaactgtatacaatttaatataagacataaactctagtgagcaactaacacatctgtccctgttgtaatatcaacaggctctgattgggagagagaggggcatatcacatcccagtgcctccagcgtcttccaatttaaagcaatatatttgtactgttccaaagtactccttggctcctaaataggaatcccactggactctgtttattaggagcttgcctgtccacacacttgacttctcctctgtcagttgaggcttttcttagcaaaacacaatttgtagannnnnnnnnnnnnnnnnnnnnnnnnaaaaagtcaactacaatgctatattccatcgggattaatatgctgagcaatatttacatctccaaatatcaggtcacaatccctattatacgttgaagttagaatgataaattatcatatgctttgcatatcagagctggtatcacctttcccatagggaatgctgcctgaaattaacatattcccaaaggtaaaatgcatattctctgaaatgcattttattatgacaatgcatgtatttactcataaaaacaataaacacagacaattctacactagctctcaatctgtggatttaaaatttcaggttaaaatcagccatccaccttgtatagggagaagagttctgctagtgtttacaataaagtgattccttgggattagaaatagtaatgctgtttttttattttgaagtgggttctacttatgattggttttaattcgggcatttcatcccaa

SEQ ID NO: 241977 - DNA, 1033 bp, Homo Sapiens
gaaccatctactgttaagtgataatcaaaaggtcattttaatgcctcaagtttttaaaaacaaattaatactttccaaatacacaaagattccataggatatacttgagtcttaatagctacacaaggagaaacagaagcactagggctcaagcaataaaaaaatcacaatatactttatttaatcagacagaattcaagtaatcttttttcacatggtttaatgcctttaggggcaagagagataaatagcactaaatttttaaggccactagttaacagggcaataaagacccctcagtcagctcataaattccactgggaaaaaaatggcaattataattatataaacagagttatacaaagaaatttatttgaattgtttgaaagacagaacaggaataaatagtagcttttcataaaaacttcagaatatgcagagttattaaaaaaacctaacacaggtacttgtgaaaactaggattaagtgaaagcatctgtgttaacacttaacagcaaatcaaatgacagtttatgattattacctctatactaaaataacctctgtccacataatcgccaagaaaaaggtatcgtgtattagcaggtgatcctcctacttcaaaaagtttcatcagatcaaaaaattggccatggatgtcaccacacactgaaacaagaagattattagataagggaaaaaaatctctaaaacaacaaattttacttaagttaaaacgtattttacataagacatagtacaaatgctatcaagaaatgtctgagaaggaagtagtctatgaacagtcatgattaggatgatgtgtaaccaagtgttcatgtgctcaagatctagaaaaagatgtaacagaaataacgaaatttgtggtcagtgacaaactgaaatctacatttataaagatcgtctctaggactccaaggatgtgttttaagtttcaagatgacaaaattacaatggtggcagttaaaatatccattctaactcaatactttctgtggctctctaaatccaa

SEQ ID NO: 241978 - DNA, 1382 bp, Homo Sapiens
aaaagccaactttgtacaaaaaagttgggtcaatgaagcttgaaaggaaacttttgagagattgcctcttgctgcactgttaacccatcctgctctttgtgttcaaggtggactttcaccctgcttacccacgcaggctgatatcctgagatgacatagatgttgagagccccctgcatttggaccaaagtgtgacttgttatggtccgatccttctgaggattttggaaatgaaaaatcacaggaacattttagctccagtacagttcgaggatgttcttattttctgactatccagtgctgtgtgaatttttgcgaaacagtattttgttattcatttttatagctctgaagctcaagatgcaggctatagaatgtacagaaaaagtcgaactaccgggttcccttccttaataacaattttttcggcacctaattactttgatgtctacaataaaaaagctgctgtattaaagtatgaaaataatgtgatgaatattcgacagtttaactgttctccacatccttactggttgcctaattttatggatgtcttcacgtggtctttaccgtttgttggagaaaaagtgacagaaatgttggtaaatgttctgagtatttgctctgatgatgaactaatgactgaaggtgaagaccagtttgatggttcagctgcagcccggaaagaaatcataagaaacaaaattcgagcaattggcaagatggcaagagtcttctctgttctcagggaggagagtgaaagtgtgctgacactcaagggcctgactcccacagggatgttgcctagtggagtgttagctggaggacggcagaccctgcaaagtggtaatgatgttatgcaacttgctgtgcctcagatggactggggcacacctcactcttttgctaacaattcacataatgcatgcagggaattccttctgttttttagttcctgtctcagcagctgacctagacagggtactgtattagctagtgtctcattaatacctgatcagggcagaaaactgatagaatgggtattcctttcaattgaaaataatggtcagttcctcagcttttcatgaaatgatatgggagcagctcatatcataatgtctgaaatatttatttattcatctgtctaattcacccttttcttttaaaagccccagtttcagaatgtgaatcaggatattcctgttactaaaatggaaatgtaattccaagtttcttttttaattttttaaatttatgtcattgtattggactatgcttatatttaaaactacttaatttagagttaactacctgcttaggccccagaacattactttatgccccttcagttaccaaaagatttgtgcaagggttttgtaccc

SEQ ID NO: 241979 - DNA, 749 bp, Homo Sapiens
ttggcgccgtggggcagtcgtgcgcaggcgcggacagcgctgcttccgcggcggttggggtggtggggccccgggcggcgttgaccatgacccagcagggcgcggcgctgcagaactacaacaacgagctggtcaagtgtgagcggcgcagccgggacggggaggtcgggagggccgcagggccgggttcccggctcgcagcggggtgcccctggacccgcctcgctgcgggcatcgcgcggctgagcagagccctccgtgccggaggccgggtgtccgtggcccgagccctcgctggctcgcaggccccgcgccgggcgctcgggggtggtgcctgactctggcttcctcgggtggaaggaggcccgccctccgccgccgcgctcctgccctgggcccacagcgccgcccctcccggcccccaggcatagaggagctgtgccagaagcgggaggagctgtgccggcagatccaggaggaggaggacgagaagcagcggctgcagaatgaggtgaggcagctgacagagaagctggcccgcgtcaacgagaacctggcacgcaagattgcctctcgcaacgagttcgaccggaccatcgcggagacggaggccgcctacctcaagatcctggagagctcccagactttgctcagcgttctcaagagggaagctgggaacctgaccaaggctacagccccataccagaaaagtagcggcggcagggacagctgaccagaccacaggcagg

SEQ ID NO: 241980 - DNA, 878 bp, Homo Sapiens
ttgggtcgctgtggcactcagtcctacggcctccgaggctgggtagtgagtgtgtcgctggccttagccagactccacaggccacgctggctgcgaatggagccgaggactcgcgcggaggcgagatgctaccagccggcgagatcggcgcctctcctgcagccccgtgctgctctgaaagtggtgacgaaaggaagaacctcgaggagaaaagtgacataaatgttacagttcttattggaagtaaacaagtcagtgaaggtacagataatggtgatctcccttcttatgtgtctgcattcatagaaaaggaagttggaaatgaccttaaatctttaaagaaacttgataaactcatagaacagaggacagtaagtaaaatgcagttagaagaacaggtacttacaatttcatcagaaattcctaaaagaattcgaagtgccttaaaaaatgcagaagaatcaaagcaatttcttaatcagtttctggagcaggaaactcatctcttcagcgccattaacagccatttgctgactgcgcaaccttggatggacgatcttggaaccatgattagccagattgaagagatcgaacgtcatcttgcttaccttaaatggatttcacaaattgaagaactaagtgataacattcagcaatatctgatgaccaataatgtaccggaggcagcctccactctagtgtctatggcagaacttgacattaaacttcaggaatcatcttgtactcatcttcttggtttcatgagagccacagttaaattctggcataaaaattctcaaggacaagcttacaagtgattttgaggaaattttagcacagcttcattggccattcatcgcaccccctcaatcacaaac

SEQ ID NO: 241981 - DNA, 1146 bp, Homo Sapiens
  misc_feature (1084)..(1096): n is a, c, g, or t
ttggcttaaaccaaagctgaggaattttcttttttcaactgaatagaaggaactttgattagtgactattgctacaacttctgtgtgatggtatcagatgttatagttgttcaacgactaagtgatttgtttgtcttgaactgtttgaaaagctatggaagaggttacagtgacatgccctcgaaagatttggtgcagaccaactgtcgcggctgttacctggaaatagagaagctttgaactttgcctccattgtcagactatttcgtctgatcttttctgcaatgttcctctgacatcaaaaaatgtacattcagtgaatgcagaacaaatgaagggaaaagtgcctttaaaattacctcactgtgggctggaagaagcgaaaatctctgcccagcttccgtatcatagagagccctattcatcgctgcccaggccttcccaggaaaatcattttttctgggctgatgttgtattctgccatggcgcatatgttcttacagaaattttattgcttttgtcttgggtgctacaaaattcacagcaagccattttggttacatatctactggttgcaaggcaggaaatattggtgaaatgctagcaaagtcacaatttctactctgaacatgatttgcagtgttcatcagtatttttctgaaccctgctttaccattttctatattgccaagttgaatcatgtgggctgatgcagggaagctctgaagcagtgaataaaggtgtttcgggccctgtaagtgtttccatggtttctggtgtctgccagcagtagtgaacaaagctgcagcttctttgaaccgcgactactggaagtggcctttgctctcagggaacatggtgatggagggttgcatcagctccacccatggccaacagcccttgttgagtgacgggagtcggaatgtgctaccccgttgtgggaatcaggagagaaagaattgcaaatgccaggcatctgtccactttagccctcctccaatgctaagaaagagggatggtgacgtatactacagagacgcaaatgaacaccaaacagtcttgaattacaagaaaaaaaggggannnnnnnnnnnnnctaattttcagacttggctttttacttagaggacattctgattttgctct

SEQ ID NO: 241982 - DNA, 934 bp, Homo Sapiens
aagaaagaattaagccttaaaaatctattgtgcaagaacccaacttttactcaggagctgagaaggaagaagcctcaaaccacccatttcctgctttttagagatagagtctaggggaaccatggctctaactgggtcaagtcctcctagctctgaagctaaggctgcagagctgtcctttggactggagtttcttcatgctttccagagttagagccttgatcacggaacatcattgtgtgcagaaaaatactgtacctagtactaagttcttttcatctttgatttttctttagcttcatcagtccttccttcctaatctctaatcccctgaagcctaacacagttcctaatgtgttttgccttaacctcttttctcttcccacattggtacttctggttggggctctctttacttactgcttaggcacatagtcaccttctctggactccctgcttccatgctttctccttcagtccattccgcaaactcttgtgatcttccaaaattagctctgattagctttcacttcctgtagaagcaagaacaagctcctctgcttggtacttagtctgtgtccatgtgatccaaaattaccttcctattgcatttcctactcctttgctacgtgtattggacctctggccaaattacaaaagatgtactctttgttctctaaaaccacactaaagttttctgacttctttcacactctttatgataatcctctgcctgaaaggctattgccacctgtcaaaatcttcattattctttgcctctttcctgagcctcttgcttgaatgtgatttctttctccctgagacccataaggttcatcttatgggaccttaatttgtcttgcatggacatttgtgattctcattttctcaccattaaattaccttggagggtagggctgtggtttactcctgt

SEQ ID NO: 241983 - DNA, 2054 bp, Homo Sapiens
  misc_feature (981)..(1001): n is a, c, g, or t
  misc_feature (1488)..(1516): n is a, c, g, or t
  misc_feature (1763)..(1775): n is a, c, g, or t
ccccagtcccatcattttttattcgatatatcaattcttgtgaagaaaattacatgtagccacaatgcagattattatcaagggtatcaaagtattcactgaattctgctttcattcactcttcacttcagaacgtatatatttctcctttccaaataaccagtatacataagggctaaaactatggatttcagaaccagtatgccaagtttttggtgcaatttccagtttgaccactgtgactttgggcaagtttctgcttctattttttttcaacgaaacaacccagtgaaaaaaatgtttccctttaaaaatctaggcaattagtaacactaccaccaccacaatgacaaaaatacttctggttttagcttttgatctttggtgatctaacttgagatgctctttaatcttggggaataacatttagaagattaaagctgtagtccaataatgaaaacccttggactcttgagaaaacacatgctaacttgtatttataagatgtgaaactcattacccatttacttcagataagtgctcaacatcttacagattgatcttgtcactaatttcctattctcagagctagatttatgtaatttgttttcatgtaagtttaggcttacttgaaagtattctactcttcgcactaatactgaataagtaagatttgtgactaaaaaacttaagaatcaccatttgaccttttataaggtctgatgaaggtaaaggttagaggataaaagcttttatttaacagattccttctcagacaaattatggcaagcactggagcataaattccttcgtggtattccttcgtggtctcctagatactgctggtagttcaataaatacccttggaggccaaatcaggactgttttacaaaatgtgctgggcatattagtggtacataagatgattttagctagttcacagatgtacatttgtttcaatagttgaatattgaacatttnnnnnnnnnnnnnnnnnnnnntaactagaacatcacactcttgatttcatcgacataactgccaagaaaagtgagggtagcatatttacagtaattcaccacaaagcccactcacaggtagaagaccagggatgctcaccagtacccagaggaccagatgattgatgggttctaccacgagcatctaatagcgactgctgcagaactggtgtggaaaaggtttctattttataaaagaaagtatccagaaggctaaaggcagttgtggaatttatttcttcccagtgctctgattgtcaaaatttgaataaagctcagtgaaaggaggacagtaattaatgacttgatagccaaacatcgtaatgatgatttagtgatatactagactggatgaaagagaggtcactgtcttttcactatggattcatcataaacagtatcattcttctcaggaagaaacttatttttagaactatattttaataaatttctcacattctaataaatnnnnnnnnnnnnnnnnnnnnnnnnnnnnncctgctaggtatgatgtgtaaaatgattttccatttatagtaatggtatagtttcctttttataaaaggtttataaagtttatgtaaaaagtcaacttaaaaataccaagttaattcagtcagttcaaaaagttttgaataattaaacttggaaagtcactgcaataaagccaaagcaagttaatggtcataattataagacttagctttttaaaataaaactctcaactcagtctacccttttaannnnnnnnnnnnnctttcttccccctaactttacagttaaccgacagcgagaccaagtcaaacgtacgtacatcaatcttaaattgtttcattaagagctatgtgaattctgtcagtgcattatgaggaacaatgtctaagaggatattctatgtttgtttcacaggttactactctgttgtatatccaggctggcccatatatccacgtaacagatacacttctttttttatggcattgttaatccaacttttttgtacaaagtgtgcctttatagaaaaagcattgctca

SEQ ID NO: 241984 - DNA, 966 bp, Homo Sapiens
ttggctgtcggtctgttcagttaccacgtgaaccgccgacggagacccgtagtgggggaggcggcggcagcgttaagtgagaaaggaaaaaagacaacgaggaaaaaggaggtgtccgggtagggcaacgcggcgacacccgaggcctggtggtggcggcggatcgagatattcaaggctgaagcagctacggaacggcagcggcggcggtcggacaaactgactgaccgagccgggtggtggcgggagcagcgggagcagccggaacgatgccggccgtgagcctcccgcccaaggagaatgcgctcttcaagcggatcttgaggtgttatgaacataaacagtatagaaatggattgaaattctgtaaacaaatactttctaatcccaaatttgcagagcatggagaaaccttggctatgaaaggattaacattgaactgtttggggaaaaaggaagaagcttatgaattggttcgtagaggtttgagaaatgacttgaagagtcatgtgtgttggcacgtttatggccttcttcagaggtcagacaagaagtatgatgaagccattaagtgttacagaaatgcactaaaatgggataaagacaatcttcaaatcttaagggaccttttccttactacagattcaaatgcgagatcttgagggttacagggaaacgaggtatcagttacttcagcttcgacctgcgcagagagcatcatggattggttatgctattgcttaccatttattagaagattatgaaatggcagcaaagattttagaagaatttagaaaacacaacagacatcccctgacaaggtggattatgaatatagtgaactactcttatatcagaatcaagttcttcgggaagcaggtctctataaagaagctttggaacatctttgtacctatgaaaaggcagatttgtgataaacttgctgtagaagaaaccaaaggggaa

SEQ ID NO: 241985 - DNA, 1006 bp, Homo Sapiens
aaaaataaaaaacacaaaatttgctgcccaccagttcagcagtttttcacaatacagtgtgtctggactttttaatgtaaacaaacatgcttgatttaccaattttcagagcaaaggacacaaacttagcattcttctaggatggaaaactggccagggaagttacttcattctttttctctttttcaaaagtgcatctcgtagtgccaactgtaagataaaaaagtattgaaacatgataactcttgggtaccctattataggaatttggttacatgaaagtttactaaaaaggaatcaccaagtcaatacaccatcctgaaaaactataaatgataaaatattccaaaacagatcacatctgaatcgaggatggggcatattactgctaggaaatatgcaaaactcttgactgctgttcccaactcatggaggcataagctcaaaacaggagcagctatggaatgcagagactactatttattatccctgtctccagggataataaataatacttatttggtctatgtggctcttaatattttggagttgtggatggaatacattgtctaaattaaaagtaacaggaaaacagatttttcttcataatcaatcacctttcccaatatcacatatattccactaaatatggcatgtatggatcactcaaagattttataatggcattcagcacttgtgtagatttatgataactctatcaatataaaatctgaaacaaagaaaagtgataccttactaagaaaatgttctaagtatatgctaacactaaccctttataatggctcaaacatgaagatattaactcagaaattgaagccctgacaattgtagcttatggcaaaatatttattctagttaatacaggctctaatttttaacttgtttaattattttgtgttggaagtatgtaaagtgaacatgaagaatgaaagcagtgaattgtatatcataaggagactcagtctagccaacttttttgtacaaa

SEQ ID NO: 241986 - DNA, 835 bp, Homo Sapiens
  misc_feature (675)..(739): n is a, c, g, or t
ttgtgctcatgatttatatacttttctcttacttttcatctaaaaaattaaaagtggattaaaacctaaatgaatataataaatctttaaaatatttaaaagaatatgtaatttttgtaatatttaaagatacttatggataaaggtataataaccaaaaaagggtacttagaagccacaaaggaaatacaaagcattctttactaataaaaaataacttttctatggcaaatatctctataaacaaattctaatgaaacatgctacaccagggtatttgttccacacaaaattaagtcttactctttctgatgcatataaaccacaaagcctaataagctaatcatagagcctaacagaaaaatggacaatagaaaatggcaataattcgtgaaagaaatattgcaaaagtcagtaagcataaaatatttctcaacctcactgataggaggatacaaattaaacggttcaagaagaaattacagtataatttgggtagtagtaaataatcttttgatatttattaagagcaacacatctattctttgaccttgcaaacacacttttgaaaatcataaaaagtaaaatcataaaaatatgtgttcaagtgttttcatttcagcactgttgcctgtgacaaaatgttgtagtggacagaacccctgaatatcctcnnnnnnnnnnnnnnnnnnnnnnnnnnnnnnnnnnnnnnnnnnnnnnnnnnnnnnnnnnnnnnnnnttgaataaatcatacttatagaatactatgtagctattaaaacaaatgtgttaatcatcaagctgacctggatggttgtcagggatacatagccaa

SEQ ID NO: 241987 - DNA, 1834 bp, Homo Sapiens
  misc_feature (148)..(198): n is a, c, g, or t
  misc_feature (204)..(218): n is a, c, g, or t
  misc_feature (488)..(510): n is a, c, g, or t
  misc_feature (1010)..(1018): n is a, c, g, or t
  misc_feature (1278)..(1454): n is a, c, g, or t
  misc_feature (1500)..(1542): n is a, c, g, or t
gagcaacacatctattctttgaccttgcaaacacacttttgaaaatcataaaaagtaaaatcataaaaatatgtgttcaagtgttttcatttcagcactgttgcctgtgacaaaatgttgtagtggacagaacccctgaatatcctcnnnnnnnnnnnnnnnnnnnnnnnnnnnnnnnnnnnnnnnnnnnnnnnnnnnacacannnnnnnnnnnnnnnttgaataaatcatacttatagaatactatgtagctattaaaacaaatgtgttaatcatcaagctgacctggatggttgtcagggatacatagtctacctaaaaaagcaaattgcaggagtcttgttttattatgaaaaaaatttaagtgcagcaacagaaaaaattcaaaatgcatatatgcgaatatatgtttgtaaatacttataagcagacataaatatgtggaagaaaacacatcaggttgttagcatgattccctgagatagggnnnnnnnnnnnnnnnnnnnnnnncctgtgactcattggtgtctttatgaaagactaatgtggacatttggaattgataaattttattatcatctagaaaaacatatcatattttgaagaactcttttcatagctgtagaatcttcttgatgacagttttactttatttggtatgcttgatgctacatctacttcacatttttatgacaactttttaataaacatctttgaagcactttcttaatctttctcaattcttgctggcttgaccagaaagagcactttttctggaagtgtgaaatcagacacttacttaaggaggtgtattttggtgataatttctttttgtcacacaaaagttgtgatggttagagataccatataaatgccttgtctttcaatttaaataaaagtataattagaaccaatgtcattttaacagttttaaacaggcgtattctgtttgttatctatatctatttaaccataaattagatccatatcacttgtgggttttcaaagannnnnnnnncattcttttcattctttgggcagctaaaatctaggatggtgttaagtttcttcattttgtcaattatatataaaaaattagaaacaacatgaatctgcatttcttggatgagatagttaataacaaactatttctcaatatttgtatactaaaaactagtgaaggtgttatgtgtttcagtatcttatctcttatttgaacatgggtttctgaaaggagcctatataataatataaatggtatgtagtaaatgaggcacnnnnnnnnnnnnnnnnnnnnnnnnnnnnnnnnnnnnnnnnnnnnnnnnnnnnnnnnnnnnnnnnnnnnnnnnnnnnnnnnnnnnnnnnnnnnnnnnnnnnnnnnnnnnnnnnnnnnnnnnnnnnnnnnnnnnnnnnnnnnnnnnnnnnnnnnnnnnnnnnnnnnnnnnnnnnnnnnnaggaagaaggtgcgcaagctctctggcctcttcttacaagggcatnnnnnnnnnnnnnnnnnnnnnnnnnnnnnnnnnnnnnnnnnnnctgacttccattaacttccttgtcattttttaatgtttttctcttcttatgtttttctactgttgggcaaggtgggaaatgtgtattctgacatatagactcctctcatcttctcttgatgttttgcataaccttctgggatatccctgtctcttctacttcactgcattttcctgcaggatgtttataaatagttcctggcaaaggaggttgccgtatagggtcctacaagtaacctaggtggcagcatctcctcccagcgtcaggtctaagcacacaagttctttgtaca

SEQ ID NO: 241988 - DNA, 765 bp, Homo Sapiens
tggcaccacagcacatattcctaactacccataccatggtgcctttgaaatgctggagaaacatcactgaaaaagcccaaaaaggtagacagagtgatagacagttggacagctatgcgataaaacagcatggtaaaatgtcagtggcagaatctaagtagcgggcatacaggtgtttgctaaaaaattctttcaacgttgctgtatgtttaaaatttttcataagaaaacatcgggaggagagcaaggaagagcccagagtgtcatctcctcctcaaagatggaagcgtactgaaaaaaaaggttacgccaataatgtcaggatgaaaggatttccccaccccgacctgcctcccctccaaaaagtatcccagttaaaatctataggccacagattccagttacaggttgccccaactggggccaatggctgagaaacagagagaagcagatgggctgtaaaactgggtcctctgccagctaagctagagaaaccatctcccaattgaaagtgttaatggaaatgccaggccaaagcagtcgacaggaaacgtttcttgacgctgtacatgcaaacaaatatggcttctcctacaaagacaaagaatgcagtggtccaaccaggcctgtctttaagtactggcaagcacccaaggcaagttaacagatttcaacttctcaggctctatagatgagtaccagctcttgaagacctcccaggggatggaagggaaggaagagggaggaagggccaacttttttgta

SEQ ID NO: 241989 - DNA, 1012 bp, Homo Sapiens
atgagccactgtgcccagcctagtttcttttctgtatgctttttttacaaaactgtgagccacagaggttgaccacttagccaatttgttgctagaagggagaaaaaaatctccaactagcctccagacaaaacatactcaaattcaaacagcagttagttttaattaacatacagaagtaattttagactttcagatttctatgctgactagaacactttgcaggctgaagctgacattattaccaaatacttcatttaagtacatactctgaagtgtcaggcttccagtatatatagcaacgctctgagagacaaactgggctcatatgacggggttgcattttattttcttaacaggtctttaaattgggcagttctgaaattctgtttggtcagttctagatggtacgtcatgtgaatgcaaccaagcactgtagttgaaattgtgttatgccactactcatatgttgtcttaggtactacgcataatgttaatagctgagatgttaaagaatttgaagtctaaaatataaaagatgaatatacccatattaatcctatgttaagatgctctggaaataaaggccttattcccttacacatgcgatttttgtaagataatatatacacagtatattttaaatgtttgtgtgggtggtctgtgtagttactccccatacaacaaagctgacaaaatttttaatttacacaatgtattctgcattttcaaatgtttatgttgtgtatatagcaaagaaattatcttactgatatgcgttgaccaaatcccatggagaaaagacatctcatttgaggttccccttcctctcatgtgtttgattttttggaaggtgatacagtatgtgggtaaccatgcaaatgtttatgaataactttactgaagtgattccatccgtattctgttctaatacttggagaatgaccttcatatttatatatttttatttctttgttttcaactatccagtgataattcaggaaatgtttcc

SEQ ID NO: 241990 - DNA, 254 bp, Homo Sapiens
  misc_feature (155)..(169): n is a, c, g, or t
tagccagctttgtagcacaaacctgtaatcctagctacttgggaggctggggcacaaaaatcgcttgaacccaggagacagaggttgcagtgagtcaagaaacagagactgcactcacaggctggaccacagagtcagactctgtctcaaatagnnnnnnnnnnnnnnnggcattaacgatgtgagtgatgcagagataaaaatcctgagcaactgtcgggcatggtggctcactcctgtaatcctagcacgtg

SEQ ID NO: 241991 - DNA, 917 bp, Homo Sapiens
ttggcggaaggggaggacgtgggatggtggcggagctggctgcagcagagctaccaagcagtcaaagagaagtcctctgaagccttggagtttatgaagcgggacctgacggagtttacccaggtggtgcagcatgacacggcctgtaccatcgcagccacggccagcgtggtcaaggagaagctggctacggaaggctcctcaggagcaacagagaagatgaagaaagggttatctgacttcctaggggtgatctcagacacctttgccccttcgccagacaaaaccatcgactgcgatgtcatcaccctgatgggcacaccgtctggcacagctgagccctatgatggcaccaaggctcgcctctatagcctgcagtcggacccagcaacctactgtaatgaaccagatgggcccccggaattgtttgacgcctggctttcccagttctgcttggaggagaagaagggggagatctcagagctccttgtaggcagcccctccatccgggccctctacaccaagatggttccagcagctgtttcccattcagaattctggcatcggtatttctataaagtccatcagttagagcaggagcaggcccggagggacgccctgaagcagcgggcggaacagagcatctctgaagagcccggctgggaggaggaggaagaggagctcatgggcatttcacccatatctccaaaagaggcaaaggttcctgtggccaaaatttctacattccctgaaggagaacctggcccccagagcccctgtgaagagaatctggtgacttcagttgagcccccagcagagtgactccatcagagagcagtgagagcatctccctcgtgacacagatcgccaacccggccactgcacctgaggcacgagtgctacccaggacctgtccc

SEQ ID NO: 241992 - DNA, 763 bp, Homo Sapiens
tattcaaccccaacagtcttcttcgttctgggaatggaaagtggactggacaacttaaggacacttcttctcccaggaggggtcttaatatgataagatgagcactggcctgggtgaggaactctgggtttgagtcccacatcagccactgagttattgggtgactttgtgcaaatcacttaacctctttgggcctcaagttccttggctacaaaacctaaggggcaactagataggtcacttgtggccttgactttctgccttgagagggtgtgtggctccaccccgtcccagggcccagtacctctcagctccaccttgccgctgtagctgcccaggtagcgggtatcagtggagggggtgtggcactcataaatgccggcatcctgggcctgcaggcgggcaatcttgagcaccacggcatcaccttgtaggcgctgcacctgcacctcacccgccaccactcgggacttgaagacagcataggagaactgggtatccttggtactgacaatgcccagtgcagtatctggggcctcgggcctatacaggaaccactcgaagttctgctgggcagggccctcatagccggtcacattgcaggagatggagacagctgtgccagccacgcggtacaagggcccctcggggaccagcacctcccgggcccagcatcccattcctagcattagcagcagcagcagcggcagcgaaggcggcagcagcgtgggcctgagggcgcccatcctgcgcggccagctct

SEQ ID NO: 241993 - DNA, 1188 bp, Homo Sapiens
tagtgagacacatacgctttttataaatatttttcttttgaaggattttactatggattgtggaatttgttatgcttatcaacttgacggtaccattcctgatcaagtgtgtgataattcccagtgtggacaacctttccatcaaatatgcttatatgaggtaaaaaataaaaatattgtcaagacttttttccgctaacacaacataggaagtattcctgtttgaaatacacagaatctaaaatctgttgagtcaatagtgatcctctcttttgccattaactccttttaccagtttattccagatgcttatgtgcttcatttcttcatcacagttactaatgagtggagaaatgttctgaagtatccaagggagaaaatctatccagaatatattcatggactagcttattgacacataacaaattaaattgatggtacattggaatctttctataaattccttgttaccacaatgtaagcttcataggtttacccgaggtggaggtggttgaaagtggcagtaatacagtgaaaatgaaattagtactatgtagtatctattacttttcaggctgcatttaagaatagaatatatccaatactactacttttcatgttgagaagaatgccttttgtgatctgagtctcacagcactcaggcaatgccactttacttactgtatgtgaagtctactttcattcctgtctttagtgcctggcttcaccttagggcctagttgatacatgataaactgtgtgtaactatatacagaacaccttgcaattgtatgttgccttcggtttcagtcttccttaatatcacatctttacttttgtgattagaggtagcagttggtgccgtctgtactttgccaatggagaacttaggcagaggcatctatttaccttatataaaatcatgaaattacagaaatacaggtcaaattacagaaatactctaagggaacatgtgatttcttttgtaattatgaatattcatttaatttttaaaaattcactggctcatgcttataatcaatgggttgaaaattaacccactgttagtgattcagaccagaactaagagggaaattttcaagagcctgtagtatctttaacagcaggagttgttaatttgtgattaatggatttagggaaagtctatccaacttttttgtacaaagt

SEQ ID NO: 241994 - DNA, 1199 bp, Homo Sapiens
  misc_feature (271)..(284): n is a, c, g, or t
  misc_feature (287)..(324): n is a, c, g, or t
  misc_feature (329)..(350): n is a, c, g, or t
  misc_feature (965)..(973): n is a, c, g, or t
aaattagctgtttttacaataaacaaagtattagaacatgtgaatattagaactccttctaactggaaagatttcttcagtaagctataaccgaaaataaatataaactaaaattataatttctaaaataagaattaacaaaccaaatttaagtatttttagtcagagattgaaacaaaataagcacagtgatctagaaaccaaatatactgattatgtaactatcgtatcaaggtacagacattcttcacatgctacaaggttagcattnnnnnnnnnnnnnnatnnnnnnnnnnnnnnnnnnnnnnnnnnnnnnnnnnnnnngtctnnnnnnnnnnnnnnnnnnnnnntgctcagccatacaacacccctccaggatgatagtataccagtgaggagcttacaattttaatacaaatcagaatcccacagtttgactcgacaaaaaggcagttaaaaatttagcactcttaagatattctgaaggaaaatgaaatttcgaaagtatttcttgatgatcgaggctatggttatgaattataaaacatataccttacacactccattgtgtttgaacaaccagtcatcacagatgtagtagtgaggtagtattgttgtcccctcctcgggactgatgtttttatatgctgcccttccagaaaggtccaggttttaaaaaataacattagttaccaacaaatgtatattttctttttttaactaatcatttgtttttctaaatcagtctataaaagaacaaaacttttaaaatcttgcagaggctgtttcatcagtaaactctcctagggagctactactgctgtctaaacctctgtgaaatggtaggcaaaaaaagccatcaaaggatcacaggagataaaacaccaatcagtgtaagctgttaaagatgactgtgattaaataccaaatatcaaatatccaataaggtaattaaatttagattnnnnnnnnnctaagcaccagctgtacatacattattaaatgttctaatctctttcctgattcatagccatattctacatgatgatcaaagactgtccactgtgctacctaccatcattttaaacactgcctgatctgtatgatggtggaattatggctatggacatggcagataagagaagggcacactgagaaaatgtgagtgagagagaatgtggaaataggttaaataccaa

SEQ ID NO: 241995 - DNA, 1358 bp, Homo Sapiens
  misc_feature (367)..(416): n is a, c, g, or t
  misc_feature (418)..(442): n is a, c, g, or t
  misc_feature (1058)..(1066): n is a, c, g, or t
aatagataaatgtaaatttgactgtgtaataccaaatggaaagtagctgaaccacacagagaaaacaaggctctacgtatctccaaatttagctgttttacaataaacaaagtattagaacatgtgaatattagaacctctttctaactggaaagatttcttcagtaagctataaccgaaattaatataaactaaaattataatttctaaaataagaattaacaaaccaaatttaagtatttttagtcagagattgaaacaaaataagcacagtgatctagaaaccaaatatactgattatgtaactatcgtatcaaggtacagacattcttcacatgctacaaggttagcatttctctctctcatnnnnnnnnnnnnnnnnnnnnnnnnnnnnnnnnnnnnnnnnnnnnnnnnnngnnnnnnnnnnnnnnnnnnnnnnnnntgctcagccatacaacacccctccaggatgatagtataccagtgaggagcttacaattttaatacaaatcagaatcccacagtttgactcgacaaaaaggcagttaaaaatttagcactcttaagatattctgaaggaaaatgaaatttcgaaagtatttcttgatgatcgaggctatggttatgaattataaaacatataccttacacactccattgtgtttgaacaaccagtcatcacagatgtagtagtgaggtagtattgttgtcccctcctcgggactgatgtttttatatgctgcccttccagaaaggtccaggttttaaaaaataacattagttaccaacaaatgtatattttctttttttaactaatcatttgtttttctaaatcagtctataaaagaacaaaacttttaaaatcttgcagaggctgtttcatcagtaaactctcctagggagctactactgctgtctaaacctctgtgaaatggtaggcaaaaaaagccatcaaaggatcacaggagataaaacaccaatcagtgtaagctgttaaagatgactgtgattaaataaccaaatatcaaatatccaataaggtaattaaatttagattnnnnnnnnnctaagcaccagctgtacatacattattaaatgttctaatctctttcctgattcatagccatattctacatgatgatcaaagactgtccactgtgctacctaccatcattttaaacactgcctgatctgtatgatggtggaattatggctatggacatggcagataagagaagggcacactgagaaaatgtgagtgagagagaatgtggaaataggttaaatatggaaagggcaagggaaacccattaaaatgttcaccattatcctttaaaatgtacacagaactgaaccaa

SEQ ID NO: 241996 - DNA, 1140 bp, Homo Sapiens
gagcttttgtcactttattgttaaccaatgaatattatccaaaattagagatgtaattgtaacttaattgtacaacacaaaattatgctaatggtaaaagcctactgggatttaccaaatactcattagtgtatttttacattgactatatgaacatgtgctcgcgactgctaataagttataattggtttaatctctaagaaatccatattgcaaatggttcttgtttagaaaaattcacacagccttaaaaatggattaaatccattttaatcctaatctacaaatagatcataaacagcaaaatataactgataatttttcaatactgtatcaaactgatgtagctatggtagtgcacataattcaaaatgaggaaaattaacaaaaatccaatgaaagttcaggtttttatctattatgcaattgctttaaagtgaacatttatgtctcaaaacatgaatagtagggtccaccatccattcctttgatgtactgcaagtaggaatattctcttccataggattctgaagcatgtgcacaaccatggtacaacagtcacttcaaggttaaccagctatgttttgtcctacaaagttcaaaaaatatattaaacgcaacctttcttttacataatgtctgcccagattaatccttttaaagtcagcaaaatcaaaaaagcacaagagatattttcagacacaacttgaatctactgtgcatgaaaatgtttaataaaatggcaattttaatagataaatgtaaatttgactgtgtaataccaaatggaaagtagctgaaccacacagagaaaacaaggctttacgtatctccaaatttagctgttttacaataaacaaagtattagaacatgtgaatattagaacctccttctaactggaaagatttcttcagtaagctataaccgaaattaatataaactaaaattataatttctaaaataagaattaacaaaccaaatttaagtatttttagtcagagattgaaacaaaataagcacagtgatctagaaaccaaatatactgattatgtaactatcgtatcaaggtacagacattcttcacatgctacaaggttagcatttctggtctctcatacccaacttttttgtacaaagtt

SEQ ID NO: 241997 - DNA, 897 bp, Homo Sapiens
tttttccacagtgggtgcactcaaaaggcttttgaccagtgtggattctctcatgtaacgttagactaccttttgccggaaggattttccacactcctggcactcatagaccctttgtctcactccaggtgaatcttcctgtagtgtcttcgaatctggggatttttgttccagcttctctcttctgaaagaattttggatatcccagcttgaggatcctgtagcctcagagtggtcatatttgtggtgggcttcagtcatcacattgaagaacgctacattctgggcatatcttccatgacagtccagcagggtagctgttggaaatccaaacatgtccactcctgcttacgacctcagtcaccacctcttcatatgattcttccatgggctgttcctgagcaccgcagcggcgcgtgcccgcagacaaaggccggcggaatggactacaactcccaggagtctccccgcgagcccgcccgccgggccgtgggtctcggcggccccggcttcccaagagctctgtgggaaatgtagttctctggcgcgccctgcgctcgggccccgcaggtccctagggcgcggggacctcaagccgtcccgtttggactggtaatccggagactcacagcggtgacctgtcagcggacgcggagccgggacggagccacggccgctcagattagcaggatctgattgacagcatcggggtagcagacgctgagccagggactcaggaatacagggttcttgcagggcgtcgcggaaggaaacgaagtttttgggagaaatccgtttgataaagccttggcggcttcgaggtcatgtgttgagcctctggctgcatgaacaaaagcgaagcccgctttcatggagcttctgtgaagagcaacccaa

SEQ ID NO: 241998 - DNA, 389 bp, Homo Sapiens
  misc_feature (175)..(184): n is a, c, g, or t
gtataaaatatagaacaagcgggtggtatttaaacataaacagggttagctgaagcaacaaatattgcaatcttttcaagttagcatattacagtttaaatatttatgcctgtaaagatctgcataatttacaatacagagctatttcagaagcagttgacttaactagttgagnnnnnnnnnncaacaaacttcaacgcaaagctataataattatctgaaacttatttacaattaaacatttagggtcctgatttacaaaactcagtgcctttcatgatttattgatgagttttatagagaaagtaagcagtatgtagaatattccccaggtaaaatctggagtgaatggcttttagaggaaagtctatcaccaacttttttgtaca

SEQ ID NO: 241999 - DNA, 1473 bp, Homo Sapiens
  misc_feature (981)..(1005): n is a, c, g, or t
actttgtacaaaaaagttggtggtttttacttctgtgcaaaaaggcagtgagtttcgtgaagcctggaagttggccatgtgtcttaagagtggctggactttgacatgtggctgtttgaataagagaaggacaaagggaggagaaagcacatgtgctccagtgagtcttcgtcactctgtctgccaagcaattgatatataaccgtgattgtctctgcttttcttctgaaatgtagataactgctttttgacaaagagagccttccctctcccccacccctgtgttcttgggtaggaatgggaaaaggggcaacctacaaagattgttggggcaagggaagtcacaagctttcggatgggcggtggcttttcacaaaacatttagctcatcttattctctctttgtcctctctcccctcctgcccgcccgcaccctggaattgccactcagttcctctgggtgtgcacatatgtttggagaaatagaggagagaaaagagggccacgtaactgagagcttacagtgccaatgccgtttgtgttctggccagagtggagtgcgcagccctgactcccaggcgctgagattgttgcctggttacccaggaagctgctgttccggctgcccagcctttctctgagccagcggatgcacagtccgtggccttcttcaggcttattgatgatgctttttgcaaatgttgaatcatggttctgtttctaagttggatcttttttgttttctccttgccaccctaatttgacatcaaaattctctcttgtgcattgggccctgggtcattcaaacccaggtcacctcattccccttctctgttcacacctaatgtcttgaagagtaggtagcagcagtgtgggctgaacctaggccagcttgcttagcgggtcaccctgctgtgaagtcctggcaggtgttggtaatgtgtggaaatgcagtcagcaagtttgctggggagtttgatnnnnnnnnnnnnnnnnnnnnnnnnngcctcggtataattttgttccacgacttcttctgtagctttacaccagaaggaaggaatgggctacagcaggtagtggaggaagaggggggtgagcaggtgtattaaaatagcttacgggtaaggcctaaaaggtcacccctcggccccctctccaaaagaagggcatgggcacccccaggagaggatggccccaaaaaccttatttttatacatgagagtaaataaacatattttttttacaaaaataacttctgaatttatcagtgttttgccgttaaaaatattcctctatagtaaattatttattggaagatgacttttttaaagctgccgtttgccttggcttggatttcatacactgatttatttttctatgccaggcagtagagtctctctgcctctgaggagcaagctacccgcatctcactcagcctctcccttaccctctcaagatttgatgaaaatt

SEQ ID NO: 242000 - DNA, 1374 bp, Homo Sapiens
  misc_feature (300)..(308): n is a, c, g, or t
  misc_feature (518)..(884): n is a, c, g, or t
ttaatttgttaatgaaatttctctttagaaactattaaattaataagacaataattaagcaaataattattaaattttacatggtaacactagcaatattaactcccattttctatcactttaattcaggccatcctttagaggtttaagtataatccattcttatgtcctacacaactgagtgtgtagtaccagtatgtaatcctaatgtaatggcacaccccagatgacctttttgtgtgttggcatggtttttcagtttaagcaaaagtttaattgattgaaacttgaagttcacannnnnnnnnctacacaccaatattgaagagaagtcctacaaaatacttattctatggaaaaaaacaaagtccactttagatctaaaatggttgcataaaattttgagaataacttaaatgttatatgaatgtaagtaaaaattttactgtaaactttgtaattgctaactataaacagaaaacaagtatatcttatataaagaaatgtgtagactctcnnnnnnnnnnnnnnnnnnnnnnnnnnnnnnnnnnnnnnnnnnnnnnnnnnnnnnnnnnnnnnnnnnnnnnnnnnnnnnnnnnnnnnnnnnnnnnnnnnnnnnnnnnnnnnnnnnnnnnnnnnnnnnnnnnnnnnnnnnnnnnnnnnnnnnnnnnnnnnnnnnnnnnnnnnnnnnnnnnnnnnnnnnnnnnnnnnnnnnnnnnnnnnnnnnnnnnnnnnnnnnnnnnnnnnnnnnnnnnnnnnnnnnnnnnnnnnnnnnnnnnnnnnnnnnnnnnnnnnnnnnnnnnnnnnnnnnnnnnnnnnnnnnnnnnnnnnnnnnnnnnnnnnnnnnnnnnnnnnnnnnnnnnnnnnnnnnnnnnnnnnnnnnnctctctgtgccttgtatttctcatactagtcaatgccaactcattaaaagttatctggagatataacatttttgggggattatatattgccactactgttatatttttgtcaggataatgtagcaattcccaaataaatcatacttaaacctccacagaaaagataaatagaaatgagaattccattgccagcattgctttgaaaaacgtttcagaactttgaatatatatactcataaacacacacacatacacagatatatatttctgcatgtgtatatacatatatggatacatatgttcttaaactttcttttaacagaaaaattaaaatagaaggaaaataatagagcactagttatataactagtattatataaataatgttatgtaactagttatataattaaaaatataagaacctaggtgagaatgagaaagtctagatttagatttactacttttcctaatacacacccacacacatata

SEQ ID NO: 242001 - DNA, 1435 bp, Homo Sapiens
  misc_feature (1268)..(1279): n is a, c, g, or t
gcagacacctctcagctaatgccatactgccataactgcccaaagctgctgtgaactgagttggcaaaggtttgatggaagccactggttttcatagatatctctgggtaatcaccagggcagtgctaagtagttatcaccgtgaaccaatttaaactggttacctagaggccagaggccctaggacgtgaaaggcatcattcttggaaattgtccattctactattgcccctaattgattaaaaataacaacaaaaaactggatctcaattgggcaaacaacatagatcataattattttattaactaaattacagctgctttgaataaaaacttaactaacaatcacgtaagggtctcataggtgacaaccagttacttttcttgtttcttctccccaacagtgaatcatcaaggccatggtgcttaaacacaagtgtattcctttcacgtcttactactctccaaatcggagtccatcacttcacttcagttattctggaaaattgaaaaatgaacacataatcactattcgtgtctattttctatccattaaaaagttgacacattaaaaaaagtttcagatatatagtatctaaaaattaagaaaatagacctgcaaaggtcagagacagaaaccaggcaaatcattagcctttttaatttcagtaagaaaaaggccaatgccaaatgaaagtaaaaaatcaacagagtctgataatctctgtttgctgggttggctgaggaaaagccaagagatgttgatttttcaaagcaaaagatgttgatcctagaataatattctataatattcactttggatctccatcattcatttaatgtaagtaaaataaacatctgatcagctgtagatgaaagagaaaaatggtactgactctgatccctaggaagcaccctgaacctcattcattgacaaggcagacatactgtaagcaataagcagttgtcagtgggaagtacccaccagccagacattttaaaaacaaattctgatcagctgaatattagcaaaattaagagaatcttgaagatcatcgtagatttcatcacaaatattcaaggcaaaactgttttacaatatttcctgatgcagtagtttaaaaaagtcacatcttaagagaaattaacaaaggaagaggcactcaagattcttagattgctttcctgaaaatggagaaaagtttagtttcttcatacagctacagaacaatgacaccaccaaggaaaaggaaaggacatagaaattnnnnnnnnnnnntaggacatcagaatgtaaacatgaacaaaccatgccacaattcctggaacaaaccatgccatgccacagttaccagaacaaaccatggtcacaattcctggtactagtcattttatgttttgttaggtcttttaactccaacttttttgtacaaag

SEQ ID NO: 242002 - DNA, 1118 bp, Homo Sapiens
tacaaaaaagttggaaaagcacaggccctccctatgagtttgaggtggagagggatgcaaaggctcggggcctggagcagttctctgccacccacgggcacacccctatcatcctcaatggctggcatggggagtcagctatggacctctcctgctcatcagaggggtccccaggagccacatcccctttcccagtgagcgccagcacccctaagattggggctatcagttcacttcagggagcccttggcatggacttgtctgggattctgcaagctggcctgatccatcctgtgactggacagattgtcaatggaagcctcagaagagatgatgcagccacgaggaggcggagagggaggcggaaacatgttgaaggagggatggacctcatctttttgaaggagcagacacttcaggcgggaatcttggaagtccatgaagacccagggcaggccaccttgagcaccacacaccctgaggggccagggcctgccacctcggctcctgagccagctacggcagccagcagccaagccgagaaatccattcccagcaagagtctgcttgactggctaaggcagcaggctgactactccttagaagttcctggctttggggcaaatttttcagacaaaccaaagcagaggaggccacgctgtaaagaacctggaaaattagatgtcagctccctgagcggggaagagagagttcctgccatccccaaggagccaggactgagggggtttcttccagaaaacaagttcaatcacactctggctgagcctattcttcgagatacgggcccccgcaggagggggaggcggcctcggagcgaactcctgaaggctccttccattgtggcagactctccctctggaatggggccactgttcatgaatggactgattgctgggatggacctggtaagacttcagaacatgagaaatatgccaggcatccccctcaccgggctggtggggtttccagctggctttgccacgatgccaacagtgaagaggtcaaaagtaccctgagcatgctgcccatgatgctgccaggcatggctgctgtgccccagatgtttggtgttgggggactcctcagtccacccatgg

SEQ ID NO: 242003 - DNA, 972 bp, Homo Sapiens
cctaaccagtcccccagttccccagccgtgctgtgacttccatttcccatcgtcctttctgaaggaacagctccttgaaaccagtctccctggggtgagacaacctgggctcttcttaggaaatggctctccctccccctgtcccccaccctcatggcccacctccaacccactttcctcagtatctggagagggaagggaagtcaggcttgggcacgggaggttagaactcccccaggccctgccattgggttgtctgtctccgtcatggggagggtccctgctcagttctggagacactggagttagggtgggggtggttctgcattcccttctcctgctgatagcagtcagcttgaggaggatgaaggaaggcagcctcagacaggaattaaggcaatgcccaggcgggcctgggcactgtattctgagcaagggcctgggcccaggagccagccagggatgagtgccatcatggctctccactcagactgtgcctggcccctgcacttacaacttcctgctgctctgtggccttgccctgtaatcactcagtgcccttagctagcctgactaagtcccagatcccctacagcttccttcggtgtggtatcttttgccacatccagggcgagggttgaggcaaaccagccctccctctgacttccttgtcactgcagccagctttgctgcacttgctggtgcacaggagcctcctgtttgggcctgggtctgggcatggggaggccgtgcctcaaagcccaccctaccccatgccttggtgctgtgcctcaggctccttcctggtctggcccagctggcttccccagcccctcagccatccagggctacccactgcttactcagggaccaggcagcccccatggcagtaaaagcagcctagacagaacctgcagctctgtggaaagaggcaaagtcctgaaaaggcaaagggttgtcacttagggcagc

SEQ ID NO: 242004 - DNA, 805 bp, Homo Sapiens
ttggcgagaggtgtcacggctgggagatgagagctgcaccgcgcgggacaagtcgccggcggcgcccgacggagcagaacagagagcatggagctggagaggatcgtcagtgcagccctccttgcctttgtccagacacacctcccggaggccgacctcagtggcttggatgaggtcatcttctcctatgtgcttggggtcctggaggacctgggcccctcgggcccatcagaggagaacttcgatatggaggctttcactgagatgatggaggcctatgtgcctggcttcgcccacatccccaggggcacaataggggacatgatgcagaagctctcagggcagctgagcgatgccaggaacaaagagaacctgcaaccgcagagctctggtgtccaaggtcaggtgcccatctccccagagcccctgcagcggcccgaaatgctcaaagaagagactaggtcttcggctgctgctgctgcagacacccaagatgaggcaactggcgctgaggaggagcttctgccaggggtggatgtactcctggaggtgttccctacctgttcggtggagcaggcccagtgggtgctggccaaagctcggggggacttggaagaagctgtgcagatgctggtagagggaaaggaagaggggcctgcagcctgggagggccccaaccaggacctgcccagacgcctcagaggcccccaaaaggatgagctgaagtccttcatcctgcagaagtacatgatggtggatagcgcagagggatcagaaacattcaccggcccatggctcccaagga

SEQ ID NO: 242005 - DNA, 1134 bp, Homo Sapiens
attgatgagcaatgcttttccataaaaaccaactttgtacaaaaaagttggctgaaaattcccctaggatttcagccattatggtggagaacacatttttaagcataccacatatggccagcactttattttcattctttccgatgcgttaccttcctttatggtgctacaaaaataaatttttgtcctacagaaaaatctctcagtgtagaatgccttcacttttcatctctggactctcagatcaattaattccaccagtaatgatgaaacaactttatgaactctccccatctcggactaagagattagccatttttccagatgggactcacaatgacacatggcagtgccaaggctatttcactgcacttgaacagttcatcaaagaagtcgtaaagagccattctcctgaagaaatggcaaaaacttcatctaatgtaacaattatataatgtttccctttttgattattgcattgtattttaatttgtgcagaatgataaagaatgttccttttagaagtgtgttatgtctgtacctgtctgaagagtgacattaaactttgaaaggacttcactgctcctttacgatattccaaatagttttttacattggaaaaactaattcttgggattctttcatacattttcatcaaaactttcagtgtgattatgtattcatatcttcagtttaatatgtcagtataatagatattgttcaaaagtttcttgttgctaaagtggtgtaatctgttacacagatgaatagctagatgtggaaagagatatgtaaacaagaaacctttgggtattgtttcttaagtaaatattgggacaatcatggtaagcaaacttagttctgtaactgcatttttcaccttaaaagttaaatgaaatgcatgatggtattttattccttgaattatgcaatgcaacattttacatgtaaatagcactggtcatatactgatgtatatggttatctgggttatatctatttttatgtaaactctattttgtttttggcaagaagtgaaattgagacttatgtgcaggttgccattgaattttgctctggtgaatgctgagatccagctttttcttacaaataaatgggaccctgttttccaat

SEQ ID NO: 242006 - DNA, 854 bp, Homo Sapiens
ttggcactgtgtgagaatctggactccctggatgagcctgaggcccgggctgccatgatctggattgtgggcgagtacgcggaacggatcgacaacgcagatgagctgctggagagcttcctcgagggcttccatgacgagagcacacaggtccagctgcagctgctgacagccattgtgaaactctttctaaagaagccaacagagacccaggagctggtgcagcaggtcctcagtttggccactcaggactcagataacccagacctgcgggaccgtggctacatctactggcgcctgctgtccacggacccggtggcagccaaggaggtggtgttggctgagaagccactcatctctgaagagacggacctcatcgagcccacactgttagacgagcttatctgctacatcggcacgctggcttccgtctaccataagcctcccagtgcctttgtggaggggggccggggcgtcgtgcacaagagcctgccacctcgcacggcctcgagtgagagcgcagagagccctgagacagcccctactggagcacctcctggggagcagccagatgtcatccccgcccagggcgacctgctgggtgacctcctcaacctggacctcggccccccagtgagcggcccacccctggccacctcctcggtgcagatgggagctgtggaccttcttggcggtggccttgacagcctgattgggggcaccaacttcgtggcacctccaacagcagcagtaccagccaatcttggagcacccatcggcagtggcctgagtgacctctttgacctgaccagtggcgtgggcaccctgtcaggatcatatgtggcccccaaagc

SEQ ID NO: 242007 - DNA, 549 bp, Homo Sapiens
aaatattttaattaaggtttatttcaatagcaaaaatgacttcaagattttgcatgaattattttttaaacaaaactatatgaaaaatatgtacaaatcagtcatcaatgtcattgacatttttatgaacaagtttcaaatgaaaaatatcccatcataacaaaggtacataaataaataaatgctgacaatactggccctaaagtctaacacaactgttagactaatcaggataccgctttctactacgtgaggagcacataatcaatgtttccagcaaaaggcaagtactggtttgtgtaggtttatttaggccagttgacagccacattattttgaggtgtggctacttgtttctcttcatagtgttgaatggcacagtgcaaggcattgggcaccagaagcatgagcataggcagagccatttccaccatgctgacggcaggcaagaagaagacaaaaatgaacccctttcatgcttgtttagaaatgtgacggctaggcgcagtggctcacgcctgtaatgaagtgtttttaaattaaggccaa

SEQ ID NO: 242008 - DNA, 757 bp, Homo Sapiens
ttgggttgtacggcggcttctcgcgcagctgatgacctggaagtgatgcctaaagctgtggccgcgtgggctcgcctccctgggactaggtttcagcggccgctgcgatgaccaaaataaaggcagatcccgacgggcccgaggctcaggcggaggcgtgttccggggagcgcacctaccaggagctgctggtcaaccagaaccccatcgcgcagcccctggcttctcgccgcctcacgcggaagctctacaaatgcatcaagaaagcggtgaagcagaagcagattcggcgcggggtgaaagaggttcagaaatttgtcaacaaaggagaaaaagggatcatggttttggcaggagacacactgcccattgaggtatactgccatctcccagtcatgtgtgaggaccgaaatttgccctatgtctatatcccctctaagacggacctgggtgcagccgcaggctccaagcgccccacctgtgtgataatggtcaagccccatgaggagtaccaggaggcttacgatgagtgcctggaggaggtgcagtccctgcccctacccctatgaggggctccggtagcacctgggcacctgccgctggaagctattgggctggcagcaggacgactggctgtcctcttgcccacccacactgacggcatcttcccagttcccaaggcatgccttcttccaggcatctctaacagccctttcatgaaggtaatgctagtcttctgtccctcagtgccctttcc

SEQ ID NO: 242009 - DNA, 1363 bp, Homo Sapiens
tggagttttccataaaattgagaactactaagaatagccaggagcgtcttggtctcttcatagccccagggcacacctgttgccagcgagacgtgactgtccttcctctgggtggcacccctgtagagggccctttgtgcagggcctgggcacatccattcttgctgacagagggatacagctctgttgtcacgcatggctggtccctgtaacaacactggagctgctgctaccgataaaatagcaccactctagcctgttgtccaggagctctctgtacatcctcaaccagagccacagcttcctcgccgttttctggatgctgctccctcacccaggtctggatgtcctctggcaagatagtcagaaactgctccaaaaccagcagctccaggatttcctcttttgagtgggtcttcggcctcagccactgacaacagagttcccagagtttgctaaaagcttcatgtgggccagttacctcctggtagcaaaactgcctgaagcgctgacgggaggcctcggagtcagggctgttaccctggagggctgatttctggccctgtgtgggatccttgtttgaggatgggtgtgcctcggtactcttcactgcagccatcatttgcttcaacgaactggcttactctggttgccacttctaccctggagatcagagtccatctttcccacatcactgggaagccatgttctcctgcaaggaatgtctttctgtaatccgtgggacatgagagtgtcagacatgtgtagagactcacagcggaaaaaaagggctcaactttgaaggatgtctgaagaggatggaaaaagacaatataaacctatcaaacattccttcactctggttcttgtgatttacttcctatccctttcctttactccctccacaaatctacaccaaggatccaaaacactagaaatagatctagaccatcctggctaactgcctttgcaaaaaccattaacagtgagaagattatgacactaaaagagataggatctaaccaactccatcttgcttttaacctccaaactgccgttggtcattcctgggtgtgggccaagctagctttgggagaaatttagtttatagtttgaatgataataacccttcccaaaactaaactgcctttgtaaaactaattaaagacaactaggttaggaggatgagaggggcctgaattctgctaagatgcaggcataatgaaatgattatccagaggtcacaagatttgcaacttccccaattaaataacatcacgattgtagaacctaagattggccttttgagatgccttttcaggcctctgctttctgacaaccagatggctccacctagacccaa

SEQ ID NO: 242010 - DNA, 723 bp, Homo Sapiens
agaaaaacaagttttctatttatttaaaaataagtttgtagttactacattgcagggacaggtattcttacacatacattctagtttgtataaaaggattcaaagaattatgcatcaaaactaacatagaaagtgtccacgtaacagtaaagaaaggtccaatcagtatgtacaaaaagaaagggcactgctattctggtgtgaaactgctgtttataatatgatactccaggttcggaaggaaaaaaacaaacttcaataaagctaaataattaatttgttttaaaactctgtgttacttattacatacaacagatctgcttgtgtttaaacattgttttctgtacaaaataagcataatcttaatttgaaaatgtgtcagtttcaactttcaccctctaggtcagttactttttaaaaattgagctacattctacacatgtctaaatatcctgtgacaggatttaagttttctaaaagatcttcagtaagacccctgtcttcttgcagttttaatatggtccaaaaatgtaactttgtattgtctcatgttatagtctatcattgtgactaatcaacacacacaatcttaaagtaaccagcatgtgtgcatctgccttatatgcatgtactatattccatcttgaacctattttcttggctccttgaattgtagaaactcagccatgcaggtaagtatttggccaacttttttgtacaaag

SEQ ID NO: 242011 - DNA, 1043 bp, Homo Sapiens
caaaaagaaaagggcactgctattctgtgtgaaactgctgtttataatatgatactccaggttcggaaggaaaaaaacaaacttcaataaagctaaataattaatttgttttaaaactctgtgttacttattacatacaacagatctgcttgtgtttaaacattgttttctgtacaaaataagcataatcttaatttgaaaatgtgtcagtttcaactttcaccctctaggtcagttactttttaaaaattgagctacattctacacatgtctaaatatcctgtgacaggatttaagttttctaaaagatcttcagtaagacccctgtcttcttgcagttttaatatggtccaaaaatgtaactttgtattgtctcatgttatagtctatcattgtgactaatcaacacacacaatcttaaagtaaccagcatgtgtgcatctgccttatatgcatgtactatattccatcttgaacctattttcttggctccttgaattgtagaaactcagccatgcactaagtatttggtctgtgccataaggttaatttcctgataatttttatctgcattaaaaaagtatttcaacacagagctatcaaaactaaaaataatatctatttatagctcatattttctactcactgttctactgcagtgtgtacaaggtttatctctggagcgccaaaagtggtacttacagtcttctgactcaatttgaccttttcttgggtactatacatagttcgtaatgacttttcatttggagcaaactttgctcagtataattaacaaaaatagtttcttagtaaatgtaatattaattttagttcagatcacttggaaattaggggaactaagggaaactgcaagggtagaagcaaagaaaagtgtatttttcaaattttaatgggaaaataaattcttgcctaagtgtaacaaaaccactgctcaatctgttatgttagaaatactttttaggttaataggagttacatgattttaaaagtcataataggggaagtggttttaaaatcaccaa

SEQ ID NO: 242012 - DNA, 1506 bp, Homo Sapiens
gggcaagtggagagaaacgcagactcaaaagcagtccatataacagctcaaaaagagccagccggggatattatcacaatgatacagtacaaatcaaagcaaaaatcaaaatcattcggctgataacagcaggctacgctgccaagaacccagatggcagccttcttgcggccatccgcacgggcctcctcacccaccatctctcccgtgcgcccactcgcttccctctcgctcactcgcacgcactctctcgctaggaaacacggaaggtattttgtgtttggagctagtaaccttggtcaaacgattcctccgaagagtcgctgaaggaggaacgcgcctcggcctctcgaagcagcagacaaaacggctgcttcctgctggtggccggcttgggtttcagagtccggggggccgccaggcccctcttggtcagcttggggccaccagctgccttgctgttctttgccaccatgctacacaggagggaaggcgtcagtttggagctggaggggccttgggcgggccactcgtccttcaggaattcttcgtcttcctctgagtccgtatctgcagtcaaagtagtttttaatagagataagtcacagggcagcaggagctggtgtcattttattggttttaatggttctgagaacgtactggaaggtgccagaacaaacaggtccgaatacctagtaggcggccgtacaaaggccttgccccatgtcaccagctcccctcccagtccaggcttctcccttgccctgggtgcctcggtcattgcatggcatcttccgagtgctggacccaggcccttcctagactggatgctgccagcctcacccaccagtcactccaggctttccgggcaccggaggatgagagaagccctatgctcaggaaggtcacggtggtcactgcctgtcccatgggattacgatggcccaagggtgacaaccgcagaggacctgactcaggagggaaagggctcatgacagccaatcatgcattctcttcccagtgcccctcccagcagcctcccagtggcagcacgaaacaggccacagtaagggtgtttacaccatgggaatgggcaaacgctgttaccgctagcagatcccttgcccttctttctacgagccagtgagccggcccaccactgctggcttccccagagtctccagcctaactatacaacggaggacaagagtcttcaaatcttccggggagacaaccagccagctttgggaggggagcctgccaggcaggcaacgctccggcccccgccatgctcacgccattttgatctgcttttcttactgggcaagatgggaagacaggggttccagagacagagaataatcccctgatctgctgaaatccactccagacggggggaacgtgaaccaacacagctacagctctggcagcacctgccacctccgagtccaagagaaaccacatgcacgcatccgtggcgggcattcctctgccaacttttttgta

SEQ ID NO: 242013 - DNA, 2118 bp, Homo Sapiens
  misc_feature (1146)..(1194): n is a, c, g, or t
ccaagttcataattttattatactctgaatagagatgatatttaaggagcagagaaaatgactatacaaaagatttatagaacattcatttacatactggatatattctttacagtatcagaaaagtaaaaatatgcactaacaaggcagagaagacgttacaaggtatttgatgctgagaataaatgcacagtgacttttaacatggctatagcttaacacgggaggaatacaacaatacgttcttttactgagtagttagtaggaccctggctataacatgcgttgggcacagttcgtgaactctccgcatttactccccagggcagtacgtgcctgtccagcgggagccctggagacaaaatgcctggaaacgttccttttcctgtggccctagagccggtgtccacggtgggggctctctcacggtttctgagcccacagtacaatctgtgatgacacacagcttgttctgtttaatgcacatgtaacacaaaaggaagaaagaaacttcctataccagctcttcagaaatcgtggaaacttgcttcctttggttcctcagagggagctatctgcttggagcaaattccccgatgcccttgaccacgtttaccttgtgtaaaaatcacacctggccaatgagttcaaaaagcacgtttgcagggcttcctgaatgccgtcgaggcatggcttcatgagggccatcgcgggcaccccgatgtctctgtgattccctggcaggctgcgtttctcaatactgagaccctagtttgctctgacttctaaatgagctctctcatccttcatcagaaggataaggaacctggcctgcactctttgggttaaacatgggtagagaccgtctcaggatgaggacctcttggggaaagtacaaacctctgctccctgtggccacattcctgcagtggatgaaaaaccgagatgctagaggcctctgctaaagacatcagggtcaacacatgaggatctgctgaaaatgccagcacctcctgacagtcatgccaccgcaagttagagaaggaggtccacaacgaccaaggcaaacatttggcacagaaatgaggcacttggtttggtgcatcaataggagctaaaaagtggaatggtccacctgctttcacnnnnnnnnnnnnnnnnnnnnnnnnnnnnnnnnnnnnnnnnnnnnnnnnntgtgatttggctgcttccaactctgcctgtttctaagttttcctcggcccctcactttaaagcagagttcacaaagcacattcccaaaccccagctccctgacaggagcttgtgacaccagtgtggcctaagaatgggggatttgacttttgaaagcagaggagggaatttcgggctggatcgcaatcaggacagtcagcatgcctgcagagcacctaggctgtgagaggatggggccaaggccttattctgatgtggcccagctccatctttcactctggggatgttccagggtcacaaattcccccaaacctttgaccacgaacagattcaagcaggaaaaccagggcattggaatgttgaaataagcctgaaatacacttgattcagtggcttagatgatggcaaacagtggcactcaaaaacagcttgtcagtaccggggtttcttctctttttcctcatcctcccttctgctcacacatgccacaaccacacatggtccccagcaggaaccccaaggtggcaaggagcagcacaaagagggctgataaatgcaggcgaacttcaggtcgtgcagcttcaggcctgaagatgatcgaaaagcccatgtgggggatgctgagcttaaatccaggcgttttccatccctcctggactctctccatcagaaaagaagtcatccacaatcggggaaaaacattccaatgagtaaaacatcagggtaggttgcttgaggcaaagccacctttgggcggcaccgcatatgggagacccacagtccactgcacactctttcagtggccaggggcctgcggtgcatcctacatagggacaagcctcacaaaatcacagcttggcaggctgcagcatttgacactggtacagtatagccaatggcaaattatcataaataatttgccaa

SEQ ID NO: 242014 - DNA, 1073 bp, Homo Sapiens
ccaactttgtacaaaaaagttggatttaaatctaatttataatttttattttaagcagcaaatgaaacaaaaatggccagttttaagattgtgttgcctgtaacacaaaatgttacgaaggtttaggaaagcctctttgatttttgtttggccttgcattgccttggtaaagtaaaaggaaacagtacacttggagctaggaaaccaaagcaagctttgtgaaactggcacagtgatagagaattgctgtggagagttatagagcaaagggatgggtccttgaggcctgccagtgtgtaaaggtgttcaaataaagggctgtttctacaggtaacattaaatgtgaactcaacacttccagagtctttaaagggtttctatgtgtatcagtgtaatagtgttttaccaccaactgcctttctttgttcctagttactgtaacaaatatttgatgatagaggtttattaattttgtttatccagaccattaattttatttgtttttgttctatgtaatcaaataaaatttgagtaacatgtaatggtaaggattaatgcatggttatttggaccagaaaaaagtgccatagaagaccaataactgtttagttgaggctagtctggaacctttcattagagcaatatttggttattgcacttcatttttatttactaagaaatgcaatttgggaatttttaatctgttatgctttgtttatcaaccttgattttaattaagacttttataagactagcttaaaacaccaaccaacattatttttgcaaaagtgagttggactcactttccattcttgctagtcagagtaagtaggcagcacttttaaaaatatgtgaactcaaatattgcacttctttcaagatgttatcaattggttattgtactgtatagttttaataattttgattgaaaccctttaacaactctttgtaaattttaactcattttagttgattttcagtactatttacataggaattgatttttatggatatagtagaagaaatgtgctgtattttgataaaattcacttattgtatgtgtgttgtaatct

SEQ ID NO: 242015 - DNA, 767 bp, Homo Sapiens
ttgggacaaaagcaagaacgcacgaagccagcctggagaccaccacgtcctgccccccgccatttatcgccctgattggattttgtttttcatctgtccctgttgcttgggttgagttgagggtggagcctcctggggggcactggccactgagcccccttggagaagtcagaggggagtggagaaggccactgtccggcctggcttctggggacagtggctggtccccagaagtcctgagggcggaggggggggttgggcagggtctcctcaggtgtcaggagggtgctcggaggccacaggagggggctcctggctggcctgaggctggccggaggggaaggggctagcaggtgtgtaaacagagggttccatcaggctggggcagggtggccgccttccgcacacttgaggaaccctcccctctccctcggtgacatcttgcccgcccctcagcaccctgccttgtctccaggaggtccgaagctctgtgggacctcttgggggcaaggtggggtgaggccggggagtagggaggtcaggcgggtctgagcccacagagcaggagagctgccaggtctgcccatcgaccaggttgcttgggccccggagcccacgggtctggtgatgccatagcagccaccaccgcggcgcctagggctgcggcagggactcggcctctgggaggtttacctcgcccccacttgtgcccccgactcagccaccctgcaagcagcccgactagcagtctagaggcctgaggcttc

SEQ ID NO: 242016 - DNA, 1665 bp, Homo Sapiens
  misc_feature (393)..(415): n is a, c, g, or t
ttggatttataccttattacataactttaaaacccatttacattataaagtaaaatactattactttttactttataaagtatttttacttaattaaaaaggaacaaatgtgtattattcttggaaaatttattttatctttccatttgtcattttctgtttatgctccataaagtttttatgacttacaatcataacatttttagagtggaagtctatgtaaaatatatcatttttgttattcttcttcagaatgaaggattaaactgaagattaaaagaaaatttccacgaagttttgattatgacagcattgtggagcacgtactgggtttgaagctgctttagtattaccttcaatgaatcctgagaaatgcagtgataatgcttagcnnnnnnnnnnnnnnnnnnnnnnnttctttttctttttatattttagataagagtgcccaggagtggaatctggaaatagagtctacatttgatgttgtcagctcaaagccagttggtggtcaagtgatcgtagccatccctaagttgcaaacacaacagacatacagcattgaacttcaacctgggaaaaggattgttgagctatttgtgaacattagcaagaatattactgtagaaacttggtggcctcatggacatggaaaccagactgggtacaacatgactgttctttttgaactggatggaggcttaaatattgaaaaatcagctaaggtttattttacgacagtggaacttatagaagagcctataaaagggtctcctggtttgagtttctatttcaaaattaatggatttcccatatttctaaaagctcaaactggatcccagcagattcattccaggaccgagtaacctctgagttgttacggctccttttacagtctgttgtggatgctaatatgaatactcttcgggtttggggaggaggaatttatgagcaggatgaattctatgaactctgtgatgaactaggaataatggtatggcaggattttatgtttgcctgtgccctttatccaactgatcagggcttcctggattcagtgacagcagaagttgcctaccagatcaagagactgaaatctcatccttctatcatcatatggagtggcaataatgaaaatgaggaggcgctgatgatgaattggtatcatatcagtttcactgaccggccaatctacatcaaggactatgtgacactctatgtgaaaaacatcagagagctcgtactggcaggagacaagagtcgtccttttattacgtccagtcctacaaatggggctgaaactgttgcagaagcctgggtctctcaaaaccctaatagcaattattttggtgatgtacatttttatgactatatcagtgattgctggaactggaaagttttcccaaaagctcgatttgcatctgaatatggatatcagtcctggccgtccttcagtacattagaaaaggtctcgtctacagaggactggtctttcaatagcaagttttcacttcatcgacaacatcacgaaggtggtaacaaacaaatgctttatcaggctggacttcatttcaaactcccccaaagcacagatccattacgcacattttaagataccatctaccttactcaggtgatgcatgcccagtgtgtcaaaacaaaaaa

SEQ ID NO: 242017 - DNA, 2120 bp, Homo Sapiens
  misc_feature (913)..(973): n is a, c, g, or t
  misc_feature (1245)..(1264): n is a, c, g, or t
  misc_feature (1288)..(1526): n is a, c, g, or t
  misc_feature (1556)..(1574): n is a, c, g, or t
  misc_feature (1668)..(1682): n is a, c, g, or t
  misc_feature (1786)..(1829): n is a, c, g, or t
ttggcgtctctcaagccactttagccagtgtagccccagtatttactgtgacaaaatttgacaaacagggaaacgttacttcttttgaaaggaagaaaactgaattataccaagagttaggtcttcaagccagagatttgagatttcagcatgtaatgagtatcacagtcagaaacaataggattatcatgagaatggagtatttgaaagctgtgataactccagagtgtcttctgatattagattatcgtaatttaaacttagagcaatggctgttccgggaactcccttcacagttgtctggagagggtcaactcgttacataccctttaccttttgagtttagagctatagaagcactcctgcaatattggatcaacacccttcaggggaaacttagcattttgcagccactgatccttgagaccttggatgctttggtggaccccaaacattcttctgtagacagaagcaaactgcacattttactacagaatggcaaaagtctatcagagttagaaacagatattaaaattttcaaagagtcaattttggagatcttggatgaggaagagttgctagaagagctctgtgtatcaaaatggagtgacccacaagtctttgaaaagagcagtgctgggattgaccatgcagaagagatggagttgctgttggaaaactactaccgattggctgacgatctctccaatgcagctcgtgagcttagggtgctgattgatgattcacaaagtattattttcattaatctggacagccaccgaaacgtgatgatgaggttgaatctacagctgaccatgggaaccttctctctttcgctctttggactaatgggagttgcttttggaatgaatttggaatcttcccttgaagaggtgagaatgtattattattnnnnnnnnnnnnnnnnnnnnnnnnnnnnnnnnnnnnnnnnnnnnnnnnnnnnnnnnnnnnnagtgtgagccaccacgcccggcctctttttgattttaaaggagtttttacttctgtgtttctaaagctaatactcccagctcctagctacccttacccacctcctgtggaatatcaccttcacatgttttggcatgtttgctatcactctttctgtttctcctcagaatatatcttttgtctctcctgccatttctagttacatgccgtctcttgggtctcttttccaagaggtttgtatcctctactttcattttctatttactcctttcnnnnnnnnnnnnnnnnnnnngaaatggggtcttgctgtgtcatnnnnnnnnnnnnnnnnnnnnnnnnnnnnnnnnnnnnnnnnnnnnnnnnnnnnnnnnnnnnnnnnnnnnnnnnnnnnnnnnnnnnnnnnnnnnnnnnnnnnnnnnnnnnnnnnnnnnnnnnnnnnnnnnnnnnnnnnnnnnnnnnnnnnnnnnnnnnnnnnnnnnnnnnnnnnnnnnnnnnnnnnnnnnnnnnnnnnnnnnnnnnnnnnnnnnnnnnnnnnnnnnnnnnnnnnnnnnnnntgagccactgcgcccggcccactcatttcnnnnnnnnnnnnnnnnnnnctcaacagttttaatttcatcaggtcatttaaaaaacggatgcatataaacacaaaaagagttcaaattttgacttcctgctggcagaaacatnnnnnnnnnnnnnnngagttcaaatttgtatgtttaaaaaatggatccataatagttgaacatatttatagagtacaagtgagattttgatacatgcatacaatatgtatagagctcannnnnnnnnnnnnnnnnnnnnnnnnnnnnnnnnnnnnnnnnnnngttgatgtattaactaggatattttcagctacatgtgacaagaaatccaactactaatgtagcttaaataatgaggacattagtaatctcacatcacaagagttcagaaatagggctgtttgaaaactggtgaagtgttcagtgatgacattcaagacccaagctcttttcatcttttaacacaaccattcttggtatattggttttcatccacagccttatcttctcatggttgcaagaatggctgtcataactccaggcatcacacttcatacaactatgtcgaggatg

SEQ ID NO: 242018 - DNA, 695 bp, Homo Sapiens
ctttgtacaaaaaagttggtaaaggagataccctcgattatacattcctttaaaaaataaacggaagttacattgttaatgttcatattatgatgccacttttctaaactgcatctggattgaaaggtgtaaatatcaataacagtgctacttagttatcagtatttaatatctgaggtgagttgggggtatctatattaggggtagggtattacagaagataattggcttgatgtcctagaagttctttgatccagaggtgggtgcagctgaaagtaaacagaatggattgccagttacatgtatgcctgcccagttccccttttatttgcagaagctgtgagttttgttcacaattaggttcctaggagcaaaacctcaaggattgatttattgttttcaactccaaggcacactgttaataaacgagcacggggttttctctcttcctttttaatatatggagtttcgaagaataaaatatgagagcaatatttaaattttcaggaaatgacttatacttttgagaaagaattcagtttcaatcaagtttaccttatgttgcttaaaaaaatagaaaatattctttatcttgcaaagaattgaaaccacctgaaatgacttatgggggatggtgagctgtgaatgctttgctgaccatttttgatgtccttgtaaataaaggtttttttttt

SEQ ID NO: 242019 - DNA, 800 bp, Homo Sapiens
agtttttgtttttaagagctgataagactagtagcagactcctccctagaaaagtaaacaacctttagaactagctctaagaccaagtcccatctcaagctaaaccccccatacctcccattaataacccacccatccccccaccatttggggaagtctattactttgagccattattttaaggaaatgggtcaaaggaagataaataaaagggcaaaaatttatattcacagtacaaataatgtgctcacttccttcaactgggagccatcaatagggtgtcaatttaaaacaattcatctccagaaaaaccaagttcagcttaactggactagttttggctcaatatattaagaaaaatgtttaacagaaaactggactttaagtaactatatggatgtaagtaaaatctgttcttacctacccgcatagcaataaaacctttcctcctggttctgactgctagtcctaagagtcaggtgtgccttactcttgtctgcctccttccttgcgatgatcactgatatttcactccctcctagctttcatggagcgtgccgtggcctgcccctggcttatctgtactccacataccacaagtgtctactctcagctgtagagtgtctgagctcggagccattcgcgctatacttgctagcagttcctagtagctgaacatctctcctggatctttaaaggcattgtcacgaatcctgaggtatctgcaaactccctcaatagttagggttccacctgctattgcaaactcagccagtatcatggaacttttttgtacaaag

SEQ ID NO: 242020 - DNA, 889 bp, Homo Sapiens
ttctcgctgaatggaggcattggggcaatatggagggaatgaggtgcttccaagggcagagtggggcagaggaaatagcaccagtctaaggggcaggaaacctgggctctcaaacaagctctgccactagtttgccatgagacttgggaaaggcatttaacctctctggcctgttgttctagatcagtgatcacacattcagacatcaatggggttagtaaatgagcgaagcaagcaagctgttcccaaggcacttgggtatgatagggactatggtaaactggaaagcacaaaaggcagggctaggcagatccaactgaggcaggccctgcagaaatgcaggtccagtgtggccagatcctctgatcttttgaaagaagccaagaatttcaattattgtgttaaatttccaaaattgaagacactgtgcaaacatgcctgggagcactaatttgcaacccctggcctaacaaatagacaaggcctctttttcttctgctagtcagtggtcagtggttacctggcctctgaccctgaagccagaacagagatccttaataaccctcccttgcctcccagaactccaagctggaggccgcggtggcccagtctgagcagcagggtgaggcggccctcagtgatgcccgctgcaagctggccgagctggagggtgccctgcagaaggccaagcaggacatggcctgcctgatcagggagtaccaggaggtgatgaactccaagctggcctggactttgagatcgccacctacaggcgcctgctggagggcgaggagcagaggtgaggaccacagctgtggggagggtgtcccctcagtttcccccaggcagtgctgcagtgcttcaacacccaggagcatgtctgcaccaa

SEQ ID NO: 242021 - DNA, 947 bp, Homo Sapiens
tttgtacaaaaaagttgggtcgcatggctcagacacctccgtggttgtcaagctggacaacagccgggacctgaacatggactgcatcattgccgagattaaggcacagtatgacgacattgtcacccgcagccgggccgaggccgagtcctggtaccgcagcaagtgtgaggagatgaaggccacggtgatcaggcacggggagaccctgcgccgcaccaaggaggagatcaacgagctgaaccgcatgatccaaaggctgacggccgaggtggagaatgccaagtgccagaactccaagctggaggccgcggtggcccagtctgagcagcagggtgaggcggccctcagtgatgcccgctgcaagctggccgagctggagggcgccctgcagaaggccaagcaggacatggcctgcctgatcagggagtaccaggaggtgatgaactccaagctgggcctggacatcgagatcgccacctacaggcgcctgctggagggcgaggagcagaggctatgtgaaggcattggggctgtgaatgtctgtgtcagcagctcccggggcggggtcgtgtgcggggacctctgcgtgtcaggctcccggccagtgactggcagtgtctgcagcgctccgtgcaacgggaacgtggcggtgagcaccggcctgtgtgcgccctgcggccaattgaacaccacctgcggagggggttcctgcggcgtgggctcctgtggtatcagctccctgggtgtggggtcttgcggcagcagctgccggaaatgttaggcaccccaactcaagtcccaggccccaggcatctttcctgccctgccttgcttggcccatccagtccaggcgcctggagcaagtgctcagctacttctcctgcactttgaaaagaccccttcccactcctggactcacatttctctgtgtgatcccccacttc

SEQ ID NO: 242022 - DNA, 1930 bp, Homo Sapiens
  misc_feature (414)..(443): n is a, c, g, or t
  misc_feature (907)..(943): n is a, c, g, or t
  misc_feature (1400)..(1422): n is a, c, g, or t
ttgggtcagaaactgtcttttgaaatatttctttacaacctaccaaaaaaggaaggttgttttttctacatgtgcttgggtatctaacatctaccattaaaacaacaaatggcttgcagacagggcagtaatggtttatcctaaattactcaaccccttgtagccttgacaaattttaccttaaaaccaaaatgaaacacaaaaattaatccttaataatgatagcaagtgatctttctttttagttttagccttcctttttcaatagtaatatttaaacccacttttgaccaattgtttgcccaaatattcttgtcatttggagtcagtggaaaatccagcacaccaagcaccagtcttcttctgaggcaaaagaaaagtgttgtcattttcactctgttggagctgcacacnnnnnnnnnnnnnnnnnnnnnnnnnnnnnngtcgtgtaagaaggatgctggtcagagctgcagaaaatatgaggcaattaaaagtctttagctgttagcaaacctgttagttttacttctgcattgaaccagcctcagaagctacttactgctttatgtactctttgggcattaatgccttctctgtaattatatctcgtttttgcttgacagtgacctacccagtaattgcatcgtgcattgccatgaaaggtaaacacattgtgaactgaacttaccaagcagattctgtgagaaagcactggttgaggctgaacactgttgacacatcatttttattggaagagtattaactggtgcctcttctgaaacacaccaacccatattcctctgctcccccaaagctgtttctgatcctgctgggagcaactaactagttattatgcacatctgctccagacccagctctttaacttcatggttttacagcttgnnnnnnnnnnnnnnnnnnnnnnnnnnnnnnnnnnnnnaaaaaagcacctttttttgttgtttccccttaataaaagaggtttctaatttatgtttctctaagatttcctttggttgtatttagaaacacaaatagttttataatcaggattgcatttgtgctgggtaaaagaggagagctgtgctttctaccccaaagttgttggtaatggagccggtctgcccttcctacaaactcaagaggctcattgttcaaggtgtaacaacatttaattgcatgtcctctaacgctttgaaacctttagagggaagatcctcattttttacaattttgttccttttcatcatagaaaacatgtttaagataaaatacaaactttacctaccccaaattcataaagtacatttagtgctgtatagcactaaaacttagagatacagacactgtacttactttttaagaattatagacagtaactccaaaaataattgtcnnnnnnnnnnnnnnnnnnnnnnnacaataaggctcttgaaaattgtcattacttgtgttttcctatacattcatctgtgtgaaagcctttttcttctttgatttaaaaaaattaactatacagttaatggtttagaacttagaactacttagaattaatgctaaagtgtcaggaagaaattaatttagcttcaataattgtgactggcctcaggaattctcccttccacacctgcccacctcacctcactgcaccgcaccgcaccagagccagagcagctgcttgtctgcagcggacacagttcctacatacgtttcagttctttcatggtaagctcaatggactttgaattgtttacagtgctgtatgtccaattgtttaatgtaccattctgaacgatgttaaagcaagtgtggtttatttatggcatgaccatgtaacttgaaatatgaacttacacggagggggcactcattagtaacagttcttacaccaaacttccttgatgaaataagccaaataatcctaaaa

SEQ ID NO: 242023 - DNA, 1572 bp, Homo Sapiens
  misc_feature (609)..(657): n is a, c, g, or t
  misc_feature (972)..(1017): n is a, c, g, or t
  misc_feature (1340)..(1355): n is a, c, g, or t
ttggcagcaattctgtggtacatgcagagaccaaattgcaaaactatggggagctggggccaggaaccactggggccagcagctcaggagcaggccttcactgggggggcccaactcagtcttctgcttatggaaaactctatcgggggcctacaagagtcccaccaagagggggaagagggagaggagttccttactaacccagagacttcagtgtcctgaaagattcctttcctatccatccttccatccagttctctgaatctttaatgaaatcatttgccagagcgaggtaatcatctgcatttggctactgcaaagctgtccgttgtattccttgctcacttgctactagcaggcgacttacgaaataatgatgttggcaccagttccccctggatgggctatagccagaacatttacttcaactctaccttagtagatacaagtagagaatatggagaggatcattacattgaaaagtaaatgttttattagttcattgcctgcacttactgatcggaagagagaaagaacagtttcagtattgagatggctcaggagaggctctttgatttttaaagttttggggtgggggattgtgtgtgnnnnnnnnnnnnnnnnnnnnnnnnnnnnnnnnnnnnnnnnnnnnnnnnnaaagagaatagtgttcacaaaatttgagctgctctttggcttttgctataagggaaacagagtggcctggctgatttgaataaatgtttctttcctctccaccatctcacattttgcttttaagtgaacactttttccccattgagcatcttgaacatactttttttccaaataaattactcatccttaaagtttactccactttgacaaaagatacgcccttctccctgcacataaagcaggttgtagaacgtggcattcttgggcaagtaggtagactttacccagtctctttccttttttgctgatgtgtgnnnnnnnnnnnnnnnnnnnnnnnnnnnnnnnnnnnnnnnnnnnnnngtctgtctcgcttgctcgctctcgctgtttctctctctttgaggcatttgtttggaaaaaatcgttgagatgcccaagaacctgggataattctttactttttttgaaataaaggaaaggaaattcagactcttacattgttctctgtaactcttcaattctaaaatgttttgttttttaaaccatgttctgatggggaagttgatttgtaagtgtggacagcttggacattgctgctgagctgtggttagagatgatgcctccattcctagagggctaataacagcatttagcatattgtttacacatatatttttatgtcnnnnnnnnnnnnnnnncctttcaaacagagcattgtgatattgtcaaagagaaaaacaaatcctgaagatacatggaaatgtaacctagtttacagtgggtatttttctgaagatacatcatacctgaccttttttaaaaaataattttaaacagcatactgtgaggaagaacagtattgacatacccacatcccagcatgtgtaccctgccagttcttttagggatttttcc

SEQ ID NO: 242024 - DNA, 675 bp, Homo Sapiens
tcacagttaagtattgtcatttatgtatctttaacaaaagataaaatacaaaacggacacaacatcagcctttatgttgaaccaccctgtttaggtaggaaaatgaacattgtttttcattcttaaagtaaataggaattaaatctatttgcattgctgtttaatttcataccaatctaaagctcgacactatgtatatccaaagtacttgacaatttgactcagttactcacaccactgtttctgagatgctgacttaatgcagtatcctacaggtggtttttggtagtttagaaaagccagtgagtgggctgttaaaagttgatatactgatgtcagaggttttgttaggctgttttcactgattctactgtcagtattatcttcacagtgttctgagaagaggcttcaggatcatggcaatctattactaatatccctagaagctatccttataattctttcaataaaccaacttcaggttttgtttttttgcaaattttacaaacaaagtaacagctgctggctataaatattaggatattctacaatttaaaaaatctaatattcatgattgttacataggggcaatcacaatgaaaacaaacggtaatgtaaaccatatcctctatgataaaggaaaggatttctacacctagacttatgtcctgccaa

SEQ ID NO: 242025 - DNA, 2129 bp, Homo Sapiens
ggaaaactgcaatacaaatctacatacggtgggtcatagaaaacaggttagtgatggatcagtatacagccagatcagtgctattttataagtgggtacctgatgagttctgatacagtaactagtggtcacagaatctggacataaaacataagagagcttctatagtctgaaattcccaaataaaagtagtcaagttacttaactgggagcttgaggatgcttcttacacacaatgctgtttagagtagaccccaactgatttagcgtcatctgtagacacgtttcccccaccccacgtgtacgtgagtggacacacacaggcaccaggctaaatcagcagggatggcagaaccacctgcatggaaccaccatgaagtctccttaaagctcccataagctttcacatcttgacacccagtccagtggggccccaacctcccctgaaggagatggagtatcagaaggagggcatcgacctgaagaagcaggctgaccaaatgcagtgaccgtatgggtggggcgtggggagggctgtacagttaattagctcctgaagacaagttagtccaacctcaaagcacaggaagttgcacagcaggtgggggaaaacccagctactcacagttgtccacaaggggttagtggcctgaggtggtccttaggcaggagccacctgtcccacccattcacttgtcctgcctggccctagccctgaacaactgcaatgcagcacctctggaagtggcacattttatttcttttctaaacgctgagttgtcagggataaattttcaatagaaaaatctttcccacctgctgataatactttggtttttttgttttcctaaagataaagcctggagtcagcaaaatttgcttgcatgataagctagttgctttggaacaaacagaaggttgctgggtatttcttggagtagaattttgtagcctgccagactgagtttctcactggcatcaaacacacacttcatcataagggcggcaaagcccaagaattgaaacccacttgactggaaataccaggacccgaaggtggagagccaccctggaggaccacgtggtctgcaatgagctctccagtcacccccgacaactctcaggagttaacttcatgggacggcaggggagtgggagacagggatgttaatacttttcagaaattaagacattaaataagcagaaaataaatatacaatatttctacaagttacagcattatgaaacagtaggacacatcacacagaaaaagaatctacaatatttacaatccttgattttgaaaaagttgagaaaaacagtgatttttttacttatttatgctgtacaaaattttacaaggtaaaggaaacacaattgcacacagacatttggctcagttgataagtaatatgacctacgaatctaataaatactcacaatatatacattaagaaggggaaacggcagacaattgtattccactatatttttttaatcagaaggaattttaaacttgatttctccgcaacccccacccccaaaattcttgatcaactaaccagttgggaagggcatctgaagcatcactcatgaaactattttgtgtgtgtttattgcgtttctgtgttaagtcacaggacactttttacaaacctcacatagggagaggttgtcaaggcacaaaacctgcagtaagtttccaaaaaggggatttaattattttttctacaaaaatgttttttaaaaaaggtaaaaacgtatacccacgggaggcatactttctgcacagaggcatcttgataaccagatacatacagtacagagacatccagtcatcgctttaagttctggtgccaacagcctggtctttaatactcctacaattcatagaatctctaatttcctcaggaactgtttccacagccagcctggaggccgccaggccagagggaaatgtgctcatgtggtgcacacagcccctgggcagcacagggcagggcctcccgtgcctggcccagggctgcacccagtgtgtgctcccaggggctgcagggctgaggaaacagagtaaagtgctctagtcaggagactggcacgtgagtacagggatcctgggagggggccaa

SEQ ID NO: 242026 - DNA, 1324 bp, Homo Sapiens
  misc_feature (872)..(881): n is a, c, g, or t
aagtaaaaacccaagtttaccttctggtaagaagaatatcgaacactaagccaatttgcttgaggacatttgcctgttggcaaatttaagcttcaaatctgaaacatcaaaggcaaggggtttagaaatcaaggctcaagatcccatgtaaggtggcacatagaccagaaaactctctctgcattaagttagacctcaaagagctatacctagaatgaaacctgccgtcctcatttcccacccaccccaaggacttccatgaaggttgtctggacactaagaggagcagaggaggaaagaaaagagaaatggcaaaggagggaaacatctgtctaaaaatctttggccacagcctggccctcattaggatttactgaccaggttctcatcaccttgattgattgcggaatttcaagctaagattttggttgaaatgatcccaagatcctcggcaaaagcaaatgcaaattattcctaaaagttatcttcatttaagcctccaggactctccaaataattttgcaagggcagtaagaaagataaccaagcatacaaggaaacaaagcaacatgggcaaaaacatgcataattacaggacaactgaaacagacctactaagacttcagatattagaattatcagacacaaattataaaactacacttgcgtatttaaaaaattaaatggcatgattgaaaatatctccagggataggaaactacaaaaaaaatggaaaagtaatttgagaaagagtcaaatgaaatttctagaaatgaaaacacaatgactgaaatttaaaactcaatgtattgcatttgcagcagatcagacccagaaaatgacagaactagtgaactggagggcagataagnnnnnnnnnntgactcagagagtagcctaggaaccagcatgcatgaaatggtgagaaaatctaatatatgtttactcttgagttccagaaggacagaagaaagaatatttgtggaagcaaactcatattttatcaatggtaacttacaaacttttttaacatctctgaaatcaagacacatctcaaaactgacagtttcttataattactgttggccaggcagcaatcataatgtatttgtgctattcatgttatcctcacttcagctgacttatgtacattattggtagtaaataagttgagtttaattgttgcttaaaatgtcttccaatactatgattcagcattgagaagttgttgcgatatgtattgcacttccaaaaagtttgttaaaagtgtatatacaaaggcccacagtctgacattagtgaagaaaatacttgtaattgccaa

SEQ ID NO: 242027 - DNA, 1033 bp, Homo Sapiens
  misc_feature (140)..(180): n is a, c, g, or t
ttggacagcaccagcgtcatttcggggccccgcacggatgagctcggccgctcttcttcgggctccgcgttctcgccctacgctggctcgactgccttcacggcgccctcgccgggctacaactcgcacctccagtacgnnnnnnnnnnnnnnnnnnnnnnnnnnnnnnnnnnnnnnnnntacgtgggggctccctacgaccacacacccggcatggcgggctccttggggtaccatccttacgcggcgcccctgggatcgtacccttacggggacccagcgtaccggaagaacgccacaagggacgccacggctaccctcaaggcctggctcaacgagcaccgcaagaacccctaccccaccaagggcgagaagatcatgctggccatcatcaccaagatgaccctcacccaggtgtccacctggttcgccaacgcgcgccggcgcctcaagaaagagaataaaatgacgtggacgccgcggaaccgcagcgaggacgaggaagaggaggagaacattgacctggagaagaacgacgaggacgagccccagaagcccgaggacaagggcgaccccgagggccccgaagcaggaggagctgagcagaaggcggcttcgggctgcgaacggcttcagggaccacccacccctgcaggcaaggagacggagggcagcctcagcgactcggattttaaggagacgccctcggagggccgcctcgacgcgctgcagggccccccccgcaccggcgggccctccccggctgggccagcggcggcgcggctggcggaggacccggcccctcactaccccgccggagcgccggcgcccggcccgcatccagccgcgggcgaggtgcctccgggtcccggcgggccctcggttatccattcgcccgcctccgccgccgcctcctgcggtgctcgccaagcccaaactgtggtctttggcagagatcgccacatcgtcggacaaggtcaagggacggggggcggcgggaacgaggggctctccatgcccaccgtgtcccggg

SEQ ID NO: 242028 - DNA, 1378 bp, Homo Sapiens
cagattcttctccagccaaccatgtcccgccactcagaagtggtttcatgcttctactgataagccaacttaacatcagatccaatacttattttttaaagataaaataccatctctactggacctgtttagtggctcaggctgccctcacaggacatccctgagaccaccctgtcactcttgatgttggaaccagggcccaggcctgctcctcattgtctcctgccctcctagtccccaggagaggaaaagaaatactgttttagagaaataacattttcaacaaaacatccctggagtcagattttgagttggggtgggctaatcagggagtcggggctctctgcgtgatgtcagttctatggctaactggtttttctaaaccagccagctgcctatcaaaacagtacaacttttctaggaaatgcaattggcaaagacacttacgatgctgagaagtacacaaggtgaaactgctccagtttttctcatagcagggtcagcaggaaagcaagtggtgcccctggtcccatctcacacaggtgagactgcaccgagaggtaacgtggccctcacagcccaccacgcctggccttcgcccaattctgaaacttcgtaggatagagctggaaagtgccacatggtgaagcgagatccagctgtctgggtggatgtcggagtccataggctgagcagagatggttcttagtgaggttctcgctgccagttgacggtgaaatcatagctgccatttacattttgtgagattatgaaaaacataagactaaagaaactaaatgtgttattcctgtggacacaaaaatgtgtgtttttcagatggggaggggaccaaaaaggaaaaacatttcatcttaaaactttcctaagacaaaggaaaacaaaaaaccatgctctacaacttcaaatttttcttacaaagaaaaatttaatattcgatgagaggttgaaccaggcttaaagcagacatactaggaaatggtgcagcctgtaagaatgccagtttgtaagtactgactttggaaaagatcatcgcctctatcagacacttagggtcctggtctggcaattttggcctgatgtgatgccacaagacccaacagagagagacacagagtccaggataatgttgacagtggtgtagccctttaggagaaatggcgctccctgcggctggtattaggttaccattggcaccgaaggaaccaggaggataagaatatccataatttcagagctgccctgggcacagtacctgccccgtcggagctctcactggcaaatgacagctctgtgcaacgagcactcccaagtataaaaattattacacagttttattctgagaacattttgcatttta

SEQ ID NO: 242029 - DNA, 1457 bp, Homo Sapiens
ttatgaaaatgcaaattgtaactgaaataagataaaactacaattcaaagagaaagctaaaatttcaacccccaaaaaattctgggttttggagagctgggatggaatagggctcctaactttacaacaatgaaagaacccaactaacttcaaagtcatgactttatttttatagcaaccaggttgccaagaactgagtcaaaatgtgagggaaaacaagcacttgcaaggagaaagaggacagatgcacttacataggacagatgcaaatagacaccagtatgacaagtaaagctggaataatcattaaattcctgaagacaaagtggggccggtcagattgggagaccgctgacagctgcagaagttgggaaagatccatcatcttgaaaactttttccccaaaacccactgtgatctctcaagcaattggtaaggaatccaagagagtctgtatatgatacagatcagggagagcagaacacttgggaggtgaccaggtcttgggggccgagcccttatgaatgggattagtgcctttataaaagaagctcaatggagttcttgtgtgccttccactatgtgaggatgtagaaagaacgccccatctatgaaccacgaaatgggctctcatcaacactgaatttgtgagcatcttgacctgagatcttacagcctcaagaagtgtgaaaaaagaaatatctattgttttttagtcacccagttcatgttatttttttataagagtccaaatagaccaagatattccacttaacatgtaggggaaggcaacaaaaactgccacacttagaatactcctgatgctgggagtatgaaaacaggaaaaacaaaactgctcttgaaggtgaaggaggaataccactgagctcaccaacacagccaggaaaagaacagaagtgtgagaaggctacattcctgggaccctgagaaaaagcacctgcataacactgagatgaaattacctaccctagttacaactgaaattccaaaaagaaaagaggaaaaaataacggagcaaaagaaatatttttcaaaataactgccaaaaatattctaaaagaagtgacagaaaatcaaacttcagatataggaaactcagagaatgtcaaatagaacaaaaataaataagaattacatcttgaaaaatctttaaaaaatcaagtctaaattttacatcttgctccaaatatatagagatataaataggttatcatcaagatatggagaatgccatatcatggaaacactaaaataaagctgtggaaagactacattgatattagacacaacagagttcagaacaagaaatagtatcagagatgagagataatagataatacaataatcaattctcaagaagttgtaaacatcctactaattagggtatgcagctaacaacagaacctccaaatacatgaggcaaaacaggaagccaa

SEQ ID NO: 242030 - DNA, 1060 bp, Homo Sapiens
ctataaaaaccaactttgtacaaaaaagttggccacttttgaagagtcttcagagcactttccacattttagtgaaccaggtgatgactttggagaatttggggatataaatgctgtttcttgccaagaggagacaatattaacaaagtcagacctaaaacagacttctgataatttatcagaagaatgtcagttggcaagaaaatctagtggaacaggcactgaacctgttgcaaaacttaaaaatgggcaagaaggtgagattggacattttgattctgtgccaaatattcaggatgactgcaatggttttcaagactctgatgattttgcagacttcagttcagctggtcctagccaagttgtagattggaatgcttttgaggatgaacaaaaagatagttgttcttgggctgcttttggagaccagcaggctactgaatctcatcatcgaaaggaagcctggcagtcacataggacagatgaaaatattgatactccaggaacccccaaaacgcacagtgtaccttcagcaacttccaaaggagcagttgctagtggccatttacaggaatcagccacttcagttcagacagctttattaaaccgcctggagcgaattttcgaagcatgttttccttccatacttgtccctgatgctgaagaggaagttacttccctgaagcacttgctggaaacaagcactttgccaataaaaacgagagaggccttacctgaaagtggggaattgctagatgtgtggactgagctacaggatatccatgatgcacatggcttgagataccagtggggcggctcccatagcaacaagaagcttttgtcctccttgggaatagacacccgaaacattctcttcacgggcaataagaagcagcctgttatagtgcccatgtatgcagcaggattgggtatgttagagcccaccaaggaaccactgaaaccctttctgctgcagaaaaaatagcttccatcggtcagacagccaccatgtcaccagatatgaacacatgtacatctgatcagttccaggagtctctac

SEQ ID NO: 242031 - DNA, 1897 bp, Homo Sapiens
ttgggctttgtgaactttgctcttgggtccgtggtggcagtcaccaaggcatctgggggcctaccacagtttggcgatgagtatgatttttaccgaagttttcctggcttccaagcattttgcgaaacacagggagacaggttgcttcagtgcatgagcagagtaatgcagtaccatgggtgtcgcagcaacattaaggatcgaagtaaagtgactgagctggaagacaagtttgatttactagttgatgccaatgatgtaattctggagagagtgggtattttactggatgaagcctcaggtgtaaacaagaatcaacagcctgtcctccctgccggcttgcaggtccccaaaacggtagtgtccagctggaaccgtaaggcagcagaatatggcaaaaaagcaaaatctgaaactttccggctgcttcatgcaaaaaatatcatccgacctcagctcaagtttcgagagaagattgacaattccaacacaccatttcttcctaaaatcttcatcaaacccaatgctcagaaacctctccctcaagctctctctaaggaaaggcgggaacgcccacaggatcgtcctgaggacttggacgtcccccctgcactggctgatttcatccatcagcagagaacccagcaggttgagcaagacatgtttgcacatccttatcaatatgaactaaatcactttaccccagcagatgcagtgcttcaaaagccacaaccccagttatacagacctatagaagagacaccatgccatttcatatcctccctggatgaactcgtggaactcaacgaaaagctcttgaattgtcaggaatttgcagttgacttggagcaccactcttacaggagcttcctgggactgacctgcctgatgcaaatttctactcggacggaagacttcatcattgacaccctcgagcttcgaagtgacatgtacattctcaatgagagcctcacagacccagccatcgttaaggtctttcatggtgctgattcagacatagaatggctacagaaagactttgggttgtatgtagtaaacatgtttgatactcatcaggcagcacgccttcttaacctgggcaggcactcactcgatcatctcctgaaactctactgcaacgtggactcaaacaagcaatatcagctggctgattggagaatacgccctctgcccgaggagatgctcagctacgcccgggatgacacccattacctgctatatatctatgacaaaatgaggctggagatgtgggagcgcggcaacgggcagcccgtgcagctgcaggtggtgtggcaacggagcagggacatctgcctcaagaaattcatcaaacctatcttcacggatgagtcctaccttgaactctataggaagcagaagaagcaccttaacacacagcagttgacagcctttcagctgctgtttgcctggagggataaaacagctcgcagggaagatgaaagttacggatatgtactgccaaaccacatgatgctgaaaatagctgaagaactgcctaaggaacctcagggcatcatagcttgctgcaacccagtaccgccccttgtgcggcagcagatcaacgaaatgcaccttttaatccagcaggcccgagagatgcctctgctcaagtctgaagttgcagccggagtgaagaagagcggaccgctgcccagtgctgagagattggagaatgttctctttggacctcacgactgctcccatgcctctccggatggctatccaatcatcccaaccagtggatctgtgccagttcagaagcatgcgagcctcttctctgatgaaaaagaagataacttgctgggtaccacatgcctgattgccacagctgtcatcacgttatttaatgaaccta

SEQ ID NO: 242032 - DNA, 923 bp, Homo Sapiens
ttggcatcagctgagaattgcagctgagggctccggggtaggtgggtgacggcggtcggaggtgtaggagggagccgtggaggtccaggtgactgcttagaaaactgcacagcatctgatgaaattagcgaataagaacatcaaccatgtcttacactccaggagttggtggtgaccccgcccagttggcccagaggatctcttctaacatccagaagatcacacagtgttctgtggaaatacaaagaactctgaatcaacttggaacacctcaagattcacctgaattgaggcaacagttgcaacagaagcagcagtatactaaccagcttgccaaagaaacagataagtacattaaagagtttggatctctgcccaccacccccagtgaacagcgtcaaaggaaaatacagaaggatcgcttagtggcagagttcacaacatcactgacaaacttccagaaggtccagaggcaggctgctgagcgagagaaagagtttgttgctcgagtaagagccagttccagagtgtctggcagttttcctgaggacagctcaaaagaaaggaatcttgtatcctgggaaagccaaactcaacctcaagtgcaggtgcaggatgaagaaattacagaggatgacctccgtcttattcatgagagagaatcttctatcaggcaacttgaagctgatattatggatattaatgaaatatttaaagatttgggaatgatgattcatgaacaaggagatgtaatagatagcatagaagccaatgtggaaaatgcagaggtgcacgttcagcaagcaaatcagcagctgtcaagggcagcagattatcagcgcaaatccagaaaaaccctgtgcatcatcattcttatccttgtcattggagttgcgattatcagtctcatcatatggggattg

SEQ ID NO: 242033 - DNA, 932 bp, Homo Sapiens
gagacatcttgttccacaatcaccccactatttgcttaagcaacctcttcttccccctaccccacacagttcaaatataaactttatctcatgcccctctaaatcacaacatacatcaaattcgtgaaatatgagttgattactttttccacattgctatagatgttggattgctgacagaactatctcttcaacctgagcattctcatcaagtatactaagtctaaatcagtgaaatatgcctgttcacaatctgagtacaaagacaccaaaacatgagcttttatcatctgaattactaattttccagggttgaatattaaaaacacatatttacttgggcacatttatgaagagtagaagtagctgaattctttaggctgcaataattaagtgggtttacactggtcaggattgaattactaaatttaaacaactgaactgttccaggaaagacaagaaacactgaaacatcctaacagcaaaacagctttttgcactgagcgtgaccattcagtctgattaggctgatgggaatggtgcaaagactactcagtaatccatttgaggatttattctgaaaaaagtttactttcctagagcaggcatggggaacctttgatcagaaacactgccaaagatggctaatgggcattgtgtcaaaaaagtgaatctgttcttttcatcagacattctgaggacagcataattctcaagtgtcttggttgtctaaaccaagcgaaagcaccagcgtaaccaggtaggagggctgtgtcaagaagacggacctaaagggcttctcccctatcctgacaactgtgtccacaggcaaaggtgacagtatgccctgcccggactgcatcatgagtagcaatctgattctgctcgcttcccaacagagaaaggcaagtggcttcatacaccaaggccaa

SEQ ID NO: 242034 - DNA, 1168 bp, Homo Sapiens
ttgggagcggccgaaggttgaatgcctttgagaacttgatgcataaaatttgcatgactcctcactcctttctggatctctcattggactcaagccagcatggctcacaccacaaaggttaacggcagtgcctcaggtaaccctgtgctctggagtttgtgtgttaaatgaaaagcaggtgatattctcagtggagaccaggacaaggaacagaaagacccttactttgtggagaccccctatggttatcaactagacttagatttcctcaaatatgtggatgacatacagaagggaaataccatcaaaagactgaacatccagaagaggcggaagccgtccgtgccatgcccagaacccaggaccacatctggtcagcaaggtatatggacttccactgaatccctctcatcctccaacagtgatgacaacaagcagtgccccaacttcctcatagccagaagtcaagttacatcaactccaatctcaaagccacctccccctctggagacctcactcccttttcttaccatcccagaaaatcgacagctgccacctccctcaccacaactcccaaagcataaccttcatgtcaccaagacactgatggagacccggagaagactggaacaggagagagccaccatgcagatgacaccgggtgagttcagaaggcccaggctggccagttttggaggcatgggcaccacaagctccctcccttcttttgtgggttctggaaaccacaatcctgccaagcaccagcttcagaatggataccaaggtaatggggattatggtagctatgccccagctgctcccaccacttcctccatggggagctccatccgccacagccccctgagctcagggatctccaccccagtgaccaacgtgagccccatgcacctgcagcacatccgcgagcagatggccattgctctgaaacgcctgaaggagctggaggagcaggtgcgaaccatccctgtgctccaggtaaagatctctgtcttgcaagaagagaaaaggcagttggtctcacagctgaaaaaccaaagggctgcatcccagatcaatgtctgtggtgtgaggaagcggtcctatagtgcggggaacgcctcccagctggaacagctctcccgggcccgaagaagtggcggggaattat

SEQ ID NO: 242035 - DNA, 1749 bp, Homo Sapiens
ttggatccagagcattccagttgttaatgaagaacacagaggtgatttttcctatattggaaatttgatgacaaaagaattcataggtcaacaattgattctaattattaagtctttggataccagtgaagaaggaggaagaaaaaaactgctggctgttttacaggagattcttattttacccacaatcccaatatccctggtttcttttcttgttgaaagactactccacatcattatagatgataataagagaacacaaattgttacagaaattatctcagagattcgggcgcccattgttactgttggtgttaataacgatccagctgatgtaagaaagaaagaactcaagatggctgaaataaaagttaagcttatcgaagccaaagaagctttggaaaattgcattaccttacaggattttaatcgggcatcagaattaaaagaagaaataaaagcattagaagatgccagaataaaccttttgaaagagacagagcaacttgaaattaaagaagtccacatagagaaggagaatgatgctgaaacattgcagaaatgtcttattttatgctatgaactgttgaagcagatgtccatttcaacaggcttaagtgcaaccatgaatggaatcatcgaatctttgattcttcctggaataataagtattcatcctgttgtaagaaacctggctgttttatgcttgggatgctgtggactacagaatcaggattttgcaaggaaacacttcgtattactattgcaggttttgcaaattgatgatgtcacaataaaaataagtgctttaaaggcaatctttgaccaactgatgacgttcgggattgaaccatttaaaactaaaaaaatcaaaacacttcattgtgaaggtacagaaataaacagtgatgatgagcaagaatcaaaagaagttgaagagactgctacagctaagaatgttctgaaactcctttctgatttcttagatagtgaggtatctgaacttaggactggagctgcagaaggactagccaagctgatgttctctgggcttttggtcagcagcaggattctttctcgtcttattttgttatggtacaatcctgtgactgaagaggatgttcaacttcgacattgcctaggcgtgttcttccccgtgtttgcttatgcaagcaggactaatcaggaatgctttgaagaagcttttcttccaaccctgcaaacactggccaatgcccctgcatcttctcctttagctgaaattgatatcacaaatgttgctgagttacttgtagatttgacaagaccaagtggattaaatcctcaggccaagacttcccaagattatcaggccttaacagtacatgacaatttggctatgaaaatttgcaatgagatcttaacaagtccgtgctcgccagaaattcgagtctatacaaaagccttgagttctttagaactcagtagccatcttgcaaaagatcttctggttctattgaatgagattctggagcaagtaaaagataggacatgtctgagagctttggagaaaatcaagattcagttagaaaaaggaaataaagaatttggtgaccaagctgaagcagcacaggatgccaccttgactacaactactttccaaaatgaagatgaaaagaataaagaagtatatatgactccactcaggggtgtaaaagcaacccagcatcaaagtctactcagctaaagactaacagaggacagagaaaa

SEQ ID NO: 242036 - DNA, 959 bp, Homo Sapiens
ttgtgtcctctagagcagtgtggctgtggtcaggggctcccgcctccacaccttgttgatgtcgtccacgctctgcacttggaactcagtcagcttggtacatacagctgcccactgccatctgggcacagccggatctccagtttttcctgaggctctttccctagcaggtccctggaggggcaggtgagacagtcaccccctcctcccatttccagctgctgtttgcactgcacccagccccccagccaggaatgttcccccaacccaggaagccttctccagccatcagctgagtgcatctctcctcctccagctcctccaccgcattcagctgaagacgtggagatctcactccacaatacaatgagcccctgttggcagggcccctagctgcccactctcacccatggccacctggtgtagcccacaggtaggggcaaggattgcctgggtctcagagagagcccctcctccccccagaaccatccaacccactgggctgagtcaggacttgcagccaggtcccttgacggcctcatctggtccctacactcccttcaccttgacggcctcatctggtccctacactcccttcaggaagaccccacttcctatcccccattgctccagcaccacccctgaggatcccaaagctgcccctgaggcctgctccccacatactgggggtcccacctgaggacctcgttccagcaccaccccggaggaccccaaagctgcccctgaggcctgctccgcacaccctggggctcccacctgaggacctcattgtagatctccgcagcgctgacggtgatggtgtactcccagtcagacgccttctcctgcacctcggagaagagcagctgcagggcccgctggttgatacctgggttctcagcggtcccctggggacagaaggaaaggccccagtaagccaggcctgtccccaaagccaa

SEQ ID NO: 242037 - DNA, 990 bp, Homo Sapiens
ttgggacgctttccctgggctctgaaggccagggggcttggatgtgagtctagtgctcctggtccccaaagtcacaaccccttctatcccagcatcccagacttctccgggcggggacagagttggacgtgcatggctgtgtcctgcaatcccctcgccacgaccgcccgggacggagtggaagcgggtccgtgcccccgttcctcgcgccagcctcggcggtggcaagcgctgtcccccagcagaggtgtccctggatacaggatagcaaaacctgatctcataaaacctaggtcacaaaggacagccctgcaaaacagaccctatttggatcaagtgagccagttcctggaacctgaataatgactcctgaatcaagggatactacagatttgtctccagggggtacccaggagatggaaggcatcgtgatagtgaaggtggaggaggaagatgaagaagaccattttcaaaaggaaagaaacaaagtagagtcatcgccacaagttctcagtcgctctacaactatgaatgagagagccttattgtcatcgtatttagttgcatatagagtggcaaaagagaaaatggctcacacagcggctgaaaaaattatccttccagcatgtatggacatggtacggacaatttttgatgacaaatcagctgataaactaagaactatacctcttagtgataatacaatatctcgtcgaatctgtacgattgcaaaacatttggaagcaatgcttattacacggctgcagtccggtatagactttgcaatccaactcgatgagagcactgatattgcaagttgtcccacactcttggtttatgtcagatatgtgtggcaagatgattttgtagaggatctcttatgttgtttaaatttaaattcacatataactggattagatttatttactgaattagaaaactgccttcttggtcagtataaattaaactggaaacattgtaaaggaattt

SEQ ID NO: 242038 - DNA, 1461 bp, Homo Sapiens
tacaaaaaagttggccatcttttaacttgacttgaatagaattggggtttgctagtaaacatgaggggataatgagtgtggctggggggttatagttccttcaactaaaggccatttacttgttatctgtttcaaaagacttacattagtcctacctgtgccagacttgggaaatagaggcagaggacccctctgccctgggagagcgcatagtctggcagaggagataagataatggtgaattcatctccatttatcagtccctcccctgagcctagctccaggctggggccagagattgggcagtgataactgtctctccctgcagcaatgctgtgactgctgtggcctgggcctccgcgtgcgggccgagggccagtcgtgtgagtccaatcctaacctgggctatccctgcaatcatgtcatgctctcctgctgtgagggtgaagagcctctcatagtacctgaggttcgccgacctccagagcccgcagctgcaccacggagagtttcagaggcagagatggcgggccgagaggccctgtcactgggcacagaggccgagctgccgaacagcctgccgggcgatgaccaggatgagtgccttctcctcccgggagagctgtgccagcacctttgcatcaatactgtgggttcttaccactgtgcctgctttcctggcttctcactgcaggacgatggccgcacttgccgcccagagggtcaccctccacagccggaagccccacaggagcctgcactgaagtcagaattttcccaggtggcctctaacaccatcccgctgccactgccgcagcccaatacctgcaaagacaatggaccctgcaagcaggtgtgcagcactgttgggggctcagccatatgctcctgttttcccggctatgccatcatggcggatggcgtgtcctgtgaagacatcaacgagtgtgtgacggacctgcacacgtgcagccggggcgagcactgtgtgaacacactgggctccttccactgctacaaggcactcacctgtgagccaggctatgccctcaaggatggcgagtgcgaagacgtggatgagtgtgcgatgggcacgcacacctgccagccgggcttcttgtgccagaacaccaagggctccttctactgccaggccaggcagcgctgcatggatggcttcctgcaggatcctgaaggcaactgtgtggacatcaacgagtgcacgtcactgtccgagccatgtcggccaggcttcagctgcatcaacacggtgggctcctacacgtgccagaggaacccgctgatctgcgcgcgcggctaccacgccagcgatgatggggccaagtgtgtggacgtgaatgagtgtgagacaggtgtgcaccgctgcggtgagggccaagtgtgccacaacctccctggctcctaccgctgtgactgcaaagccggctttcagcgggatgc

SEQ ID NO: 242039 - DNA, 404 bp, Homo Sapiens
ctttgtacaaaaaagttggttaaagcagcaagcagttagaactgagactctggaactaatgtcacagcatggatataatgcctagaaagtttacaatgaaaatctagttcgtatgattgaacactcacagaaagaacttcagaagactccagtgacccttcatgagaagaacatgtctgcggtagccactggtccaaggagaatgaggaaatatgtagagcagctttgaacctaatcagcagtctgaagtcaagcccagtggattccagccaagcacagcagaaccacagccaatctatagaactatgagaggggaaataaatatttgtggctataagctattgagagtttaaacttgattgataggcagcaaaaactttcaaatcaattgttcttattaaaca

SEQ ID NO: 242040 - DNA, 1180 bp, Homo Sapiens
ttggctcaattcttcccgatggagtgtacgagaggcacatggaccctctgctgctaccaggcgagctcgcgagccccagccaggcccttggagctggggagatcccggcaccttctgagacaccctggctttctccggaccccctgtttctggaacagaggagggtcagagaagcaaagaccgaagaggacggccctgccaacaccgagcagaagctgaagtcctttccagaggaccctcagcacctgggggagtggggccacctggaccctgccgaggagaacctgaagagctaccggaagctgctcctgtgggggtatcagctttcccagcctgacgctgcctccaggctggacactgaggaactccggttggtggaaagagatccacaaggaagcagcctcccagaaggcgggaggcggcaggagagcgctgggtgcgcctgcgaggaggccgcccccgcgggggtgctgcctgagctgcctacggaggcgccccctggggacgcccttgccgatcccccgtcgggcaccactgaggaggaggaagagcagcctgggaaggccccggacccgcaggacccccaggacgcggagtccgactctgccaccggatcgcagaggcagtccgtcatccagcagcctgccccggacaggggcacggcgaaactgggaaccaagaggccgcaccccgaggatggggacgggcagagcctcgagggcgtctctagctccggcgacagcgcagggctggaggccgggcagggccctggggctgacgagccgggcttgtcccgcgggaagccctatgcctgcggcgagtgcggggaggccttcgcgtggctctcgcacctgatggagcaccacagcagccatggcggccggaagcgctacgcctgtcagggctgctggaagaccttccacttcagcctggccctagccgagcaccagaagacccacgagaaggagaaaagctacgcgctggggggcgcccggggcccccaaccgtccacccgcgaagcccaggcgggggctagggcgggcggtccctcagagagcgtggagggcgaggctctctctgcactctctagaggcgcagaggtgagccgctgtgctgtctcgttccggaggggccgctttgcccggccgtgaatcccagacgaggcattgggcctttccac

SEQ ID NO: 242041 - DNA, 1472 bp, Homo Sapiens
  misc_feature (383)..(400): n is a, c, g, or t
ccctcttctaagtgactcgagactggaagtggattcctctggtagtataaaggaagcttagtaaaatgaaaggagttctgaacacatccaggattccatccccacctgtgccacctcaatagtccttgataagattatacataaaaggagataatttgactcatgtggattctgaaagcagacagaaggtcagaaactgctagggcactctttaccaatatatgtgcagatcccaactggtaaatttagcaggcattatataaaggctggcaatctgtatttaataatcatttcagaggattagaatgcatctgatccatggaaaatgcaggaaagccactagattaaatgcttgtcagacattagtggcatatcttgtgttnnnnnnnnnnnnnnnnnnggcctaaatttattatgttttaaaatgattatatacatcagaatattgagacaagataggaaatgttagtttcataggtctatagctatcagtcattgactacctaccattttttttgcctttagaagatcacaatggtaattcacaaagaactgctggcagagatagggtagagaagaaagcgacaaaaagaaaaaagtatttaagtttaaaaatgccaagtttttaagactgttatgaaaatgatatcagtaatgcaggaatcagcaaacatttgcagtaaaggcccagagagtaaaagttttcagctctgcaggccagatagtctctatggaactacttacctctgccattgtagccacagacagtaagtaaataaatgagcatggctccgccattgaaaatttactcacagaaggaaatacaacctggattaggctcacagtctgtagtttgccaagtgttgatataatggggaaaaaagtattgtgataaattatcaacttcaaagtttcagttgctttatcaaaaagtattttttacatatgcaattgtaatgagaacaaactaaaattagtattaaagaggaaaaaattcacacaaaatgtggtaaggagaatttgctttaagactttatccatgcaaacctattttaatcaggtaaatgagacccagctgaccaggatggaaatctttagttaaatgaaaattttctgaaatctctggaaaaaagaataaaattgacagctccacatacttcatagaaaatcagtatgccctacaaaaaccttcagaacaaaacgcgaagggttttcagcatctgtaaaatgagctgagatgctttatcattaatatagttcagaaaaaaactaggtaatctttcttacttcctttttaaaaatctgtgcccatcaagacaaattaaatgcttaaaaagttacaagtaatatttcacacatgtatatacataaacagagtgagaaaggaagagatatttacagaaaaaggtatacttgaaaaataaagctttaaatagtctttctgaatttaatgaatacaagcatcgtgttag

SEQ ID NO: 242042 - DNA, 1452 bp, Homo Sapiens
  misc_feature (307)..(332): n is a, c, g, or t
  misc_feature (1151)..(1236): n is a, c, g, or t
cacgggaagaagcgcgcctctgggggtggcagctacgacggacagggaggatggaggagtgggccaaatgcagttcagaccaactgacgaccctaactgtgtgagcgacaatcacgtgtgagcctcgaatgtgtggggccaacgctgagccgcccactcagtctccgggaagaaaagcctccgggcggccgctaagcctgggccacagttcccagccaccacccacgccgccacaaccacaaccgcagccccagcctctccgctatgagcgaacaaccagaaccatgtcttacaaagaacagactcnnnnnnnnnnnnnnnnnnnnnnnnnnccttaaacattcttacagggatcttaaagaacagaatacatgttaaaaacctcagtaatttatatcaattttaagcggtactttatatacaatggggaaaaaacacatgcatagtccaaatacaatgttgaaaacagcattttcataacaaaaaaccccgaacactaagtgttaataccatgtacatgaattcaagaaggaccaccctttttgtctgttgcacacagtttatttaacaatatgatataagaaatgagttggtattttaccattctatacagtgattgaatcttctcgagtttcgtatttataggaattagagcgcttgcatgatttacactagaattgcttttcctcatttcaagtttcacatagaagaaagaaaagaaggcttcttctctagtaacattagcatggtctaagagtgatcatccctattttttgtctaaaaccagttttatcagagaaacaaagcaacaatttctacatctgcaagacaagtttggcttcagccattatgtatagatagatgtgtgtgggtgtgtacgtgtgtgcacgccggagtcaattcctatcatccagggtaatactgggagacgcccacagagttcactatagaaaaaaatcttcccgaaacatcacaaagttatcgggatacattataagcttgcattatttcaggaatcagttctgaatattatttttcttcttacttttaaacataaatgtttaaagtcttgaaaatacaaataaaaaatatgaatataatgaacttgtttttcccgttaaaaaaaggcatgagtcaccagcaatgacgannnnnnnnnnnnnnnnnnnnnnnnnnnnnnnnnnnnnnnnnnnnnnnnnnnnnnnnnnnnnnnnnnnnnnnnnnnnnnnnnnnnnnaaaccaaagagagagaccagatatttaaatcaactggtttttaacaaaaaaatatattctttgtattgtttctttaaacatcaatccacccttccatggctcggaagtcgcagttccatctaggaataaaaagaacctagatgcctggattttcagtacaaaaggtccaagaacatgaaagggaaaaggtgatgctctcacaatgctacaagccaa

SEQ ID NO: 242043 - DNA, 893 bp, Homo Sapiens
gccaacttttgtacaaaaaagttggcaagatgacctgggccccgagaaacaaaagcgaagatgaggacgaggacgagggcgacgctaccagaagcaaggacgagagtcccgacaaggcgcaggagggcacggagacctcggcagaggacgaagggatcagcctgcacgtggactcgctcacggatcactcgtgctcggccgagtcggacggggagaagcttccgtgccgcgccggggaccccctgtgcgaatcgggctcggagtgcaaggacaagtatgacgacctggaggacgacgaggacgacgacgaggagggcgagcggggcctggcgccgcccaagcccgtgacctcgtcgccgcttaccggcttggaggcgccgctgctgagccccccgcccgaggccgcgccccgcggtggccgcaagacgccccagggcagccggacgtctccgggcgcgccgccccccgccagcaagcccaagctgtggtcgctggccgagatcgccacgtcggacctcaagcagccgagcctgggcccgggctgcgggccaccggggctgcccgcggccgccgcgccggcctcaaccggggcaccgccaggaggctcgccctaccctgcctcgccgctgctgggccgccccctctactacacgtcgcccttctacggcaactacacaaactacgggaacttgaacgcggcgctgcagggccagggtctcctgcggtacaactctgcggccgcggcccccggcgaggccctgcacaccgcgccaaaggcggccagcgacgcgggcaaggcgggcgcgcacccgctcgagtcccactaccggtccccgggcggcggctacgagcccaagaaaggtaggcgggcccgcggccggcggcgcccggga

SEQ ID NO: 242044 - DNA, 1428 bp, Homo Sapiens
actttgtacaaaaaagttggcccttttgtaacaatgagaccttcggccagtatcctcttcaggtaaacggttatcgcaacttagacgagtgtttggaaggggccatggtggagggtgatgttgagcttcttccctccgatcactcggtgaagtatggacaagagcgttggtttacaaagctacctccagtgttgacctttgaactctcaagatttgagtttaatcagtcccttgggcagccagagaaaattcacaataagctggaatttcctcagattatttatatggacaggtacatgtacaggagcaaggagcttattcgaaataagagagagtgtattcgaaagttgaaggaggaaataaaaattctgcagcaaaaattggaaaggtatgtgaaatatggctcaggcccagctcggttcccgctcccggacatgctgaaatatgttattgaatttgctagtacaaaacctgcctcagaaagctgtccacctgaaagtgacacacatatgacattaccactttcttcagtgcactgctcggtttctgaccagacatccaaggaaagtacaagtacagaaagctcttctcaggatgttgaaagtaccttttcttctcctgaagattctttacccaagtctaaaccactgacatcttctcggtcttccatggaaatgccttcacagccagctccacgaacagtcacagatgaggagataaattttgttaagacctgtcttcagagatggaggagtgagattgaacaagatatacaagatttaaagacttgtattgcaagtactactcagactattgaacagatgtactgcgatcctctccttcgtcaggtgccttatcgcttgcatgcagttcttgttcatgaaggacaagcaaatgctggacactattgggcctatatctataatcaaccccgacagagctggctcaagtacaatgacatctctgttactgaatcttcctgggaagaagttgaaagagattcctatggaggcctgagaaatgttagtgcttactgtctgatgtacattaatgacaaactaccctacttcaatgcagaggcagccccaactgaatcagatcaaatgtcagaagtggaagccctatctgtggaactcaagcattacattcaggaggataactggcggtttgagcaggaagtagaggagtgggaagaagagcagtcttgcaaaatctctcaaatggagtcctccaccaactcctcatcacaggactactctacatcacaagagccttcagtagcctcttctcatggggttcgctgcttgtcatctgagcatgctgtgattgtaaaggagcaaactgcccaggctattgcaaacacagcccgtgcctatgagaagagcggtgtagaagcggcactgagtgaggcattccatgaagaatact

SEQ ID NO: 242045 - DNA, 1109 bp, Homo Sapiens
aattatgtgagagcttttcattttgtgtactctgtctcaatgtcttaccctcatgtgtttgtgaaatgagtgaatgatgggtgatgaatgaattggtgacactagtgacacactgaattcacagcacttacactgggccagactgtgtagagaagccagcgtgcatcccagccttgacgaggacatagttcagagacaggctgttaggtttggccggtgcatgcccttctgcctaagccatttaccagccccagacctttccactgctccaagactttattttcatacttccttaaagttactattgcttttttttcctccatgtaacttaggtagaaaaaactggagaaactaaattgttctgacctaatcagttcttaatattgcacctaaaaagatagaaactgcattctgaaaaatcatgcactaaaaattacaagggaaataggtttggaactttgtgacctgtgtagtacaataacaatcctaaatttccagttatttgcacctagaattagtcaatcttttgcagtcaaaattttgggtttttgtttcttcctttgagagacagatccttgaaatcagtcacttctagtagaaagcattttcatcaatattgaaagaatgatacagaggtatctatcagtcagcgcttttttctaattgccaggtgaaatgtcttctcagttttttcatcagtacttgcagcttctcagataacagcaggaatgaggtggttttgaagccactaagccagctactccttgcatttaaagggttttcatcctttttcataagatcttcatatatcccttagggtttctctctaggtgtgtgaacatttgcctctggttgcttcagcacatcagctttctggggagagtcatgttgaaccaatgtgacttcgaattatactggtatcaccccctacttagcagttgccgatggactgatgcacattacagaagcacacacaccttgcagcagaatggattatggttcatgatacgagttacacaagcgttttatttaagaaataaaggattagatttttaattcttttacctagtggtgtttcattttctgcctttgtaaaataaaaacaatga

SEQ ID NO: 242046 - DNA, 657 bp, Homo Sapiens
ttggcccaaccctctcctcagggagccctccccagcccaggcaccccatccagccctccctgcctgggaccaccagtggcagcctcagcagtgtgccaggtgcccctgccccaccagctgcctccaaagccccagtagtccccagccctgtgcttcaaagcccatccgaaggactggggatgggggcaggcccggcctgccctctgcctcccctggctggtggagaggctttccctttccccagccctgagcagggcctggcactgagtggagctggcttccctgggatgcttggggccttgcctctccctctgagtctggggcagcctccaccttctccattgctcaaccacagtttatttggtgtgctgactgggggaggaggacaacctccccctgagcccctgctacccccaccaggaggacctggtcctcccctagccccaggagagcctgaagggccttcgcttttggtggcttccttgcttcctccaccaccctcagaccttcttccacctccttcagcacctcccagcaacctccttgcctctttcctgcccctgttggctctgggccccacagctggggatggggagggatctgcagagggagccgggggtccaagtggggagccattttcaggcttgggagacctgt

SEQ ID NO: 242047 - DNA, 1301 bp, Homo Sapiens
ttggggcccggaccccgacacgtggtagccccaggatgggtgagttcaacgagaagaagacaacatgtggcaccgtttgcctcaagtacctgctgtttacctacaattgctgcttctggctggctggcctggctgtcatggcagtgggcatctggacgctggccctcaagagtgactacatcagcctgctggcctcaggcacctacctggccacagcctacatcctggtggtggcgggcactgtcgtcatggtgactggggtcttgggctgctgcgccaccttcaaggagcgtcggaacctgctgcgcctgtacttcatcctgctcctcatcatctttctgctggagatcatcgctggtatcctcgcctacgcctactaccagcagctgaacacggagctcaaggagaacctgaaggacaccatgaccaagcgctaccaccagccgggccatgaggctgtgaccagcgctgtggaccagctgcagcaggagttccactgctgtggcagcaacaactcacaggactggcgagacagtgagtggatccgctcacaggaggccggtggccgtgtggtcccagacagctgctgcaagacggtggtggctctttgtggacagcgagaccatgcctccaacatctacaaggtggagggcggctgcatcaccaagttggagaccttcatccaggagcacctgagggtcattggggctgtggggatcggcattgcctgtgtgcaggtctttggcatgatcttcacgtgctgcctgtacaggagtctcaagctggagcactactgaccctgccttgggccttgctgctgctgcacccaactactgagctgagaccactgagtaccaggggctgggctccctgatgacacccaccctgtgccatcaccataacctctggggaccccaacctcagaggcagcttcaagtgccttttgctgcgcaccaatgcccagcaggggaggtgaggggggctggcggggcgaagtttggggggtgttttgtggggctccccggacatactctctgcctggtggtcagatgcaggttggaaggggccttgctgagtggcgcaaggccgagcgttcccagcagggggagaaacccttcacaccccaggcccttcaggaactggggctttgccttgcagccacatggccccatcccagttggggaagccaggtgagctctgacccttgggcctgggcctctgcccctcccaacccagccgtcgtctccctcgacagcgcccctgctgtcttccccaccgcagtcaccaccacccgaaatgcc

SEQ ID NO: 242048 - DNA, 343 bp, Homo Sapiens
ttggcacaaaaatcagtgacagtagtttggcaagatcacccaggaataaatcttgggcagagtggggatgattaatatcttcaattatcaaaccacttgagagaaacatctgaggtacaggcaaaacttccataggcaactctgggctggctaccatgttttagaagtcctgggtattttctgcatagtccagaaacagtgctaccaggattttatcacccagcaagctcactaaagccactgaatgtacaccaaaaattatgcaaagtgctaggattacaggtgtgagccactgcatccagccccacttcttatttatttattaatttattttgagacaagt

SEQ ID NO: 242049 - DNA, 1233 bp, Homo Sapiens
cccaacccagctgctcaagccagaaacttggaggcatcttaatcctatctttccccttgactcctccccttcaccaaatctgtggcttttacctcccaaaatttctgtctccattgccacttctccgtcggcgtacccactgtcacatgcctggatcagagaaatagcctcgctactgatctctgcccacattcaatccgcttccaatcaattctccatctgcagctaagacgtgatctctttgaacagtgctacttaaaggatagtctgcaaaccagtgctgtttacacttacccctggtctatgatgagaatggaaactgagagtacacactgaaaaacttacgtaacaattttacagcaattgtatgctgttgaatctaatatgaagaaacatggacttgtattttgtctttataattttattatctttatcagtctctgatggtttagaaataaaatagaaaaatgtccttcaccacagatgatttgagacacactgtcctagtgttctagaatatatatcttatcattacccccaactatcccttattaaactcctcagaagctctccatctaagataaagcatcttctagataattcacaaactcctgaagagcaagggttgtccagttcatctcgcacctttaggactcagcacactgtatgtatcagtgtctaccaaatcaattaatgaacatacaaataaatgacctggcctcctcctgcagccactgtccctcatgaaccctaaactgcagccaaatgactagcagtttctagaacatagcagacttcccccttgacctctgctcttgcctgaaatgccttccacttccacattccttctacctaggtaactttctcaacctttcgagctctcaggcatcatctcctctgggaagtctctctggtttcccaggtttggttacatatttctcctatgcattttaattcaatttaactaaaaaacaaacaaaccaacaactcagggccatgtgcggtggctcagactctttaagttggcaaaatattcagttatggaaagcagaatgctggaggatgaccaaagggataatgagtcctgattcatgttgaccctatgacttactgcaggttgagtgtcccttatccaaaatgcttgggaccagaaatgttttgaatttcatatttcttttggattttggaatatttgcattatacttactagctgagcatctataattgcaccaa

SEQ ID NO: 242050 - DNA, 913 bp, Homo Sapiens
aaatgtatacacacaaacacatatgtatacccagactgtgttatgatcatcaagtgaatgctatcctgtgtttccttactttcagaagtgaacctgacttgtatgtacccttggtaaaaaaatattgcaactagggcaaatttgggaattgttactcctagctaagtaaatcttccttcccaatggacaataagatcctgaatcaatgcagggatgcaggtcaattcatgaaacatttataaagaacctagtttatgtctgtcactggctggcaaatactggattcagatccaattttagactctgtggggttggctaagagtagagccaaacaagaactccaagattggtactaaaatagattcaaattcttagcaggtgcagactggaatagagcctctcataaccgatctggtctagaattataccttatggggtagaaagcataaggcaattcacctggacattttctatggatttttaggtaataccaacctaatcggtaagggtaagggatggaagagagagggtacaaagtctgatggagatatgtaatatcagaattaatctacagcgtgagtgtactgaaacaagcttatgtttcctttagaatgcagaaattctatacgatgaggttactaacatccttaaagatagtatggattaatgaggggcttctaaaaactaataccagaaaacaaaggaaccaacaacatcctgactagcatggcccctaaaacttgtagtagagaactgctgcatactatgttctacgctactccattttctcaaatttaaccttgaaagaacaccacaggagatgaaaagaaaggttaaccaagaggtttatcttgaaagatatatagtaactcaaaagaaagaaagtcagaaaataattgcaatatagtaaatc

SEQ ID NO: 242051 - DNA, 1155 bp, Homo Sapiens
ttgggttgttgtccggccgggggaggcggaggtcgctcgctcgctcgctcggctcgctgactcgccggagcgctctgtggcggtcggcggcaggtcggtcgcgagagcgggctctgtggaagggggcgaggctatgtcgcggtggcagcccggatgggccggcagggccgggagtaacgggacgtcgccgcggagcttcttcccccggatacagtgcggcccgagcggaggccgcggcgccgccctccgatcttgaagagcccgcgctgcgcggagcccgcccccgcctgcgcaccggcaccgacgcggagcgaccagcccagccagacccggcccggcgcggcctgatctaacccagccaggcaggcaatactagcccctctggagcacggagctccttccccaaagacatgaagctattggagaactcgagctttgaagccatcaactcacagctgactgtggagaccggagatgcccacatcattggcaggattgagagctactcatgtaagatggcaggagacgacaaacacatgttcaagcagttctgccaggagggccagccccacgtgctggaggcactttctccaccccagacttcaggactgagccccagcagactcagcaaaagccaaggcggtgaggaggagggccccctcagtgacaagtgcagccgcaagaccctcttctacctgattgccacgctcaatgagtccttcaggcctgactatgacttcagcacagcccgcagccatgagttcagccgggagcccagccttagctgggtggtgaatgcagtcaactgcagtctgttctcagctgtgcgggaggacttcaaggatctgaaaccacagctgtggaacgcggtggacgaggagatctgcctggctgaatgtgacatctacaggtgggccggcatccctgcagatggcctccaggcctccaggtttgtggggcacttggcgcctcacaccacctgtcaccctatactccccagctataacccagacttgggactcagatcccttcggggaggatggtagcctctggtccttcaactacttcttctacaacaagcggctcaagcgaatcgtcttctttagctgccgttccatcagtgggctccacctacacacccctcagaggcaggca

SEQ ID NO: 242052 - DNA, 2018 bp, Homo Sapiens
  misc_feature (462)..(529): n is a, c, g, or t
  misc_feature (1025)..(1035): n is a, c, g, or t
accctgcctacagggataggatgaaaagcaaggcccagctgacagcatccaggggagagtgaactgccaccacaccagaggtgcaaatgtgactcagcacttcatgagttctactctcaccatgggatttctcagcagaagcaaacttgcagtcaggctcacttgtagccaacaaatgatatagccatctggatttggcataggaaccttttgttctcaccataccaggtctatgttcttgaacataggcagtacctgagatgatagtataacactaccctgttccccacattttttgcttttctttaggaaataattaagtccttatcataggcacttttaacctgtttaagataatgaagcaaacaaatgaaaagtactgagatgagtttaagaaagaatatgctaactgaaaaggatactgggtgcgtacatttaccatggtttagtctaaatattagnnnnnnnnnnnnnnnnnnnnnnnnnnnnnnnnnnnnnnnnnnnnnnnnnnnnnnnnnnnnnnnnnnnncccttttggaactctccaagaccatctccgaatctaggtaaatagtcttaaaatttcgggggagctaggtttggaaacaaaaatggtttttggagacaggaaaagagatggtctgaaactggactcacttcagtttggaaaggaatagcctaggtgccaagaccagacccaggaaggggtgagcatttcaagcccagttatggtctaagtctaaggcatgaagagaggtaaaagtctaggtgctggaaaagcaagctgtgtgcttcaaaggaagaatgcctgtgtcaaagctgcagttacaaaaccccaggacaaggcaggcaggcggtgtctgcacctacatcaccgtcagagagacaggcagaggtcaatcacctgactattctcctccaggtacttttattacctttgggggacccaagggaaaggaatggagttaccgcttcaccaagaccctccagtaggcacctcttgcctggtccagacaggcaacttnnnnnnnnnnngggagggctgaggagtggggtggggtgataaaggagattggagggggagcaggaaagacacgcagtggcacatctccctgatgataaccaatgcttcaggattgcctataagggcatattagaaggcttttgataatctcaaacactgagttttgctgcctgacatatcaatacaggtttagccaaagagctcacatcttgcttttgattttcaggtagaacaaatgtttacattagtatacagaatgtgcaatgcaagcaggcagcattggtatgagaaccttaactgaatgcattccttggctttgggatcttatttattttttactctataaactcaactctataataagagaagagtttcatttgtattttaagttcccacagaccaaacgacaaaaatagaatctacatttagagtaggatctgctaccaataccaataagattttattggaatatggaatgtaaacaaatgtttcaaacaaacatctaaccttataaaaatgtatggcattattaaatagttaataaagaaatcttaaagggtgatgtggtagacacctctagttctagcctaggtgtgtgaagtccccacagctgtggcatggccctgcagctggggtgaggggactgcctacaaaccatgttgctcctgagtccccaaaatgaaatcagccctatttttgtttaaacaaactctagctttctctgctaacatgaaggtttgcaaaatggatccaacacttgctccgggagcaccattttcttccccaagccccttgtatattcctctgagttgcttgagtttcaaatgaccctgcccacacaactctagtacctgcatgcaagacagacttatctttgccatcacataaatgtatcacatatcagaacttacaaatgcatattaccctgattacagtgggaaactgtgtctcatggggataaaaggaggtgggagagagatatttttttccccaa

SEQ ID NO: 242053 - DNA, 519 bp, Homo Sapiens
tttgtacaaaaaagttggcctcactgtttctgaaataagcaaaatatccatgtttcctctgagaaatctgttgtggactgaaagcgctgctggctgtgaaatttaataaagtgtgtatgctttgctagaaaattatttcttggacaataggaacagtcattgatctgtaaatcctggctcttaacagtgagtggccaaggacttgatcagcccatttcttggtccctcagtgctttaaaatttaagtagcactgcattttgtaatgttgaatatgactctagtgacttgtaggaggcacttgtgaggagatgcttgcttcagtgtaaaagatgctcatggcctgagtcagttgagttttctttcaagaaaccacttcagagtgaaatatccagggtttccccgccctggacatgtccagcctgcccaggcagcacacagccctgtaagtccacctcgtgtgggtgagatttcctcctgcgtgatgacctcatcgccatctctgctgtctcattccacag

SEQ ID NO: 242054 - DNA, 1577 bp, Homo Sapiens
ttttacagcactccatctaaataagacaaatatccctttaatatacatgcagaaaaaataaacatgtatatatatggtgacttaacttacacacagacatttaactctggaagactttctttagtaatacgacatatcgccatcaacaaatacaacttagaatactgagtacattatgccagttaccatcagattgttaaaaataaaaggcaagactataacctgtgtaggaatagggagagttatgacactgagtgttatgaaatatacatttccattttctccagtttctataaaataaagctagtccattgtctatgatatgaataacatcatatcctgaaaaatatttaagttatttccttttgacattttatgttgattaaaaagtgccttttaccaggaaatgctcagtattcatttgaaatctttaaaatcaaatggtataaactgttgacttgttgagtatgctgttaaaagaatgtgagcacttcacggactcacgtgacaaccattcctcatgtctgaaagtcattctccccgagtgaagtgtctttcagttgacacgcctgctgctaaggaagcgtggggaggatctcacgggctgcacacacatctgcagcaggcacctgcttactcacctgctatgtgcctgactcaggggtgtggctccaacctgaccccaggctgatggttctctccatctgggacccagtatcttccttcaaacactaacagttttctgcttcttcctaattcactttggttttccttttcctgacacaacaatgttaattctttgcacattaatggtagttttgttataaatggtggggtggcctaatgttaatctatcacaggatgtttacaacaaaacatgaaatacagctcaaacaccaacatatccagaaagctttcacagacagactagaaatagtgtgaagccctttacctaactcctagatacttcccatcatctctctgtggcttaactcatgatgtgaactttttaaatttatgagccttaatttcataattagtccaaaaatagtctgaagacataaatgtcttctctcccaaaacgcctattacacatgaggcccatgagaaccaattcacattccatgccgaacatccttcctcgcctacgtttattaagtggctatcaaaagaaaagctattcaggccaacagctttgtgagccatgttgacaaaacgaccccaggcctggggtcacctacaaaatcaggcttgggcagagcaacaattcagaggaaacaaaagtcctccttcgtgttcccttagattcccacttcctgatttctaacactgctttctaacattgcaatggggcagctgactgttctagtcacacacgaggtcgaaatcacacaggcaggaagaggtgacacatttcctttaactaaccctggtgggaaaagtctgattcttgatgaaaagaacattttgataaaagatataaacaaaagcgctatgctaggaaggatgcctacaatcagggaatatctgagaaataatagttttgcagaacatgtttctctaaagtcataccccaa

SEQ ID NO: 242055 - DNA, 979 bp, Homo Sapiens
ttttccccagactgttttttctctttcatttatttgtaatcttggttgtttgctcatttttaagagcacaggactaaaagactaactgcaaggtctagacataatgcgtgggatggtgggattgccaactatgattttcactgtagtgtcatctagctgggcagtttagccgggacatgtctgacatcaagatcttaatgaggccttttcacttgcattggtcagatttcacagagaagactcttcggtattccaccatgggatggtaaagatctggctgccaggattcagtaagaaaaggaggattctggctttcttatccatcatgtaaatgtcccctgttttgaggatggttcccctgtcatctactgtatcccgtattcttaacatagccaaaataaacagccacacacttactgaaatcatatcatatgtgcatttttaaagaataaataactttatattccatttgtataacattttattgtttgcgtattgcatagtgaaaagaacagagtcagaagactcatggtcaggctcaactactaacttgctgtgtaaattggatagatctcttaaccttgctaaacccttacttcctcatctgaaaaatagagataatacttattttacagaattgctaaatactgaatgagatacttatactgttttcctcttaagtaattagtcaaaataattatagagtttgctattgctaaccccttgttcatcatctcaatgctgttctcaataaatgcattaagacaacaggtaccaatgtaacactttaattttgaatattaacaatagcaaaagaaaaacaaactcaaaaatgaccctaccctttattatttttagaatactggcttttaaatacttattgatactatcccatcaggaattcaattcatttaaatattttttttcttcttcaacctactcaaaatgaatgacctacatatgtgccaacttttttgta

SEQ ID NO: 242056 - DNA, 1006 bp, Homo Sapiens
actttgtacaaaaaagttggatagcttttaggggtacaagtggttttggattacatggatgaattgtatagtggtgaagtctgagattttggtgtaccagtcacctgagtactatatattgtacccagtatgtagtttatccttcccccttccctgttccgggtctccagtatctgttataccactctgtgtgcttacctgtagcttagctcccacttaaagtgggaacatttggtatttggttttccattcctgagttacttcactaagaataatagcttccaatactatccaagttgctgcaaaagacattttttatggctaatattccatgggatatatataccacactttatccattcattggttgatgggtacttaggttggtcccatatcttttattatgaactgtctagccagtttttaaatagaaaagtactgattaggtgaacagttccttaggaattaaattgtgaaggggaggggacacagcagagaagtaatctgttggttcttttgagatattgaatacatgtcccaaatttgctagctgcttaactagcaagttaacccaaactgtcagagtaactgaagcaaatatgtccaactgggacataaggaacatgagatttgtgtaataagtaggttatctaacgtgttcatgtgtctaacactttctagctattttcaagacagacttaatcaatactgtgtttgctttccaatttaatctgttacaaatacatatgaagaatctagttggtacaggctcaggaggatagaaagataggtacacagatttgtcctgttaggatcctaccattagaaggattaggaagagaagccctccatgcccatactctgcaagggagaacaaggtaagagccacaggagggaacaaaatgctatggggactcagtagggataggtcagacaggctggatcctgcaaagcttattactgagctgggcaacaacgagcatgatcagacaagctggagaaagtc

SEQ ID NO: 242057 - DNA, 1280 bp, Homo Sapiens
ttgggtgaagggagacagtgtggaggccacagggtactcgccacgatgagcagcaccttagctaagatcgcggagatagaagcagagatggctcggactcaaaagaacaaggccacagcacaccacttagggctgcttaaggctcgtcttgctaagcttcgtcgagaactcattactccaaagggtggtggtggtggaggtccaggagaaggttttgatgtggccaagacaggtgatgctcgaattggatttgttggttttccatctgtggggaagtcaacactgcttagtaacctggcaggggtatattctgaggtggcagcctatgaattcactactctgaccactgtgcctggtgtcatcagatacaaaggtgccaagatccagctcctggatctcccaggtatcattgaaggtgccaaggatgggaaaggtagaggtcgtcaagtcattgcagtggcccgaacctgtaacttgatcttgattgttctggatgtcctgaaacctttgggacataagaagataattgaaaatgagctggaaggctttggcattcgcttgaacagcaaaccccccaacattggctttaagaagaaggacaagggaggcattaatctcacagccacttgcccccagagtgagctggatgctgaaactgtgaagagcattctggctgaatacaagattcataatgccgatgtgactctacgtagtgatgctacagctgatgacctcattgatgtggtggaaggaaacagagtttatatcccctgtatctatgtgttaaataagattgaccaaatctccattgaggaattggatatcatctataagggcctcactgtgtacccatctctgcccatcaccgctggaattttgatgacctattggaaaagatctgggactatctgaaactagtgagaatttacaccaaacccaaaggccagttaccagattacacatccccagtggtgcttccttactccaggaccacagtggaggatttctgcatgaagattcacaaaatcttatcaaagaatttaaatatgctctggtctggggtctctctgtgaaacacaatcctcagaaagtgggtaaagaccatacgttggaggatgaggatgtcattcaaattgtgaagaagtgaaacctttcccttttcccatctgccggacgaaccacaacagcgttccccatgatcaagcacccctacgccagttctttctggttttggcagtcactggatcgggatccagggggaggggagatgggaggcaccc

SEQ ID NO: 242058 - DNA, 1641 bp, Homo Sapiens
  misc_feature (739)..(767): n is a, c, g, or t
  misc_feature (1507)..(1515): n is a, c, g, or t
tttgggcattttgtgatcaaatttattttttgtttaaatttcatttactttgttttactgtaatttacacaagagactggcaagtaaactaggtattttacattcaccacacattccctcaaatctccacagttgttagaaaaacattaaaatccatgcgccgggctctcatttccatgtgcgcctaagctcccaatgatactacagatgccagcgagagttaagttcattaaaaggagagggctagactctttatttcacaaaattagcaataatcttcctcgcaccaaacactttgcagacaatgattatgctctgacaaaacctatcttacaacagtgcccagagagtaaacatcagtctttatcctgagtacacaaaggatgtatgaaatgtgggttttgttgctgaggataacagggtattgcaatgcagtagtgatcctacacatccttccttgtctgattcactgaaatcactccagtgggggagggatgcaggacatgtgggaaaacgaggagcaggcagggcaggactgtcagcaaatcagattactaatgtgatttgactgcaggggttggcgtgttttaggagggacaggaggttacaaaagacagtttgtgacctgaaggcttcaacaatataattctattcaagcttccaggactgacagaggaaaaactggattcagacagagaaagctgataaaaatcttacctagctattgttccttcctttnnnnnnnnnnnnnnnnnnnnnnnnnnnnngtggcagccgtttctgaccagcactctcatgatgcctattcagaatctgtcctgatgacgtcctacttgagagcacatcccacagtcagatgtcccaccagtctcttggcggggcctcctcaccgcacgcaggccagactcacactgcatcttaaactgttcctatctcaaagtcactatctcctccttgaagtgtgtgttcccacaagaagagcaaaatgtcatcactaactatatcctatcatgtgagctctgaggaatctagaccatttgcatagtttccaagctgtagttacagaaaactgtcatcttcaaaacaagactccatgaagtgctatatttccaacttttctacacagcctacaatcctattaagactaatttcttcatcaatgtgtttgtctaacaggagcctgaaaactgtctagtatttattataaatcagaaaccgtcatctccatttttgctaggtttgatgtagaaaaatatttgaaatttaaaatacaaaaatccaataaaaaccagaaattttttttaaaaggatttttccctcagggcaaacaagtaaaaactggcctgtaactttgctccttactttatattgtcaaatttggctacaagataatgaccatccagaaataaatagttataaatacattcagagtttacatcccagattcattggaacaccaaaaaattttgaagaaattttctgtgggagtctactgcttatgggactnnnnnnnnntttataacagactgacttaaaagaagagaaaaataataaaaggctatatatgttggtccacagcttgacatttatgaaacataccagctagtattacattgcagtcaatttgtccattaatgccaa

SEQ ID NO: 242059 - DNA, 1400 bp, Homo Sapiens
  misc_feature (211)..(265): n is a, c, g, or t
  misc_feature (457)..(465): n is a, c, g, or t
  misc_feature (1222)..(1232): n is a, c, g, or t
agctgtagttacagaaactgtcatcttcaaaacaagactccatgaagtgctatatttccaacttttctacacagccctacaatccctattaagactaatttcttcatcaatgtgtttgtctaacaggagcgtgaaaactgtctagtatttattataaatcagaaaccgtcatctccatttttgctaggtttgatgtagaaaaatatttgannnnnnnnnnnnnnnnnnnnnnnnnnnnnnnnnnnnnnnnnnnnnnnnnnnnnnnccctcagggcaaacaagtaaaaactggcctgtaactttgctccttactttatattgtcaaatttggctacaagataatgaccatccagaaataaatagttataaatacattcagagtttacatcccagattcattggaacaccaaaaaattttgaagaaattttctgtgggagtctactgcttatgggactnnnnnnnnntttataacagactgacttaaaagaagagaaaaataataaaaggctatatatgttggtccacagcttgacatttatgaaacataccagctagtattacattgcagtcaatttgtccattaatggtattactctgataattattaaaatctgttccaggtatatatattgaaaatattttcttttgcattcttgctgaagataggtacagtactttggagaaattgtactaatcccttcagtatgtctgtatgtacatatatacacaagtgtgtgtatctggatctgtagctctacatgcgctttatatacagctacagacatatgcacacatacatatatacacacgtggttgagaacctgtgcatgtgtgtgtatcatcacaagcacacatctgggaaacgtcaacactgcaagatactggtcagattcttcttcactcatcactggctgcgcttgttcccctcacttgaccttgattacgtaactgtaagaaaagtgaaagacagtgcaaaatgtgttaaaatacagagacaggaaatgttagcagctcgtcacacacactctccaaatgcatcaaaacttttggcagaaaatgtaccccaactactgcatcttacaattttcatctgttcaaaaagattttggtcttactactaatgccacaatatattgtctcatcagaggggaaaataaagtcgaggcagaaataaatcacaaaaacttaggagagtttaacaaaagtaacaataacttaaannnnnnnnnnnaatgaacatggaatttaaaagtgtttggggggaatcttggaagagttacttcattcttatttggcacaactagcttttctcacaactgaacatttcattcatcccaatgttcaaaaattaaagagcaggtagctcatgtggggcagcaaagaaccacagtggagccaa

SEQ ID NO: 242060 - DNA, 1332 bp, Homo Sapiens
ttggctctgttaagtgctcagactttcaataccatttccttttattatctcttttaaactagctggtaaccagagcaagaccgctcctgagaatagtggctgaagggttatctctgtgcactttgttcttctcccagggtcctgggaagaacagaagcctcctgaccctaaaaattctgcccagtgtctggcgtcctggggatttgcccattttgtgaagtactgtatactaactagtaactctgtaagtggaaattcaaggtatatcgggaatttccattttttcagaagcaatgttacatcctgctcttaggacattcgtatttttactcatatttgattgttttaagtaggcgtcacaccgaccacctggaaaatgattcatgaagtgaagtgaagaagaagtaagaatcccttacatttagatggtgcatttaagtttatgaaagcctctgggaaacctaatcccatttttttagctaacataaaaataacagaaactttaaatgctgctttcatgggttcttttccttagaaaggggatactgtgtttgaaagataataatcgtaataatttatcttttaatgcactttatagtcaatcaaatgttgccactcgcatttctcacttggatcttccattttcaggtgttgtttactggtagtgtgctgtttttgggaatcaatctgttggacaagaggttgttgaaaaaaaataattaaaggtcatatttatgtatagaaaaaaccgaattaactgtaataagaggctttttaaacttcccatataactaaagattaataataaatatgataagactctaccaatgaattttaagaaaagtcagtgccaaatcagaattagaggccccatatttacactgtgaactcattgaagatatatatgagaacagctctctgtacttctaagaggtttcataatcatattaacttttatgttctgaaataagaacttctaagtacttttatgttttgaattaagaacttccagacttcttgtcttcacagtaatgccaagtttttctggaccttctttgcactattattttgaccagcaaatcctaccatagacaaaattctgctcattcctcatgtgaaatactgagttccaagtgagtaggatcagaatgacagaggtcttcagccacagttttcatggtgctgcagtgcgtgtggtggtttgtattgggtccgattggttttaatcaatctgtgtaatatttggcattgcaccccagtctcctagcacttgagcccttggaccgtgtttctctctggaggaactgtctccactctcttgatgatgtgggg

SEQ ID NO: 242061 - DNA, 2069 bp, Homo Sapiens
aagatgtgtcctgctgtgcagacaaaagcaactgcagcacccacacagaaagccccgtgaatccacagacccacagattgcgcaaatagttctttgaaagtgaccaggaagcaggaaaaaggtcctatgtcccctgggggatggggagcgtgacttctgctggaagctgccagccatgttccaaagtcatgggccaaaacattcaactagagaccccccacaaccctctatcatctttacctccgctgggcacccctctcctggaagagttccctctgaaccccaagcttccccttcccctccacagggctccacagctggagatgggtggtgattcctgccgctccttgtccagacccaccccacgtattcctctagattccattccctgggctggaggtgaatcaggtcatcccggaggggactgtcccccaatggaagcactgaattgaccgtggacaactaaagatcgaggaggaaggaaagagagactcagggatctgggaagcctgtcaacagagcaccccatgcagaaagggctgcaggctgtctttggtttgggaaccagggaagaagggatttggggaaagaatcaccctctccttgcctcagtagactctgtgacttcctgaggacacagagcagagctgcgaggagggcgggcaggtctcaaacttgctggccgcactccactcttggtgtgtgttaccctgactctgacagccaaggaaagacaggggagccggccttttccatgctccccttgggccccccaatctggttttgtctcccctacaggactggaagagagggagaagtcactcctcactggcagggaagccacgggcccccaggacaccttgtacaaaccagaaaacaagtgcaccttgccaggggtgggctggggcaaagcctgcccatcacacagcacagcctgacctcagagaggcacggcagaggtccctccacaggaatacagctcagccccagctgtggcatttaggttggatggggaggggatgcagaatggaaggaggaaggggcttaggagtcaagggctgccctgagaacgtggtgggacactccctccctccctgactgcccacacctgggttggctgagttggaggggagggcagaaaaaagaggggaattggaagggctgaaaagtcacctgagtcagaaagaacaagaacccctcacgggaggaaggacagggtcccagacgtctcaaagcctgtgctgatacatcacacaacttagcagacgcctgcacacccgcagcctggcccggtgcagccgagaaaccacatctgtatgcctggagcatggggtgccatcgcacctgtgccagacccctgccctccgctgaaagccgcaagcaggtagcaaggtgcatgcaaggtggggtgagtgcaggtgtggtggtgaggtcttttgtgctgtgaatcaccccacgttcgcctggccaaggtttctaacccaggttcgcaaggcccatgtggacacgtctgcagccacacatgctttcacggggcacatgggaacgtacacgcgaagggtaatgcgtgcacacctgtgcagccaggtgtgcatgagcgtttctgcacaggccaggtgatgaggggagggcagagctctcagcagaagggtctcagcggcgcctcctccctgggaaggatagaagcctctctgaaggggaagggactcgccccaagtaacctcaacccttcctcctgccccttcctcccgccccactcacttttggtcaaaaccagcctccacagcccaccgcaaagccagagaggagagttcaaggtaaagacccaattgaaacaagagaaaaggggaaaaccagccaaccaggctggggtggccactcaagggagagggtttgggccttccaatgctcctttaactcccagaaccagctgctgcgtcactagaggagaatgataatggtggtgtcccgggcaggtgatcctgtcctcatcctgccctgggggtggtaccccaactcccagagcaactctctccatccccagcctgaggcctcgtggtaaacgccaa

SEQ ID NO: 242062 - DNA, 1236 bp, Homo Sapiens
ttggccactcaattttgaagaagtcctgcatcgaaattctagcagctgaaccatccaccatatgtgcaggagagtcatttcaagttgtcgtgagaggaaacggcttccgacatgcccgcaacgtggacagggtcctctgcagcttcaagatcaatgactcggtcacactcaatgagaagcccttttctgtggaagatacttatttactgtgtccagcgcctatcttaaaagaagttggcatgaaagctgcactccaggtcagcatgaacgatggcctctcttttatctccagttctgtcatcatcaccaccacacactgtagcctccacaaaattgcatcaggccccacaacagctgcttgcatggaatagcagagaataccgcctgctccctccggacagcacactcctgaaaacggggagagaggagccaaacatgctcggtttacactttccttatttactgaatgagtggagggcagagacaggcctggagttacgcacactgagtgccccaacatggaaagaaacatcaggagggacaggaaacgttccctccttaaccaacagttttcaagaccttactggaggcactttattggctacataatcactccatgcggtgggcatcaggcagaatcctggtgcagacccaactttgaggtggaggatttcacagtttctttattttgaacttcccccaggctcccactaattcctctccattctatcctcctccctttcccacaaaagaaaacagaaaggagcagcagtgtttgataccgtatcatccagaggcctggttctctcccattatagggcaaacaagccctggcaagatatttcactcccgccccatgccatgcattaaaaatccaaattgcctatattccacctgccaagcaagagatgctttcattattgaagttccaaatgtatacctttgagaacagtgccttctcgtcttaaaagagaggtcctcattttgtgagttgggagcagagggaattaaagaaagccatgatgcagggatttggccattcaagccgggcagccttcacagaatgtcatccctaatgacacatgcccgaatgaaggagcggggctgagcttgtcctgccttcgtattgaatgttgcctgtctgcctccttaatagcgggcctctgtgtgagcatttgactagacttaaaactattcattgaagaaaatggatgatcccccaacaggaagatgcaa

SEQ ID NO: 242063 - DNA, 1632 bp, Homo Sapiens
  misc_feature (788)..(796): n is a, c, g, or t
  misc_feature (1428)..(1436): n is a, c, g, or t
tcaacaaatctttacagtcctgtacaaatttgaataacttgaaaccattttcaacaaaattagttactgtaagcacacactacaagactgaaaatgcttttcttagaaaagttgaatgtaaaggattctgacacgttagcatctacaacaaaacgcattgaaattcccacgtcgtattgccaggaaacaaagaaaacatgccagccccatccaaaaaaagtacacagaactacaattaaaacagtaaaacagtctgtacaataaagtactgtgtattaacagtgccagatattaaatagcttgaatgaacacatccacaatatacaaatgtcttacaaaggtgaagaattaaatacaagtgccaaacagaacagagattggaatcatacaacataaagtcaatacaagtgaaaacaattttgcattcattttggattttatacaaggcatttaattttataggcctaccacccccattagctatttatatttaaaataaccaccatccttttgagacagttcctatcaacaatcttgaaccatactaatacattacttgttcctgaagtccttttgttgtagctcataataaaataagcaatacaaatgaattatctgtatttaagggaaaagaaacatttacaagaaaacacaaaaatataactgttataattcattatgaataaatatacactttgaactggctaagtacaatctttatacattgtttaagatttaatacagtttattagccattttcttttttcacacaatgtatatcaaaattnnnnnnnnntactgatttatagaaaaatggcaaagtacagtagttccattccaatttgaagggccatgaaaagccactgcaagaccttttagcctaattcaaacctgtaaacatgttcagtcttttttaaagagaatctttaatatttggttaccaggattgatgtctaatatcctgttaactgcaggttttgaatttattacatgtgcttgacttatacaattaaagccaccctaaggtgacttgctttaaaaaacaattaccttgtacaaatgaaaataggttcatattttttcataaataaatggaaaaatatcaaatgttccagctttaacaaaatacaagggaatacatatacagtaagttatcttaacatgttctgacccaccccttaactatgcttactgtattgtctctacaggcagtgaaaagcctccatttgccacagtggaaggccttccagttaccagacacacaattcccagacaagttggaaacaattattgcttgaggaaaagcagttcattgtactttttcttcataaaaaagtgcacttaagtgccaagtcagcttgtcaagaaacaatttttaaatataaaatagtgcttgtctgatatttttttgtgccactgtgcagtatnnnnnnnnngtggccctcaacagccattaagtgcaaagtgctttagcaagtcctgctgtcacctgcactcaactgacattccattttgtgatgcgctggacattgacggttcagctaaagttaacataacagcagctgttatggaactggatgaaggtgaagaggaggatgaggatgtagcagcacctaaggaaaagggagccaa

SEQ ID NO: 242064 - DNA, 1026 bp, Homo Sapiens
ctttgtacaaaaaagttggcacgtaataccacaccaacctcaatccccgcaaactaaagcaaagctaattgcaaatagtattaggctcactggaaaatgtggctgggaagactgtttcatcctctgggggtagaacagaaccaaattcacagctggtgggccagactggtgttggttggaggtggggggctcccactcttatcacctctccccagcaagtgctggaccccaggtagcctcttggagatgaccgttgcgtcgaggacaaatggggactttgccaccggcttgcctggtggtttgcacatttcaggggggtcaggagagttaaggaggttgtgggtgggattccaaggtgaggcccaactgaatcgtggggtgagctttatagccagtagaggtggagggaccctggcatgtgccaaagaagaggccctctgggtgatgaagtgaccatcacatttggaaagtgatcaaccactgttccttctatggggctcttgctctagtgtctatggtgagaacacaggccccgccccttcccttgtagagccatagaaatattctggcttggggcagcagtcccttcttcccttgatcatctcgccctgttcctacacttacgggtgtatctccaaatcctctcccaattttattcccttattcatttcaagagctccaatggggtctccagctgaaagcccctccgggaggcaggttggaaggcaggcaccacggcaggttttccgcgatgatgtcacctaacagggcttcaggggttcccactaggatgcagagatgacctctcgctgcctcacaagcagtgacacctcgggtcctttccgttgctatggtgaaaattcctggatggaatggatcacatgagggtttcttgttgcttttggagggtgtgggggatattttgttttggtttttctgcagttccatgaaaacagccctttttccaagcccattgtttctgtcatggtttccatctgtcctgagcaagtcattcctttgttattt

SEQ ID NO: 242065 - DNA, 884 bp, Homo Sapiens
gaggtcacctccaacccggtgggagtgggggctctggagtgtggccgctatgatttgaagatgtgctgctgcttatgctatttgcagatgatggtctaggaagtacagagttgggtggtctggattttgcaggggatgcaacttttggttctggcccagagctccctgaagaccctagcagagaatcctgtgccggcccggattggcttggaagtatttccctcgtggaagtcaggagatgctctttatctttaacttctttttcccgggactttgctttgtgttctgccaggaggaggtcaaattgctttttccggcctgggactgccctccgatggcttagcgaatgtgtctaaggagaagagaaatgaaaagcacagcctctttgatcagcacataaacctgcttccccaggccctccatttcagaaatagcaattcatggaaatttagaggtgcttgaaaagtcaacttcaaggcaacagctcctgttctgtggctaggaagaggcagagaccacacgaacgcaaccatgccctacactcctggtgttaagaagccaaagcttcctccaaaaaatggcataggatgacgagcttcagcgcagaacccatgaaaacctctctgatgaaaggcaactgcgagggaatgctagagttaatccaggtgcaggtgggaggctcgattcggcccagacaaacagagccaccaagcagagagggccatcgccttgatcccaagaagcactagcagttcagcatgaaatacagggctttgggcgacccaatggcggccgccttgggtcagctgttcccctggccaccccggtgtggctggatcaggggcgcggcatatcatcctcccctccagggctgcctttcaggg

SEQ ID NO: 242066 - DNA, 613 bp, Homo Sapiens
tgattggactgcaacttttgggggcctctaggcaagttgagggtgcctggcacatgctgatggctctagaggccttggaagaaggtcatcattttcagcatcaccctggttcaggcctgcaggctcctggctcgccttccccgtcagggctgatgtccacacacctcccgggagctcgttgggcccggctccttcagtcctgggcaggatgtggaaggcgcacccatcccccgatgaggacacccgggcacgggcgaggaagtgactcggcctgtgtcgcccggccggggagtcacgccggacctggggcctttctgctgtaatggaggggagacccctgcgcctgccccagccccgccctccctgcctctggcaggcccgggccctcagccagccttggcccctctgcgcccggacgcgcggacgctgggcgcgccagggcctcagtttccctggaagcgtccagccccctcctgtccccgccgcggcgacaggctctttcctcggggaatccggcctggcctcggggtaggggcgggcgagaagccgcgcggagcggcggggaatggacgcgtggaagcggaggtcactttcaagggtcccggcctgccaa

SEQ ID NO: 242067 - DNA, 1782 bp, Homo Sapiens
  misc_feature (78)..(98): n is a, c, g, or t
  misc_feature (1279)..(1291): n is a, c, g, or t
tttattttgtgactcattatattacaacatagaaatatgcattttaatacttcatataaagttattgacatacaaaannnnnnnnnnnnnnnnnnnnnaatgaaaatgatttaacttagaaatctgttgtgaaacttttgtctagttttgcaattctcagatattccagtgcaaaaatagatcccattacagacagcgtaaagtgcttggaatgagggccaatgatgaacaaagagcacaaaaacagcttcatcttagggtataagaagggataatagcatacctaaatccttatggaaatagaaacattctaagggggatgcaacaattttgaaaagaattagagcaatatttctacagtattacattattactagtagataataacaagggtacaaattaatgtctcaatatcaaagtggttcagtattacatgacacatggctctttggaaaatattttacctgatatatacaaccacaagaagaaaacacagacaaatggctttagtcaatgattactatacagtgaatgaatgatgtgcaacatttaatagtcacaaagcatttgctttcagtacagataatgaaatacagtagtgtgaggtttggttgttttttaacaatgaattgtgctgggcatttatgtatagagggcttattattttcttctgtatttctcatattcacagttgttaataagttttctgaggtgtcccaaagatgcaaaagcagaaatttttgaacacgtattttgagaatttctgaaactcacataggtacattccacagggaatatacagaaatttgcttgattgagtatagagttggtaaaaatttctaccacaattaggtttacacaggaaaatgtaaaaaattactattttaaaaggtaacacagtattaatgaagatgtataactatagattgtttctagcttcagaagaggtcctttcaatctgtattaaaatgttgtgttttcttcaaaatagttcacagtgccttttgattttttaaaatatggccttgaaatcagaggaaccgaagtaaggagttgctcatagatttactataatgaagaattagaatacgattttagtaaaatgaggaaaccataactttgattttgaaaaatattaaatgaggagaaattattctataaattctgtatttttgaagatactgtaaaatgcaacgatgccatatcactagttattggaaatatgccttcattacttatatttaaaatcaatattgactttaacttctaaaacaatcannnnnnnnnnnnncagcagtgggttatataatattctgtaaatttaaaaaatatagaaagattaatttgaaatctgaagtcttacacctttagcgttaatattcaaattctggaaaaagtggaagaagttagtaatgatattgaaagatcacttgaaattccccaaacaatagttctctcatatttttcttttctctcaagacagttaacagtaagtattagtgaaacagtatttttacaaatgtttactgactagaaaaataagactgggttagaaaactctgaaaaatgctccatatggaagtatttgttgtttttatatttttcttgactagtgattgaagagatgaaaaatttgagactgtcagatttaatggggtatccaatatctgcaaagccaattatttgaaggtactaaatgccataaacacaagttgtgtttttcagcaagttttcaagctagctgttttccctgttgaagaattcattgtttagacttgccaa

SEQ ID NO: 242068 - DNA, 1096 bp, Homo Sapiens
ttggcttcctaaaaagagcaacttagaaattgggggaaaaatgtttttaaagcccaaatgctccagtttttattcaaagtcaaagtcgttattctggaaaatacaagtaatgttctatataatgtcacttaaaatattcgtaaatctattttgcaaacactgaatagtataagtaagatataaaatcacaatagatatttaaatactaagctgaaacttctgacaactaattattatgggggacacaataaagattgaaagcctaggttaccaagttggttttagctttctagaatctttgtaaatactcacgttcaaataagatcacacgtgcatatatagaaagcaatatgttctgaaatttcactttagtgccactgtttgtccataatggatttattgccaattttgaatcctcatcttactttgatctggcttttttttcccccccttgccagaatgtttaggagaaagtaaaattattccgttttactttggctttttgccagagatacaaactaagaatagtctgaatatgtgtttttcagatctggttacaagacggattatagattgtgttttagagcaatgttgtgattgaaatataaataatggtataactttttttgtgttagcaaaaacaacattaaaaaggttatgttacataatatgtaggttttggtttcttagtgcaagacttatatttctcttaaatgttgtataattatttcagttttcactcactagctactttactaaaatgtagccccaaaatgacgggccagcctcagcgtatctgccatatgtatttcaaagattacagtcagaatgagttaatgaaaatggcaggttccttttcaaagtttatttgactcacagccatattgctaagtttgggtatagtgaagttaacaacaatcacttaaattaatatcttacagcaagatatactgatactgttttaaatgaaaaagactgtaaattcaatgtaaatattacctaactttatgtaccaagttaggagagtggaagaggggaatttttcaaaaaataagctgtatttgaacaaagcatgaaacttgttgttttaaaattt

SEQ ID NO: 242069 - DNA, 1539 bp, Homo Sapiens
  misc_feature (682)..(805): n is a, c, g, or t
  misc_feature (814)..(822): n is a, c, g, or t
cagtatttaatgccattttattcacatgctcccatgttctccctccctcccattgtagccttgctgcccaggggagggatatgtcttcctttatgcatctgggaaaccaggaacagaccctgcgcaggagagtcagagggggaagagttagaatgggtcagtggctggaacaaagttctggttaaggaggaaattagtgccacccacggtgagaagcagagaaggcacttgcatcctatgcagccctgaagaccaggctcctttgggcaaaaggcaagactctggcaggagggtcaatgctctctccttggagcaagaagccagcttttggggaaggcaggtcctgaggcaggcactgccctgtggtcttccccaggttgaggagagaagtggaagccccatggaagacagtgctcccagctgaggtaggaggcggaggtgggggtgggggtagtttaagcctatggggcccagggggaaaggccaaacagaaacccaactaccccctaatgaagggcctggaggttggggtatcttggagctcctcagagcccttcttcccatcaaaaaggtatcaaatgccttggaagctccctgatcctacaaaacaaaaaaatgcttatttttaccactgtgaggcaagctgaggtgaacatttaaaaggctatttcaagacgaggtnnnnnnnnnnnnnnnnnnnnnnnnnnnnnnnnnnnnnnnnnnnnnnnnnnnnnnnnnnnnnnnnnnnnnnnnnnnnnnnnnnnnnnnnnnnnnnnnnnnnnnnnnnnnnnnnnnnnnnnnnnnntctgtctcnnnnnnnnngatacttcacagaacaggaaacagaaatggccaatacaaacctatagtaaccaaaacaacatggtactggcataaaaacagacacatagaccaacagaacagaatagagaatgcagatataaatccacccgtttataaaccaactcaacttcaacaaaggcaccaagaacttacagtagggaaaggacagcaccttttcaaggacagcaccttacagtagggaaaggacagcacattttcaataaatggtgctgagaaaactgggtaactacatgccaaagaaagaaatggacaataaatacatgacacgatgttcaatctatttagtaattaggggaatgcaaataaaaatcacattacataccgagatactttaaaactaaaaaattctgccaaatgcagtatataaatgctttatctcaattttttaaaaagcaaatttaatttaaaaagaacttgtctgggataaatgttttctagcctccagtaaacgattacatggtttgtttttctaccagcataacaagagagcttctgactagatttattaaaaatcagcattttaattagtatggcacaaaactcataagaaaacaaagttctagcttttaaagaataaccattatctttgaagacttatctcccaccaacccccattgcgctcgaaagaacaaatctttggctcccaaaacgacatttaaatattatcaaatccaa

SEQ ID NO: 242070 - DNA, 1381 bp, Homo Sapiens
  misc_feature (196)..(237): n is a, c, g, or t
ttgggagacgccgagcgggccgagtgcggccgagcaaagccggagccggagcggggccgcaggagacgggccgggtccggacgggccgagatgccctataaactgaaaaaggagaaggagccccccaaggttgccaaatgcacagccaagcctagcagctcgggcaaggatggtggaggcgagaacactgaggagnnnnnnnnnnnnnnnnnnnnnnnnnnnnnnnnnnnnnnnnnntctcagccaccgtcatccaacaagcgtcccagcaatagcacgccgccccccacgcagctcagcaaaatcaagtactcaggggggccccagattgtcaagaaggagcgacggcaaagctcctcccgcttcaacctcagcaagaatcgggagctgcagaagcttcctgccctgaaagattcgccaacccaggagcgggaggagctgtttatccagaagctacgccagtgctgtgtcctctttgacttcgtgtcagacccactcagtgacctcaaattcaaggaggtgaagcgggcaggactcaacgagatggtggagtacatcacccatagccgtgatgttgtcactgaggccatttaccctgaggctgtcaccatgttttcagtgaacctcttccggacgctgccaccttcatcgaatcccacaggggctgagtttgacccagaggaagatgagcccaccctggaagctgcttggccacatctccagctcgtgtatgagttcttcttacgtttccttgagtctcctgatttccagccaaacatagccaagaagtacatcgaccagaagtttgtacttgctctcctagacctatttgacagtgaggatcctcgagagcgggacttcctcaagaccattttgcatcgcatctatggcaagtttttggggctccgggcttatatccgtaggcagatcaaccacatcttctacaggtgaggccaggagcccaggcttaggagcaaaaccttctgctactgaggtggggtgggagcagggaggtggggggactgtacagaatgctggagggacatcaggggttgtcaagagagccatttttcttccctcaggttcatctacgagacggagcatcacaacgggattgctgagctcctggagatcctgggcagcatcatcaatggctttgccctgccccttaaagaagagcacaagatgttcctcatccgtgtcctacttccccttcacaagtcaagtccctgagtgtctaccaccctcggtgagctgccttcctccttataatgtccaactcaacagcagagaaaagagccggcaggaaagtgttccagctgggataggggaagcatagggagcagtgggatattccttccctccatctccccttcccttc

SEQ ID NO: 242071 - DNA, 1335 bp, Homo Sapiens
ttgggtgggggcagtcggccgggggacagctacagccctcccacaggaactgcctcccctcctgagggtccccagagctacgaaccctatgagggtgaggaagaagaagaggagctggtatatcccccagcctatgggctggcgcagggtggcgggcccccgctgtccccagaggagctgggctcagatgaggatgccatcgatcctgacctgatggcctacctaagctccctgcaccaggacaacctggcaccaggcctggacagccaagacaagctggtgcgcaaacgccgctcccagatgcctcaggagtgccctgtctgccacaagatcatccatggggcaggcaaactgcctcgccacatgaggacccacacaggcgagaagccctttgcctgcgaggtctgcggtgttcgattcaccaggaacgacaagctgaagatccacatgcggaagcacacgggagagcgcccctactcatgcccgcactgcccagcccgcttcctgcacagctacgacctcaagaaccacatgcacctgcacacaggggaccggccctatgagtgccacctgtgccacaaggctttcgccaaggaggaccacctgcagcgccacctcaaaggccagaactgcctggaggtgcgcacccgacggcgccgcaaggacgatgcaccaccccactacccaccaccctctaccgctgctgcatcccccgctggcctcgacctctccaatggccacctggacaccttccgcctctctctagctcgattctgggagcagtcagcccccactgggcccccggtctctaccccagggccccctgatgacgatgaggaggaaggggcacccaccacaccccaggctgaaggtgccatggagtcctcttaaagagggacgagggccagactgaagcagcacaaggccggggacacccatgccaagcagtgggagcacgcaggacagacacagcaggggtctggggcacggagccttgctggcatcagcatcagcccttcctcccagagccctcattccaattccaagctaagaaggtattggggcagaggctccccaaattggggtgatcccccaaggagtgatacatatattgtgtatatatttacagctgtattgtaaaagtggggtccctgtccccagctgctcctggggagtagaagcaataatgtatttctaatttgtgggtcccacttcggctatgcgggtttctagggggtgggggcttgggaacaaagccttgccccgcccctatgccccttgggggttttggctgtgtaggggggtgaaggactgcccctcctttcgagaccctcc

SEQ ID NO: 242072 - DNA, 542 bp, Homo Sapiens
  misc_feature (127)..(183): n is a, c, g, or t
  misc_feature (251)..(370): n is a, c, g, or t
gacgccacctgccagttatttgtgctcccacatgaagtattctgaattcctctctatctccaaacattccaagtactttctctaagtcttttattttatttatttatttctctgagacaggatctcnnnnnnnnnnnnnnnnnnnnnnnnnnnnnnnnnnnnnnnnnnnnnnnnnnnnnnnnntggactcaagcaatcctcccacctcagcctctcaggtggctgggactacaggcatgtgccaccatgcnnnnnnnnnnnnnnnnnnnnnnnnnnnnnnnnnnnnnnnnnnnnnnnnnnnnnnnnnnnnnnnnnnnnnnnnnnnnnnnnnnnnnnnnnnnnnnnnnnnnnnnnnnnnnnnnnnnnnnnngtgtgagccaccatgccaggccactaaatcttataagcatagcatgatctgtagcaggaattccttagcactctgtagctaccgttttttttaattttgccagtcttcttccatccccgttccttcaggcccagttcactgcatgtgcaaatgggggtggcagggagggtct

SEQ ID NO: 242073 - DNA, 677 bp, Homo Sapiens
ctgagtgctacccatattccacaaaatatagcaccgtgaaaaaacttaattttatattgcaatttaatcaaaacttggtaaagaagctttgctaaaagatgagaaacaaaaaagcatgaaaatactttcacactagtttttgaaataagccataaaagtgactttagaatattctatttctgataaacctttcataaagcctcacgttccacaaaaatattggggatggggttagcatttaaaacaatggactttacatgtcgaaagttccatcccttcccctagaactattcatcacagaactcaaaatgttactgtaattgtttaaaaggctggacagcaaagtatactgaaaattatatatgatgcaagtctcccttttatggatgtgaaaattccaacttgaagataagtaccagttggtaaatgtacataaaatgatttccaacatacatcagctgtaaaaggtgtttaattccccattaccacaaacatacaaatttttgaaaaatgctcaaaaaagttttatcaaaaagttagaagtggcatttatatctttctctctcaatcactctattattgtctgatgacaatctatgggattaaaacaaaaacaacaaaaagataaataacccaacttttttgtacaaagttggcattataaaaaagcattgctc

SEQ ID NO: 242074 - DNA, 1452 bp, Homo Sapiens
  misc_feature (81)..(90): n is a, c, g, or t
  misc_feature (376)..(398): n is a, c, g, or t
  misc_feature (1188)..(1196): n is a, c, g, or t
  misc_feature (1366)..(1386): n is a, c, g, or t
actgtcagtttttcccaccagtcacagggcagtgatgttatatttttatttttaaaatttctgttacatctacaataaatnnnnnnnnnnttcttccatagcctctctggtgatacttgcagcactgaggtattaaaaaaatatatatataaaccaaaaggttgctttcctaatttgtaaatagaaagtgaatggagaaaggttgtattaatgcaggcttatccactcctggcccatgggcccccagatgtgggagcagggtggggggcagggggagaagagaggcaaagtgtcctagggacctttggaggtgctgaaatgattggacaatagaaaatgatcaaatatttaaaaattaagactgaaaaagaatgtnnnnnnnnnnnnnnnnnnnnnnnagccaaacaggtgtgctttgaaactttaaatatgttaaatattaaaattgtagctttgtttttaaaaaaacatcttgggaaaagcagtttttcatattttaaataaaaatctaactagacggtaacatttgaagctgtgcacagacaagaggttaataggctggtacaacactaatacagttcttaggtctatcacacagacaaaggagctaaacagtgctctaacttgtcctggggtggtcctggcagctgggcgatcttcatctcagtaactgacttggccaacgttcccttcccgcctccttccacagagcatcaaactgcctgggaccgactccctcacaaaaatatttttgattctctctttcttaatagtttctatgtagttaatggaattgtatttacaacatttcttttttagaattcacaatttcaaaaaaccttataatatcacctctttcaacagaaaaaaagcacttatagaaaaggaggacactcaaaacactgtcgtccttaccttattgccgaaaatagatagactcagattaacaaagagacatcacaaaaagaactgctagaaagtctgttaattagcttactacatctcacttcttctacaacgcaaaatagaaagctcacgcccacctcccgccctgcacttcacaactttgcttcagtgtgtgctaaagttccacctgaaaattcatacagtctcagaattgccaaaatagggagagtcatattaccatctcagcatcctttaaaagtgagaacagaaccaaaacaagcnnnnnnnnntgttttaagaaaaaataactccttaatataacaattatactatggttagctttgaactagatattaaagctatgtgactactggactaagtcaaaatcactaccaaatgtgattcaaagagatttaaaaggagaatgggaagagagggagggagagggaaaccatcaagnnnnnnnnnnnnnnnnnnnnncgaaatcatgggttatatacacatttaaaagctgttgtcttatattacagcagattcgtgagccaa

SEQ ID NO: 242075 - DNA, 1684 bp, Homo Sapiens
  misc_feature (1600)..(1616): n is a, c, g, or t
gagtaaaaatactgaaagaataccaacactgctcaattttttagaattagaaagcacagtctgatcaatgatgttaaccacaaaccttgcataagagagccaaaacccatgtgagacctatgcaaatgatacactcaagggagcaacaattttagtgctgaatctttaataatttgccaaatatatctggaggttctcatttcttcaaattgtcattactttccagaaaaaaacagcttaggatgagtaaaaaacttttctgtcctcaatttaatctagtaatttacatgggcaattcaattaagacagcactacaaactgggtgacaactcaatgcaaaaaaatttggtaacttattttctaaagcaaggctcaatatgcttttagtcaaataaaataaatagaattcagcatattagtaacacatcatgttcaaaactttcaaattcactagcctaatagaaaagtgtattatttataaaaattagaaaagtaaaaattgggaaggaaaaccacataatgaatcacatccttgttaaactgcatgatttaaaatttataatatgaaaatgcataaagaacacatcaaaaaatgcattcatatgtacttttaaaaattaatatacagaggtcatacaacaaaaacatcttagaggctttattacttcatcactaacaaggtactccaaggaatgtgaaacagatcatgatttgcacaaacagtacatttttaagcttcagaagataaagcattccagacgactctgtcgaaatacatcaataaatttaaagcagctacatctaaattgtgaggataaaatacatctaccaacaggaaatcaatgtcttaagcatacaaatgcaaaccttaaaataatttaaatgtaaaatatacaactgcaaatattaatcacagtaacaaacacaaaatagaagtatatattaagagtattccaggattttctgttattacagatttgatttcataaatgcaggaactctacccatcaagtaaaggttttgataaatcacatcaaaatttcctaaaatgtcaagtgtatcaaaagaaatataaagtcacataaaaatataaactgagaggcatcagtcaaagggtcctttaagtgattttgtttttaaatgtacattttttcattcatataactttctgatatgtctatttactataatttactactacaaggcttctctatggccctcagttacaagtttagatatcctggattcttcaaagaaaaaatttgccttgtatgtaaaatggtgcaatgcagcaatggctaaaccgacaaggtcatttttctgcagtacaaaaacctaaaaactgaaatttactgacagaaaaactgtacattacagtaaaggcccctttgaataaaggtaccttaccttttgactgctgtaagaggccttaagtcacaactcaactttcataaattgctaccaaaaaattagggtgtggcatattagcaatctcaaggtcatgctttaaaaaacgaatccaaattagaaaaacacaataaaacagacagcaatccatgtctgtcaaggtaaacaattgtaagctgaggtttctcccccnnnnnnnnnnnnnnnnnggaagaaagttgatagctcatacctcgatgcattgctgtgtagcgaactgtcctcctcttggctccaa

SEQ ID NO: 242076 - DNA, 1568 bp, Homo Sapiens
  misc_feature (565)..(581): n is a, c, g, or t
  misc_feature (1127)..(1209): n is a, c, g, or t
  misc_feature (1223)..(1272): n is a, c, g, or t
aaaatttcctaaaatgtcaagtgtatcaaaagaaatataaagtcacataaaaatataaactgagaggcatcagtcaaagggtcctttaagtgattttgtttttaaatgtacattttttcattcatataactttctgatatgtctatttactataatttactactacaaggcttctctatggccctcagttacaagtttagatatcctggattcttcaaagaaaaaatttgccttgtatgtaaaatggtgcaatgcagcaatggctaaaccgacaaggtcatttttctgcagtacaaaaacctaaaaactgaaatttactgacagaaaaactgtacattacagtaaaggcccctttgaataaaggtaccttaccttttgactgctgtaagaggccttaagtcacaactcaactttcataaattgctaccaaaaaattagggtgtggcatattagcaatctcaaggtcatgctttaaaaaacgaatccaaattagaaaaacacaataaaacagacagcaatccatgtctgtcaaggtaaacaattgtaagctgaggtttctcccccnnnnnnnnnnnnnnnnnggaagaaagttgatagctcatacctcgatgcattgctgtgtagcgaactgtcctcctcttggcttttgtccttatttctcatcatcttttaattcttaaatattaagggggagggggaatctgtgtttgctttgaagtcctgtgcccaggtatttactgtcaaaagttgaaagaaaggtaaggtcccggcttctatcgatgctttttattatcaggaacaaagtcctgacgatgttaacgatattgttataacacaacaacggtaagcaccaaaaaactaaatatttctattttttccttaaaagaaaaaacaacaggataaaccgaacagtggaagcatcactatcaataaggaaactttctcaaagtagcacactagatacaaataacaatctctgtatcttattgcgtcatccaagaatttctcgtatttacagaaaacaaggcaaacttaaacaaataaatctttaaaattatcaccaatgatcgtgaacttacctgatccatgtagtatgtccaaaccaagagtcctatctactagtagannnnnnnnnnnnnnnnnnnnnnnnnnnnnnnnnnnnnnnnnnnnnnnnnnnnnnnnnnnnnnnnnnnnnnnnnnnnnnnnnnntgttaactggtcannnnnnnnnnnnnnnnnnnnnnnnnnnnnnnnnnnnnnnnnnnnnnnnnnctcattaggagagcgcacaaaaatggaggtgcgccatggcttctaagctggaaaaaacaacgacctgggctctcagtacggctgcttctttccaacaaggcacgaaaagaaagctcctaaaagctgcttttctcccaaaaaaaggttcgaatcgaccccagtaagtccctaggaaaggcagggggctacgggggccccctgaggctgcccgaaagttagggaaagttgcgtaaagtgaggcaaaggcagggagcagagcgcgctctctctaaggcacagccgccatctagagccaa

SEQ ID NO: 242077 - DNA, 1024 bp, Homo Sapiens
ttggcacaaataaagataaaacagcacaagcattcttcgccctaaaaccctatagcaagctttcatgacccattccacacctgtcatctcagtacattcaagtgctcacatgggccctcagctagagcatgagcccattcttagatgcctacgctcagaaaacaggcccatgctactctttgtttaaatgcagaaagaggagctccccctaaaacactccaagcaaaatctggacacacaatgccttcaaattgccccaagtcaaccacagaaaatggaagaggagatcacagaaggatttcaaatgcataaagggatgtagattatctttcacacgtgggcaatgctcagaaaagttgatcttgagtaacgagggaaaatatttcattcactatcttgtgcaaagagaaaaaaaccaaaatccacatccacgaccctggagtacagcaaatggaatcaaagtgtgccagcccccaaagattccagcctcctgcagctcctgaccctctggccatttgcagggagctctgcaggcagtctcatctcaatggactgggaccctccagcctgcaccactatggctgttctactctccctgccccctgagcaaggcaaatgcttagtgaaagtgtgaagagtaagagttgaatctgcattttctagtcagacttcagccctctcatagtttaaggggcatcccctctaccgtccagccctgacatcctacaggtgttcagagggggcgtgactgagccaggtcacacagcaagctggtgccagtgccaggagtgaaacaagcccacaactctgatgagcaggatgagaggaggaaggggatgaaggaagtgccctccagcgaaggcaagagtgcaggaatccctaggtagagaaaggtccccccagataagcacctggacaccctgtgcaggctgtgagagccaacagagaggggcagtcggtcaacagagcttctggccaatggctcccagcctggctgttcatcagaatcatccaagctgcccaa

SEQ ID NO: 242078 - DNA, 1645 bp, Homo Sapiens
  misc_feature (1480)..(1495): n is a, c, g, or t
aaaaaaatgaaataccaaccctaatttaaattacttaagtatccaagtctataaaagtaggaggttagaggtctgtggtcaatttgcaaattaggttttagatagttggtatgaaactgtaaacttcgtatccagaccactgaaaaatggtttagaatggtggtcattttaataaggtaacacttcttaataattaagaaaaacatttatggaacaaaattctgtgaaagatatttgggtctctagttatgatataaattcttagaaatttaaagcaaatactcattaaggcaaagctgacatttctcaagaataatgaaaattggatcagtattttgttaaaatgaaatctgttataaaattgcttctggaaagcttgtcagtgagtccagcatccagattctttaatagtagggtcagcagaattgtagctaattttagcattattgaaaaatatatttctgattggctcaggaaattaatgggtcctggacttgggagggaaaagctagtttgagaaatcaatcataagaatcacattatctttgatccaaagtttaataaatgtcagctgtcagaaatggaactttacatcaattccattttatttcctatgtagataacacttgaggacagatggcatatatgtgaatttacggtcttatcccttgatgctgggcatgtcacaggtccttattaaggagtcacaggtccctattaaggagtgtgacatattccattgagtgtcttggtagaattgccctagcaataaatgtgaacatgccacaaattcccaaagtatgaacgatcattttgtcaaagtgttgccttttaaaatggctaacatgaaacctccaatatttgttctaaagaaaaagatttacccactggaaggttttcctagagatacatcccagcagcttgagacagacagtgaagtgtttgtacatctacattagtttggtgggatacacatctgtactgcagagcagctgtctgatgatttgtcagagctgtaaatacgtcggccgaaacactctggcaaacatttatgtgtaagaattgagttgttcttttgaccgagactggatatcttgcagttcctgttcttcctttgctttgatatcctggtaagcctgcattttgctcgcatcctttaagtaagcccagttagaagacagtatcatgaggaagtggatctggaagagaagggtgagcatgatggctagtgagcattgtgagaaggcaaagcgaggcgctagttagattagacagacttgactttaaaggggcgaaggttaattctgtattaataaatactcgctctactagcagagctgtcagatcctgaaagcatgctctactagttggcttcgcattaaaaggctgaagaaaagttagtatacaaacatagtgaactggaaaaaaatggccaaaggtattgttaagaaaaagcaaaaatgaaatacaagagggtgcnnnnnnnnnnnnnnnnaataccattttgagagtaattttaaagactaatgcgaaagttcgggagcacattgtatatttgaagtaagtgtagtgtgtgcaaagaccattttctacctgtggataaaaatcaattcccccaaaggcctaaaagcatgaacaatgccaa

SEQ ID NO: 242079 - DNA, 1480 bp, Homo Sapiens
  misc_feature (571)..(594): n is a, c, g, or t
ttggttcctgtattgctcggcccggggagtttcgccccctgcccggctccgcggcgcggaggatggtgtggaaacggctgggcgcgctggtgatgttccctctacagatgatctatctggtggtgaaagcagccgtcggactggtgctgcccgccaagctgcgggacctgtcgcgggagaacgtcctcatcaccggcggcgggagaggcatcgggcgtcagctcgcccgcgagttcgcggagcgcggcgccagaaaggtaccaggcactgcgactccagggagtggggggccgcaggggcgggggtaagcccacctgctgccgctgcgggatcccgcgcccgggagctgagagtcgccggccaccccacttctccgcgccacccacgagtgctgagctagtcggtttcaccttgtaaatttcccgggcaccggactgtcttttttggcaggttcagagttgatccgctcctttgggatcggtggctggctgactggctattcacccccaccctgaaacctaagagacccaccatttcccacattcctgcctcccaaaggaaggtgttgtgnnnnnnnnnnnnnnnnnnnnnnnntttttcttgccgccaccctggtgagtgcagggtgtggcactcctgggtagagctgggagccgcctgctagctggcgcctcgtattttccttggcaacccgctacccagccccaacctgggcggctgcagctctgaagacacgagagagggtacttggtttgggtttgaaaagggaagagcggtcttgtatgcagtagtctggccggaccgacactgagaggcccaggtgtttggaaagcaggaaagaggaggccaggattgttctctggggccggactgagaaatgcctgaaggagacgacggaggagatccggcagatgggcactgagtgccattacttcatctgtgatgtgggcaaccgggaggaggtgtaccagacggccaaggccgtccgggagaaggtgggtgacatcaccatcctggtgaacaatgccgccgtggtccatgggaagagcctaatggacagtgatgatgatgccctcctcaagtcccaacacatcaacaccctgggccagttctggaccaccaaggccttcctgccacgtatgctggagctgcagaatggccacatcgtgtgcctcaactccgtgctggcactgtctgccatccccggtgccatcgactactgcacatccaaagcgtcagccttcgccttcatggagagcctgaccctggggctgctggactgtccgggagtcagcgccaccacagtgctgcccttccacaccagcaccgagatgttccagggcatgagagtcaggtttcccaacctctttcccccactgaagccggagacggtggcccggaggacagtggaagctgtgcagctcaaccaggccctcctcctcctcccatggacaatgcatgccctcgttatcttgaaaag

SEQ ID NO: 242080 - DNA, 1141 bp, Homo Sapiens
  misc_feature (197)..(228): n is a, c, g, or t
tttgtacaaaaaagttggatctagcatgccaagggagtgaaacaggttctcgggagggttcggatgttgcctgcactgaaggcatttgtaatcatgatgaacacggtgatgactcttgtgttcatcactgtgaagacaaagaggatgatggtgatagttgtgttgaatgttgggcaaattctgaagagaacgacacnnnnnnnnnnnnnnnnnnnnnnnnnnnnnnnngcaagatactgaaatgtgatgaacatatccagaagcttggaagctgtattacagatccaggtaatcgagagacctcaggaaataccatgcacacagtgtttcaccgtgacaagaccaaagatacacatcctgaaagctgttgcagctctgaaaagggtgggcagccattgccttggtttgagcataggaaaaatgtaccacagtttgcagaacctacagaaacgttgtttggtcccgattccggaaaaggtgccaagagcttagttgaactccttgatgagtctgaatgtacttcagatgaggaaatctttatctcacaagatgaaatacagtcatttatggctaataaccagtctttctacagcaatagagaacaataccgacagcatctgaaggagaaatttaataaatactgccggttaaatgatcacaagaggcccatttgtagtggctggttgacaacggctggagcaaattaaataaataaaatagctctgtctttcaatgaaacactcacgatgactactgcgccttctctttcgaaaaactcttaatttagtgacttatggcaaaattttatcttaaatcaatgtgattctttcttgttttgggagacggtggaggtatcctcattagttctttcttcaggcttgtgtctttagttgcgtggctgcgcaggcctgccatatgatttaagccatctcttttcattaaatgttttctcttcctgtgagacttactaaagcaacttagtggcaaaaagtaatgttgtacttataattctgtacagaaatgacaatgagctgaatatatggttttacaaagtagacatccacttgcaaaatgtttggatgtaatgttaaagcgcaatgtgcaaaatttaaaataaagaatatttattaatacgcccagt

SEQ ID NO: 242081 - DNA, 1124 bp, Homo Sapiens
ttggctcttctgcttttccagataattcactgctcattgctgttgcctagtcactcccagtggcatggatagaaataattgtattggagaaatatttatgtaaaatagactgtgacttggtgcttcaaagatgtgggcattatcaaaaggacagttagttgaactgtgcgtgtgacatgatttatctttttaggaaagagattgtaaggaaagcacaacaaaacttgaaaaaccgactttataagaaagtagattgaattgctcacaagttatttgaaatggtatttgtagatcgcctctctcctagtgggtgtttaatctaaccaaaaagagttggctaaactttatatattgataaagtcaaaaaattccttaatattttcaaaacattaccactaaatttgtcttctggccaaggtgaaagaacagagattagacttacctctcttcagaaacagctaaaaaactgaacaaaaacatatgtaacagcagttttcaagacatgagatatcagacagtgaaggacagtgatccctgagagatggaaaacaaatgaggtgaaccttgtgattaacccagcttactaccttgggagagtttcccaaccttgtatagaaagggggacatcaggtggagcctgctgatctgtctgaattgaggagaccaaactggaagtccacagtggctaaggtggcaatactatacaagaaaacatactgaagaagagagagctcacatacagagagaactctggcaatttaccaagggatccctcttgaatctttagctgatgtgaattcaggatgtgaatgaagaggctaccagagctggaaaaagcagttgccaagaagatcacagtcaacaattctcagatctatacatggccaggagtagttcctgttctcactggccaacgtggaaaacttcgtaactcgtgaagcaccaagtaaggctaattggaagccatttccctcagtagtggggccaaattagccttagaataaattcttccctggttcctcctgacaaaacttaaaagcaagacctggtagaatcaaactaatttgtaagcagtttagctacaacagagagcaaagtcagagatttataggaatatgaaaata

SEQ ID NO: 242082 - DNA, 1517 bp, Homo Sapiens
ggcagggacacagacgagcctgtggaaaggtatactgctttaagattgagaagaaaaccatttggcgctctaattttgcctggatggtgctctgtcagtcaaagaaagggaacaggtctggggagggggtaagggcaccctgagttcctgttccatcacttcccaggcagtagaaggctgtccaggaacagctcccatccgcagctgggcatgtgttggctcttacacaagagactttaattttacttgaagaactaagagctaaatcttgttaagtaaatacggggtttcaggggtgaaggactatcaagaaatcccaagttatcagcataaaagtagtcccaaagtaaaggcagtaattctcccaatggccttttctccctcatgcccccacagagactttcgagaggtcctagttagccagccacaccaacctgctgtgttcgcgtaagtagctgtgcctgtcccatggggtgaccactgcctggtcatgggaggggagccccagccccagctccctagccttttccaggagcagagcagaaagctctacttcggggtgctacatcccacctggagaaagagctgcacattctagcctatgagggacccacccttttcacttgcttctccggggctggattgagggtaagtgcagtacacctggagatcccagggagcccccttcttgagaaagagtatcgtatgaaagaatccagcttcagggagcagcaaacccaaaatcttgcccagctccaccttatggagctggacaaccctgggggccaggcccttaatcattctgaacctcagttccttttttttaaaaaaggtcacaatacaagaacaagctctactaactttacagggttactgtgaggctcaagttagattaagttagaaggctacctagaagctgtgcagtgaggtacccagtttagaggatggccatttcacttaggtgggtttatctggacacctttttcactatctggagaagaagacacatactggttgttcagggctgctgtggtcacagagaaaagcggacagcaaatgaccaggctgggcagggctgcttctgtgtgatcagagaccttcacagccgggagtgaggccttacgccacacctgcctctccgtgtcccagccaggagctcctggccaactctgaaaaaggcacattccctaccttggcatattaacactgcctgaatttaaatgtaaaactgagttgtaaatagtcaacaaaagtccctgatatttctttcgttttaggtaagactccttcacaaggccttgcgagtgatcctaccatgaattcagtcttctgggagcgtgacacacccaccagaacaatgccctatatatatttggtgctcaaaaagtgtttaatttcttaaacttttatcagacacctatgtgcaaggtgctgggggcatggctgaggaccttctctttgcccagagtgaccctgaagataaatagcatcacaatcactatccataataacaccaa

SEQ ID NO: 242083 - DNA, 921 bp, Homo Sapiens
actttgtacaaaaaagttggcctcaatccagccccggagaagcaagtgaaaagggtgggtccctcataggctagaatgtgcagctctttctccaggtgggatgtagcaccccaaagtagagctttctgctctgctcctggaaaaggctagggagctggggctggggctcccctcccatgaccaggcagtggtcaccccatgggacaggcacagctacttacgcgaacacagcaggttggtgtggctggctaactaggacctctcgaaagtctctgtgggggcatgagggagaaaaggccattgggagaattactgcctttactttgggactacttttatgctgataacttgggatttcttgatagtccttcacccctgaaaccccgtatttacttaacaagatttagctcttagttcttcaagtaaaattaaagtctcttgtgtaagagccaacacatgcccagctgcggatgggagctgttcctggacagccttctactgcctgggaagtgatggaacaggaactcagggtgcccttaccccctccccagacctgttccctttctttgactgacagagcaccatccaggcaaaattagagcgccaaatggttttcttctcaatcttaaagcagtatacctttccacaggctcgtctgtgtccctgccactctgagttatccagaaaccaccacctacaaatgaggggactcatctagaagacctctaaggtccccttttggctctgaggggtctctaataatccccacttggaattcagcaccgcaaggaaattatgggtatgtgagccataatatgatggccagcagtggcgctgccttccacccatggtgatggatggtttggaaagggaatgttgggtgccttttgtgccacaagttaagatgctactgttttaaag

SEQ ID NO: 242084 - DNA, 925 bp, Homo Sapiens
taagaaactgctagtcattttacttatgttgctctgtaacttttggtttttcactgtagcatttccatttatttttagtgtgtgattgataaaacatggctggagatggctatgaatcgctgagtaagcttcagacagcggttctgcatgggtcatcacactataatttacagaacatacagtcttagtgttgtattttttctttataaaagttgtacttaaagaagagttataatcagttttaaaggcaagacaaattagttggtgtaaaaactgtgtatttaggctgtgtttcacaaaatttcccagtcaatggcctatggaacgtgtcagttctttattgggatttgcataatgttaaaaaacctattaaaataaatattattttaaaacatacaaaaacattattcagcagcctaccaattaaaatgtaattggctgcaacctctgtacaagaaaagcctcaaaaagcagcttaagcattgattataagagctttcctacaaaataccgatgtggaaaatttcattttaaaatttctgttgtaatcagagtttctataaatagatttgactacttggtgttgcagaaaaacactgtagagaccctctatgttctaatctttcaaactcaaatttcagggtgtatttctctccttaaatgcaaatcttttgcttcagcattgggagcacgcgttcatcaagaaacccacttttacaagggctggagaaaacagaaatttcagcatctaagatgagtgtatcaacgaccagccactcattaaatgcacactgggttaaatgcagcagttttataaggtattgagggcagttaagattacatctcacagtgttatttaggattctgcacctatattaaatttcccaggaagaactattaacgcctggaccaacttttttggaca

SEQ ID NO: 242085 - DNA, 1240 bp, Homo Sapiens
gcgtgagccactgcaccgggcccatttaatactctgagccccacctttcccatctgtggatggagccccatgtggaacccaaggatgcagctgctctgctaacacggcagcccatccttcgagactgtgacctcgccacagtggccctcagccctccacctccggcgggggcgagggccacccacctccaagtctccagccatgacgacctccgcactccggcgccaggtgaagaacatcgtgcacaactactccgaggcagaaatcaaggtgcgcgaggcctccatcaatgacccctggggcccccctagttcgctcatgtccgagatcgctgacctgaccttcaacacagtggccttcaccgaagtcatgggcatgctgtggcggcggctcaatgacagcggcaagaactggcggcacgtgtacaaggctctaacattgctggactacctgctcaagacgggctccgagcgggtggcccaccagtgccgcgagaacctctacaccatccagacactcaaggacttccagtacatcgaccgcgacggcaaggaccagggcgtcaacgtgcgcgagaaggtcaagcaggtgatggccctgctcaaggatgaggagcggctgcggcaggagcgaacccacgccctcaagaccaaggagcgcatggcactggagggcatcggcattggcagtgggcagctgggcttcagccgccgctacggcgaggactacagccgctcccggggctccccgtcctcctacaactcctcctcttcgtcaccccgctatacctccgacctggagcaggcccggcctcagacgtcaggggaagaggaactgcagctgcagctggccctcgccatgagccgtgaggaggcagagaaggaggtgaggtcctggcagggtgatggctcccccatggccaatggtgcaggggccgtggtccaccatcagcgggacagagagcctgagagagaagagagaaaggaggaggagaagctaaaaaccagccagtcctccatcctggacttggctgacatcttcgtacctgccctggccccgccctccacacactgctctgctgacccatgggacatcccacgttttatgccgaacacagaggccagtggatcctcctgggggccttctgcagacccctggtctccgatcccctcggaaccgtcctgtcccgaagccagccctgggatctgactcccatgctctcctcctctgagccctgggg

SEQ ID NO: 242086 - DNA, 583 bp, Homo Sapiens
taagggccttttcttggggctctcaatgcatacctgtgtaagtggaaaattcctgcgtgaacttgttttacatttccagtacagctaacagacgacaaaactgactctaagtagagacaagcaaagtcttgaatctctatagtattctcaaataaggtcctgaaacaacaggcttttatgttaaattcaatacttctgagcaaggcacgtacagtatcattgatttgtaagcaggtaaagcacagtacctttccttgtttcctagaattcctaaggaggaacaacaacaaaatcggggtttgttcagcaattgcaccacatctctaaaaattaaaacattattcagtaagtgaaggtttctgataaacaagtggatcaaactgaatatttccaattaagaaagttcacaataatacagtagtgtattattaccaataggaaggcctaatagtcgactattattttttaaggcaagaaaaaagaaaacaagtgcaagctatgccaagctttggtgaatgctgtccttggcattgcaagtataaagtttgtttaaaaagaaaagggaaaaattaaactaatccaa

SEQ ID NO: 242087 - DNA, 1465 bp, Homo Sapiens
actttgtacaaaaaagttggccctgctatgcgccgcgccccctcccgagcactgtcccctgcttccctttctccctagggtggcgtgggttgcatccctcggaagagcgaaggaatgagccaggtcggggggcggggagacaggtgcacacaggaggtccagggcttggtccatggggctggtgacctttctgcttcccttgcagaaaactctcccaccatgtcgcagaatggatacttcgaggattcaagctactacaagtgtgacacagatgacaccttcgaagcccgagaggagatcctgggggatgaggccttcgacactgccaactcctccatcgtgtctggcgagagtatccgtttttttgtcaatgtcaaccttgagatgcaggccaccaacactgagaatgaagcgacttccggtggctgtgtgctcctgcacacctcccgaaagtacctgaagttaaagaacttcaaggaagagatccgtgcgcaccgcgacctagatggcttcctggcgcaggccagcatcgtcctgaacgagacggccacctccctggataacgtgctgcggaccatgcttcgccgcttcgcccgggaccctgacaacaatgagcccaactgcaacctggacctgctcatggccatgctcttcaccgatgccggggcacccatgcggggtaaagtccacctgctgtcagataccatccaaggggtcaccgccacagtgacaggggtgcggtaccagcagtcgtggctctgcatcatctgtaccatgaaggccctacagaagcggcacgtgtgcatcagccgcctggttcgcccacagaactggggggagaattcctgtgaggttcggttcgtcatcctggtgctggccccacccaagatgaaaagcactaagactgcgatggaggtggcgcgcacgtttgccaccatgttctcggatatcgccttccgccagaagctcctggagacccgcacagaggaggaattcaaggaggccttggtgcatcagagacagctgctcaccatggtgagccacggtccagtggcgccgagaacgaaggaacgcagcacagtctccctccctgcccacagacacccagagcccccaaagtgcaaggactttgtcccttttgggaagggcatccgggaggacatcgcacgcaggttccccttgtaccccttggacttcactgatggcattattgggaaaaacaaggctgtgggcaaatacatcaccaccaccctgttcctctacttcgcctgcctcctgcccaccatcgctttcgggtctctcaatgacgagaacacagacggggccatcgacgtgcagaagaccatagccgggcagagcatcggggggcctgctctacgcgcttcttctctgggcagccattggtgattctgctgaccaccgcgcccctggcgctctacatccaggtgattcgtgtcatctgtga

SEQ ID NO: 242088 - DNA, 890 bp, Homo Sapiens
ttggtgaaaggtgaggggaacagctgatccgtctgttgggaggacagatatctcaaggccaggatggaagaatcaccactaagccgggcaccatcccgtggtggagtcaactttctcaatgtagcccggacctacatccccaacaccaaggtggaatgtcactacacccttcccccaggcaccatgcccagtgccagtgactggattggcatcttcaaggtggaggctgcctgtgttcgggattaccacacatttgtgtggtcttccgtgcctgaaagtacaactgatggttcccccattcacaccagtgtccagttccaagccagctacctgcccaaaccaggagctcagctctaccagttccgatatgtgaaccgccagggccaggtgtgtgggcagagcccccctttccagttccgagagccaaggcccatggatgaactggtgaccctggaggaggctgatgggggctctgacatcctgctggttgtccccaaggcaactgtgttacagaaccagctcgatgagagccagcaagaacggaatgacctgatgcagctgaagctacagctggagggacaggtgacagagctgaggagccgagtgcaggagctcgagagggctctggcaactgccaggcaggagcacacggagctgatggaacagtacaaggggatttcccggtcccatggggagatcacagaagagagggacatcctgagccggcaacagggagaccatgtggcacgcatcctggagctagaggatgacatccagaccatcagtgagaaagtgctgacgaagaagtggagctggacaggcttagagacacagtgaaggccctgactcgggaacaagagaagctccttgggaactgaaaaagtacaagc

SEQ ID NO: 242089 - DNA, 940 bp, Homo Sapiens
gatgtgggaggccgcgggcggtggcggcctcgcgcacaatgagcccaagccgagctagcaaagggggagattgcacaacacttagaagcgaagcagactgggggaggggaacgcctcaggccaccatgtgctcgctccctcgaccacccggcggcgtctcccacccctccatggaacaatccacatcccgcccgcccccgtcgcgaagtagcgtcgccctcccatacctcaggccgctcacccccgaaggaaggtggacctgcccatccgcagtttgccaatagcccggcttgtgcggcaaaatggacccgcccgcccggcgccgggtgggctcctggtgcctcacgcggccgctcctcggggttaggctcagtcctggccgtcaagaaaaccagcacactgaacggccggtttcttctccccgacccgtgttttagccgcgacgaagtgactggatctaaggaccaggcacccccgcctctcgcgagtggtaccgtcagaatgctccggaaccccgcgcgccgtccctcccccggcacagggaggcaaccggacctgccggctctgggccacacatagtggcggccgcctccacctttctttcccacgccaggtcgcgaccccgtctcgccactcagcgccggggcttcgcgcatggcaccgcctcgggtcgaggcctcgtaacagacctcgcacgcctgaccctagccgggctgtccctaccctccgcctcgacctggtggccgcgtcggccgtgggtcttccccctcgcccctccaagtcggaccctccccccacccggttcggtttctcccgcaaccctggtgggcctctcagctacccccggcgggcccgtcggaagggggcggcaaaataagcagccacaatctcttgcaaatgcctttcttaccgggaatcctggctcgcagacatgatccaa

SEQ ID NO: 242090 - DNA, 1174 bp, Homo Sapiens
gtattagctggaatttactaaaaaagaaaacttcccttatcaacaatttgttaccctaaagtagacgttgtacaggaaagtctaactactgctttgctgttgttctttgtcttctctcattctcaaggatagcactccaaccctataatttcaatagaaatggaccagattaggtattcgaaaagtaaattttccataaattgaggaaaaaattccctcatcacctctaacctgtatatatccctttcttcctcattccctttagctggaacccccaggcagttttcccactaagaaactttcctaagcataagaataaaactgtgctagctggagatgaggagagaggtccctgactcaggatcagtataagaaaggctgcaagaaaggaagacctagaatgaacagaagcttttaagaagtgccaaggattacaaaggctttggagtaagaacaaagatcatacagagattgtatgccgccttttgctgaatctctgaacgagaaatggcaactaaaggcatcttgtccaaagagcccttattttagattctatgtgtttcaactattttaacccatgtttattttttatagaattcattatttcaaaaacattttttaacctttccatcaggatgactgatttctccctgtatgtcttggtcttcctcctcctctttatattcaggatctgggaagttcagtggttcaagtggctccctgggagaggcagcctgtaagcacaacacatttcaagcagctaaaacctactcttacttccaaagccagattctgatatagggttctaggactagtgtttacaaaatataacatttataatgttaagtaaaaactcttttttacacgtggtttagaaacgttaagtctattaacaaattgatttcaagcctaagtaatgtatgtttgaagaatatataaaaacagagatttacttgtcccttatccaaattgcctaaatcacgaggaggtgcagacttggatcttcgaggtggattgcctattagaataaaattgtcaagagttagatttaatatttaattgaaaattttattagtatgatcacacatttccttagttcatatcctgtgaactgctgtcctttatccattagttaaggatgtcttaatatttttctttactaatttgtagccaa

SEQ ID NO: 242091 - DNA, 1007 bp, Homo Sapiens
ttggcttgggtttcataagagcctgagagagatttttctaagatatgtgtaacacaccaacgtactgtgacctaggaaaggctgctaaggatgtcttcaacaaaggatatggctttggcatggtcaagatagacctgaaaaccaagtcttgtagtggagtggaattttctacttctggtcatgcttacactgatacagggaaagcatcaggcaacctagaaaccaaatataaggtctgtaactatggacttaccttcacccagaaatggaacacagacaatactctagggacagaaatctcttgggagaataagttggctgaagggttgaaactgactcttgataccatatttgtaccgaacacaggaaagaagagtgggaaattgaaggcctcctataaacgggattgttttagtgttggcagtaatgttgatatagatttttctggaccaaccatctatggctgggctgtgttggccttcgaagggtggcttgctggctatcagatgagttttgacacagccaaatccaaactgtcacagaataatttcgccctgggttacaaggctgcggacttccagctgcacacacatgtgaacgatggcactgaatttggaggttctatctaccagaaggtgaatgagaagattgaaacatccataaaccttgcttggacagctgggagtaacaacacccgttttggcattgctgctaagtacatgctggattgtagaacttctctctctgctaaagtaaataatgccagcctgattggactgggttatactcagacccttcgaccaggagtcaaattgactttatcagctttaatcgatgggaagaacttcagtgcaggaggtcacaaggttggcttgggatttgaactggaagcttaatgtggtttgaggaaagcatcagatttgtccctggaagtgaagagaaatgaacccactatgttttggccttaaaattcttctgtgaaatttcaaaagtgtgaacttttttat

SEQ ID NO: 242092 - DNA, 913 bp, Homo Sapiens
gacaaaaatttgaatgaatatatttcataattagtattacctctgtgtaaagaaagatgcccaaggattaggagtgatgatgaaaggacaattattgccattttttataaagtacatagtcatgtataatgtttacgtttttaaaagttaattggcaatacttactaattgatcgatttggaaaaggaacaagacagagatgtcaaaaatggtgaattatctagcttaatcagttagatggatggtggtgaaatttggaaggactaggtactttagaaaaaaaagtattttggtggcaaagagaacgatgagttagattcagaagtattagattcagatgttgaatgaatgatttgatgctagggcttgaagtttaggaaactgatttactctaagctggggattaaaatgtgtagctcatctgcaagatgatggcaattgaagccgtattggtgaatgagaatttctaaggaaaaagtatagtgaagagatgactcaggacaaatccctgcataattccatccttgaattgttgaatatggtggaaagggaggccaaagaaggctaggaataagtgtccagagatgtagaggaacacaaaacatgagagtaaaatcacaaaacacgagagtaaaatcacaaaacatgagagtaaatatcacaaaacatgagagtaaatatcacaaaacacgagagtaaatatcacaaaacatgagagtaaaatcacaaaacatgagagtaaaatcacaaaacatgagagtaaatatcacaaaacacgagagtaaaatcacaaaacatgagagtaaatatcacaaaacatgagagtaaaatcacaaaacatgagagtaaatatcacaaaacatgagagtaaaatcacaaaacacgagagtaaatatcacaaaacatgagccaa

SEQ ID NO: 242093 - DNA, 1547 bp, Homo Sapiens
ttggtgaagttctgcaggagttcagcaggcgggaaaacctcaatgctcagatgtcttcagtatttcagcgttaccttgcactcgccaatcaagtcttgagctggaactttcttcctccaaatttgggcagacattatatagctatgtttgaatcctcgcaaaatgtgctgttgaagccaacagagtcctggcgggagactcttctggacagcagagttatggagcttttcttcacagtacatcgaaaaatcagagaagattcagatatggcacaagattctctgcagtgccttgcccagttagcttctcttcatggacccatcttcccagatgaaggatcacaagttgattatctagcacacttcattgagggattactgaatactatcaatggaattgaaatagaagattctgaagctgtggggatctccagcattatcagcaacctgataaccgtgttcccacgaaatgttttaactgccattccaagtgaacttttctcctcctttgttaactgcctcacacacctcacttgttcttttgggcgaagtgctgcattggaagaagtgcttgataaagatgacatggtatacatggaagcatatgataaattgttggagtcctggttaactttggttcaagatgacaaacatttccataaaggcttttttacccaacatgcagttcaagttttcaattcctatattcagtgccacctagctgctccagatggcacaagaaatttgactgccaatggtgtggcctctcgtgaggaggaagaaataagtgaacttcaagaggatgatcgagaccagttttctgatcaactggccagtgtaggaatgctaggaagaattgctgcagaacactgtatacctcttctgacaagtttattagaagaaagagtaacaagactccatggtcagttacaacgacatcagcaacagttacttgcttcaccgggttcaagcactgttgacaacaaaatgcttgatgatctctatgaagatattcactggcttattttagttacaggctacctcttagctgatgatactcagggagagactccgctaatacctccagaaataatggaatattccattaagcattcatctgaagttgacattaatacaacacttcaaattttgggatctccaggagaaaaggcttcttccatcccagggtacaacagaacagattctgtgattaggctgttgtctgccattctcagagtttcagaagttgaatctcgagcaataagagcagatctcactcatctactaagtccccagatgggcaaagatattgtttggtttttaaaacgctgggcaaagacttatctcctggtggatgaaaaactgtatgatcagataagtctgccattcagtacagcgttcggagcagatacagagggttctcagtggataattggctacctcttacaaaaagtcatcagtaacctctcagtctggagtagtgagcaggaccttgcaatgacaccgtgcagctccttgtcactttggtggaaagagagaaagggcaaa

SEQ ID NO: 242094 - DNA, 1058 bp, Homo Sapiens
ttggcaaagaacctggcaaaagaagtggccatgtgaagagggacactcaggacactttacgggatcaaagtgggtctgcaccagtgctgcttcctgaatgtttgtgtgtgaacccttgtttcctccaaaacaaacgacagcaacgaaaactccttaatcagaacactgatccaatgaggaatggagcttgtttctgtgacccaggagaacttagtgcaagactacaggagttaacagatggccagctccttattttttaatgtagaataactcctgagtttatatcaaatcctgaagaaataagcctcagttttccatctgtttttgataagaataagaaagggagtgagtgtgaagatggtggttagcagtttcactagactgatattttaggcctcttgttcacatcaaaagatattggtgtcagaataccagcattttcctgccatgcaaaggattaaaacttagtttacactatgtggttacaaatatatgtcaatgtacattttgaacatatttatgtgctatggaaggaaatgctggtgactaaaataaggtttactctgaaagaggaggaattttattcaaagcattcaaacattttattcaagtgtttcaaaattcaaagcattgtattcaaagttgcagtgaaggcatcaacttatgtaaaaactcagaaggaaggctcctctgataaaaacacagctcctttattatgctgcttttcttgttcactttacacactaagtaaacacttattgtcaggtgcctagtcttgagtgaattgttagatgtgcactgaactcgggatgttggggattggagagagagaattgccaaagtaacagcaaaaatatctcttactttgctttgtttataaataaattagtagattggaaaaactagtgttagggaaagaaatcacatgttcagagcctaattcagtagaagggcttttctctaccctgaaatgaagtaatccaaaggcatccattttctaggcttaaagatatatttttgatatatttaatgatattctctacactccagcattaata

SEQ ID NO: 242095 - DNA, 1287 bp, Homo Sapiens
ttggctcgaaatttccaggcacatgtgtctccccatgagatgcttcaggcagttgtactttgcagtaagaagacttttcagatcaccaaacaaggagatggcgttgactttctgtcttggtttctgaatgctctgcactcagctctggggggcacaaagaagaaaaagaagactattgtgactgatgttttccaggggtccatgaggatcttcactaaaaagcttccccatcctgatctgccagcagaagaaaaagagcagttgctccataatgacgagtaccaggagacaatggtggagtccacttttatgtacctgacgctggaccttcctactgcccccctctacaaggacgagaaggagcagctcatcattccccaagtgccactcttcaacatcctggctaagttcaatggcatcactgagaaggaatataagacttacaaggagaactttctgaagcgcttccagcttaccaagttgcctccatatctaatcttttgtatcaagagattcactaagaacaacttctttgttgagaagaatccaactattgtcaatttccctattacaaatgtggatctgagagaatacttgtctgaagaagtacaagcagtacacaagaataccacctatgacctcattgccaacatcgtgcatgacggcaagccctccgagggctcctaccggatccacgtgcttcatcatgggacaggcaaatggtatgaattacaagacctccaggtgactgacatccttccccagatgatcacactgtcagaggcttacattcagatttggaagaggcgagataatgatgaaaccaaccagcagggggcttgaaggaggcgtctagggctttgctcccaagggctgtggctgatgatggtaaataagaacacagaagctgtagctgaacacaggctggctggtgggcttcctaggccagcccagcttgtatgggttctggctacaccagagcaccaagagcccacttgcctgggatggccccacactgtcactcagctgttctttgatcatttttttctagattgatgctcctttctcccatgcattgagctcccatctagcttcagcaggggcagaacccttctccagatgtgtgtaacttatgtcttgagtatctgggagtagttgaagaacagataattccttcaaacatcaagccttgggattcttggagcaagcagaaagccagtaacttcgctctgttagaggtggaggattttccctatggttccccccatttcctgaattgtattttta

SEQ ID NO: 242096 - DNA, 1190 bp, Homo Sapiens
  misc_feature (589)..(710): n is a, c, g, or t
ttggcgacgcagccgggacggtagctgcggtgcggaccggaggagccatcttgtctcgtcgccggggagtcaggcccctaaatcgaagaagccctggcgcgccctccccccctcccgggtctggtagggcgaaggaacgggcgtgcggtcgatcgagcgatcggttggcggctctttctcctgctctggcatccagctcttggggcgcaggcccggccgccgcggcgcgcgcccggtggccgttggcgctcgcgccgcgtctttcttggctcgtacgcagaactcgggcggcggcctatgcgtttgcgattcgacgaggagtcgtccgggtggtcggcggcggcgggcagctgctccgccccgctccgggggaggcggcggcggcagcggccgcgggatttggagcggccggggaggcgggggtggccggggccggcttggaggcctggcgccacccttcggggcctgcaaggacccagttgggggggcaggagggggccggaggatggttggttgtgggatttctactttgccttttcctccttatgccgccttagtgaggggcgggagctctggcggcagccccggnnnnnnnnnnnnnnnnnnnnnnnnnnnnnnnnnnnnnnnnnnnnnnnnnnnnnnnnnnnnnnnnnnnnnnnnnnnnnnnnnnnnnnnnnnnnnnnnnnnnnnnnnnnnnnnnnnnnnnnnnncctatcaatgtgtgtggggttgaaatcgctttgtaaactataaagcgtgggtgtacgtaaaggatggttattgtttataattttttttgagttgtaagaaaacttagcagttccccaatccttgggttttgaacctgggaaccttggattggagttggggatccccaaacttcctgaaattgtgggaatgtgcggtttgggggaatgatgggaatttgtgggaatgtgcgttttaggggaatgatgatccatcgctagcaagttttccaaggggggctgtgacccagaagagttaagaatcacaatttcttcatgctacagagaggaaactgaggccctagatgtcattttgggacccttcacaaccattttgaagcccctgttttgagtccctgggatatgtgaactgtttctatgcataatgggatattcggggttaacacaagtcccctgctttggctttctattctgaatcctttt

SEQ ID NO: 242097 - DNA, 909 bp, Homo Sapiens
  misc_feature (818)..(828): n is a, c, g, or t
tctacccaaaacttaagcaaatctcagagagaaactttaaaaataacatttattttgatcattcaaaatgtttcaatcaatattctgagcctaaacgtgtaggtgagtgctttctccatctttgcacatgtgaagtgcgcttgaaccatagccccacattttctcaaacaccatcacactcatagaacagaaaggaaagggcagtttcaccagctagcccccataaaccactccctagggtcctccccagcacctgctaaatttgggaggcctgattccagggggctggataatgagctggcaaaataaacccagaagaatcgtaattgcagacaaagataaactcaggttccagcacagatagacagcccataccagtgcttttgatattagctgcagttaagcgggcaggaaaggctcccactctatggccggtggtgtggtcagctcagcgccgccacctcggcaggttccatcccaccatcaccctcccaatcaggctgatagtgtctccttatgccaagtggaaggaactgcaatcaaattctgacacgacctgcaaatcctccagggccctgggctactggttaggccagtagggctgtgtatcaaccgattaaaccaattaataactggcagcacagcacggcctccttctcaacaaattacgatgctgatccccagactcggccatccatgcccatggtctattgttcttacgctttcaaaacgcctcccctgcttcatgctttctagtcttgaggacttggcttaaatatgcttctgaattgccactccctcttgttgacaattcttcnnnnnnnnnnnggggagacggagttgctcttgtcgacccaggctgccaacttttttgtacaaagttggctattataagggaaagcattgctc

SEQ ID NO: 242098 - DNA, 1860 bp, Homo Sapiens
ttgggacccagcgggccaggtggggacggcgcggagcgggtgcgggagatgccgtgcgggactggggccacctgagccgcccgcctcgtccccgccttctgtgggaaggatgtgcgcgcggatggccggtcgcacaacagcggcccctcgggggccctacggcccctggctctgcctcctggtggccctcgccctggacgtcgtgagagtggactgtggccaggctcccctggaccctgtctacctgccggcagccctggagctcctagacgcccctgaacacttccgtgtgcagcaggtgggccactacccacctgccaactcctctctgagctcccgatctgagacctttctgctcctacagccctggcccagggcccagccacttctccgggcctcctacccaccttttgccactcagcaggtggtcccccctcgagtcactgagccccaccaacggccagtcccatgggacgtgcgggccgtttcagtggaagcggctgtgactccagcagagccctacgcccgggttctcttccacctcaaagggcaggattggccaccagggtctggcagcctgccctgtgcccggctccatgccacacaccctgcaggcactgctcaccaagcctgccgcttccagccatccctgggcgcctgcgtggtggagctggagcttccctcgcactggttctcacaggcctccaccacacgggccgagctggcctacacgcttgagcctgcagctgagggccctgggggctgtggctccggcgaggagaacgaccctggggagcaggccctcccagtggggggtgtggagctgcgcccagcagaccccccgcagtaccaggaggtacctctggacgaggctgtgactctgcgggtgcctgacatgccagtgcggcccggccagctctttagtgctaccctcctgcttcggcacaacttcacagccagcctcctgaccctgcggatcaaggtgaagaaggggctgcatgtgacagccgcccgcccagcccagcccacactctggactgccaagctagaccgcttcaagggctccaggcaccacaccaccctcatcacctgccaccgtgctgggctcacagagccagattccagcagtccccttgaactgtctgagttcctatgggtggactttgtggtggagaatagcactggtgggggcgtagcggtcactcgccccgtcacgtggcagctggagtacccaggccaggcccctgaagcagagaaggacaaaatggtgtgggaaatcctggtgtctgagcgggacatcagagcccttatcccactggccaaggctgaggagctggtgaatacagcaccactgactggagtgccccagcatgtccccgtgcgccttgtcactgtggacggcgggggggccttggtggaggtgacagagcatgtcggctgcgagtctgccaacacacaggtcctgcaggtgtctgaggcctgtgatgccgtgttcgtggctggcaaggagagccggggcgcccggggggtgcgagtggacttctggtggcgccggctccgcgcctcgctgcggctgaccgtgtgggccccgctgctaccgctgcgtatcgagctcaccgacaccaccctcgagcaggtccgcggctggagggtacctggccctgctgaagggcctgcggaacccgctgcagaggcgtcagatgaggccgagcggcgcgcccgtggctgccacctgcagtaccagcgggccggtgtgcgcttcctcgccccttcgcggcccacccgctggacggcggccgccgcctcacgcacctgcttggccccgactggctgctagacctgtcccaccttcgtggcgcc

SEQ ID NO: 242099 - DNA, 1351 bp, Homo Sapiens
gacactgactatgcccactgggggacaattagacatttgcattgcttagaacacatataggaaccagggactgactgctggaaagtactgtgattcttttcttccaacagctcatttatttaggcccaactacagcccactcattcatggcatggacggacaaacacaattagtctaaagtactaaggtggagagaaatgttaaggatttatctgtcattagacaatgcaaacacagtcacaatgtaaaaggttgttatcagtcttaacccctattttctaaaatacagcaatgtgagaaacatggacgaaagcagttcgagttgcaaactttggtcttcccctgcacctcaggggaagcacctatttgagactagcactaatacctacgacggcacatgcttagtaaacaagcactccaactagcaaagaatgtattcacaactgatttccaactctaccggaaaacttctcaataggggccactgcctacaattctttggtgttttgtggccaaatgtgttacttgtgcaccaaagagttttttaaaaagagatttgcctacgggtgagcactgaagtatacattgtgccaatgtaattattgtcttggagaccttctagaacttgctaaatcatatagcaagaagagaatgagttcaggcccagtaaatctggtgagttaatttacatctgtgatactgccgtttttcccattaaatgtggttatggcaaagcattcttagggtaataaataaataaataaactttggacaatgcctttacttgtgccctatatacagaactattccatagaattttccaggatttcaagatactacacaaagaaaaaaactgtaaagcaatttggtcctttccaaatttcagcagctgagactgaattaagtaaatcagatgggagtggggagaagggcagaaagcagcctccccttaccctatcagcacaaccaaaccccatgaaatcccattaaaagttggtgagtctgagaaaagcgatctccacggtttctctacctctaggatgtcatttaaatttccattttgtcctccttccctgtcttgacattttaaaaatccacccctccccaacccaccctccagttatgctccaaattgtaactcaaaaattttcatgtttgtgcagcaaagcacatctcaacagccacaaaatgtgcaaaacgtacaaccattcacacacgtccatacatgtgaagacagctgtaggcattgtttcagcatgcaggcatcgaacaataaatagctaaatctataacaaacttcttaacagccaagggaaagtttaaagtcacttataaatagaaaagaacccaa

SEQ ID NO: 242100 - DNA, 1348 bp, Homo Sapiens
  misc_feature (65)..(118): n is a, c, g, or t
ttggcacagctcgctggctcccgccgcggaaaggcgtcatgccgcccaaaaccccccgaaaaacnnnnnnnnnnnnnnnnnnnnnnnnnnnnnnnnnnnnnnnnnnnnnnnnnnnnnnccctcctgaggaggacccagagcaggacagcggcccggaggacctgcctctcgtcaggcttgagtttgaagaaacagaagaacctgattttactgcattatgtcagaaattaaagataccagatcatgtcagagagagagcttggttaacttgggagaaagtttcatctgtggatggagtattgggaggttatattcaaaagaaaaaggaactgtggggaatctgtatctttattgcagcagttgacctagatgagatgtcgttcacttttactgagctacagaaaaacatagaaatcagtgtccataaattctttaacttactaaaagaaattgataccagtaccaaagttgataatgctatgtcaagactgttgaagaagtatgatgtattgtttgcactcttcagcaaattggaaaggacatgtgaacttatatatttgacacaacccagcagttcgatatctactgaaataaattctgcattggtgctaaaagtttcttggatcacatttttattagctaaaggggaagtattacaaatggaagatgatctggtgatttcatttcagttaatgctatgtgtccttgactattttattaaactctcacctcccatgttgctcaaagaaccatataaaacagctgttatacccattaatggttcacctcgaacacccaggcgaggtcagaacaggagtgcacggatagcaaaacaactagaaaatgatacaagaattattgaagttctctgtaaagaacatgaatgtaatatagatgaggtgaaaaatgtttatttcaaaaattttataccttttatgaattctcttggacttgtaacatctaatggacttccagaggttgaaaatctttctaaacgatacgaagaaatttatcttaaaaataaagatctagatgcaagattatttttggatcatgataaaactcttcagactgattctatagacagttttgaaacacagagaacaccacgaaaaagtaaccttgatgaagaggtgaatgtaattcctccacacactccagttaggactgttatgaacactatccaacaattaatgatgattttaaattcagcaagtgatcaaccttcagaaaatctgatttcctattttaacaactgcacagtgaatccaaaagaaagtatactgaaaagagtgaagatatagatacatctttaaagagaatttgctaaagctgtgggacagggttg

SEQ ID NO: 242101 - DNA, 401 bp, Homo Sapiens
  misc_feature (139)..(169): n is a, c, g, or t
ccccttgcagttctctctgatttggtttgttctgtctcaggcttctgtggcaggactggcccagggaggaggaagccagcagcacacctggggaatggggtcccggccgggaggcttggcctctgggcgacctcgtccnnnnnnnnnnnnnnnnnnnnnnnnnnnnnnnaaaggtaaacctcctgggccgcagatggcaaagggagtgcctgggcctggtgacccagggctggatccacccctgcggagccctgggccaggcaggtgtctgctgctcacctggctctggagggctgccctgcagctgggcctggggacaggtcggctgtggggcagctcagtaccctccctgaggctcacggtggctccgagcatgagggtccgcctcctgggcgagaccc

SEQ ID NO: 242102 - DNA, 1326 bp, Homo Sapiens
ttgggaaagatcccgaaaggaggaagaggtggcgaaaaatcagctgccctgctggatttgtctttctcagcaccttggcgaagccttgggtttctttcttaaaggactgatttttagaactccacatttgaggatcacagtcaccttctatatagcaccatccccaggatgcaggagccggggcagattgtggagacctacacggaggaggatcctgagggagccatgtctgtagtctctgtggagacctcagatgatgggaccactcggcgcacagagaccacggtcaagaaagtagtgaagactgtgacaacacggacagtacagccagtcgctatgggaccagatgggttgcctgtggatgcttcatcagtttctaacaactatatccagactttgggtcgtgatttccgcaagaatggcaatgggggacctggtccctatgtggggcaagctggcactgctacccttcctaggaacttccactaccctcctgatggttatagtcgccactatgaagatggttatccaggtggcagtgataactatggcagtctgtcccgggtgacccgcattgaggagcggtataggcccagcatggaaggctaccgggcacctagtagacaggatgtgtatgggccccaaccccaggttcgggtaggtgggagcagcgtggatctgcatcgctttcatccagagccttatgggctagaggatgaccagcgtagtatgggctatgatgacctggattatggtatgatgtctgattatggcactgcccgtcggactgggacaccctctgaccctcgtcggcgcctcaggagctatgaagacatgattggtgaggaggtgccatcggatcaatactactgggctcctttggcccagcatgagcgaggaagtttagcaagcttggatagcctgcgcaaaggagggcctccacctcctaattggagacagccagagctgccagaggtgatcgccatgcttggattccgcttggatgctgtcaagtccaatgcagctgcatacctgcaacacttatgctaccgcaatgacaaggtgaagactgacgtgcggaagctcaagggcatcccagtactggtgggattgttagaccatcccaaaaaggaagtgcaccttggagcctgtggagctctcaagaatatctcttttggacgtgaccaggataacaagattgccataaaaaactgtgatggtgtgcctgcccttgtgcgattgcttcgaaaggctcgtgatatggacctttactgaagttattacccggaaccctgtggaatctttcatcccatgactcaatcaaaa

SEQ ID NO: 242103 - DNA, 835 bp, Homo Sapiens
caggaaagatcccgaaaggaggaagaggtggcgaaaaatcagctgccctgctggatttgtctttctcagcaccttggcgaagccttgggtttctttcttaaaggactgatttttagaactccacatttgaggtgtgtggcttttgaagaaaatgtatgtactgacgggaaaaggaggataagcaagtcgaatttttgtcttacgaacggccggtttgtgggcgatgctgaccttgaaagacagaaattttcagatttgaaactcaacggaccccaggatcacagtcaccttctatatagcaccatccccaggatgcaggagccggggcagattgtggagacctacacggaggaggatcctgagggagccatgtctgtagtctctgtggagacctcagatgatgggaccactcggcgcacagagaccacggtcaagaaagtagtgaagactgtgacaacacggacagtacagccagtcgctatgggaccagatgggttgcctgtggatgcttcatcagtttctaacaactatatccagactttgggtcgtgatttccgcaagaatggcaatgggggacctggtccctatgtggggcaagctggcactgctacccttcctaggaacttccactaccctcctgatggttatagtcgccactatgaagatggttatccaggtggcagtgataactatggcagtctgtcccgggtgacccgcattgaggagcggtataggcccagcatggaaagctaccgggcacctaattagacaggatgtgtatgggccccaaccccaggttcgggtaggtgggagcagcgtggatctgcatcgcttt

SEQ ID NO: 242104 - DNA, 1328 bp, Homo Sapiens
gattacatgaatttttattgtaccatttcttatggtggcaaataagcaaactgtgagtaaacgagggcagctgaataaatttacagtatacaatattagagaatattatgttgcaattgctcatcttactctgaccatcataatcattctttttgctgggtccaggaccatggctaactcatggcacaaaaagctagtcctggtttggtctgaatttgagtcctagttattctggtgacttcaaggctacccaagcacatgggcaaaacacttaaaaaatatgaaagattatttaagtaaagcaaaatgaggaacagaagaagacagtttagattcatgtacacatacatatattttatttgggtatattacctcagaaaatcaacaactgtcattttcaatcttatctcaagaccaaccttcagaaatgctagtaagtgctacagtaatattaacattatattgagtttaaaagaaattaatatatttaaaatcagtctaaggttttaatgctgtatacccattttcataatcattcaaaaacatcaggccgggcacggtggctcagtccacaatttcaagaatgtaaacatgaactattcatttttctgatggtttaaagcatcataaaattacagcacagcctatgcaactaatgtatatgtacatagcatagcctatgcaaaaaatgttttccattttttagtatcaaagcgagcaatctgtacttaaataaaattacactactgaaaaacacatgattctaggccagtaaatgggtgaatggaacaccactttacctattataatttagttcctgaaatctgtgaatgaaaatagtaacctccaacgtctctcccagctctaaaatgatgacaatctgcctactgtcatttagaaatattagtagaaaaataacttggatttcagcatttaagtttctgtattgtataacctatttcacacattgtttatttttataagttacacttaagaattcagtttattacttcagaaacttggcatggtttaaaagaatctgaaagccccgtattcctattataagccaactagacactttatggctatgatcattaaggtaactaagattacggattttgaaaaactgttcattattcaagaagatttttactgaaattaaacaggtagaatattaacattaacatttttttagtaataatttcattatgggtaatgactctaaaagtattaatttacatctcccataaagaaaaataggagatgtcactttacgccaacttttttgtacaaagttggcttttataagaaagcattgctcatcaatt

SEQ ID NO: 242105 - DNA, 1564 bp, Homo Sapiens
ttggcattgtttcttcttccaagagtgctttacattcatcagtgcctaaaagtaccaatgacagagatgccacacctctgtcaagagcaatggactttgaaggaaaactgggatgtgactctgaatctaatagcactttggaaaatagttctgataccgtgtctattcaggatagcagtgaagaagatatgattgttcagaatagcaatgaaagcatttctgaacagttcagaactcgagaacaagatgttgaagtcttggagccgttaaagtgtgagttggtttctggtgagtccactggaaactgtgaggacaggctgccggtcaaggggactgaagcaaatggtaaaaaaccaagtcagcagaagaaattagaggagagaccagttaataaatgtagtgatcaaataaagctaaaaaataccactgacaaaaagaataatgaaaatcgagagtctgaaaagaaaggacagagaacaagtacatttcaaataaatggaaaagataataaacccaaaatatatttgaaaggtgaatgcttgaaagaaatttctgagagtagagtagtaagtggtaatgttgaaccaaaggttaataatataaataaaataatccctgagaatgatattaaatcattgactgttaaagaatctgctataaggccattcattaatggtgatgtcatcatggaagattttaatgaaagaaacagctccgaaacaaaatcgcatttgctgagttcttcagatgctgaaggtaactaccgagatagccttgagaccctgccatcaaccaaagagtctgacagtacacagacgaccacaccctcagcatcttgtccagaaagcaattcagttaatcaggtagaagatatggaaatagaaacctcagaagttaagaaagttacttcatcacctattacttctgaagaggaatctaatctcagtaatgactttattgatgaaaatggtctgcccatcaacaaaaatgaaaatgtcaatggagaatctaaaagaaaaaccgtcatcacagaagtcaccacgatgacctccacagtggccacagaatcaaaaactgtgatcaaggtagaaaaaggcgataagcaaactgtggtttcttccacagaaaattgtgcaaaatccactgtcacaaccaccactacaacagtgaccaagctttccacaccctccacaggcggcagtgtggacatcatctctgtaaaggagcagagcaaaaccgtggtcaccacgacagtgacagactccctgaccaccacgggaggcacactggttacatctatgactgtgagcaaagagtattccacacgagacaaagtgaaactgatgaaattttcaagaccaaagaagactcgttcaggtacagctctgccatcctatagaaaatttgttaccaagagcagcaagaagagcatttttgttttgcctaatgatgacttaaaaaagttggcccgaaaaggaggaatccgagaggtcccttattttaattacaatgcaaaacctgctttggatatatggccatatccttctcctagaccgacctttgg

SEQ ID NO: 242106 - DNA, 1267 bp, Homo Sapiens
ttggcatggatcacactgacaatgagttacaaggcactaatagttctggatccttgggtggtcttgatgttcgcagacgaattcctataaagctcatctccaaacaagcaaacaaagcgaaacctgcaccgcgaactcaaagaactataaacaggatgcctgcaaaggctccacctggtgatgaagttctagggccaaaagagtcgtgagaagcctggctccttggagggatatatttgtctgctcagctttactttagaaggatttgattataatgaagaagaacggtatgactgtaaagggggtgagctgtttgcaaatcagcgaagatttcctggcaccttttttgggactttcagataaacatcttaggtgaaaaggatgatacaccagttcatttctgtgacaagtgtggattgcctattaaaatctatgggagaatgattccatgcaagcatgttttttgctatgactgtgctattttacatgaaaaaaagggagataagatgtgtccaggctgtagtgatcctgtgcagcgaattgagcagtgtacacgaggttctctcttcatgtgtagcattgttcaagggtgcaagagaacatatttgtctcagagagacttacaggctcatatcaaccatcgccatatgagagctggaaaacctgttacccgtgcttcacttgaaaatgttcatcctcctattgccccaccaccaactgaaatccctgagcgttttataatgccaccagacaagcaccatatgagccatattccgccaaagcagcacatcatgatgccaccacctcctttgcaacatgtgccacatgagcactataatcagccacatgaggatattcgtgctcctccagcagaattgtccatggctccacctccacctcgatcggtcagtcaggaaacctttcgtatttcaacaagaaaacacagcaatttaataaccgtccctattcaggatgactcaaattcaggtgctagagaaccaccacctcctgccccagcacctgctcaccatcatcctgaatatcaagtcaaccagtggtatcgcaccctcatcatattatgcctccacagcaacattatgcaccacccccacctcctccaccaccaataagccatccaaatgccacatcctccccaggctgcaggtactcctcacttggtatatagccaagctccacctccaccaatgacctctgctccaccaccaataacccctcccctggacatattattgcccagatgccacct

SEQ ID NO: 242107 - DNA, 400 bp, Homo Sapiens
ttgggtgtactttcatatttgattttaaaatgtacattataacctgtatggtattttatttaaaggagataaacagccaaatagcaaataggtcactgaatgataagatttgcaccttagaacaataatcattttaaggataacaagtaaatgtctgaaagcatgaggggctttatttgcctttacctcatatgagtctttgatcttgaaccgatacttttggatctcattgttgatatacctgaatttactttgtaagagattttaacttcacttcatgctgatgatgtatcaaattcattttatagaaagatttaaagtttttttctggaagtgatatatgtcaaattacatttcctactgcagtatttgagcagggacagtcattttttaaatgttt

SEQ ID NO: 242108 - DNA, 859 bp, Homo Sapiens
  misc_feature (410)..(473): n is a, c, g, or t
  misc_feature (716)..(754): n is a, c, g, or t
ttggcacggacccagcagggtcacgcgggaggagactcgggacacccactcgctggctgccaccgggagcagaggggggctcggccgccccctcccacatcagtctccagacccttggggcttcagaggccgctcctaggctcctcggaggaggcgcgggttccttcttttccggagagcaaactttcctcggagatgcctggcaggatgagccgcggcccccggagaggacgggacagcctctgatcgccgcctgcgtgccccgccactgcccatggccaggaggccccagggaacggacagcccgacctcttaggcgccgggaccctcaggctcagatcagtggccgaggccccagagtttgcaaactcagctctggagttcagcagcaacagcagcaggaaaaaccnnnnnnnnnnnnnnnnnnnnnnnnnnnnnnnnnnnnnnnnnnnnnnnnnnnnnnnnnnnnnnnncggttcccgccaggccctcctgccatgtcggacccagacgtccccaggggctcggatgtccccgccatgtggcccccttgttccaggggtgcctgagccccttcaaggagccccaacccacccccaaccttggcccagccctgagccccagggaccatgagcgggggcaagaagaagaatagtttccaaatcaccagcgtcaccacggactatgagggccctgggagcccaggggcttcggannnnnnnnnnnnnnnnnnnnnnnnnnnnnnnnnnnnnnngcctgcccaaatggggagaccagccccgatccggggggcaagggcaccctccggatgggttccccaccacctggggcccctatctcccgttttccggtggtgaag

SEQ ID NO: 242109 - DNA, 1257 bp, Homo Sapiens
  misc_feature (966)..(1027): n is a, c, g, or t
ttttacttttcttttaaataactagcatattactattgtaaatttttaaaaaaagtcacttagataggaaagttggaacagtaatgccaacaagacagagaagagtcactaaatatttaatttcaacttgtgatgaaagcaattaggaaataaaaaataaacaaggagatctatttatagactcttcaaggaaggcctctgtgagaaagtagtacttatactgagatgtaagaaagcaccaacaaaagagtggggaaggggtcacatgttgaaaagaagtagttttagtcaaagggaagagcacggtctaagttcctggacaaggaagaaaaacatacactgtttgaaaaactaaaagatagctggtatagctgaagcttagtaggtaaggaaaaaagaggagacgcaggttaaagagagataatccacagctttgttggtcacagtatacagtttggattttatttgaaatatgacgggcagccattgaaggttgttttaagcatagaaacgccatttttgcccatccaattttaaaaggctattccactgtttggagataagaattgaaaggagatagataaaagaactgcagtagtctcatcaagaaatgttaacttgttgtagaaagaaaaatggagtttggggatacggtttttgaaagaatgaaacttattgatagaatggagacttggggaaaagagaaattggaagaatcagaaatgatagctgttatcaaataagtaaatcataattttaaccatcaccgctagcacgtttatatcaaatatcacactagtaaagacgtttaattagaatgctctaaatttctaaatattatttacctcactgcttcatcatctgcttcccagattactcaagttttaaaacaatttagtaaatacaatcttaatgaacactataatacatatatctaaaggtatgattttccaagaaagaataagnnnnnnnnnnnnnnnnnnnnnnnnnnnnnnnnnnnnnnnnnnnnnnnnnnnnnnnnnnnnnnagaattcaatgtaatattttgaaaaataaaccaactactctgtataatgccgtataattatttccaagtatcattttaagaattctagttaattcttaaaattaactagtcatagaatagttttaccttatacattactcacactcaaaaacaacaaataattattttactactttttaagatgcttttcaaagaaaactatttcatatttcatacataccttttgccaa

SEQ ID NO: 242110 - DNA, 970 bp, Homo Sapiens
gttaactcttggagagctcatgccctatgaggaaaagcttctgtacccctaacacatagtatgtatgagctctttaacccaatgcaactgggactgaaggctactgcagctacttggcccccacaatggagagagatggttcgcttcgtctttgcttttccttcaatggcctggctggctgtgtccaaggcccaggagacaacctgttttctggctgttcgaggttggggagtctgggtagagaaaaacgttaaagtgctaaagcagcttctgcgagaggctgcaaatgcagatttggtcatacttgtctagggtctgaacctgcaaacagcaaggggaaaacctatgattctccaccagagtttacaagtccagaaagcagattttctctctctcatttttttaaggagtaaaatgctgttgctacaagtaaaaaaatgtaatgataaaatggtcagtttaccacagctggattttgcggtaataaaaaagagaggttacactcctagaattttgagttaagattacaaaaaggaccatagcttgatattctgaatgaaaatttagtagcagctgcaagaagggaagagaccatgtggatcaggttattaaaaaaacatactgaaagtaatcaagactcctatacccttggtttagttgagagaaccttgcctagttggagagcaaggactgaactcggctgctcccactgtcttcagcctaaagggaaccatgtcacaccacgttacacacacgatggaataaaaggtcaggtttgttcatggctaatgacggctaaatgacacctccgtttctagcatttgtataaactgttagcacaatccattaagagtgaacaaaagcaaacataccccagctcattagactaccatcttatacatttaagtctacaagaaaagttttaaacatgtttttactgtgcaagttaagcagcatcaaaataacccaa

SEQ ID NO: 242111 - DNA, 1258 bp, Homo Sapiens
ttggcacaccgaggggagctcgtggtcgagacttgccgccctaagcactctcccaagtccgacccgctcggcgaggacttccgtcttctgagcgaaccttgtcaagcaagctgggatctatgagtggaaaggtgaccaagcccaaagaggagaaagatgcttctaaggttctggatgacgccccccctggcacacaggaatacattatgttacgacaagattccatccaatctgcggaattaaagaaaaaagagtccccctttcgtgctaagtgtcacgaaatcttctgctgcccgctgaagcaagtacaccacaaagagaacacagagccggaagagcctcagcttaagggtatagttaccaagctatacagccgacaaggctaccacttgcagctgcaggcggatggaaccattgatggcaccaaagatgaggacagcacttacactctgtttaacctcatccctgtgggtctgcgagtggtggctatccaaggagttcaaaccaagctgtacttggcaatgaacagtgagggatacttgtacacctcggaacttttcacacctgagtgcaaattcaaagaatcagtgtttgaaaattattatgtgacatattcatcaatgatataccgtcagcagcagtcaggccgagggtggtatctgggtctgaacaaagaaggagagatcatgaaaggcaaccatgtgaagaagaacaagcctgcagctcattttctgcctaaaccactgaaagtggccatgtacaaggagccatcactgcacgatctcacggagttctcccgatctggaagcgggaccccaaccaagagcagaagtgtctctggcgtgctgaacggaggcaaatccatgagccacaatgaatcaacgtagccagtgagggcaaaagaaggctctgtaacagaaccttacctccaggtgctgttgaattcttctagcagtccttcacccaaaagttcaaatttgtcagtgacatttaccaaacaaacaggcagagttcactattctatctgccattagaccttcttatcatccatactaaagccccattatttagattgagcttgtgcataagaatgccaagcattttagtgaactaaatctgagagaaggactgccaaattttctcatgatctcacctatactttggggatgataatccaaaagtatttcacagcactaatgctgatcaaaatttgctctcccaacaagaaaatgtaaaagaccacattggttcttcaaaa

SEQ ID NO: 242112 - DNA, 963 bp, Homo Sapiens
ttggaatttcattatttttatctgtaagcattattaatacatctttaccaaaacctgagcaatacaatattttctttatatgttatatgcctttgtttgctaaaagctaatatttttgcatttactttaaagggctgtactaaacccacagctttaagttcttccctaaaagaagcattgcagctaacccttgaactcacagttttaaaatacagtatttctcttctccacatctccatgccttcgcatcaatgcttgtttttcctggtgaacactatagataatctcctgtttgaaatgtgggacagggtgtttcatggcagtggagctaagtttctcctctttatagtgaactggtgacccaaatgtccctgtcatttatagtgaactgatgacccaaatgactccctgtcagtagagtcccatgtggcccatgcttcacacaagcagaaatgaacgcactgtttttaaggctagattatcagttctagaatgattacttcaagatgggagctacctcctcagatattcacactatgaaatggaggtgcttgatgtgtttcacactggcttgtttgacagtcttctatcttactgttaattcagcagtattttattgtgaaagaaaaccccagtgtttgagctcactcaggaattggggagagagatggaccaccactgtggtgcatttcttaagtgttctgggagaatgtcatacttttccttcccagagtaaaagaaacctttgggagatcctgagggagactgtttctccccaagtatgatgatgtctagtcaagtctaagaataccactggacatgttctatggacatttgggattgcagttgctattctgatttgattggtcctcagtcaaatggatcactttgaaggaaagctttggttgtcaccgttatataccactgagataaagtgttagcaaagtatggttcaaattaact

SEQ ID NO: 242113 - DNA, 1710 bp, Homo Sapiens
ctttgtacaaaaaagttgggtggctgagggagccccgcggatcgtttaggaaagccggccagctgatcgtcgtgtgttgccacccattcatgtcaagatgactaagtttggatttttgcgattgtcctatgagaagcaggacacacttttgaagcttctcattctgtcaatggctgctgtattatccttctccactcgtctgtttgctgtcctgagatttgaaagtgttatccatgagtttgatccgtactttaattatcggactaccaggttcctggctgaggaggggttttataaattccataactggtttgatgaccgagcctggtaccctttgggacgaatcattggaggaacaatttacccaggtttaatgatcacctctgctgcaatctaccatgtactccattttttccacatcaccatcgacattcggaatgtctgtgtgttcctggcccctctcttctcctccttcaccaccatcgtcacgtaccaccttaccaaagagctcaaggatgcaggggctgggcttcttgctgctgccatgattgctgtagttcctggatatatctcccgatctgtggctggctcctatgataatgaagggattgccatcttttgcatgctactcacctactacatgtggatcaaggcagtaaagactggttccatctgttgggcagctaagtgtgcccttgcttatttctacatggtctcgtcatggggaggttatgtgttcctgatcaacttaattcctctccacgtcctcgtgctgatgctcacaggccgtttctctcaccggatctatgtggcctactgtactgtttactgcctgggcactatactttctatgcagatctcctttgtgggtttccagcctgtcctttcatcagagcacatggcagcctttggggtctttggtctctgccagatccatgcctttgtggattacctgcgcagcaagttgaatccacaacaatttgaagttcttttccggagcgtcatctctctggtaggctttgtccttctcaccgtgggagctctcctcatgctgacaggaaaaatatctccctggacggggcgtttctactcgctgctggatccctcttatgctaagaacaacatccccatcattgcttctgtgtctgagcatcagcccacaacctggtcctcatactattttgacctgcagctcctcgtcttcatgtttccagttggcctctattactgctttagcaacctgtctgatgcccggatttttatcatcatgtatggtgtgaccagcatgtacttttcagctgtaatggtgcgtctaatgctagtgttggcacctgttatgtgcattctctctggcattggagtctcccaggtgctgtccacatacatgaagaatctggacataagtcgtccagacaagaagagcaagaagcaacaggattccacctactctattaagaatgaagtggcaagtgggatgatactggtcatggctttctttctcatcacctacacctttcattcaacctgggtgaccagtgaggcctactcttctctcgtccattgtactatctgcccgtggtggggatggcagtaggatcatatttgatgacttctcgagaagcatattattggcttcgtcataatactccaagaggatgcgaaggtcatgtcctggtgggattatggctatcagattacagctatggcaaa

SEQ ID NO: 242114 - DNA, 1611 bp, Homo Sapiens
gatgatgacccattagtttgtttccctagtatctaactctaaaatggttaaagttctaggcaatatgctgctgttacagtgtaaaagagtatgtcattatctcatccagcttgcacaattctaagaaaattaattacaaaaattatcatacctgtaaattcagcctaaggtttctgttgggcaatatgatttttaaagagctacttttcccatataacctaaacaattttcccaaataatagtagactggggtctctatacacattaaggtagtcactttacaagtgagctatcacttaacttcaaattcataatgggcaccaaattatctttgatttgggtttatgcctgtcagatttatgaataagaaaaatgactatttttaagtctataatccatttgtctttataaagtagactggcatctaagtaaaatgaccatttcttttatagaaatgatcaaaacagtggaacatctaaaattcaggaggccccaaaagggcattttcatagaaatgttaataacttacacattaactccagtctaacaccgtgctacagtgtacagtttagttagactcaagagtgtaattggttcattattaaatttactcatctgtggttcaaaaaataacacaaatttaagtattttattataatccatctcataattgtgagaatactttctgacaaaggctttatcagtgtcacatttatgaaacaattttccctaaaagaaaataaaatcagggacaattttgagctattaaattaactggtttttcaaaacctcccaatggcatttgtggagatggcagagaagggagaaatgtattctaagtgaaataagtcatttcagttatcaagactgagttctaagttatctatttttactggtgcaaaaatgctatttaaagaaatccttactttacacaggagttgcacaattcaaattctgctgcaaaacagtgagatgtgcctcactataagagcatgtaagccctcccacccagcccccaaagaggaggaggaaatactaaatcaattaaaaattcaattgtcatctgttatcctcaaattatcgagatcaactaatgtaatttactataatggcaaagttttcctttataaaaataatagcttattcatatataattcttataccacaaagttagaggcagatgatttcaagatactgacatttgatatttctagaatattggtctaaatcataaagtattcttaatatatgtgacagttcaaatatttcatcaaattttcccacagtgagagatagtaaaacctcttcatcaaaaagttggagatcgttcatttatatccaatttaccttttcttaatggtgaaatcaaatttacaacctagcaaatgagtaagaatatcttttaaaaattaaatctcaattatttaaccaaaaagtctaatgttctcttgtttatttactactcctcattacaaggtttttactgactaaagatgatgacatacctaatgtgactgtttgcattgatgactccttaaatagtgtaacatcaaccctcagaataaaatgtcaacacaaaaatccaagtgagtgatccagctcatttgtaca

SEQ ID NO: 242115 - DNA, 365 bp, Homo Sapiens
ttgtgacttctccagtgtcatttgaaaatggcagggaagttggggttcaaagccagaagtctgactccagagcccaccctctaacaagctagacatattgcctctttacagtgtatgataagtgcttgccaaatgcatgtaagaactgactatccagctaagtttctccaaactagataactgtctttaagcagggaccttgctgcctgtgcccctcccagctctctctccagtcaccactacagagcacaatgcatggtgccttcttcacaagcaaataccttctcccttcttcaaatcctgactacagatccagggtagcaccatataccacacctccctaaaaaaagaatggttataggcag

SEQ ID NO: 242116 - DNA, 1086 bp, Homo Sapiens
  misc_feature (713)..(761): n is a, c, g, or t
ttggaaaagaatagagaaggaagggcttcagtgaccggctgcctggctgacttacagcagtcagactctgacaggatcatggctatgatggaggtccaggggggacccagcctgggacagacctgcgtgctgatcgtgatcttcacagtgctcctgcagtctctctgtgtggctgtaacttacgtgtactttaccaacgagctgaagcagactccaagaatgaaaaggctctgggccgcaaaataaactcctgggaatcatcaaggagtgggcattcattcctgagcaacttgcacttgaggaatggtgaactggtcatccatgaaaaagggttttactacatctattcccaaacatactttcgatttcaggaggaaataaaagaaaacacaaagaacgacaaacaaatggtccaatatatttacaaatacacaagttatcctgaccctatattgttgatgaaaagtgctagaaatagttgttggtctaaagatgcagaatatggactctattccatctatcaagggggaatatttgagcttaaggaaaatgacagaatttttgtttctgtaacaaatgagcacttgatagacatggaccatgaagccagttttttcggggcctttttagttggctaactgacctggaaagaaaaagcaataacctcaaagtgactattcagttttcaggatgatacactatgaagatgtttnnnnnnnnnnnnnnnnnnnnnnnnnnnnnnnnnnnnnnnnnnnnnnnnnctctatgcaatctgagtagagcagccacaaccaaaaaattctacaacacacactgttctgaaagtgactcacttatcccaagagaatgaaattgctgaaagatctttcaggactctacctcatatcagtttgctagcagaaatctagaagactgtcagcttccaaacattaatgcagtggttaacatcttctgtctttataatctactccttgtaaagactgtagaagaaagcgcaacaatccatctctcaagtagtgtatcacagtagtagcctccaggtttccttaagggacaacatccttaagtcaaaagagagaagaggca

SEQ ID NO: 242117 - DNA, 1052 bp, Homo Sapiens
ttggcacagagcaagctgaccccagcgacacagccccccagccctactgtatttccgttcctatcaaaaaatggatgactcggagacaggtttcaatctgaaagtcgtcctggtcagtttcaagcagtgtctcgatgagaaggaagaggtcttgctggacccctacattgccagctggaagggcctggtcaggtttctgaacagcctgggcaccatcttctcattcatctccaaggacgtggtctccaagctgcggatcatggagcgcctcaggggcggcccgcagagcgagcactaccgcagcctgcaggccatggtggcccacgagctgagcaaccggctggtggacctggagcgccgctcccaccacccggagtctggctgccggacggtgctgcgcctgcaccgcgccctgcactggctgcagctgttcctggagggcctgcgtaccagccccgaggacgcacgcacctccgcgctctgcgccgactcctacaacgcctcgctggccgcctaccacccctgggtcgtgcgccgtgccgtcaccgtggccttctgcacgctgcccacacgcgaggtcttcctggaggccatgaacgtggggcccccggagcaggccgtgcagatgctaggcgaggccctccccttcatccagcgtgtctacaacgtctcccagaagctctacgccgagcactccctgctggacctgccctagaggcgggaagccagggccgcaccggctttcctgctgcagatctgggctgcggtggccagggccgtgagtcccgtggcagagccttctgggcgctgcgggaacaggagatcctctgtcgcccctgtgagctgagctggttaggaaccacagactgtgacagagaaggtggcgaccagcccagaagaggcccaccctctcggtcgggaacaagacgcctcagcacggctccccctcggcctattacacgcgtgcgcagccaggcctcgccagggtgcggtgcaaagctagcaagcaagggtgggggcccgggcccgcagaacccaaaaggtcgcacccc

SEQ ID NO: 242118 - DNA, 857 bp, Homo Sapiens
  misc_feature (222)..(339): n is a, c, g, or t
aagccaactttgtacaaaaaagttggaaaaggtatttgttttaatcgtttttaataacttttgtgtatgttttgatatttagtatttgatcaaactccaagcaactggattcatggccattgtgagcttgcactttgcagcaggagagctgactgcatctgtgacggctcggacggcctgggacggtcgtttcttttctgagacagggtcgttctctgtcannnnnnnnnnnnnnnnnnnnnnnnnnnnnnnnnnnnnnnnnnnnnnnnnnnnnnnnnnnnnnnnnnnnnnnnnnnnnnnnnnnnnnnnnnnnnnnnnnnnnnnnnnnnnnnnnnnnnnatttagaaatggtttcctcttatctcaggtgggaaccactcctgctcctcactgaagtgacctcagcgaatgaagtgtgggtgacctcgaacagcacagcattagtctttgtctctgataacgtcagggaagaattggaggaagtgcaggatcttctgtgcaggacgctgcccctccccgtccagctgagctttcctgaggaagctctggatgtcgcccgtgtctgttgctcatgtgtttgtttctcccttttgcttctctgccggctcagaggagaggagacgccgtgagcgggacgaccagatgtaccgagagcggctgcgcaccttgctggtcatcgcggttgtcatgagcctcctgaatgctctcagcaccagcggaggcagcatttcctggaacgactttgtccacgagatgctggccaagggcgaggtgcagcgcgtccaggtggtgcctgagagcgacgtggtggaagtctacctgcacccctggagccgtggtgtttgggcggcctgtga

SEQ ID NO: 242119 - DNA, 1309 bp, Homo Sapiens
ttggtgaatctttccggaggtttctcaaccattccacggaacaccagtgcatgcaggaattcatggacaagaagctgccaggcataataggaaggattggagacacaaaatcagaaattaagattctaagcataggcggaggtgcaggtgaaattgatcttcaaattctctccaagtgctgaacaaattgccaaatacaaagagcttgtagccaagacatcgaacctcgagaacgtaaagtttgcttggcataaggagacatcatctgaataccaaagtagaatgttggagaaaaaggagcttcaaaagtgggactttattcatatgattcaaatgctgtattatgtaaaagacatcccagctaccctgaaattcttccatagtctcttaggtaccaatgctaagatgctcattattgttgtgtcaggaagcagtggctgggacaagctgtggaaaaagtacggatcacgctttccccaggatgacctctgccagtatatcacatcagatgacctcactcagatgctggacaacctagggcttaagtatgagtgctatgaccttttgtccaccatggatatatctgactgctttattgatggtaatgaaaatggagacctgctttgggattttttgactgaaacctgcaactttaatgccacagcaccacctgatctcagagcagagcttgggaaagatctacaagagcctgaatttagtgctaagaaagaggggaaggttctttttaataatactctgagtttcatagtgattgaggcataactatcaatcacaaaagtatattcaaaaattatattttgaacaactcgaatcactcatttatttccatattaaaatcacaaactcatccattaatgtagataaagcactgtttggatatgagatgtagcaaattccaatacattattggacttccatttggaatcatatgggatactgctggtcttatcctgtccctcctccaggtagagagaccacaagcaggctcaacataacataagctagaaaaattagatgactgaatttctatggcatattgataataaaattcattccatttgctgattgtctgaaattttctagaatactaataaaatacatactatagattctttattagtgaagtatgcactaatcaatactttgaacacaaagcctgtgttactgatttggccgttttgtgaagaaacatttatctttgtacgttcttctattgtgctttctatctaatttttattaatttgtaagagtaagcacctttagaatatttaaaaattaattctttatc

SEQ ID NO: 242120 - DNA, 1428 bp, Homo Sapiens
  misc_feature (48)..(60): n is a, c, g, or t
  misc_feature (1187)..(1206): n is a, c, g, or t
ttgggtactttatttgtatttgccattcagtctagcttttaagtatannnnnnnnnnnnnctcattttcaatgcacattagttttgcatctgttttgtgacctgttagatgtgacacattctctttttgtttattcccttattctaaatgagttctaaaaacataatattttggcaaaaattgaaaaaagctggagacattttgtgacatgcatacagatagcatgtgttattaaaaagagttgcctattgaaatgatcgtgtttctggagaaattaagcttatagacagcatgtgttattaaaaagagttacctattgaaatgatagtgtttctggagatttctcagccccatcttcctccagcttgtctaccttcctcatgcaaacaatattccacatttttatatctagagcatgactggctaactggagagggaaggaaaagtttagatctggttactggagcaagtctcaaagagaaactctgaaagcttccagaatcacaggtataagataaggatagcattgacatttgctgggagttacagtgatagtttcatctcagcagttcatttttttcttcagtcactgctggttttctttgactattatagttgccagggagatccttgctcttcttactttaaaaccagcatttaagtggcaatttggatgtaataggatgagaccaaatttatctaattattacagtagtaatacatttaagagttaaaaatgtgtttttatatatccacatatgataacaaaagattcaattcccaagcctaaattttgaagcatgtggtattgtcaaatctagcttaccatcttttttgggggtacttgcaaccatagtaaaggaagatggaatagactttagttaactttaattataattatatgttaaataaggcacataaccagtttccaaggtcatcatggttgcttaaagtctttccccttctgtactccatggaaatattctcagtaaaccaaaaacaaaaatggaaaaataatcaccaacccccatcccgacacacacacacagtccaaagcaaaagtcagtgtgtattgaatttaacaagtaatgcagtttgggatgcttttgctacattttggtggcattttaactagttatctgaatatttattaatcgtacttcctcttgtaaagttaactacttacnnnnnnnnnnnnnnnnnnnnaacatcaggttctgtatctaataggagatgtaacactttatttcatggcaggtttttattgcagagacttgaagtcttagttttttaaactggcacataaaacactttttgctgttatttttatttatgtcaatactgcagagtatctttatgccttattcaagtggattctgagcctgtatgtcacaatgtaaacactggagttcactcacctacgcactc

SEQ ID NO: 242121 - DNA, 986 bp, Homo Sapiens
  misc_feature (197)..(226): n is a, c, g, or t
gagtatcccaacgtgacggtgacattgaggcttgacgttatttatgggtgagcaagaatgttcattagatgtagactctcaaagggctaaaaaaaaccatgctctcacttctagacaagtttgcaacaacctctaagctggcactccataacaagactgttccacaatactacaaacaaaatagcatgtagcttgtnnnnnnnnnnnnnnnnnnnnnnnnnnnnnnacagaaaacgtgtctccctccaaagccattctccatttagaaaggcccaactaaggattcaaaatggcacccacgtgccgacgatagattcaaaatggcgcctgcgtgcccatgacgcacgtcacgggagccagcggccagccccctcaccagcagtcagccccaaccccaccctggcgctttgatttccagtttgggaaattcataccaatggaatccgatgtaagcaatccaccatcagctcactgatgctctcttgcccttccacacttcgagaagacctgaaatgtggtgtccattcccctctttattcaaaagaggaccttcaaaaatattcacctaactaggaatttaaagaacacaagaaattgttggtatatttcacttcaggtaactgccctaaaattaaaacctccaatttatgcaaaaaaagaaaagatggtgcttcaatttacaaaaggattcatttcagggttatctctagttgtctggtttccccaatggctggccttgccaaatgatttgctgtaggaaaatttgaactgcacccaattttccaggagcaccttagtgtaatatggcatattgatcacagacgatagacaagtcttaggcaggtttatgcaaaaaatgctgcaaccacccagtgatcatcggagggaaaaaagcttgacttactgtggtctaaaattgcttcggtggcctacatgcccatgaaccagcttcaaaagcaattcacattggtcatgatgacacacac

SEQ ID NO: 242122 - DNA, 1527 bp, Homo Sapiens
attggtgaactggtctaggagagcctgggtatcagaactgtataagttccccaagtaatccaatgcgggaccatggctttactactacaggcttggttgatggccaattcccaatctccagcctcttcctgtcatgttggagtcaactatcctatgtccctctctccatcttcccaagatttaaaaacctttctcatggcttcccaaattggaaaactctctggaatccagcgtggatgagcaactgaacaaaatggctttgggagggaatgatgggagctggggcctaccagtcacctgctcttcagcctaatactgctctgtgggaaaacttggtccatttcccccagggctcctcaacacacacccctgggtcagacgttctgggagggaataggcagcattcctcactctacagaacacccaatgagcatcctgtctttcatggctaataccaaagttgacaatcaatgagggtcaatgctttcctgtcattacagaaacttcccatcaccagaatcccttcatgggagggatggatgcctgttgaaactcactgacctattggactgacgctggggtggtatcttcatcagagctattgtaagtcatccaaaaggcttctgacgaaagaacaatttttaaaaagtccctcttttcaatcaagccaatgtcctattttatttctaaaagttttgggactcgtgctgttatcaagtacaatgaaaatggctttataaatagctgttttgacattgtgatagaaggcttgaattcggaggaaagatgtcgctggagctagtcctgagttccgactgtccctgtggtgggaatccagtctgggaaagcaggactgttttagcaaacgtgtactcgttctataaaaatggaatctgttctgcaggttaccgtccctccccgcccaagcatcccctctgtcctgtctctctgctgctgggacccagggctttttcagctgcagaacccactggacttccaggaatcaaggaaaaagtggaaatgtccaactgtgttgtctctaaatggttccattgtctgggaactgaaaccctccatgcttcaccctgaactgttatttctagaggaagcagggagcctctggctcttctaaaaattgccagtgggagctctggcctcacccacaggcggagcttggtgaagtcaggatgaatgatgccgtcacaggttcatggttcatggaaggaaaggtaaccaaccttgtcctgtctaggatgccagatgagaaagagtatcccaacgtgacggtgacattgaggcttgacgttatttatgggtgagcaagaatgttcattagatgtagactctcaaagggctaaaaaaaaccatgctctcacttctagacaagtttgcaacaacctctaagctggcactccataacaagactgttccacaatactacaaacaaaatagcatgtagcttgttccctcctccctcccccccaaaccctctcccacagaaaacgtgccaacttttttgtacaaagt

SEQ ID NO: 242123 - DNA, 1250 bp, Homo Sapiens
  misc_feature (147)..(200): n is a, c, g, or t
aaagttatgaaaactctaaagctctagtaccaactccgagctttattgtatgattatggcaagagttcttaatcacctaggacttgaatctaagtttatccttggacaagttatttaacctttctaaagtacggtatcctcatcttnnnnnnnnnnnnnnnnnnnnnnnnnnnnnnnnnnnnnnnnnnnnnnnnnnnnnncaaacaacagtactacctaccttgatgctttgttgtgaagattaaatggactaacatatttaaagcactcagtaaagtgcttgtcccatagcaaaaaaatcagtcaatgttaactgggtgattatacctttcccatttgctaaatcactggactactctgaaaacaagatttttaacagattaaaatattttgcctcatatatgcattataggctattaaaattaagttgcactgtcttcaatcatagtagctaacttaagatatcaaaatatcaatgcttaagattccatttaagaatacttattaatccaatctattaataataaatcagccttctaataggaaagggatcacatactaagcaaactagaatagtaagaacatggtactaaaactagaaatctttatctcaaataatgtgataaccagtacttaattaaaataagtatcatcatgtacctgaggtggtcctgagagtatcacaggggagttatcctctccaaaactgagcttttggatacgctgagcaactgaaattcctaattctttttctaaaattttgggtgaaaaggtttggagatcacgcacactattgatacccagtgcttcaagacatttggcagttttatagccaataccaggtatttcctttatgtgattcaaactatgaataagatgttgacaactttcaggtaataagactgtttgttgatttggtttaaagacaccagaaactaattttgccaacagtttattagaagccactccagcacagccagtgagccccaactgattatacatggcttcccgcatctctgctgcaatctgagatccaacaagtagtctgatgtgcaagacgtcaagcaggtttatagactgattattgtatacatgacccgacacagtcaccgcagaaagttcatcactttgcagctgctgtagtctcttctcaaccatttctgttagatccacaaaattttcatcaaatccaagtctctcaacaactggactaaattcttccagtaattctgtaaccttataagacccaa

SEQ ID NO: 242124 - DNA, 1573 bp, Homo Sapiens
actttgtacaaaaaagttggcgtgtgtgggactcgacacagacatcgatggctacccagaccaagcactgccctgcatggacaacaacaaacactgcaaacaggacaactgccttttgacacccaactctgggcaggaagatgctgataatgatggtgtgggggaccagtgtgatgatgatgctgatggggatgggatcaagaatgttgaggacaactgccggctgttccccaacaaagaccagcagaactcagatacagattcatttggtgatgcctgtgacaattgccccaacgttcccaacaatgaccagaaggacacagatggcaatggggaaggagatgcctgtgacaacgacgtggatggggatggcatccccaatggattggacaattgccctaaagtccccaacccactacagacagacagggatgaggacggggtgggagatgcttgcgacagctgccctgaaatgagcaatcctacccagacagatgcagacagcgacctggtgggggatgtctgtgatactaatgaagacagcgatggggatgggcatcaggacaccaaggacaactgcccacagctgccaaatagctcccagctggactctgataacgatggacttggagatgagtgtgatggggatgatgacaatgatggcatcccagattatgtgcctcctggtcccgataactgccgcctggtacccaatcccaatcagaaggactcagatggcaatggcgttggtgatgtgtgtgaggatgactttgacaatgatgctgtggtcgaccccctggatgtgtgtcctgaaagtgcagaggtaacgcttacggattttcgggcctatcagaccgtcgtcctggatcctgagggtgatgctcagattgacccaaactgggttgtgctcaaccagggcatggaaatcgttcagaccatgaacagtgaccctggcttggcagttggatacacggccttcaatggtgtggactttgaaggcaccttccatgtgaacacagtgactgatgatgactacgcaggctttctcttcagttatcaagacagtggccgcttctacgtagtcatgtggaagcagaccgagcagacctactggcaggctacacccttccgggcggttgcccagcccgggctgcagctcaaggcagtgacatcagtgtctggcccaggtgagcacctccgaaatgccctgtggcatactggccacacccctgatcaggtacgactgctgtggacagacccacgaaatgtgggctggcgggacaagacctcctatcgctggcagcttctgcaccggcctcaagttggctacattcggtaaggagaggggctgagcccacctgtgggactcaggccgggcctgtccttcctctttagctgggattcaccagtgacctctccatgggtgggaactgcagccacttctctccatcacccttctcaccacggacacaagcacctatgagtgatgttggtgaagtcactcctccatgacccattttcccgtctgtaaaatgagggcattgggttagatgccctttacagttctccagaa

SEQ ID NO: 242125 - DNA, 979 bp, Homo Sapiens
ttggcttctttaaaagcataattttctaaatgcataatattgttgaaaacaagtgtgttcatttcaagtgtaaattgattgacatttatatttctatataggaaataatttagttactatcaccaggtggatgttacgggttgcctgctacaatgcagaattattcctgtttgacacacatggcagatcgagttaacatttctaaaacataaaagtcatgggatgtgtactaaagtggaagagctgagagtctcatctggtcactgtcaagacattttattgttataatgtcctatctggtttttggaaactcttagaaaccccactttataaacttaaatttcacaagttagtctcttagctctcctgtttacttataacatgtatttttccattttagatacagacagaagctgctcagttgcttacaagtttcagtgagaagaattgagaacttttcagagaagatttatgaaatagctaataaacattgccttttcttttaattctaaacttaatatatgaactataactgttctacggctttttaaatgttgtgaccatttaaccgtgtaaatataaaatattctaggcttcttcacaaataatagggtaaaataaataatcgccataagagtggtagaaataaatctccatggctcaggcaaagagattattttgcatcctggataccagcaatgcaaaatggtatgagatttctaaggattgatcacattgggatgggagatcaagcaaagaaatatttgtagaggaggggaaatggatctataggggatatacagggggatggattttcaaattggattgattctaagttgaaatcttgaagagaaggtgtggtgacagtggttaggatgttgtgggttcctgacataaagtagttaaatgatatatcttggagctaacctgtgtaagtaaagaactaagtaaggagatgactaaaaatggagtagtttcc

SEQ ID NO: 242126 - DNA, 941 bp, Homo Sapiens
tttattctagtagtttatattcacatagtaaatataaattagggagattcaacatattttacattgcacataattattctattaatattctataaactgtttatttttcctttggtaagtacagatggggaagttgaacaaaatctgcatacaagaagactttctaaaaatagaaaagactttctaaaatctgcatagaagagactttctaaaattacattttttctaaaaaactaaaatgcacttttcttctttaggaaagaatgacttttattcagtattcatctacagtttgccaagaaagtacttccttatccatttttcctttaatttggaagaaacattaagagctatagattaatttgcaagattaatttgcaaaattaatccatttatgtatttcatgttttttctcatcttgatagacacttactataaatgtctgaaccatacaaaatagtaacattagtataagtcattaatagtgttttgaaatgaatttaatcaaagaatcaggaggaagaaagttgatattataatgggagaactgaaacacacagttgcattttttaaaaaatcatggcttcttcagcaaacacagtaaagcacttattggtgtttagaaaacaaatatgatttatttttctcatttcttgttagaaagcaattgaactgaaccctaaagatgctacttcaattcaccttatgggtatttggtaagaaaatttctttaaatatttcagtagtatttagtgtgatattttgtagtatgtataaatatcttcttttgcatatataaaagatattaaatattttaaaatattatctgacagagcttagagtgctaaatccattaactagcccttgtatatatattgttagaacatactaaatttgattatgaccatgttaaacattgttattcagccaacttttttgta

SEQ ID NO: 242127 - DNA, 1513 bp, Homo Sapiens
ttggggcacatgaaaagctgtcgcaggcttctggtggattcgaaggtctcactaggcatcgcgggcatcttgatcgtgctgagctcggtggcttgctccttgggtgtcttcagctacattgggttgcccttgaccctcattgtgattgaagtcatcccgttcctggtgctggctgttggagtggacaacatcttcattctggtgcaggcctaccagagagatgaacgtcttcaaggggaaaccctggatcagcagctgggcagggtcctaggagaagtggctcccagtatgttcctgtcatccttttctgagactgtagcatttttcttaggagcattgtccgtgatgccagccgtgcacaccttctctctctttgcgggattggcagtcttcattgactttcttctgcagattacctgtttcgtgagtctcttggggttagacattaaacgtcaagaggtaagttggtgccaggattatagtctatttaatttgagtctagaatctagaggaagcagctagcgggtataacctttgtttccctctgtcccctcagaaaaatcggctagacatcttttgctgtgtcagaggtgctgaagatggaacaagcgtccaggcctcagagagctgtttgtttcgcttcttcaaaaactcctattctccacttctgctaaaggactggatgagaccaattgtgatagcaatatttgtgggtgttctgtcattcagcatcgcagtcctgaacaaagtagatgttggattggatcagtctctttcgatgccagatgactcctacatggtggattatttcaaatccatcagtcagtacctgcatgcgggtccgcctgtgtactttgtcctggaggaagggcacgactacacttcttccaaggggcagaacatggtgtgcggcggcatgggctgcaacaatgattccctggtgcagcagatatttaacgcggcgcagctggacaattatacccgaataggcttcgccccctcgtcctggatcgacgattatttcgactgggtgaagccacagtcgtcttgctgtcgagtggacaatatcactgaccagttctgcaatgcttcagtggttgaccctgcctgcgttcgctgcaggcctctgactccggaaggcaaacagaggcctcaggggggagacttcatgagattcctgcccatgttcctttcggataaccctaaccccaagtgtggcaaagggggacatgctgcctatagttctgcagttaacatcctccttggccatggcaccagggtcggagccacgtacttcatgacctaccacaccgtgctgcagacctctgctgactttattgacgctctgaagaaagcccgacttatagccagtaatgtcaccgaaaccatgggcattaacggcagtgcctaccgagtatttccttacagtgtgttttatgtcttctacgaacagtacctgaccatcattgacgacactatcttcaacctcggtgtgtccctgggcgcgatattt

SEQ ID NO: 242128 - DNA, 3899 bp, Homo Sapiens
  misc_feature (1119)..(1161): n is a, c, g, or t
  misc_feature (1375)..(1406): n is a, c, g, or t
  misc_feature (3162)..(3195): n is a, c, g, or t
  misc_feature (3229)..(3253): n is a, c, g, or t
aaattaattatattacaaatcatatctgaaaacaagtaaatgctgctaacatataagataaaaatattgaatacatttcttaaaatgtctgattcctttactgcactgcagatgagggacagttctagatgttaacatacatgctgcataaagatattttctctgattactgtatcttatgtaattcatttccaagtgataactaaatttagtcaatcccaagtctcagatgttacctaatccagctcacaaatattccacatacttatttacttggattggaggaagacagttttataataatgccagcagtctttaaatttgtagtgaagttgtgcaataaaaacaattgaaataaggccaatctttagtttataatacatgcagaaaatagtccaatgccactatagcaggtcacaaaggataaaattttaaaaagctatgtatctattgcccagggctgtgagtctcgattagactaaatatttaaactaatgctccactgaaacttttcatctgggacttgagaatgttggagttgagggagagaatactagggttgggtacttagaaatacctaaattggtttacactttccatgcatgtaagagttatatttctgaactttcagtaaattggagatgtttttattgcttacctaagacaactgccaatatttctttctggcctattaacagtacatacatagtgttactgcctcaaagaggattattttcccaagtggtaaagaaaacaaaaatatggtgatgacttaaatttcttaattcaacttctgtaatgcatagaagctaaattataaaaatataaaatctaaatatattggtattactaatacatgtttaagtgtttcggttacaaagaatctgatccaagttactgtgctttactaagaaaccagtgtctaataatgtccaaataaggtcataaatatacagtgtctgtagaacaggaataatacatttacatgttataggaaagatggtaaatactcatttctttgcttgagttggaattaacacatacactgtactagaggtatattccactctaagactgtgtacgctcttcctttttctgtacacaacttaaaactgtacnnnnnnnnnnnnnnnnnnnnnnnnnnnnnnnnnnnnnnnnnnnttaacacaatgcagataacatcaggaaattacatatttcaaatagattgccttcaaaagcaactaattaatgacaaatttcaaacatacactattattttcaagaatggtgtaactgaaagactcatttttctatacaatcaagccatccatttctgcattatgaagagtttaactactgaattttaattttatagttaaatatatttgttagnnnnnnnnnnnnnnnnnnnnnnnnnnnnnnnnttgaaattatttttcaactgcaaaatctcagcaatgcagtcaagatctggaaaatggtttacttaatttcacaggagaatttctgtacaaatttagttacaaatgatctaaaaagcccaaatgtatcactttttcattcttcacgacagttaaatgacagctaatatttatccttatcagaaataattatgtaatgtattttgccaaggttcaattgcagactttatttttctacatcagggtcatgctgatacatattttccccatcctcactttttaaaaatgtagtatctgaaaattttgattacatttttgtaccataccagtcctcagaaaatactacattctttaaatttttaaaaaaatggacagtaatttttaaacaatagaaatggtaagtatgttggtttttaaggtataaaataactaactgtaccataaacaaataaataactgctttccttttccatagcagtacatatagcaatacattctcctaagtcatatagttatcatttacaatagacaacttaattttactaatgatgcaaaaaataatagaatacaaggcacaatcattaaatggagtttttctttagggtgtatattgacataccagcatgataaggataccgtaaaaagtgcagaaaaaacacaatgtgcaatgagaccactgtataaaacatgattgcataaaaagtgatttggcctattttaacctttaataattgaaaataaccaatttcccccttaaaattaaactataaagtatgacattttaaaattatttttattctactgctatctaaaaaatcctgaaaaaagaatttatacctgggtaatagtatataagtatgtgtttgtatatatatttaattatacccatttatcaatatatacacatacacacacagacacgtttctttgtaagtcattttaggctattagatatgtctaaagtttagaaatgacattaatccagatcaacaagtaaacatcaaatcccataccttttttcctgtattttccttgaatcctttaaccacttaaacatttcctctagaacatctctgtcaaaggacccaccagtgcattattttctattagtaccaaaaaaagatatatctcagcataactctttaataacttgctctttagaatatatagcctttccaatattgaaaagtgtatgctgtcctgacgtcaaaaacaggctttccactgcactgattctcagtctttggcacaataaacagagattgagtgatataagaatcaaggtctgaaaaattagacagtcaaatgttttccaatgtggatatgtttcccttcatcagtacattttctcttaagtttggcagaaatggaataaagcaaaagcctcctctagatactttgtagatgaacattctataattaaaattaaactgtttagggtatcaaatggtggaaattttatatttatcttttagaggaaacatttcttaattcactgctactctgtataacatctatcttttaggggcatgacttgtatcaatagaaatgtacctcacttggtcaaaaataattcattttaacatgaaatgctctatcactaggaatattatgctcctaaagagtgtagcagaattgtcttttctataaataaatcaggaattcattatagatcaatttctttcgtttcaaacagtgaatgaaatgaatgtgaaaatgcataacctatctaagggcaataaatagcaaacatttaaannnnnnnnnnnnnnnnnnnnnnnnnnnnnnnnnntcatttaaagaagtgaagtgtctcgtaagtttgnnnnnnnnnnnnnnnnnnnnnnnnngcaaatcaaatcataacattccctactccaccacagcagcaaggaagcagaagccttagttctacttattccttaactgtacctgctttatagattttgaagtaaaatattttggtacaagttaccaaccaattaaattagcttttgctttttcagtcaactttcggactcgtcctctactagaagttccaaaagttaaagaggtgtcttcgaacaacagctgcctttgctcctcttcagagtcatcctcattatagaaagctgtccttcgaccttgatttctagttctcatgtggggttcagagcctttgagttcttcaaactcttcttcctcatctataggatcatctatcttttttcggttacttctccttaacactttgacacttgcagggactaggagatctgcatctaatttttgtgtcttcatcttccttttgggcttcctacctccacgattctttttctgtaacaaatcttcctttacattattagtttcagaaagaaaattgcatgttgaagaaggaagtacttcatctctgatgggatgcacattattttgctctaaatcttctggctttgcatactgtagctttttgggctttctaccccttttcttgtgtataatttcaccactattggccaa

SEQ ID NO: 242129 - DNA, 1374 bp, Homo Sapiens
  misc_feature (376)..(390): n is a, c, g, or t
ttggctttcatgttccgcaacatcaataatgtttgcaactttgcttcaagaaatgactattcttactggctctctaccccagagcccatgccaatgagcatgcaacccctaaagggccagagcatccagccattcattagtcgatgtgcagtatgtgaagctccagctgtggtgatcgcagttcacagtcagacgatccagattccccattgtcctcagggatgggattctctgtggattggttattccttcatgatgtaaacctcagtcagaaacgctgaaagcaggagacttgaggacacgaattagccgatgtcaagtgtgcatgaagaggacataacattttgaagaattccttttgtgttttaaaatgtgnnnnnnnnnnnnnnnaaattcctaggatgcagtgtctcattgttaccccaactttactactgctgccgtcaatggtgctactatatatgatcaagataacatgctgactagtaaccatgaagattcagatgtacctcagcaatgcgccagagcaaagtctctattatttttctactaaagaaataaggaagtgaatttactttttgggtccagaatgactttctccaagaattataagatgaaaattatatattttgcccagttactaaaatggtacattaaaaattcaattaagagaagagtcacattgagtaaaataaaagactgcagtttgtgggaagaattatttttcacggtgctactaatcctgctgtatcccgggtttttaatataaaggtgttaagcttattttgctttgtaagtaaagaatgtgtatattgtgaacagccttttagctcaaaatgttgagtcatttacatatgacatagcatgaatcactctttacagaaaatgtaggaaaccctagaatacagacagcaatattttatattcatgtttatcaaagtgagaggacttatattcctacatcaagttactactgagagtaaatttattttgagttttatcccgtaagttctgttttgattttttttaaaaaacaaacccttttagtcactttaatcagaattttaaatgttcatgttacataccaaattataatatctaatggagcaatttgtcttttgctatattctccaagattatctcttaagaccatatgccccctgttttaatgtttcttacatcttgtttttactcatttctgactggacaaagttcttccaaacaattctgagaaacaaaaacacacacgcagaattaacaattcttttccctgtgcttcttatgtaaaatcctcctgtggccttctgcttgtacagaactgggaaacacacttggttagtctccttttagtttacaaaaagccaattgatgttt

SEQ ID NO: 242130 - DNA, 1012 bp, Homo Sapiens
gccaactttgtacaaaaaagttggagactgtcttcgacaccatcaacgctgagacagaccggctggaggctcgcaagaaagccaagaacaagcagctgggccatgaggaagactacgccctgggcaaggactgcatcatgcatggctacatgtccaagatgggcaaccccttcctgacccagtggcagcggcggtacttctacctgttccccaaccgcctcgagtggcggggcgagggcgaggccccgcagagcctgctgaccatggaggagatccagtcggtggaggagacgcagatcaaggagcgcaagtgcctgctcctcaagatccgcggtgggaaacagttcattttgcagtgcgatagcgaccctgagctggtgcagtggaagaaggagctgcgcgacgcctaccgcgaggcccagcagctggtgcagcgggtgcccaagatgaagaacaagccgcgctcgcccgtggtggagctgagcaaggtgccgctggtccagcgcggcagtgccaacggcctctgacccgcccacccgccttttataaacctctaatttattttgtcgaatttttattatttgttttcccgccaagcggaaaaggttttattttgtaattattgtgatttcccgtggccccagcctggcccagctcccccgggaggggcccgcttgcctcggctcctgctgcaccaacccagccgctgcccggcgccctctgtcctgacttcaggggctgcccgctcccagtgtcttcctgtgggggaagagcacagccctcccgccccttccccgagggatgatgccacaccaagctgtgccaccctgggctctgtgggctgcactctgtgcccatgggcactgctgggtggcccatcccccctcaccaggggcaggcacagcacagggatccgacttgaattttcccactgcaccccctcctgctgcacaggggcaggccctgcactgtcctgctccaaagtgttggcaagaggaggggcccattgtct

SEQ ID NO: 242131 - DNA, 917 bp, Homo Sapiens
ttggagactgtccacccgtcctcagccccctctcttcgtgggctatctactcagttgatccctccctcgctggcttggctctgactcctgctcagacccatcacctttgccgggaatgatgtctggagaacccctgcacgtgaagacccccatccgtgacagcatggccctgtccaaaatggccggcaccagcgtctacctcaagatggacagtgcccagccctccggctccttcaagatccggggcattgggcacttctgcaagaggtgggccaagcaaggctgtgcacattttgtctgctcctcggcgggcaacgcaggcatggcggctgcatatgcggccaggcaactcggcgtccccgccaccatcgtggtgcccagcaccacacctgctctcaccattgagcgcctcaagaatgaaggtgccacagtcaaggtggtgggtgagttattggatgaagccttcgagctggccaaggccctagcgaagaacaacccgggttgggtctacattcccccctttgatgaccccctcatctgggaaggccacgcttccatcgtgaaagagctgaaggagacactgtgggaaaagccgggggccatcgcgctgtcagtgggcggcgggggcctgctgtgtggagtggtccaggggctgcaggaggtgggctggggggacgtgcctgtcatcgccatggagacttttggtgcccacagcttccacgctgccaccaccgcaggcaaacttgtctccctgcccaagatcaccagtgttgccaaggccctgggcgtgaagactgtgggggctcagggccctgaagctgtttcaggaacaccccattttctctgaagttatctcggaccaggaggctgtgggccgccattgagaagttcgtggatgatgagaagatcctggtgga

SEQ ID NO: 242132 - DNA, 1628 bp, Homo Sapiens
  misc_feature (1470)..(1478): n is a, c, g, or t
attaaaaattatttattcccacaaatgtaaacacttagtgaatctgggaggaggacacacaagagctctttgtactaatcttgcaacttacataagcctgaaattatatcaaaatagaaagttatgcaataatgaattatttcaactaatattaaacttctacttttcaaagatccaatcaacctatctccccagctgagataaagagctcaacaaaggaaaagtaacacatttctttatgtctacctctgtttgtgtctgaaacaaaataggtgttcaagagataattctaaaagctaaaaaaatgagaacgattagatgcaacaggacctagctagagtcctgggaactgggacaggagcagcctggagtcactgcagccttgcttgtctctgggagccccaggcccctgcctcagcctccaggcccctccttcagccctgaccccagcaggtacctccccactcgctccccagactgctagacaggcaggagtggatgtctcaacttgggagaaaaactaaaggaattttgctgggaaaaggaatggatcacgatattcttctgcttcaaacaaacatgaggtattttcaaaaagtgatctctttccccacaccgttttcaaaacaatatcactgcactgggaaacacccaaagggatgagagcactccaagtctctgccctgcagctgaagtgaggttgtcctccatttccaggtaccaccccctcttcagcaataagggcaccagtccacacacaagctgaacaactaaaaaagacaaccagtacctccagaaccccgcctctaaacaggcttccaaccacccacaatgaagaaatgccaacgcagaggcaaatttcttccactggcatgaaactgtttaatgttttaattatacggaaaattctaggatagtatccagccaggaaattcatcctgagttaaacaaaaactgaagtccctctgatatttttatgctggaacagaagcattaagtgaggaaactgtactgtcccatctgtgactgtctcccacacacagcttcaaaatctgccccaagactaaaagctctaaaaacaattattaaaagggggaaaaaagtgtgtgcccaagcacagtgttcttttgttggctgtgcatgtaacagatggggatgcacagaactcaaaatacccagtgcaaagcaaagcggtttgaaccaggcagagctgaggctgaagcccaatggccacacctaatgacatttccccccatctccacaggaagatctgtcagtcctagacatatcagtgcccctctgtctcacaaggaagggaggctcggccctgtgggtccatgggttcttgtagaccacgtggtaaaaaaaccacatactgggatgccaggcttcaggctcagggggacaggaagagagggtactgattatctctccacccaaaacaggttgcctcacaacctactactaagnnnnnnnnnggtatggaactgatggagctcacaagatgtatggactagtacaaaacagctgctgttaccaagaaagaaaactactcaaaaattccagtcatgggccaagcacagtggctcacacctgtaattccagcactttaggaggctgagacccaa

SEQ ID NO: 242133 - DNA, 518 bp, Homo Sapiens
actttgtacaaaaaagttggagaagaccagcgtaccccttttgagacttttgggtacatttatcaaaaatgttttccttttgttttaccaggaatgagttcgggctatactctttgaaactgcctttgtgagcaaagtgctttggcaaggcaagggtctccctcagcagggctaggtgcactacagcctctttccccgtgtcccgttggatctgagctgtgtagcacttgttgcattacaaagaaaaagacttctgcaggaaatagggtagagaacaggctgtctagtcagatgcagcttgatctgtggcaaaaccaagtgtggtctttcagcttcagtgtgttagcatcccagcacctgggatggggtttgtgggcaagttgattttgccacactgtatggcccaggtggtcccattgccaccgtgaatccttattccaccccaagtctggtatagcagtcgggcagctagttttcgggggaggatggtgtggtgggacggaggacctcaccggcct

SEQ ID NO: 242134 - DNA, 1497 bp, Homo Sapiens
  misc_feature (624)..(850): n is a, c, g, or t
aggacatgatggcaccatcactttaactgacccagcatccctttcccactctactcttatcgcacacttttcttattgtccgttcttcccacacgggacaaacagaacaccagcagtaagccattatgctggcacaggcacgtgcaagggacagtgagggtcacccaggggagttggctccttaacctctttgatgggaagagatttgcttggtgtggtagactgtattttctaaaaatggccatggcaatatttcaagtcctgtgtgatcttcaagaaccttgccacttcccataaagatgtgaaatctacttctcctttccttaaatcagggtgggactttgtgacttcttcaaccaacagaatacaaagtgacgggctaggtcacaaaaggcagtatgacttccagccctgacgcatgtgtgcatgctcttttttctctcgacttccgccctgggaacccagccatcctgttatgaggaagcctgcgtcacatgaagaggtcactgtgggtgttcttcctgacaacccctgcaccaactgccagacacgtgagtgaacaagacttcggatgattccagcccacactctgcgagtcttccagcagaggccctagactagtannnnnnnnnnnnnnnnnnnnnnnnnnnnnnnnnnnnnnnnnnnnnnnnnnnnnnnnnnnnnnnnnnnnnnnnnnnnnnnnnnnnnnnnnnnnnnnnnnnnnnnnnnnnnnnnnnnnnnnnnnnnnnnnnnnnnnnnnnnnnnnnnnnnnnnnnnnnnnnnnnnnnnnnnnnnnnnnnnnnnnnnnnnnnnnnnnnnnnnnnnnnnnnnnnnnnnnnnnnnnnnnnnngcctagacattgtggaataggaaaaagccatctccactgtgccctgtctaaattcttgccaaaggaaacttcgagaaataataaatgattgttgttgttgttaagtcacagagttttggaataacttgttacgtagcaatagatacactcacttcctgccccacagttcctgggacttataccattccgatccccgacttttaggttacccgggtagaagagaggcagcttctgttcaaattctaatcccggctgattgtattttttggctctttcattttcagatatgtattatgtaccaaaataggggatttcccgtaatgatcacagaataataggagagctttacacactcagccctaggatagagagctgcctttgacataattatgtgactcctcctgccttcattttagtcttggctcaaatgttacctcctcacagaggcctttccacactaactggcctagtgtaacgcctcatatcattctgcttttacttttttcttcatagctaatatcacataaaacatttatttatactagaatgcaaactccacgaacatattgacctggcctatcttgttcacgcctgcatccctaccatctagaacagtgtatgacagaaagcattcaataaatacccaa

SEQ ID NO: 242135 - DNA, 905 bp, Homo Sapiens
tttgcttggcctatgcccttatggagaaggtatttctatcataactgaagtgtgaatcagcctatgttccctgcactcagaccctatttcctgcctcctacctacagctgtgtggtcctgagctgtcacctcttccctttgaagctcaggttcctcatcggtaaaatgaggcagaaatactcactgctgagatgtgtgaggatcgcacaaactcagtgtctcaacatgttgtacgtgtgttttggccctctgagcccttgagggctgccccaggtggaaccctcttcacttttcttggagaactgaccatgggttgcagcaaagcctaaaatggttcctgtttcagccctgcctgggaagattcagctggaacctttaggctaggaaaagggagaaggaccctacccccactgtgcccgacctgagacaaatccacagaaaagcaatccttgctaactctgggcagtatgtggacaagatactaatttttaatctctgcatctccatgagaatgcaaggaccagcacagtgaagtgcccaatgattgccccctgaacaaacggagatgtcaagttcagaaaaaatcctggctgaggaagacagggaacattcccttgaaaaacaagggcagtcatccagacagagcaagaggagtggcaggataagaggaggcagacagggttgattccacagggctcctcctcaacacccatgaacctgagaagtaagtggtcagatgcgtttcaggccactggccagcagtggggtcatggcgggaactagtcccacctgaaggactctcatctccctacaatccccaaacgctgaggcatggggatgctcttccctccttgaagtgagggccccgaggctctcatactttaatccaacttttttgtacaaag

SEQ ID NO: 242136 - DNA, 1085 bp, Homo Sapiens
acaaaaaagttggcaaataattcagggcatccctacaaattggtaaaagaaactggtgttaccaagaggacacctcagaagttatttaccccttcgccagagattgtgaaatatactcataaacttgctatggagagactctatgcagtttttacagattacgagcatgacaaagtttccagagatgaagctgttaacaaaataagattagatacggaggaacaactaaaagaaaaatttccagaagccgatccatatgaaataatagaatccttcaatgttgttgcaaaggaagtttttagaagtattgttttgaatgaatacaaaaggtgcgatggtcgggatttgacttcacttaggaatgtaagttgtgaggtagatatgtttaaaacccttcatggatcagcattatttcaaagaggacaaacacaggtgctttgtaccgttacatttgattcattagaatctggtattaagtcagatcaagttataacagctataaatgggataaaagataaaaatttcatgctgcactacgagtttcctccttatgcaactaatgaaattggcaaagtcactggtttaaatagaagagaacttgggcatggtgctcttgctgagaaagctttgtatcctgttattcccagagattttcctttcaccataagagttacatctgaagtcctagagtcaaatgggtcatcttctatggcatctgcatgtggcggaagtttagcattaatggattcaggggttccaatttcatctgctgttgcaggcgtagcaataggattggtcaccaaaaccgatcctgagaagggtgaaatagaagattatcgtttgctgacagatattttgggaattgaagattacaatggtgacatggacttcaaaatagctgggcactaataaaggaataactgcattacaggctgatattaaattacctggaataccaataaaaattgtgatggaggctattcaacaagcttcagtggcaaaaaaggagatattacagatcatgaacaaaactatttcaaaacctcgagcatctagaaaagaaaatggacctgttgtagtaatac

SEQ ID NO: 242137 - DNA, 1251 bp, Homo Sapiens
  misc_feature (374)..(392): n is a, c, g, or t
aacatagaatagatgctactctaaagtcacaatggaaatgcccaacacatttcacaaatacaattatatgtaaacaaaaagagaactctatgtatcaaaatgactttgcaagtttaaatacaatattgatgcatctatggcaattttcacatagcccttgaaaagcaccaggtagcttggtgttattatatgactttatcccctagaaaagaatgaacaggtctgaaaagaccttctagattattcacatgagaaaaagggtaagaaaataatagtaaccaataatataacctgtgatgttggagaaacctggaagggcatttatagtctaatatgatattaattactaagttaaacattttattaggagaatnnnnnnnnnnnnnnnnnnncaatatggcgcaattttaagtgaaaagaagtatagatgataatagctaccttcaagagaacatgtaaaagtaaattcaataactcctggggcaggttcaaaagaggtaatgctgcatcaaaatggctatgtaaagaataatgggggcatattaccataatcgatatcaagaaaatggatatatgtatatagcagaaaaaatctggggctcatttaaaattaattctagttttaaaaaaatcattaacaaaaacgtatattgtcattaaagagaaatttccattgaaggagaagttgaaaaaattctgtagaggttctattgtatcttagtctaactcctatcttgattctgtgcaatgaagctatgttattaggtaaaatagtattataaatcaagctctttgggaaatttgctggcctaggtacatgacagagccacattttataatacaattatgtaaatcataacaaagtcccagagtttaagtgctcatccttctacgtggaatgaaattactccaaaatggtatcacagcattatggaaatatttcagatcacgttataatcaagtcagaataaacggggattgaaaccacagacattatgttaacataagaatgctatttataaattcaattgtatcataaaggcatggctaagctaaagctaaagtgagaactaacaagttcaccagtaaaagttacctgaattttataacagatgaatgatatcatactcatcatttttttaaaacacaaagctaaccaaataataaaaatcctttttccagtagataggagtagtgccttcttcactctttataacctgttcctggggtaatttccaaccttttccccaa

SEQ ID NO: 242138 - DNA, 2979 bp, Homo Sapiens
  misc_feature (1512)..(1704): n is a, c, g, or t
tagcaactacttggagcttatcaattaaaaggaaacaaggtaagcagacacattcattagatcaaagaaatttgatcaagttcactggaatcagtctgtaactactcaagtcacaatgacttcagtgcaggagttttttactggacacagaagtctgattccaagcccactcttcaacagctgagattttgtgtgcgtgtatgtatgggtgtgtgtgtagacgttgtcttgaggttcatcagctaaaataatataataagcaatccctacaaaatatttcaaaccaggcaaatgacttctggaagagagagaaaggaaggggagagggagggagaatatgagtaagcaagcagggtcatatggttaaacatggaattttttaaaggagttattacaagtgggagtcaaatagaactgtggtagaatgctttgggtacaggaatatgttatgcaataaagtgaggaagagaaaaagggaataagaagggaggaatgtaactagagcagctcccaacagtttgcctatgtatttgccagcaccaaaatttgtagagtaagccacttacatttccactgctagtattaaggaaagacagcagtggtgatttttataaagtgagtatacatttatttttattctgatatgtgaatttttctttcacgagttaattaactggtaatttgtaaacagtgggaagaagattagaacaattatggaggtactgaattacacaaggagattaaaatgaaatgaatcaatctacctatcttgtggttagtttatatttaccatgatgcatacacttgagaaacgagaaatgcccaaattgtataatgcattatcttgtttattatttattttagtaaataattcttgtctgaaacataagctccaaggatagctatatctatactgatagcttagttcttatacaaagcaagctacttttgaagaagttttacctattaaaaaaataagttaaggtgccatgttgacctggccagccatcttgtttactatctcagatacaaatataaatacaaggaatgatgattttgttctgagggttggtctagccagggcaaaactgtggtctgctggtaaagtactaggcaatgaaaagaaagcttgtattacactgcccataatgtacccattttatggataaacaggagactttagcaccggtcaattatattagctacttaaatgtcataacaattaaaataaacatagaacattgcacctatatatttaaatcagtcatttaatgtaaactttttagtaagtggtaggaaaatgccaaactaaattaactgaattatcaagaattagactaattgtgtatgtacataaaatacactgtatctctataggcagtactgagaattaacttttgccaataaaagattatagataaccaggttaagctgaatttacatgaagaacaatgtataactatatcagtctgagtggaagaaaaactctatatctcaacagagtcttagccnnnnnnnnnnnnnnnnnnnnnnnnnnnnnnnnnnnnnnnnnnnnnnnnnnnnnnnnnnnnnnnnnnnnnnnnnnnnnnnnnnnnnnnnnnnnnnnnnnnnnnnnnnnnnnnnnnnnnnnnnnnnnnnnnnnnnnnnnnnnnnnnnnnnnnnnnnnnnnnnnnnnnnnnnnnnnnnnnnnnnnnnnnnnnnnnngttgcacatactacatatgtagaaaaagatatattgtaatgttcttatatacatggcacaaaatatatagacaactggttttaatgaattcccaaacatgtaggttagcaagctgaatgtttctaaaatgtgacgtttctaaaatgatgtgctaaagcataattatttccccttataagtaaattacatttcaaagtcttaagtcctatatagtcattttagaaaaatccatataacatttataccaagttggctatccaaaagaaaagggacataacattctaaatagttaagatgaattcattaggaaggaatcatcactatacagcattcttggcttctttggaatgattaaagtgcataatatcaatagggtattaagaatattgcataaaagtttgcagtcctcagtgccactaacagtcacagaaatactagcacggggaaagcagccctatcccaaaggtagaactatcctgacctgttgctgatgatcctttctttaagcaccaccgctgtggtaaggagctggaatagaggcaaaattaacaaaaaccaaggcactccatctgactgtatctgatcaaaaggaattatcttaggtctggagggagtcagatataacctttttctcatttcctttgacactttttgtctaggtaaattaactgaggatagacaagaagtacactaacataaacaactttgccctgtctagttaaaaaaaagtggcataatcaggctttacctaaactatgttttagtgatttatttccatctaattaacatcagagaaaatgctttcaacactttcttcctgaaatttacacacatctggtgcatggagtttcacagatgctaaaattctcatgagtattcagataagacctaccattagctggttgagatgaagacaaatttagtttatataaaggctgaacagtctaattctgtaatcttttaccctctcccaaagaaacaattctagcaatgtaccttttcttttattcttaagccaaagggaagaaatggagaaaagaaggtttaaatggaaaaagtaaaagctgggacctactgaaactatttgtttatgtgtttttggaaatagtgaaaaatgaaattataaatgataaaaaggcacttttccatagcattagatctagatataaaatattaatttaaaaaatttcctgaaagagaaagtaaaaacataattttattaataaatgaggctagaatggcataaaaataaatggggattaaagaagtaattag

SEQ ID NO: 242139 - DNA, 1113 bp, Homo Sapiens
  misc_feature (288)..(314): n is a, c, g, or t
  misc_feature (616)..(644): n is a, c, g, or t
gaaaactttcagtgttttatttttgactgcagctgtttacagaaatatagttgcgagtatacaaatgttccaatagaagcaaaatatctttttaatatttaacaagttatcacagatagctaaaaacatagatgcaaatgaaattcccccagagaacaaactgaaaatatctggtatcagtgctctgaaatcccaactatgaaagccatatacacaaaaatgtaacccttatatcattgcaggacaatggaagaaggcagttcagtggttgatcagtgtgctcaagcnnnnnnnnnnnnnnnnnnnnnnnnnnnggcagaatggtagctaaaccacttgagaacaggttaatgaaattattggtactatacttaaaacattaagtaaaagaagtgaatgaaactcatttaaagttgtcaaaaaattagcaactacttggagcttatcaattaaaaggaaacaaggtaagcagacacattcattagatcaaaagaaattagatcaagttcactggaatcagtctgtaactactcaagtcacaatgacttcagtgcaggagttttttactggacacagaagtctgattccaagcccactcttcaacagctgagatttnnnnnnnnnnnnnnnnnnnnnnnnnnnnnagacgttgtcctgaggttcatcagctaaaataatataataagcaatccctacaaaatatttcaaaccaggcaaatgacttctggaagagagagaaaggaaggggagagggagggagaatatgagtaagcaagcagggtcatatggttaaacatggaattttttaaaggagttattacaagtgggagtcaaatagaactgtggtagaatgctttgggtacaggaatatgttatgcaataaagtgaggaagagaaaaagggaataagaagggaggaatgtaactagagcagctcccaacagtttgcctatgtatttgccagcaccaaaatttgtagagtaagccacttacatttccactgctagtattaaggaaagacagcagtggtgatttttataaagtgagtatacatttatttttattctgatatgtgaatttttctttcacgagttaattaactggtaatttccaa

SEQ ID NO: 242140 - DNA, 1300 bp, Homo Sapiens
  misc_feature (1043)..(1053): n is a, c, g, or t
ttggcttttaagaagattcctatggaagacagacataatatccagacacatacaaactatttggctatgctggaggaagtaaattacataaacaccttcagaaaagggggacagttgtcaccagtgtgcaatggaggcattatgacaccaccgaagagcactgaaaaaccaccaggaaaacactaaagaagataactaagcaaacaagttggaattcaccaagattgggtagaactggtatcactgaactactaaagttttacagaaagtagtgctgtgattgattgccctagccaattcacaagttacactgccattctgattttaaaacttacaattggcactaaagaatacatttaattatttcctatgttagctgttaaagaaacagcaggacttgtttacaaagatgtcttcattcccaaggttactggatagaagccaaccacagtctataccatagcaatgtttttcctttaatccagtgttactgtgtttatcttgataaactaggaattttgtcactggagttttggactggataagtgctaccttaaagggtatactaagtgatacagtactttgaatctagttgttagattctcaaaattcctacactcttgactagtgcaatttggttcttgaaaattaaatttaaacttgtttacaaaggtttagttttgtaataaggtgactaatttatctatagctgctatagcaagctattataaaacttgaatttctacaaatggtgaaatttaatgttttttaaactagtttatttgccttgccataacacattttttaactaataaggcttagatgaacatggtgttcaacctgtgctctaaacagtgggagtaccaaagaaattataaacaagataaatgctgtggctccttcctaactggggctttcttgacatgtaggttgcttggtaataacctttttgtatatcacaatttgggtgaaaaacttaagtaccctttcaaactatttatatgaggaagtcactttactactctaagatatccctaaggaannnnnnnnnnnaatttagtgtgactaaggctttatttatgtttgtgaaactgttaaggtcctttctaaattcctccattgtgagataaggacagtgtcaaagtgataaagcttaacacttgacctaaacttctattttcttaaggaagaagagtattaaatatatactgactcctagaaatctatttattaaaaaaagacatgaaaacttgctgtacataggctagctatttctaaatattttaaattaggcttttct

SEQ ID NO: 242141 - DNA, 1349 bp, Homo Sapiens
  misc_feature (207)..(252): n is a, c, g, or t
  misc_feature (449)..(528): n is a, c, g, or t
  misc_feature (553)..(566): n is a, c, g, or t
  misc_feature (755)..(981): n is a, c, g, or t
  misc_feature (1008)..(1033): n is a, c, g, or t
aaaagtccacagttactgggcaggtaattggtataaatggagggtgtggggctggatgcggtggctaatcaaacatttttcaagtgactagtgcatgtccagcaccggtaggggctaactggatgaaaaatagaacgagtcaaagttcttgacctcaggaatcacagtcttgtgtgagagaagacaagagggcagtgagtgtggaannnnnnnnnnnnnnnnnnnnnnnnnnnnnnnnnnnnnnnnnnnnnnagtctgagcaagagaggagaggatctcacaagaggaagattggaaggctgggcagagagacataagcctgaacatggggcagtatgacacagttctgagggctgcaggctctacctgaggctggtccaaagggacgtgttgacacccactttgcttgcctcctggtcacccttgctcacctgcactgtgggtggggnnnnnnnnnnnnnnnnnnnnnnnnnnnnnnnnnnnnnnnnnnnnnnnnnnnnnnnnnnnnnnnnnnnnnnnnnnnnnnnnggcaacagagtgagactctgtcttnnnnnnnnnnnnnngaattttttcagattggctttttggaaggtcaaaccatgttaaggaaaatagctctcttctctctcccatgactttagtcagaaatatgagcagaatttatacagtttggcgacagcacggacgctgtctaaaaaggtcaacattttccttttataaaatagaagctcagccaggtacggtggctcatnnnnnnnnnnnnnnnnnnnnnnnnnnnnnnnnnnnnnnnnnnnnnnnnnnnnnnnnnnnnnnnnnnnnnnnnnnnnnnnnnnnnnnnnnnnnnnnnnnnnnnnnnnnnnnnnnnnnnnnnnnnnnnnnnnnnnnnnnnnnnnnnnnnnnnnnnnnnnnnnnnnnnnnnnnnnnnnnnnnnnnnnnnnnnnnnnnnnnnnnnnnnnnnnnnnnnnnnnnnnnnnnnnnctggcaacagagcaagactctgtctcnnnnnnnnnnnnnnnnnnnnnnnnnncagaagttgtcctcctgaggggatggaaagagagactgaggcagttaactgggccttccttcctctgggccacaggcctggcctctgttacatacctggagcccaacaggcaaggataaagcagtttgcttaagaaactgcaggagaacaagctgggacaacacacactcgttctccttagggtgacggagggagtggtttcagaggcacagtctggcagagcctacgtgagcattttcttgccaagatcactcctgcttgatcaatctactgagcaaacagcactctgcttgcaggaagacttgtgctgagccaa

SEQ ID NO: 242142 - DNA, 1241 bp, Homo Sapiens
taatagccaactttgtacaaaaaagttgggctccgaggaggaagaagctaactattggaaagatctggcgatgacctacaaacagagggcagaaaatacgcaagaggaactccgagaattccaggagggaagccgagaatatgaagctgaattggagacgcagctgcaacaaattgaaaccaggaacagagacctcctgtccgaaaataaccgccttcgcatggagctggaaaccatcaaggagaagtttgaagtgcagcactctgaaggctaccggcagatctcagccttggaggatgacctcgcgcagaccaaagccattaaagaccaattgcagaaatacatcagagagctgtggcaagcaaatgacgacctggaaagagccaagcgcgccacgatcatgtctctcgaagactttgagcagcgcttgaatcaggccatcgaaagaaatgccttcctggaaagtgaacttgatgaaaaagagaatctcctggaatctgttcagagactgaaggatgaagccagagatttgcggcaggaactggccgtgcagcagaagcaggagaaacccaggacccccatgcccagctcagtggaagctgagaggacagacacagctgtgcaggccacgggctccgtgccgtccacgcccattgctcaccgaggacccagctcaagtttaaacacacctgggagcttcagacgtggcctggacgactccaccggggggacccccctcacacctgcggcccggatatcagccctcaacattgtgggagacctactgcggaaagtcggggcactggagtccaaactcgcttcctgccggaacctcgtgtacgatcagtccccaaaccgaacaggtggcccagcctctgggcggagcagcaagaacagagatggcggggagagacggccaagcagcaccagcgtgcctttgggtgataaggggttggacacgagttgccgctggttgtccaaatcaacaaccaggtcgtccagctcctgctgaagcctgttcttggtcttttccagtttatcataagcggccgccttctcctcgtactgctgggtgaggttctcgatctccttctggaacctcttcttcccctcttccagagcttccacggtgctggcaaagtcctgcagcttcttcttcgagtcggagagctacaagacagcgtccagggtagggtgagagggggaccatgagtggcccctgtccctggccccacagactc

SEQ ID NO: 242143 - DNA, 999 bp, Homo Sapiens
actttgtacaaaaaagttggtgtgcggccgccctctgggggaagcgaaggttcctgattccacctaccacctaagtgaaggcttccgtccctggagaggaggcggcgccctgtatcggccttcgtcctccgcgggtgtgctaccgttgggacggtcctttgttgccgcgaggggtaggagtgggcgtggcggagccagctccgttcggaacactcccgggccgacccgactcgctcatcctgcaggagctgcggcgccaagatgagtggagaggagaacccagccagcaagcccacgccggtgcaggacgtacagggcgacgggcgctggatgtccctgcaccatcggttcgtggctgacagcaaagataaggaacccgaagtcgtcttcatcggggactccttggtccagctcatgcaccagtgcgagatctggcgcgagctcttctctcctctgcatgcacttaactttggcattggtggtgacggcacacagcatgtactgtggcggctggagaatggggagctggaacacatccggcccaagattgtggtggtctgggtgggcaccaacaaccacggacacacagcagagcaggtgactggtggcatcaaggccattgtgcaactggtgaatgagcgacagccccaggcccgggttgtggtgctgggcctgcttccgcgaggccaacatcccaacccacttcgggagaagaaccgacaggtgaacgagctggtacgggcggcactggctggccccctcgggcccacttcctagatgccgaccctggctttgtgcactcagatggcaccatcagccatcatgacatgtatgattacctgcatctgagccgcctgggctacacacctgtttgccgggctctgcactccctgcttctgcgtctgctggcccaagaccagggccaaggtgctctcctgctggagcccgcaccctaagcatcctgctgccttctcacaacattaaactctccttcctcag

SEQ ID NO: 242144 - DNA, 1092 bp, Homo Sapiens
ttggctttttaaactgattcttcctcagctgttcttcagccctctatactttttcataaaagtcaccagtgactgcccagttgccaaatagatgaatacctttcagtgctcagctgtcttgacctctccgcagcatttcacaccacccaccaaccctcagtgaaacaacctcctcccttagcttttatgacaccacaagtctctggattctcagagaatccagaaaaacaagtctctggattctctcctcttacctctcagcccacacaggctgagctgtccttgaaacctagatgggggaaatgtctgtggctgtctgtggtctcttcttttcaggagttgggtagggaggaagaatcacagctgctcctgcttcctctgtctgtctctctatttcctgagtcccttccttttcctgaactcagttctcctcatgccaaccatgtttatgagctcctgctgggaggacagcatctgtgagtccttccctctgtctctcccagacaacacagaggttttagcctgtttgctaagagaccccatctaagtcagcccaagggtgtggattaggttttacagcatccaggccgcagtctggctaaactggattaccaggctggtgggcagctcctcaccatgatcctgcaccagttagagcctgctgtagttgggaaggagcctgggattgtggtaagatgtgtttccgtgcatgtcagtgctgctaaccaggaggagaacctggcagggtgggtgcctgctgctgataacattcggatggagggagactagggagcgcggtggctgctcccttgctggggctcagctggagtcagcatgactccttatatcagggcctttcccacctgtgctgatcaccaccacctgcttgctccagttgtttctggagttggaggcagctattggttgctttcttggaggtaaggaggtatatactagaaagatatctgatttgagagtctgaacaccaaaatttttggctctttccattatgagctgtgtaaccttggatacagtttcctcatctataaagttgtggtgggagatggctgagacagtgatctctcagctctc

SEQ ID NO: 242145 - DNA, 1030 bp, Homo Sapiens
gcagtacatgaatgttttattcttcataaagtgcttaaaacatgaagaacaagctctttataaagagccttaactaggaagacaaacagcaaagcagaaccatgcctgctccctgcccaacccacctgcaactttcctccaagtgtggctaggagaagaaacatcaacaaggaccctgggcttcgattcaaaaactcctctgaagccatccatgccctgggcattagggaggcccacaaaggtcagggccagggctgggagtgaataaagcccagaggaatccccagtagggggggtgactccccctctctcagaaaagatacttacttctctaatacccaatgacccccaaaagcatgactgaaaccctggggaccagtggatacttttctcagatttgatgagtggagtttaaggtaggtaacgttacaggggctttcctccatgtgtggcgctcctctgctccatcctggcagcagacagacatcacccagagggcacgtgtctgcctgaggccttccaaaagcaagcccacaggccctctcctgaagaagtggtggtcccagaggagctcttgcctcctcactaagctgttaagtatccttcttcagcacctcatcaccccccatttttgctaattcagggtgccccaagctgccaaagttccctgcagatgccttggggaagcctaccatgttttctacaagcaaaccagggggtgggccaaaggacagatacttcatttcaaagtgcactgcagccaagccaggcaagcccctggggcagaagggacaggctgagatagcagcttaatggatggatgggaggacaacaaaggctttttcctaagtataggtgtctcccaaaggcatagtgggacctccctcttccaggcaagctgactggtctagtatggctaagtcctgaggccagacaatgagagtgagcagggcagccccaggcctgcctgcccgcctgcccagcagtgtttatcctgggatcctcctattgggggtgagggaggggccaa

SEQ ID NO: 242146 - DNA, 2223 bp, Homo Sapiens
  misc_feature (53)..(66): n is a, c, g, or t
ttggcaagtagggtgatacaaaatgtatgccaagaaaagtctgattgtttcannnnnnnnnnnnnncttacttgtctgacacagtgacaggatcacagaatgtgaattttgaacagatctgaaaagttattaagttcaactccacagaggtgagtaatgtgcccataagtgtggctgaagatgagtggcgctaacacaatgctgtgagtccgacccccagtccagcactctttccatgtcgtctaactcgctctcatttaccttcacataaagtgacaaaggggcctgatgcgtaacttcctccagccactccccgttcccagttattattccaaagaaatgttgctggggaaaagtgaagatgtgacttgatggggcaagctgccactctgccttccttcctatgataacttactagtaaataatgcattccttctggaatttaatttcacattttcaaaggccaaagacagcttgtagtaaatctttatacttataaaaaagcattttaaacagcataacatttataatatagttttccccttgacctccctaagaaataaaattttataacatttacttggtatcatattgtaaggcacccttggcagttttcttttattgcttatgttagagatctgatcagtgacaatctttaaaaaagatctcacagattcattagcctccacttttttctctgagaactgtagaagagttgactcaacagcccagcagggggttggcacgctggtttctaagcggctttaatgcacaattcaccagggtcaggagctgaccctcaaccttttagcttaggcactagattagcatactgaagactgctggggtggagtcacagtaactaagttgacaagactgatttataaaaccaaaatagtatcaatgttcaaaaagaaacagatctgtcccagaaacagaagtataagcacctgcagctccagcccattgcctcaagtccagttcatacaataagaaacaactgtcagggcaaccagtatatttgagaggacatgaataatgcattctcttcccatgagctaacctacactggaaaagaaagtaatcagtacaagttggattggtgggactggaatcagaacaagggaaatcagagtcagagaatgttgaattgtgctaagctgatgtattcctttcacaataaggatgcattctaggcagagggactgggaattggaaagatattactggctataatctgatgcatccattgcacctagtgaaggctcaccatatggtcagaatactcgatgcacactgatacaactctctacatccatctctgtgttagggacaaatgttactttactcttgcacagaacttggacagtcacttttaatatctgtcttttctttttctattttcattactgataccctctgccccttctttctgactaaaactctcattcaataaaattatagtcaaatcttgcaattggaaaagtattcagacttttaaagttatatttatatatctaaatgttgctccattagggttttaattctaaatttaacctttaaaaagttatcatattttctttatttccaggttcctaggagaatgttaacagtccagacctttttcactacatcaaccacggatgattggcatataaaatcctacttaacctttacataactgcaataccaggaaacaaatatgtcaataaaaggaaacatcattcaatttttctgagaatgcattcttccatcattcctgaagtagaggtttttctataatcatgttaagaacataagctcctgagggcaggaatttctgctttgttcattgatttatcccaactgccaagaacagtggagtgctcaataaatattaaatgaataaataaatataacctataacctaaactacattcttaaaaaaagtcaacatccaggaaataagactctaaaacaatacacattatctacttaatatctcttatacagtctaccaaatttcaatacatcatcaatcattcttaaacaaaaaattctgctgaaataggataataattataaaagtgcaccatagtttataagatatttaacaaatgtctgttggtatttatcaattattttaattattctatcattccaaattttatcttttttaaaacattttattctttacatttgaaagaaagaagtatagctgggaatacatttttaaaaatccaa

SEQ ID NO: 242147 - DNA, 939 bp, Homo Sapiens
  misc_feature (102)..(111): n is a, c, g, or t
tgtaaaactaaatgtcataaagattctgattatacataagtcatcgttactaatactcatcatgtactttcaaatgtaaaaagttctagaaatgcccaaatnnnnnnnnnnttccagaattgaatttagcatggtcaactaatttttactttatgtgcttttttgctgatcatcacagactgctaaaattcatggtgtttggtatatatgtgtgtatacaaccatactatctacatacatacacatgtacatatatagattctaaaccaaaggttcatatgagcatcacctatcaaaagaaaaatctttatgtgatgagagaatgaatacaatctgacaccaatttggttgatataccccttttgatatattaattctactctaaaattcttttttattttatcaagtctaatgctattatttatcaagaattagtaaaggaagataaatattaaaaaattaaaatattaagttgggtaactttaaaaatagttatttaaattttctaagattcaacctaagttcttggtggccttcaatataaattttaagtacttaatttatgtagttttaaattatgtagagaaaaaattaatattggtgtgaggtctgtgtttaaaaaaattctgtttttcaggatttcatttcaaatttactataataaacacatggatattaaaataaatgtataacaaaataaaagtaaatagttaatactttttacaacagaaaaatactagaatataaagttgtcttgagaaagtctttttttatgtgaagtcctatattcatgaaatggacatgatcttacaaatacacatgaaaataacaactatcatttgtagaatcctcagcatttacaaaatactttttcacacattatctcatttactgtaaagaatttcttaactaaataattctattatctataagagccaa

SEQ ID NO: 242148 - DNA, 1197 bp, Homo Sapiens
cattaatttgaatgaaaaggagtcaaaccaaggcataatatcctattgcatctaaaggcctgggagattttaaactcttctaaggtgtatttgaatcagatcttcaaagaaaagagtgttatttctagttttttgttgtccaaattacaagagtttcaacggattaaggtttccttaccatgattcttttaacactaattcctaatcagaaatggtacttaagaatatcaacgtttagaattcaaacatgattctagaaaatttcttatcttaaagtcaaactataacctttactcaataaagcatactcttaaaggtctgtgatgcatgctttaaagaacagtgatgggattctggagttctttcctttctttctccttctccaaagatacagatacctttctacagttttctatggaataagagacttcatcatataaaatggctggcatgttttcccttttgaatagttctgattataagatccaccatgaaattttacgtttccaaatcataagcttaatagcaaaagcaaacaatttgacctaccactgagctaaattgaagaagaaaaacctgcattttagagtatctgttatcaagggttagcaaactttttctgtaaaggatcagataaatattttaggctacctgggccatatggtctcccttgcaatgactcaactctgctactgtagcacaaagcggccatacacaatatttaaaagggtgagcatgggtgtgccccaataaaactttacttatggacactgcaatttgaatttcatataattttcatgtgacacaaaatatcagtctttggaatttttttcccaactatttaaaaaagtaaaaactggcagctgactgcaatagcttgtaggctgcactttgctgacccctggtccagatcattcagatttcttgatgtgagggtcaaagcaataatgtggccatgcatcatctcacttcacttggacattgatagctttctgggctgatagtatagaactccgaacaaaaatccccaaagcacaagacaatcctacaagtaagtagtatctacactcacagactgtgtagagcttgtaagtgttgatactcatctatctatctgtatatatattcaggaaacatttaaatcaaattcatttaaattatgttgtcaaaaaagcagggaattgccaggtgtgccaa

SEQ ID NO: 242149 - DNA, 551 bp, Homo Sapiens
  misc_feature (404)..(413): n is a, c, g, or t
gcaaaataggaaaccattttaataaccaaaaaacagaaaccagtctgaataaaactacaatagattaggttttaatattttcatatcataagcagggtttgaaattgatcccttattttacatgaaataaaaacaatttctgttgcggcaggtttgatttcaacacagttgaatctgtaaaaaccaaagctcgtttctgatgcaggacaaatatccacaatatttaaaactgcaagcaccatgcggttcatacaatcttgttattactgttaatttatcaactaatacaaactcaaaaatgcatccggccagcagcgccagcaatttcaaatgggaacttaaaaatacacttttattttggtatttttgtcagtgcaacttaaatccttttactgacctgcagnnnnnnnnnngtaataataaagaaaaacacccatatcttccctataactactatacaactgaagaattgaaggggggggacaccaccaagaactcttcctactatctcaaaagcagggaaagaaacgcccaacttttttgtacaaagt

SEQ ID NO: 242150 - DNA, 711 bp, Homo Sapiens
cagataaaatttgtttttaataaaggagtaattttctttcaatcctatataaaacaatagcaattaaaaacttcatttctgaaagtaaaatatttacatatgaacaagtaactgtgcaaaatttacatgaaaaaatggaaagacagggatttcctaaaagacaaaataaaaggtgtaacagttctcaggtgttgataaaaaatactgatcagcgttcagttcacacgcgctcgaattaaagtctaatgtgagaattcacacggagaaagccagagtatttacagtcataaaagtactatcaatagacaatttcatacaataacctctgaaaatagaaagaaccaattagtatatttgtaataaaaaaataggtacaaagaaggggctttgctctggacgtctgtaaagtcggcccaaggcttgcatacagtctcttagcaaaataattatagtttacatagccatttctatgtcatgtgccaaaagttatgtacaattactgacaaaatacaccaaccatttttcaacacttgattcacaccgagaaacagtcttttgatgattcttctcaactttgattttatttaatctaggttttcacttttagctaaaaaacacagtgcaagtaaaatatatttatgctgaaaaggttttcatctcttttaactttacattacaaacccaacttttttgtacaaagttggctttttt

SEQ ID NO: 242151 - DNA, 1252 bp, Homo Sapiens
  misc_feature (868)..(880): n is a, c, g, or t
ttggattagctttataagcccagtgtgagctagttagaatttcagatccttttcctgcctgccgaagtgaaaactctgcttggaatcttatgttttatgtgcagtatgttcagattttctagctgggattgtctgacgtctaacttgacttttactcctcttagtcctcccaaaccgaaggaccctgtatctgcagctgtgccagcaccagggagaaacaacagtcagatagcatctggccaaaatcagccccaggcagctgctggctcccaccagctctccatgggccaacctcacaatgctgcagggcccagcccgcatacactgcgccgagctgttaaaaaacccgctccagcacccccgaaaccgggcaacccacctcctggccaccccgggggccagagttcttcaggaacatctcagcatccacccagtctgtcaccaaagccacccacccgaagcccctctcctcccacccagcacacgggccagcctccaggccagccctccgccccctcccagctctcagcaccccggaggtactccagcagcttgtctccaatccaagctcccaatcacccaccgccgcagccccctacgcaggccacgccactgatgcacaccaaacccaatagccagggccctcccaaccccatggcattgcccagtgagcatggacttgagcagccatctcacacccctccccagactccaacgccccccagtactccgcccctaggaaaacagaaccccagtctgccagctcctcagaccctggcagggggtaaccctgaaactgcacagccacatgctggaaccttaccgagaccgagaccagtaccaaagccaaggaaccggcccagcgtgnnnnnnnnnnnnnaacctcctggtgtccactcagctggggacagcagcctcaccaacacagcaccaacagcttccaagatagtaacagatgtatgacctgccatattcagtaagaactgagattggaatatttaatgactccaattccagggtttcagaaccgcatcgcagcatctttcctgaaatgcactcagactcagccagcaaagacgtgcctggccgcatcctgctggatatagacaatgataccgagagcactgccctgtgaagaaagccctttcccagccctccaccacttccaccctggcgagtggagcagggcaggcgaacctctttctttgcagaccgaacagtgaaaagctttcagtggaggacaaaggagggc

SEQ ID NO: 242152 - DNA, 791 bp, Homo Sapiens
  misc_feature (72)..(84): n is a, c, g, or t
  misc_feature (292)..(301): n is a, c, g, or t
accaacgtttgttcccgagtagaaacataaatagggcagaatcgaacactctgttcttctctcttccaaagnnnnnnnnnnnnngtaaaagtaaaggaaaggcagggtttgaggctgcgccccctcggagcccccttccgcggcgcggtgtacaaaggggcagccgagacgcgcgggtttgtgcaacacggggcggccgcgcgggggaaagaggcagcgcgagggcgggggggtcatgcgctcgcccccccgggagcagggggtccagcttgtcgagtcctgggcaccctcnnnnnnnnnnaatccccgggggccgcgccctctctgagttcctgggcacactcggggagggggggtccccagggccgcaccctctccaagtccggggcgcccacgacacccccccgcgagcccgccccttggggagggtggccgcgcatgcgccccgcgcgcggactcagtacgcgggcacctggtgctggggcagcagctggcagccgctgttgacgtggctgaggactttctgcttgagctgcgccacctgctcgcgcagcaggctcgccgtggacgccagctccgtgttctgactcttgagggtcttcactttctcttccaggcgcgagatgcgctccagcttgcgcttgcggcacttggaggcggcgatgcggttgcgcagccgcttgcgctccgccttgatgcgctcctgcgtgtccatgtcgatgggcgacaacggcgggctctcgccgaagctcggcacgtcgggcaccgtctgtggctcgtccttgagccaa

SEQ ID NO: 242153 - DNA, 1105 bp, Homo Sapiens
cttggtactaactgaacttgacaaatcatgagctaatgcagttcctaggcttattttctgagccaaccgaggcaggagacactacaacacaaaaaaatgtgaaccacagagaccaccaagtacaaaaactgcaaactcataagcattaaaaaacattgggtggaactggttagagcacattagaataatttaccagaacttgtgcagagaaaagaatgaagactggtggggaataattgacaggttctgctcccccagcttaactatcattgtgaaggttaaaataaaagaagatatgaagctctagcataataaagaacacagcagaggctatatataaaaaagttaacataaaaatctgacaggtgaaggaatagaatatcctgggaaaagcaagaactacttactaaaacctttgtttttccacttggaatctgcatacttatattgaactaataaagtattgctatgaacaaactagtagaatgaattattttaacttctcaagaccctgatatagagctatccattttgcattctaaaccctctccaggctaattgacaaaggataataccagaaatagatcaggagttaaattatagttagaaaggggagagaagtaaggtaggacattaaaattttattctgaaattatctctggccacaacaataaaatttaacagatattcactaaacagtcttactcctgtcatcagctgtataatacatacagtatcatagaactggccactaggattaaaatccactagaacatatttaatgttaagtggcgacagcagcatctcacagaaatttttacatacatatatacacagtccacattcaaccattttcacatattttcagtacacacagttgcagcatattacagtcacgtgtgtaagttgttgttcgataaaaacccaagccactgcctagacagaactgtagcagttgagctgagtataattacaattaattttatgtatgtccatagcagagagatgtacaagcccctaagaaacagagttcacaaatactttttttaatgctattacagcattatgttgggcaatattaaaacctttacggagaccagatcag

SEQ ID NO: 242154 - DNA, 1158 bp, Homo Sapiens
ttggcacagaatgacccggacaaggagtacaacatgccgaaggacggcaccgtacacgagctcaccagcaatgccatcctcttcctgcagcagcttttggacttccaggagacggcaggcgccatgctggcctcccaagagaccagctcttcggccaccagctacagctctgagttcagcaagcggctgctaagcacctatatctgtaaagtgctgggcaacctgcagttgaacttgctgagcaagtccaaggtgtacgaggacccagctctgagcgccatcttcctgcacaacaactacaattacatcctcaagtccctggagaagtctgaactgatccagctggtggcagtgacacagaagactgctgagcgctcctaccgggagcacattgagcagcagatccagacctaccagcgcagctggttaaaggtgactgattacatcgcagagaagaatctacctgtgttccagccgggagtcaagctccgggacaaggagcggcagattatcaaggagcgttttaagggcttcaatgatggcctcgaagaactgtgcaaaatccagaaggcctgggctattccagacacagagcagagggacaggattcgccaggcccagaagaccattgtcaaggagacctacggggcctttctacagaagtttggcagcgtgcccttcaccaagaacccggagaagtacatcaagtacggggtggagcaggtgggcgacatgatcgatcgccttttcgacacctctgcctgagcctgctgctagccctgcctggttccaccagactggcgtgtcattggacagataaaccagtgttagcttgcctctgggctgggtgagcttgaagtcctctgggacagagacctgtctccacgcctccgggagctgtgtccctgagccccctagtcctggctcctgctttttccccacagcccgtgttcccagccgaaccagcactctcccggaagcctggggtccctccacaccttggcttttatgaccctgatggcttctgaaacaggaaaagagagaaggaagacagaggcctgtgcccactgctgctccatgtgtaccaagagcagcagggcagaaaggccctctctccagcctatgtcagagtggggacagagaactcccctacagccc

SEQ ID NO: 242155 - DNA, 1657 bp, Homo Sapiens
  misc_feature (497)..(784): n is a, c, g, or t
caggcattacaccaaagaacgggacagtcaactctggcagctacattccctgacacctcactgtgctgaacaggggcagggagaaaatgtagctctgtgagttcacatccgttttgtgtccatgaatggatccaaccaaactggtccagatgcacatggggtccagatgccttctgtggcctgtacccagaccaccagccagtactgtcctcggtcccttgcagatctcagggatactttggcatgagtcagggaagggaacaggcgcaggcggaaggttgatcatctcccccaacctgtcagagctggtgtatgtaacagaatctctaagtgacctgaactgacaggaaccaacagaaagacagagacacctccaacctctagcacaggacaaacaagctccaggtccaagattctgttctgctgactgacatccacgaatggggctcacatgatgtgctctgcttacatggaaagccagtgacatcgagagttcnnnnnnnnnnnnnnnnnnnnnnnnnnnnnnnnnnnnnnnnnnnnnnnnnnnnnnnnnnnnnnnnnnnnnnnnnnnnnnnnnnnnnnnnnnnnnnnnnnnnnnnnnnnnnnnnnnnnnnnnnnnnnnnnnnnnnnnnnnnnnnnnnnnnnnnnnnnnnnnnnnnnnnnnnnnnnnnnnnnnnnnnnnnnnnnnnnnnnnnnnnnnnnnnnnnnnnnnnnnnnnnnnnnnnnnnnnnnnnnnnnnnnnnnnnnnnnnnnnnnnnnnnnnnnnnnnnnnnnnnnnnnnnnncagagttctttttcaaaaagcttttattaaagtcaagttcactgacagataaattacacacatctttatagttcataatctcagttttactatctaatctgaggaaactgaacaaagctgatgacttcctgaagggactcatgtacattacataacattttaagaatttctgaggaacaacagcctttcaacagtcatacatatagtgtagatgatcaatttcgtgaaagcctgtgttcatgtcccacacgaagattttcattttaagggagtccttaaaatgaaatgcaatatggccatttattctcacctgcacaagctgctgcttgtttaccacaccagccaaataaagcctatggtcatcacgctacccgccagccaaatgctccatttctgtaggcctgacatttttctgtgactgagcactgcattacattttgtcactattttaccaaaactcacgtaaagggaaaactaaatgtgccgatactggtgacaggcagacacatctcacaggctggcacaattgtgacacaggtgcgaatcaaaaggcatgctcagaggggaagacacatgaccgagacactccacgcacccaatcatgttgaagagacttgcaatcatgcagattgagacaaaaggatggcacacacattctagaactcttattctgggctgcatctgaaggcgagttccactgggagtctgctgttttttttacacaagtttcaggatgtttttagaggagctcattaggcattacaactcgacacagtgaccccacagccattaggagatgagggctgcgaggcacaagggtcccctctaacacatctgctgctggccttgagttaagggagggcattatcccaa

SEQ ID NO: 242156 - DNA, 1050 bp, Homo Sapiens
ttggctaaggcaccacatgatttcatgtttgtgaagaggaatgatccagatggacctcattcagacagaatctattaccttgccatgtctggtgagaacagagaaaatacactgttttattctgaaattcccaaaactatcaatagagcagcagtcttaatgctctcttggaagcctcttttggatctttttcaggcaacactggactatggaatgtattctcgagaagaagaactattaagagaaagaaaacgcattggaacagtcggaattgcttcttacgattatcaccaaggaagtggaacatttctgtttcaagccggtagtggaatttatcacgtaaaagatggagggccacaaggatttacgcaacaacctttaaggcccaatctagtggaaactagttgtcccaacatacggatggatccaaaattatgccctgctgatccagactggattgcttttatacatagcaacgatatttggatatctaacatcgtaaccagagaagaaaggagactcacttatgtgcacaatgagctagccaacatggaagaagatgccagatcagctggagtcgctacctttgttctccaagaagaatttgatagatattctggctattggtggtgtccaaaagctgaaacaactcccagtggtggtaaaattcttagaattctatatgaagaaaatgatgaatctgaggtggaaattattcatgttacatcccctatgttggaaacaaggagggcagattcattccgttatcctaaaacaggtacagcaaatcctaaagtcacttttaagatgtcagaaataatgattgatgctgaaggaaggatcatagatgtcatagataaggaactaattcaaccttttgagattctatttgaaggagttgaatatattgccagagctggatggactcctgagggaaaatatgcttggtccatcctactagatcgctcccagactcgcctacagatagtgttgatctcacctgaattatttatcccagtagaagatgatgttatggaaaggcagagactc

SEQ ID NO: 242157 - DNA, 962 bp, Homo Sapiens
ggaaagaaatcccaagtagaaaacaaccattcacggccctgccagaaccatctccctccaccacactgctttctcaaaaggccagggacactttcaaaaggagaccctattgactcctcccaagagggtttcagagcaagcataagagcttggccagtgctggcccctttgctgtctgaacagcagggctttcagggcagtggttggcatgagagtctctcattgccttcttgttccttcatgaccaatgtgcccaggactcaatagttttgaccatgattaaggatgtggtcagaatacaatggaccaggaatgagtgtaagggaggattagaacagaggagaggatgcccagaaggaaaagagagttaccagatacttctgaatcttcagccagagcgtcttgaattccaccgcccccaaagtgcccattccattgctctaggcacattaaagaccaacatgattgagtccaaattctacatgccttacagatttctttctcttgtgagcttgcatgagtgccttaaggccttagtgaaccttccatgtctgtggcaagcagagcagtgggggtgacggtgtgtaacaggttcaaataaagattaaaaagtcaaacgtgcaccaaggctctcctctgaggccaggcacagagctaggaacaaagggcaagtcatgagctggccaatctgcaatatcgtgaataccctaatcatcctggtttatttacagggtggagctgtatgatctgtaaattcgcttctacatttacatttctgtgattgatcattcagctaattagagtttgttggaatgtcaaaatgttatgggaaaagacatcaggagccaggaaccatgggactgggagtctaagccacagaatctgctcataggccactatacaaccaaacaggaggatattatgagggattttctgtgtccaacttacattcactccacaaa

SEQ ID NO: 242158 - DNA, 1009 bp, Homo Sapiens
ttgggaggtttggacctcctgcgtatagacggtttagtagtggtggtgcctatcccaacatccccctctcttctcccttacctggagtacccaagcctgtttttgctacagttgatggacaggaaaagtttgaaaccaaagtaaccacattggataatgggcttcgcgtggcatctcagaataagtttggacagttttgtacagtaggaattcttatcaattcaggatcgagatatgaagcgaaataccttagtggaattgctcactttttggaaaaattggcattttcgtctactgctcgatttgacagcaaagatgaaattctgcttacgttggaaaagcatgggggtatctgtgactgccagacatcaagagacaccaccatgtatgctgtgtctgctgatagcaaaggcttggacacggtggttgccttactggctgatgtggttctgcagccccggctaacagatgaagaagtcgagatgacgcggatggcggtccagtttgagctggaggacctgaacctgcggcctgacccagagccacttctcaccgagatgattcatgaagcggcttacagggagaacacagttggcctccaccgtttctgccccacagaaaacgtagcaaagatcaaccgagaggtgctgcattcctacctgaggaactactacactcccgaccgcatggtgctggccggcgtgggcgtggagcacgagcatctggtggactgtgcccggaagtacctcctgggggtccagccggcctgggggagcgcagaggccgtggatattgacagatctgtggcccagtacactggggggattgccaagctagaaagagacatgtccaatgtcagcctgggcccgacccccatccccgagctcacgcacatcatggttggactggagagctgctccttcctggaggaggacttcatctcctttgcagtgttgaacatgatgatgggcggaggtggctccttctcggctggtgggcccggcaaggg

SEQ ID NO: 242159 - DNA, 648 bp, Homo Sapiens
gccgccagctccccaggccccgggcccagagaggacgcccggggcttggcaagggcgcagaaggcgagggcacgcaggcacagcggagagaattcctgggtcccccgacacggcttccggggcgtgggggagcagggcgaccctcgcggggacgccggcactgccaggcggggcgcagggcacagggtctccatggagcagcctgaggggtgcccactgagcgggtccaggtcccagcggcgggatgccctggctgcccgaagagcccacgggtgaggggaacatcgccccccgtcgacggggaggtctctgctcacgggcgcccccggcccgccacccggggccgcagagctcgggctccctcttcgctctcctcacgcggccctcccggcggccggactcctgggtccctgtgagtcccggcggggtcggccgcccttctgccgccgcgtccccttcgcaaccccggcgggagaccctctcgagtcgcccgaagcgcagaggcaggggaaacaaagcggccggcggccgcgggaggcgggaaggaccccgggcccggcacccggtgcccgggcccaggcggcggggagggcgccttccgcccgctcggtttctttcttccccgctggctcccggagaccgcgccaa

SEQ ID NO: 242160 - DNA, 1103 bp, Homo Sapiens
ttggcagctcgcctcatgttgctttgagtcatgtggatgcacgctcctaccatttactggttcgggatgttagcaaagaaaactctggctactattactgccacgtgtccctgtgggcacccggacacaacaggagctggcacaaagtggcagaggccgtgtcttccccagctggtgtgggtgtgacctggctagaaccagactaccaggtgtacctgaatgcttccaaggtccccgggtttgcggatgaccccacagagctggcatgccgggtggtggacacgaagagtggggaggcgaatgtccgattcacggtttcgtggtactacaggatgaaccggcgcagcgacaatgtggtgaccagcgagctgcttgcagtcatggacggggactggacgctaaaatatggagagaggagcaagcagcgggcccaggatggagactttattttttctaaggaacatacagacacgttcaatttccggatccaaaggactacagaggaagacagaggcaattattactgtgttgtgtctgcctggaccaaacagcggaacaacagctgggtgaaaagcaaggatgtcttctccaagcctgttaacatattttgggcattagaagattccgtgcttgtggtgaaggcgaggcagccaaagcctttctttgctgccggaaatacatttgagatgacttgcaaagtatcttccaagaatattaagtcgccacgctactctgttctcatcatggctgagaagcctgtcggcgacctctccagtcccaatgaaacgaagtacatcatctctctggaccaggattctgtggtgaagctggagaattggacagatgcatcacgggtggatggcgttgttttagaaaaagtgcaggaggatgagttccgctatcgaatgtaccagactcaggtctcagacgcaggggctgtaccgctgcatggtgacagcctggtctcctgtcaggggcagcctttggcgagaagcagcaaccagtctctccaatcctattgagatagacttccaaacctcaagtcctatatttaatgcttctgtgcattcagacacaccatcagtaattcggggagatctgat

SEQ ID NO: 242161 - DNA, 1211 bp, Homo Sapiens
  misc_feature (1151)..(1160): n is a, c, g, or t
ttggcggaaggagagccaggccggaaggaggctgccggagggcgggaggcaggagcgggccaggagctgctgggctggagcggcggcgccgccatgtccgacagcgagaagctcaacctggactcgatcatcgggcgcctgctggaagtgcagggctcgcggcctggcaagaatgtacagctgacagagaacgagatccgcggtctgtgcctgaaatcccgggagatttttctgagccagcccattcttctggagctggaggcacccctcaagatctgcggtgacatacacggccagtactacgaccttctgcgactatttgagtatggcggtttccctcccgagagcaactacctctttctgggggactatgtggacaggggcaagcagtccttggagaccatctgcctgctgctggcctataagatcaagtaccccgagaacttcttcctgctccgtgggaaccacgagtgtgccagcatcaaccgcatctatggtttctacgatgagtgcaagagacgctacaacatcaaactgtggaaaaccttcactgactgcttcaactgcctgcccatcgcggccatagtggacgaaaagatcttctgctgccacggaggcctgtccccggacctgcagtctatggagcagattcggcggatcatgcggcccacagatgtgcctgaccagggcctgctgtgtgacctgctgtggtctgaccctgacaaggacgtgcagggctggggcgagaacgaccgtggcgtctcttttacctttggagccgaggtggtggccaagttcctccacaagcacgacttggacctcatctgccgagcacaccaggtggtagaagacggctacgagttctttgccaagcggcagctggtgacacttttctcagctcccaactactgtggcgagtttgacaatgctggcgccatgatgagtgtggacgagaccctcatgtgctctttccagatcctcaagcccgccgacaagaacaaggggaagtacgggcagttcagtggcctgaaccctggaggccgacccatcaccccaccccgcaattccgccaaagccaagaaatagcccccgcacaccaccctgtgccccagatgatggattgattgtacagaaatcatgctgccatgctnnnnnnnnnntcaccccgacccctcaggcccactgtccggggaacatggagccttggtgta

SEQ ID NO: 242162 - DNA, 760 bp, Homo Sapiens
ttggctcgcccgttattcgtcgtggctcaagcccggccacgccgccccaagggctcctcccgacctcccggcctgccgctccggccactgcgggatccagaaacatgtcgaccacacttctgtccgccttctacgatgtcgacttcttgtgcaagacagagaaatccctggccaacctcaacctgaacaacatgctggacaagaaggcggtggggacgcctgtggccgccgcccccagctcgggcttcgcgccgggattcctccgacggcactcggccagcaacctgcatgcactcgcccaccccgcgcccagccccggcagctgctcgcccaagttcccgggcgccgctaacggcagcagctgcggcagcgcggcggccggcggtccgacctcctacggcacccttaaggagccgtcggggggcggcggcacagccctgctcaacaaggagaacaaattccgggaccgctcgtttagcgagaacggcgatcgcagccagcacctcctgcacctgcagcagcagcagaaggggggcggcggctcccagatcaactccacgcgctacaagaccgagctgtgccggcccttcgaggagagcggcacgtgcaagtacggcgaaaagtgccagttcgcgcatggcttccacgagctgcgcagcctgactcgccatccgaagtacaagaccgagctgtgccgcacctttcataccatcggcttctgcccctatgggccgcgctgccacttcatccacaacgcgga

SEQ ID NO: 242163 - DNA, 1069 bp, Homo Sapiens
cctgggattaaaaggtatttttctctttccctggcagaactgaaataaatgaaagacgtatcattatgggtcttgatttgctataaacagcaggataatggagtgaaaagaacactaggtttggagttaggatactcaaaataaaaaaagccttactcttatattaataatgcatcattatgcattttttactctatgcctactcaggcttaaacttttctttcagttttcctgtagccattttactaggagctgactgtgggtagctactgctgaaagagatgataagtgaagccacaaaaatatggacactaaaaccatcataatcattatatgaaatttgcactttgagttaaaaagaaatgaatttctaaacttgaaatttcaaataccagtaataacttgaaagatattttaggggaaaaaacttttgagagtatgcctcaactgacactaagtaaaaagctgagtatgctgtttctttataagattggtcctgcaaaggaaaaactattaggagagttttgatctaggatagctactccctagcttcttaagttcatttcactgccagcaaaaggctgccatgttactatcaacactctagtcccatcctagacaagcataaaaatatcaaccaaggcaaagtcaatatactcctttcccccaacagtaacacatgccacaccttctatcataaggttaccgtcctttcctttattggatttctgaattttttaaaaagtaaaagtaaagcaatcattaagtagttcagataaaagaaaagcatctttacctgagttacccatcaggtctactctgacccaccctagcttctcccagaacaagcttctgggtatctaaaaaactattttcatactgatttcatgtaaagtcctctctaccatatgagtcaactaactatgagaacagtcttctcatacatattatatgtacatagattctcacccacaattaaatctctcactgcagaacaggttttttggggcctgataagacaggagcttctaccaaaggttttctcagactcaaggtaagtatgggccaa

SEQ ID NO: 242164 - DNA, 933 bp, Homo Sapiens
gagggaaagggtcaagtgaatgtgtttgctttgtttttgtttttaatttggttgtaatttgattagggatagggtggaagacagcaggaaagcagcccctccccttaggaatcagacagacctggctttgagtcctggctccaccacttactagctgtttgaccttggctgagtcacttaacctctctgagcctcagtgtcttcatctgtaaaatggggataataacaattataccactgtcaaagttattctgataattaagtaaataatggatcaacaaagctgtttgcaggctgttcaaggagggatgagaatgggagtcaagtgtagggataggaatccagaatgcagactggcattatgaaattatacaaaattagaggtagcagggttctactgaaactatccctacctcctccacacactaaaacctgctttttgaccctttatgatggcccataccacacccacccagtgtcagaaatttaggacactaacgacctctcatgaatcacagccaaatgtcggggtggagggattgtagcatatgcaagcagggttcagtaagacattctaggaggcatgaataagtggataaataagtagatggaagattgaatggatgaactaacattataagggtacaatcagctttgagcggctgagggagccgaccaggagtgccagataatctgaattaaacttaggacaggcgaactgaggcccagcgacaggcagagactggctttaggtcatacagtgtgtcggggcttagaattcctccgtgaaagggatgagcaggagaaaataatcgatgcctggtcctgcttttgtcttaatttatctgaccgacccagggccagccgctgcccttccctgtatctcagattcccaacccgcgtaattaggcacgacggtaaacaccctcccaa

SEQ ID NO: 242165 - DNA, 1463 bp, Homo Sapiens
  misc_feature (940)..(955): n is a, c, g, or t
caggcctgtacaaaactttattatactctgaataacaagcatgtaacaaaattttgagcatgacaaggatgaaatatttcaaattctgtttcttacaaaagcattaagcacaatacacaaagactgttcataatattttacagtcagctaaaaataacaagacattctaggatttcaggagttttccttttctttcaactagagcattagctttatttccattagctttgctacaatgaaaattaacatatatggacatacacatataagtgaaatggaaaatgaaggcatacaacaaacattccgattaatcaacaagtataaaatagtcttttagtacttccaaacttacattttctttgaatgtacaatgaaactttttgtctaaaatgtttttaatgttaattttgaccattcccaaagtaattaatactctttcttagcaccaccattaatctaattttagagtttgaaatgaattaagaaacactctaatcttattcagaggtgctattcacaacaccgaacaacaggcaatccactgccccttatcaaggctgagacactgtagtaaatgagtagttcaccaatactgtctatcccaggtgaatatcagccctgatcttacttccaatgatgagatacatgttttggcttatgtagtagcatgagctatgagataggaaacatgaaagtcacatggacatgaaattaaactcaaatctctactgcatggaggctgaatgtgaaatatttcacagtgactaaaactgactggctaacaggcaatggtggatttttatattcaactttgattaacataaatggactttacaagaaacccttgagatttaattaatgctgctaatccaagggctacaaatgactgaggagcctttaaaatcagtatatgtgatcttttatatttttttccataagnnnnnnnnnnnnnnnncaccgaggtacttaagtttcttttcaagggattactgttggttatcttcctgagatgcaaaagaccacagaaaaagcaccatgcctaggctgctgaatgaggcatcagacactaatagtttggtccttttctgaacggatctcttctggcaattacactaaaacatagtgatgggtcgcagatgcctggggggcctggttgcccttggattccaggttttccatggtctccatctttgccagggagacctgggtctcctggaggaccttctttgcttattccaggagggccctctggacctgggggaccaggaggaccttgttctccaggatacccaaacccttggctccctttttccccatttcttcctggtaggcctgcagggtgtcaaacatctgagtaagtttacttaaaatcactgccttctagattgtttcattcaaagctgttaatatacacatgaaagaaaaatgtcttttaaaaaccagcttgccatctattttgtaca

SEQ ID NO: 242166 - DNA, 1266 bp, Homo Sapiens
  misc_feature (950)..(978): n is a, c, g, or t
  misc_feature (1134)..(1174): n is a, c, g, or t
ttggattacttctgtcatctgccttgaacgctgaagttgtatctggagttgtagccgccactttgaggccatgaggaggaatgggagagtgcaaagatacagagtctgggccttgatggcatcaagtggtcagaccaactccagtagctgtcttcctcagatttctgttagtgagaaaagtgctactcgtgagcagtagtcgccatccagacagatggattgtccctggaggaggcatggagcccgaggaggagccaagtgtggcagcagttcgtgaagtctgtgaggaggctggagtaaaagggacattgggaagattagttggaatttttgagaaccaggagaggaagcacaggacgtatgtctatgtgctcattgtcactgaagtgctggaagactgggaagattcagttaacattggaaggaagagggaatggtttaaaatagaagacgccataaaagtgctgcagtatcacaaacccgtgcaggcatcatattttgaaacattgaggcaaggctactcagccaacaatggcaccccagtcgtggccaccacatactcggtttctgctcagagctcgatgtcaggcatcagatgactgaagacttcctgtaagagaaatggaaattggaaactagactgaagtgcaaatcttccctctcaccctggctctttccacttctcacaggcctcctctttcaaataaggcatggtgggcagcaaagaaagggtgtattgataatgttgctgtttggtgttaagtgatggggctttttcttctgtttttattgagggtgggggttgggtgtgtaatttgtaagtacttttgtgcatgatctgtccctcccttttcccacccctgcagtcctctgaagagaggccaacagccttcccctgccttggattctgaagtgttcctgtttgtcttatcctggccctggccagacgnnnnnnnnnnnnnnnnnnnnnnnnnnnnnattaaaagataccagtatgagatgaaaacttccaataatttgtcctataatgtgctgtacagttcagtagagtggtcactttcactgcagtatacatttatctacacattatatatcggacatataatatgtaaataaatgacttctagaaagagnnnnnnnnnnnnnnnnnnnnnnnnnnnnnnnnnnnnnnnnngggcatttctagaattgagagcctcacaattaacatacctttttgttttcgatgctagtggctgggcaggttgccctgtcctttctctattt

SEQ ID NO: 242167 - DNA, 1261 bp, Homo Sapiens
  misc_feature (187)..(195): n is a, c, g, or t
  misc_feature (224)..(256): n is a, c, g, or t
ttaaacataaactataagaaaatcttaaaacaatattgacggcagcttacttatatcttcaagcaatgtaaaattaacaggcatggttaattttaatggcagaatatagtagctgagaacttcttttaaatgaaagctcctccatgttaaattatgcaattgactagtgtccacaaaattcgagtcnnnnnnnnnttagacgctattaaaatcataactggccnnnnnnnnnnnnnnnnnnnnnnnnnnnnnnnnngtagtgtataaatatttggcatacttataatacctcatcttttattttttccaactcaaaaacagtaagttaatctaagaatgcattccattattttcctaaaaacaacatatgccaaagtacaatactgacagtggtcacctcagtcagcagccagcatcgaagtcatgcatcaagaacctcgccaggaggcaatgcctaattacatttgtactatacactctgttcctcacagttcaggtaggaatgtttatttgtgttttataaaactgtttaatctttttacattaggtaaactctgtcaaaaatgctttgaaaaccacaaattaacagatgctgagactactgtatcattcacaaaaagttcttcctcatgccaaagatgttctgagaaaacaagcagaagtttattgtaacttcacattttaccattaccactcttaagacgctagaaacaagtaagatttaaggaaaaataaaaagaacctaaacccgatagtactggatataccaatacagagactgattgcagaagactacagcagttctctctagagttcagccagctgcttattaagacatttaattacatttattaatatgccttgcacaagaaaatactacttaatctttcacatctcctatctttcaactatgttctgtataaataatacttctattacgttactaactccagcttaaataagcctcataaatcatgtcaaatgatataatttcaaaattccacacatatattactctacaaatatactccttggtgaaaagatgtcaacagtctcctttctgaaagctgttagtttgatgttagatcaatcactgactaagcatttattgagcatctactataactgtacccagtctttaactaataagaaaaaaatacctgctccaaatgcaagatgatatttgtaagggaggataatttatcaactttttctaatagaatgctccttgaatcaatatcccaacttttttgtacaaagt

SEQ ID NO: 242168 - DNA, 1702 bp, Homo Sapiens
aaaagttcttcctcatgccaaagatgttctgagaaaacaagcagaagtttattgtaacttcacattttaccattaccactcttaagacgctagaaacaagtaagatttaaggaaaaataaaaagaacctaaacccgatagtactggatataccaatacagagactgattgcagaagactacagcagttctctctagagttcagccagctgcttattaagacatttaattacatttattaatatgccttgcacaagaaaatactacttaatctttcacatctcctatctttcaactatgttctgtataaataatacttctattacgttactaactccagcttaaataagcctcataaatcatgtcaaatgatataatttcaaaattccacacatatattactctacaaatatactccttggtgaaaagatgtcaacagtctcctttctgaaagctgttagtttgatgttagatcaatcactgactaagcatttattgagcatctactataactgtacccagtctttaactaataagaaaaaaatacctgctccaaatgcaagatgatatttgtaagggaggataatttatcaactttttctaatagaatgctccttgaatcaatatctgccatatgaaattatatgacaagtaaacctcaaatttattacctatcaccttataatgataaataagcaatctaaagtatgctgcatagtaccttgaggaaagtgactgctatacttaaaattaaggctgattcctaaaaggtatggaagaaaagccagaatgttattgtttgtaaaccactaaagacttaatatgaacagtttacataactatctggttaatttgggcaaatgagcacttgtgtttggtttctaactttgctggaaggtgttggtctaataaagaaaactgctttaagtaggagcacttttagcatacacaaaaataaaaatcctttgtaaatttcacttgcaatgttgtgcaactgtatatctttgccttatgcatttgaaactgattatgtattttatgcaaaatggtatatttttcccaaagctaagaatatggacaatgatgatatgatagctaagctagttttatctttctagcttttatcaactcttgacttgttgaattcctacaatgtgcaaggcagtatgcaatgtgttgaacatatatgaggtctacacataaaacaaagggaaactgaagtctttggaagcaaaatagttgtcaatttgaaaaccaacggtaatcattttcctcaacagtatttctaaaagttgagaatgatgtcaactaaaacaaaatacaatcatccccacctctaccaaagatggaactataacacagaaatcatttccacagaagacacgagaatgttcatactagagccatagggaccaaagcagcaagataaacaatgaggcagtcacagaatatctactagctactgtactggtaatagtttataaaaaatacgatctatactaaaatttaagagctaataatatatttagcatatttttgccttttctttttgccactgaatataaaatttgtcctgaatttactaaatcttctacaccctgaggaataacaacagactaataaaagtaacgtcagggttagctttctggacaatagaatcatccagaaagcacaaattatatatagctaatattcttggaccaa

SEQ ID NO: 242169 - DNA, 1832 bp, Homo Sapiens
  misc_feature (1471)..(1479): n is a, c, g, or t
  misc_feature (1508)..(1540): n is a, c, g, or t
catttagcaaaggtaagacaaatactattttccatattctacagaaatacaatactttatagctggcttggtacatggtcacataagaacaaatctaatggaaaaaagaatatttcattctacttttctgccacttatcacagtgtaataagtgccagtaagtcctggaagacagttgcagaggaagattagaatcccagggctgtttgttaatatacatgattatattgtaagaataatataaaaacaaaataggtaagatatacaattaacatgcaatttaagctatattattttgaagaaacaggacagaatttagtgaacgcaacttaaaaatttgttaatgtagtataatcagcatatcatggtattttacatggtatggaattattcctccttaataatgcttggcaaattggaacaggctgatcctacttctagaacatattaaaatgaagatgaaggaaaacaagtggataattctattagatgcttttctaaatattctgaatttttaaagtaccataattacaggcctacctcaccatctccaaagttaaagtcatattttatactctatgaatctgtactgtccagtatagtagcccttagccatatgtgactactgagcacttaaaatgtggccagtcagaattgagatgtgctgtgagtgcaaaatacactcaaatctaagacttagtatggaagaaaaagaagataaggtgtttcattaataatcttttatattgattacatgttgaaatgatatttttaatatactgggttacataaactgttattaaaattaattttgcttgtttcttttttaatatggctactagaaaattaaaaattatgttgtggttcacattatatttctgttgaacaatgtggacatagataatctacagtcattacattagccttagaatttagcatcatacttttaagcactctggggtactaacttgaactcccagaaacccataagcacactctgcatataaattattgcaaaattcattcttatctctctgaaagatatgcattttaagggtaaaaagaattcacaaaatattgaatccttaacaaatgtcaattagtatatggagagagctaaaggacttcaatgtagactgttacattggggaaaaacagatcaagaaacatagcagtacaacagagggaagaccattagtctcttcagtaaaatagttagccaaacttatctttaatggccaatgcctgaccctgcaccatagattatatatgtaacttttccatttaaacataaactataagaaaatcttaaaacaatattgacggcagcttacttatatcttcaagcaatgtaaaattaacaggcatggttaattttaatggcagaatatagtagctgagaacttcttttaaatgaaagctcctccatgttaaattatgcaattgactagtgtccacaaaattcgagtcnnnnnnnnnttagacgctattaaaatcataactggccnnnnnnnnnnnnnnnnnnnnnnnnnnnnnnnnngtagtgtataaatatttggcatacttataatacctcatcttttattttttccaactcaaaaacagtaagttaatctaagaatgcattccattattttcctaaaaacaacatatgccaaagtacaatactgacagtggtcacctcagtcagcagccagcatcgaagtcatgcatcaagaacctcgccaggaggcaatgcctaattacatttgtactatacactctgttcctcacagttcaggtaggaatgtttatttgtgttttataaaactgtttaatctttttacatccaa

SEQ ID NO: 242170 - DNA, 889 bp, Homo Sapiens
ttggttggctgccatgctgcataagctgaaggttcgggctgagtcctttgacacctgggccaacaaagtgcgagtggccctggaggtggaggatgggcggaagcgcagccttgaagaactgagggcactagagtctgaagcccgtgagcggaggtttcctaatagtgagctgctgcagcaactaaagaactgcctgagtgaggcagaggcttgcgtgtcccgagctctgggactggtcagcggccaggaagctggcccccacagggtggctggtctacagatgaccctgactgagctccgggcctttctggaccagatgaacaacctgccttgcgccatgcaccagattggggatgtcaagggtgttctggaacaggtggaggcctaccaggctgaggctcgtgaggccctggcctcactgccctccagtccagggctactgcagtccctgttggagagggggcggcagctgggggtggaggtgcctgaggcccagcagctccagcggcaggtggaacaggcgcgatggctggatgaggtgaaacgcacactggccccctcagcccgaaggggcaccttggctgtcatgcgaggactgttggtcgcgggtgccagtgtagcccctagccctgctgtggataaagcccaggccgagctgcaggaactgctgaccattgctgaacgctgggaggagaaagcccacctctgcctggaggccaggcagaagcatccaccagccacacttgaggccataatccgtgaagcggaaaacatccctgttcacctgcccaacatccaggctctcaaaggaggctcttgctaagcccgggcctggattgctgatgttgatgagatccaaaatgggtgaccactacccctgcctggatga

SEQ ID NO: 242171 - DNA, 1294 bp, Homo Sapiens
ttggctgcatttcagtgggatgtcaatacacttgaccccaagtcccccggccctgcctggtgtcactgtggccaaacagtgcccagcttaagcatccctggcatcagactatggccttcaagagcactagggcatatgcttttggcagcataacgggctgacttggtgatggagggaaaaagccttgagccaggcagaagtttgtggccagggtttgtgcagcagctttgtgagaagagcccttctacctggctctatctcactggctgcattccctacacagggaatttactaccctatatgtgaatatccctgtatgtacttgtgtgtacttgttggtctgtatcttagtttctttggggaggacagggctgtagctgtgaggtcttgtctccaagggtgtgtgtatgtctccgtggatcagccacagggatagggattttgtttttaagggaaagcattctctaattccctttgttcatgccgagattcagttgctctgagactatggggtacaagtttgatcctccgaatctggagatgttgtagagctggaacgagtgcagagtaggaacgctttgatgcgcatgcacattggggaagatgcgctcctcagggacacaaaggccgagtggggtaaaaccacgaagggagggaagggaagtcagctctgggagcagccctcactggctggaccaaggtactcttcctggagtttgccgtgttagcaaccacagtcaccttgcagtcaggctggaatcttgggccaccccaaagtgctttgctgaaggatttagacggggatgaagtgccctccagcctcagagctagccacaaagcccccagagctgaattcattgagtatttgtgcctagggcttgggctgtttgtgtgataccggccccccgccagacaatagcctttgctgacaccccagcctacttccccgatcctgggctccctcttgattactttttgacattttccagctgtcaggcatcactgcggctagtccggcagcgacctagatggggtccacccccattcctgctcaagcatgggcacctaccacatggtttctgctgctcagcctgcctgcaactcacctcgaaggcggaccagcctgcctctgtgatgactgcagcagacctccttgggtgtaccaatgcccctcatctcccactttcacacctaaccctgactccttcaccaagaagacgggagtcggcagcccaggagttcccgtggcacctctctctcttcgtggctccctgcttcccccttccctctttcc

SEQ ID NO: 242172 - DNA, 856 bp, Homo Sapiens
ttggcacagagagaggcagcagcttgctcagcggacaaggatgctgggcgtgagggaccaaggcctgccctgcactcgggcctcctccagccagtgctgaccagggacttctgacctgctggccagccaggacctgtgtggggaggccctcctgctgccttggggtgacaatctcagctccaggctacagggagaccgggaggatcacagagccagcatggatcctgacagtgatcaacctctgaacagcctcgatgtcaaacccctgcgcaaaccccgtatccccatggagaccttcagaaaggtggggatccccatcatcatagcactactgagcctggcgagtatcatcattgtggttgtcctcatcaaggtgattctggataaatactacttcctctgcgggcagcctctccacttcatcccgaggaagcagctgtgtgacggagagctggactgtcccttgggggaggacgaggagcactgtgtcaagagcttccccgaagggcctgcagtggcagtccgcctctccaaggaccgatccacactgcaggtgctggactcggccacagggaactggttctctgcctgtttcgacaacttcacagaagctctcgctgagacagcctgtaggcagatgggctacagcagcaaacccactttcagagctgtggagattggcccagaccaggatctggatgttgttgaaatcacagaaaacagccaggagcttcgcatgcggaactcaagtgggccctgtctctcagctccctggtctccctgcactgtcttgcctgtgggaagagcctgaagaccccccgtgtggtgggtggggaggaggcctctgtggattctt

SEQ ID NO: 242173 - DNA, 941 bp, Homo Sapiens
ctttgtacaaaaaagttggcttcaggatcgtcttcagctcacagagatcaaaccacttctaaatgataagaatggtacaagaaacttccaggactttgactgtcaggaacatgatatagaaacaactcatggtgtggtccacgtcactataagaggcttacccaaaggaaacagaccagttatactaacatatcatgacattggcctcaaccataaatcctgtttcaatgcattctttaactttgaggatatgcaagagatcacccagcactttgctgtctgtcatgtggatgccccaggccagcaggaaggtgcaccctctttcccaacagggtatcagtaccccacaatggatgagctggctgaaatgctgcctcctgttcttacccacctaagcctgaaaagcatcattggaattggagttggagctggagcttacatcctcagcagatttgcactcaaccatccagagcttgtggaaggccttgtgctcattaatgttgacccttgcgctaaaggctggattgactgggcagcttccaaactctctggcctgacaaccaatgttgtggacattattttggctcatcactttgggcaggaagagttacaggccaacctggacctgatccaaacctacagaatgcatattgcccaagacatcaaccaagacaacctgcagctcttcttgaattcctacaatggacgcagagacctggagatcgaaagacccatactgggccaaatgataacaaatcaaaaacattaaagtgttctactttactggtggtaggggacaattcgcctgcagttgaggctgtggtcgaatgcaattcccgcctgaaccctataaatacaactttgctaaagatggcggactgtgggggactgccccaggtagttcagcctgggaagctcaccgaggccttcaagtacttttt

SEQ ID NO: 242174 - DNA, 988 bp, Homo Sapiens
ttgggggagttagtagtgcagtggcatctgaaacctgtggagcagaaagcacatgagtcctaatgccccagcagcttccgattggaaaatgcaaattgtttttatttaaagatggtgagaaagtgctgggattacaggcatgagccactgtacccagccaaaattgttttcttttttaagtgaattcaacaatttctgtgagtggctctttgcatgaacactgtgcaaggtgttggagaaatccaaagctgaccaaaacatggtccccaccttttggagcttacagtctgttctggggaacagagattcagccaaagtcaagaaacactggatgccagctagattatctgttctgtgctttggtgtctataagtacatatgtggatatgggttcattttatccctaaacttagtaccaaaccagcatttaatatctaattataaatctaatttggcctaaactttattattgcacactgcctgaacaaaacctatttgtctctatgtaaattttttcctcatggaacaagggtgtgaaatgaaaatattttaggatttattcaaaaacagactattctgttttcagcttcagaattgttctttgaatcctaaggaacctctgtcaacagttgaggttgctgttgaaaagaaagaagaaggaggcggaaatctctcagggagaattatttcctttcttttctattttagatacctggaggggtggggagaagtaagaattgtaagggaggttcagtagtggggaattctgtgacagctgattgaagatgatgatgaaaacctctgcattctagttaccctttgcttcccttcacctcttgtaaaatttggcttggcaacaatgacattgtcatgcttattgtcccaatatccatcctgtcgtagatcttaatgtttttgatcgttgcgttaaagtggaagtgccacccacagtgaaaaccagatcccattaataaataagcttaaaggc

SEQ ID NO: 242175 - DNA, 764 bp, Homo Sapiens
agcgcgcccacctctcgcgccggggccctcgcgaggccgcagcctgaggagattcccaacctgctgagcatccgcacacccactcaggagttggggcccagctcccagtttacttggtttcccttgtgcagcctggggctctgcccaggccaccacaggcaggggtcgacatggcagagacactggagttcaacgacgtctatcaggaggtgaaaggttccatgaatgatggtcgactgaggttgagccgtcagggcatcatcttcaagaatagcaagacaggcaaagtggacaacatccaggctggggagttaacagaaggtatctggcgccgtgttgctctgggccatggacttaaactgcttacaaagaatggccatgtctacaagtatgatggcttccgagaatcggagtttgagaaactctctgatttcttcaaaactcactatcgccttgagctaatggagaaggacctttgtgtgaagggctggaactgggggacagtgaaatttggtgggcagctgctttcctttgacattggtgaccagccagtctttgagatacccctcagcaatgtgtcccagtgcaccacaggcaagaatgaggtgacactggaattccacccaaaacgatgacgcagaggtgtctctcatggaggtgcgcttctacgtcccacccacccaggaggatggtgtggaccctgttgaggcctttgcccagaatgtgttgtcaaaggcggatgtaatccacgcccacgggagatg

SEQ ID NO: 242176 - DNA, 1710 bp, Homo Sapiens
agcaatgcttttttatttatagccaactttgtacaaaaaagttggtgaattcagattcccaacctgctgagcatccgcacacccactcaggagttggggcccagctcccagtttacttggtttcccttgtgcagcctggggctctgcccaggccaccacaggcaggggtcgacatggcagagacactggagttcaacgacgtctatcaggaggtgaaaggttccatgaatgatggtcgactgaggttgagccgtcagggcatcatcttcaagaatagcaagacaggcaaagtggacaacatccaggctggggagttaacagaaggtatctggcgccgtgttgctctgggccatggacttaaactgcttacaaagaatggccatgtctacaagtatgatggcttccgagaatcggagtttgagaaactctctgatttcttcaaaactcactatcgccttgagctaatggagaaggacctttgtgtgaagggctggaactgggggacagtgaaatttggtgggcagctgctttcctttgacattggtgaccagccagtctttgagatacccctcagcaatgtgtcccagtgcaccacaggcaagaatgaggtgacactggaattccaccaaaacgatgacgcagaggtgtctctcatggaggtgcgcttctacgtcccacccacccaggaggatggtgtggaccctgttgaggcctttgcccagaatgtgttgtcaaaggcggatgtaatccaggccacgggagatgccatctgcatcttccgggagctgcagtgtctgactcctcgtgggttatgacattcggatctaccccacctttctgcacctgcatggcaagacctttgactacaagatcccctacaccacagtactgcgtctgtttttgttaccccacaaggaccagcgccagatgttctttgtgatcagcctggatcccccaatcaagcaaggccaaactcgctaccacttcctgatcctcctcttctccaaggacgaggacatttcgttgactctgaacatgaacgaggaagaagtggagaagcgctttgagggtcggctcaccaagaacatgtcaggatccctctatgagatggtcagccgggtcatgaaagcactggtaaaccgcaagatcacagtgccaggcaacttccaagggcactcaggggcccagtgcattacctgttcctacaaggcaagctcaggactgctctacccgctggagcggggcttcatctacgtccacaagccacctgtgcacatccgcttcgatgagatctcctttgtcaactttgctcgtggtaccactactactcgttcctttgactttgaaattgagaccaagcagggcactcagtataccttcagcagcattgagagggaggagtacgggaaactgtttgattttgtcaacgcgaaaaagctcaacatcaaaaaccgaggattgaaagagggcatgaacccaagctacgatgaatatgctgactctgatgaggaccagcatgatgcctacttggagaggatgaaggaggaagcaagatccgggaggagaatgccaatgacagcagcgatgactcacgagaagaaaccgatgagtcattcaacccaggtgaagaggaggaagatgtggcagaggagtttgacagcaacgcctctgccagctcctccagtaatgaggtgacagtgaccgggatga

SEQ ID NO: 242177 - DNA, 974 bp, Homo Sapiens
ttggcactgaattccatgattcctgtttctcttggtcaggtatcttttcctaaattctataaaccaaagtttgtgttttcagtcccccaaatggcagttcctgagggagacctacatgcagcagtgggtgccccagtcatgtctcctcttagccctggagaaagagtgcagtgccccttgccaagcacccagctgccatccccaggcacctgtgtgtctcagggcccagaagagcttgtggcctccttgcagacatcagtagtggcccctggagaagccccttctgaagatgctgaccacgaagggaaagggagtcccttgaaaatgcctaagattaagcttccatcatttaggtggtccccgaagaaggaaacagggccaaaggtggacccagaatgcagcgtggaggactcaaaactcagcctggttttagacaaggatgaagtggccccgcagtctgccatccacatggatctgcctcctgagagggatggagagaaggggaggagcacaaagcctggctttgccatgccaaaacttgcacttcccaaaatgaaggcttctaagagtggggtcagcctgccacagagagacgtggatccttccctttctagtgccacagcagggggtagctttcaagacacagaaaaggccagcagtgacggtggtaggggaggacttggtgcaacagcaagtgccacaggaagtgagggtgtgaacctccaccggccacaggtccacattcccagtttgggctttgccaaacctgatctcagatcctccaaggccaaggtggaggtgagccagcctgaagctgacctgcctcttcccaaacatgatctgtctaccgaagtgacagcagaggatgtgggctcggggatgtcccagtgagccagccttgtggggaggggatagcccccacacctgaagatcccctccagccatcctgtagaaaaccagatgctgaagtcctc

SEQ ID NO: 242178 - DNA, 340 bp, Homo Sapiens
ttggaacatttttacatataataatttttttacatatattaaataatgtagatttataagccagtctcatcttaaatatcagccttactttaactcgttttcctattctgctttctaccagttctgtaaaagctgagtaatttgatgtggatgctaagtaatttgaggagtagagcacacagctccaggaagataatcctgggggctgctggtctaatttggtctgaggtgttagagtgcaaggcgttaggacagaaggataaacccaccacagtctttttgaaaaggtggttttgttgtggttgtttttcagcatctttaagttttaaaagttacccaa

SEQ ID NO: 242179 - DNA, 932 bp, Homo Sapiens
  misc_feature (344)..(413): n is a, c, g, or t
tttctttgaatataatgccagctttacccactgtgcacaccaatccccattattcccttcttagcttgtctttcctcacccttacactgcccactgttttgtctaccatcactagtgcctctcctcaagacacaagccctgcctcactgccattctcgtgctctgacccttaggtccatcatgaaatgccagattcactgggttttgccaaaatggatctgattatcattttatcagattaaaattccattctaaatttttttaaagaaataagaagagacatgaagactctatacaatttttccaaactgcaactccctcaaatatttcaaaatgtctatacnnnnnnnnnnnnnnnnnnnnnnnnnnnnnnnnnnnnnnnnnnnnnnnnnnnnnnnnnnnnnnnnnnnnnnggtagttgttttgtttgcatcattataatgaaatgacactatttgaggacttcctgtatgttttctttaaagtcagtttccaaaaacataccaccgacacggaggacttactatagtcctatttttttaaaaggacagaaaggtaagggagaaatattatgctaaatttcaacagtagcctaagaaaaatatgccatatctggaagcaatggaagtgaagtatgcaattggttttcaaaggataaagtaaaagggagactcaaaggagcaaacagatcaaaaaagctattctcctagagattcagatctaacctgacatgacacagtttttcaccaccctccccaaaagatgtagggtccacatgctcagtttccaccctagctacctgggtcattatgctcctgaagtctaagggatggtggcagagataatgggggaagaaaaatgtagaaataaaagtttttaccctgtattaggtaaaaagcacaaacctactgtcagcatctccttatttccaa

SEQ ID NO: 242180 - DNA, 1364 bp, Homo Sapiens
  misc_feature (1296)..(1318): n is a, c, g, or t
aaagtgctgggattacaggcgtgagccactgtgcctggccctgtctctcttaagagtaggttcattgtctgtcttagagtcacttctattgcaactcattttctttttccagggcacagatcgaccaagctgccgttccctattctgcaggacaggactattctagcatacctgcttcgtccacccaggcagggtttggggtggtctcttctgtgcctgcagtccccatttgacacttggttgccaccatctttggagattattgtttggaatgatgcttccattggctttttcttgttaccatggactaggaagaaaacatggtttccaaataatctgggagcttttggccatggtgccgccttcctgaattggcagtggtcagagcacacctgaaccctatcctgggctggtgatgagcagaaatcagacctttttctatgcttttttgaatatcagagtaggatgaacacccagattcaaatatgtcaccaaagttggtggtggtccttccctgcacccttgcgttaagccattatgtaatgaaaatgtgtttgcttgaaggaacagctcaaagcaccttcacaagttgccttgacttaccctaggtgggtgtgaaagagcacccgtagcaaggaaaattttctctattagtgtgttcttctgcctcttcccccttgattcagctttcagaggtactatggcagttttgcctcaggtgctgaacatttctcagccctggctaaaagggagcagcacagggagagaaacaggataggaaagcagaatggcgagcagcctatggcccagggcctgtaatcccttcccaagactagctgctcagggtggtgcagggacaggaccagaccctgcgcctatttcctgccttctttcccctatagggaactctgtaggctgagccactgtcctgctcttatgacattatatcttgtgcctttctcctcagcagtgagcagtgagctactcctggcccaggccctaggggaaatggatcagtctttgaggtttctatttggggaggggagtacttaagatgagtcaaaagacactttcctctgttccattccccatctcagggactcctgaatattcagcctctccaggctggtgtcttctagtttcccccactgggaatgctggctgggagagccatgactaccagacttttcctcaggctccttggcatgttagtctgaattgttcttgagcactgtactactgacccaacaactgtgactagctggccacgccattcagggctggtgtggcatttannnnnnnnnnnnnnnnnnnnnnnttttcctgtttgcccagcagtgcattgtgggttccaagagtgggta

SEQ ID NO: 242181 - DNA, 2194 bp, Homo Sapiens
  misc_feature (84)..(96): n is a, c, g, or t
  misc_feature (514)..(746): n is a, c, g, or t
  misc_feature (778)..(796): n is a, c, g, or t
  misc_feature (2008)..(2017): n is a, c, g, or t
ttgggttagaaagtcggaacactttgattaatgtcttaaaatttgtgggccctcatttggataaaggcagcaatcctaaggacnnnnnnnnnnnnnaacataatctgagaatttctctgtagagcatagactttcaaaccttttggctgtaacccacagtaaaaaacgcatttatatcaaaccttataatatgtttaatgaacaatacttaccattctgatgctttttattgtttcagtttttaaaatatgccagttgcaacccactaaattgatatctaccaatgggttgcaacccttaacttgaaaaaaacaccctcacaaaggaactggtatttcttgaataccttctgtttgccaggcacttcaccatgcattttacaagtaaggaaactgggcttcagagaaaataatttgcagaggtttactcaactacaaaggggtgaagccaggaatgttaactaggtctgttgagctacaaaaacttttatgtctctcagactatacagcctctnnnnnnnnnnnnnnnnnnnnnnnnnnnnnnnnnnnnnnnnnnnnnnnnnnnnnnnnnnnnnnnnnnnnnnnnnnnnnnnnnnnnnnnnnnnnnnnnnnnnnnnnnnnnnnnnnnnnnnnnnnnnnnnnnnnnnnnnnnnnnnnnnnnnnnnnnnnnnnnnnnnnnnnnnnnnnnnnnnnnnnnnnnnnnnnnnnnnnnnnnnnnnnnnnnnnnnnnnnnnnnnnnnnnnnnnncagccttggtgacagaacaagaccctctctcnnnnnnnnnnnnnnnnnnnggtgggtcatccattctcctttaccaaacaggctttgaaatgacacattccattcatttgcatctttttaaaaaacttctgattccttactgagtgtccagcagcctcaaagtttttaatggtagctgatgcagacataaacagtgctcaatttggcccttaaactataaaatcaagaaagagtatttcaatcccatccacctgcctgcaagatttcttaatgttcactagttataaccattgtttaaacagtgctttttgtgtaatttaaaaataaactttaatgctttttaaaacaaatttatcataattcatagatcaaatgattatcctttaaaatgatacccttgggaaatcatgtacttactgtagtgatgctagtattaatattacttagaccaattttgaaactgttctttcagaattgcctccaaagacattttgcagatcatcccagaaaagggggtatgatggtgctgtgtagaactgaccagagttcctggaggattttgaggttatactgaaactgagtgctgtacagggagaattgcatgagtccagaaacttccttctgtgggctgcctgccttcctgccctcccttaagtgctctaagatttttgtacaggagtaagaatcaaatactggtaacatcaatcacaagaagttgaggaaacctgtaatatagctagataatatacaacgtttgtcttccatcagagtgcagaaaccaaaccatgctttgtgttaaccttaaatatgaaaggtgtttctcagggtcccctttgtccttcgttgctgccatatgaaatcttacaaggaaggatgaggaaaagcctggggggaggttctcctcggaaatgaggtggttttttttgttattaagtagaacgtggctgtggttcacaggtacttaacgaatgttagatgatgttcttaagtaatcagaggcctaataaaaggcaggggagtttctcttctagcctaaattaatattaaaagttcaggggtattttttgtttttaaattaatactttattgtttttaacaggtggttctcataatttacattcattaatttgatgcccttttacaaagaaacttcttaggtattataaaccatcaatgtaaaggatccacatggtatgtatccacattgctactctcaaatagaaatgggagataagaaatatatctgtgcaatatttaattgnnnnnnnnnncccataaaaagtgtcaaaggcaaataatttgctctagatcacaaaactagttagcacaacgctaggattataaccagggtctaggaaaaaatcctgaaggtgatttaactgagtgttagccctgtcaagccacctgctaagctcatggtctttcagactagcttcacattccaaatc

SEQ ID NO: 242182 - DNA, 2632 bp, Homo Sapiens
  misc_feature (482)..(681): n is a, c, g, or t
  misc_feature (2505)..(2517): n is a, c, g, or t
taaaacaggttacccagaaaaaagtggcaaattccaaaatgggcttaatacctgtgacaactattgactgagcccaggtacaacatcgatgaaagtcagacatacaatgtaaagttgaaataatcccaaattattttacattatttatgtatactttacaaataacacaaatatggaaatgttttcttggaaagctgttggaactgtaagcactgcaacgtatgaaagaaacatatttagcaataaaaaatttaataatatcctacaactgaattagttgcatatttataccattcaaaatcttgattttaacctcattcactcctttgaaaaatacattcctcttttgttcttttaaatgcaaaattagtggcagttgcagcaaaaacgccgaaattctataagaaaaaaactgatttaccccaaacatatcattcagcacaaactgcggtacctgaaatcccagtatcagctcatagtannnnnnnnnnnnnnnnnnnnnnnnnnnnnnnnnnnnnnnnnnnnnnnnnnnnnnnnnnnnnnnnnnnnnnnnnnnnnnnnnnnnnnnnnnnnnnnnnnnnnnnnnnnnnnnnnnnnnnnnnnnnnnnnnnnnnnnnnnnnnnnnnnnnnnnnnnnnnnnnnnnnnnnnnnnnnnnnnnnnnnnnnnnnnnnnnnnnnnnncttcccacatctatccccactcacaatgatcagaaataagaaacagctttttaaaaagggccactaaaaaatcccaaatatatgtaacacaaacagtccgacttaacaatggtttgacttatggtttttcaactttataatggggcaaaagcaatacacattcagttaaaaactgtacttcaaattttgtactctgatattatcctgggataacgatatgtggtacaatactcttatttgagatattaaacacttcattataaaataggttttgtattagatgattttgcccagctaaaggccaacgttaagtgttcagaacacatttaagataggctaggctaagctgggatgttcagtaggttaggcgtattaaatgtattttcaacttacggtattttcaatttacaatgggtctactggaacataaccctattgtaagtcaaggaacatctgtattctaacatttatgaataattttttgtacaatgaaaaagtcataatgcccatataattctgaagttaacacagtaaaaattccagataacctttacagatttaaaagtacaaacattttaatatacatataaaacctttcatattactttaaggtatatctacctggccattacaggcaatcacatattaagagagaataccattctactggtttggtgagaatccaatacctagtacctatcaaatatataccaataaaaattatgtaataacttaaaattatataagcactaaatattaactccaaaacatgacaccaaatacctgaaaaaaaatttactttagttatctcaaacacagccatgaatgaagcaattttctcaggaccctgaaaactgactcatttcccatcataacaaaccaactccctcattttacaaataaaaataatgttcaaagaggcaagaccagtgaccaacactacttctaatacaataccaaatatgacctcacattcactgaatatgcaggaataatgcaaataagtagtgactgctttgagaaaacatttgaattttttggaagtggaaattaattattcaaaatttagatatgtcagaaaagctgggatgattgattttcacaccaccattatcgtgaatgggctatccaaatactcttaacagaaggaattccttttttaggtctttagtgattattactaggctcagtagaaaccagaagacaattattctcttaaatattgaaaagaggcagtaatatagataaaacacactattttctgagattatctgatgatagaaacaaagttggctgaattccttaggtattagaataaacataaacttgatcatggatacctcatggcagatcactttaagtgaggtcagagagtattatcacaaaaagataatatatttctaatgttttgttcacacccaccacaaaacagttaagttaaattcaaaataatgtacactcattttcattatcctctatcagttttcacatggctttaaacagtgaatttctaaactacattctcaaatgcaatagactaaaatgcataaagtgctcaacagaaaaagatacaatatgaaaaaactttgcttataatatacagagtggttataaagaacatatggaaattactatccagttaagctttccatccaagaaaacaaccttaaaaatcaaggcaagatggactactctttgaaggcaagaatactgctggaataagaggaaaacctttccactttgtgctgcatcattctgcttatagaaacagtctttaagggactggtatttacattatagcaatcacatgtacactcaaaggtnnnnnnnnnnnnncctcagaaatttttatagagtctaatatttggcaaataatctgaaccactttaagggctttcaattaccatgtatattactggcaatagtactgactttacccaaactaagccaa

SEQ ID NO: 242183 - DNA, 342 bp, Homo Sapiens
ctttattctttcttagcagtgcataaaacagtggtgtttgctaaccactgatggcatcttagacttaataaaatactaatagactgatgaaactgtatatttaaataaaaaattatatattggctataaacatttttcaaattataactactggcccaaatgtttacagcatctttaatcacaggcaaatcccactttggtagaatttgttaacatgtggtttcaaacttaattccttctaaaattatttttcttggttattatactatcaagtaacccaaccagttatttgtcttttctaaattgtaaaatggtctcagattggtataggaagagtgccaa

SEQ ID NO: 242184 - DNA, 1739 bp, Homo Sapiens
  misc_feature (629)..(639): n is a, c, g, or t
ttgggagaataatatggtctcactgtataaatacatattccccgctcacctggacaagtcaaccctcgcgtgcattggtctcatccagcccctaggttccattttcccaactgctgaacttcaagctcgttgggtgacaagagttttcaaaggcttgtgtagcctgccctcagagagaactatgatgatggacattatcaaaaggaatgaaaaaagaattgacctgtttggagaaagccagagccagacgttgcagaccaattatgttgactacttggacgagctcgccttagagataggtgcgaagccagatttctgctctctcttgttcaaagatcctaaactggctgtgagactctatttcggaccctgcaactcctattagtatcgcctggttgggcctgggcaatgggaaggagccagaaatgccatcttcacccagaaacaaagaatactgaagccactcaagactcgggccctgaaggattcatctaatttctcagtttcttttctgttgaaaatcctgggccttcttgctgttgttgtggcctttttttgccaacttcaatggtcctagtcagcataatgctttgggctttattatcttgtcagtcactacctcctaaagnnnnnnnnnnnggctagaagaaaaaacattacattcatgttctaattatagattttagagttaggtagtacaggtaagggggaaattgtaaagaattagcagaattaggcatatgtacaaaaccaaaattttgtcatgaaattttgcctttccacgcttccctcagttcaccaaagttaccaaaatgtaaaataaaataagactggctcaggtaagtagtgctgccaaccctgatataggggagttgtatggaaaaatagtagaattacacagcatgaaaagcagcccatggtttaaattattggacaatttaaattgtgggtaaatatttaaaactcctgaacaatgtttctgatggtcttctatccaccctacttggtaacaaagttctcagatgttaggtcatgtttcatttgctcagtcggggatcactcaaaactactagacaaaaaagtgagaggatagatttagaaaacatcagtgatgctcagataaacttttaggacctcatattaagagctaagcaaatggccacatttcctatattttgacagagatactgctggaaaaattaaaattaaaatgccataatagctacctaacaaatatatatgtttaatgtttatcataggccagacattgtgctatgtgcatatcatatgtattatttcatttaattctcacaacaattctgtgaaatggttacagctattatagtcatttcacagatgatgaaactaagattcagagcagctgatcttgtgaggcagctggaattggaactcagatttgttgaactctagaactaaagatcataatgttgtcttgtaatatatttatttacaaaacacttcattatttataaagaatttactaacagtttatcttatttatacccatacatctgctactttgggaggccctttacatagaaaacagcattctttttgctaaatatgaccaaattacttttatttataatttttgatttatatttcagctagatctaaaaagcatctgaaaggaatttacaatgaaagatacctatgcataacatttaggataatctttgacattttggaaaaataagaattgagaaaaaaagtgtatc

SEQ ID NO: 242185 - DNA, 1519 bp, Homo Sapiens
  misc_feature (465)..(473): n is a, c, g, or t
gacaggaaagagctacattgtagaaaaggatattcatgtatgtttagagatataactcccaacaccagagcagtctgctgccaccaattccctaaatcttgaggcttgagtctaattttgatgctaaaagtagagcttagtgttggaagaaagatgatgctttaaaaagttttcttctatttgcttggaaacccagtgaccctttccaagccagatcctaaagctacctttgcccatccttctctctttctcttctccgtgacagcactgtgttaagcactagaggagaaaagataagagtggatatggagggacttaaagatctgggacctggaaaaccgtggtaattgaaatgtaaggttatacaggagataatggcaggatatgaggcaggacaaataaatcagggatagattgtgacaatgcagggggtttcaattttgttatttgggcaatagggggccnnnnnnnnngtttctaagtagggaagtgacatagttaaaggcgtggtcagaattataaattttcaaagacccctgtggctgtgtataggatgaattggaaggagaaaaagaaaagaagtggagaaagccatcatgttactgctgcagttcaaatatgaaatgatcggtcctgaacactgggtatggtaacaacaggacagagatgaaaaatacttcagagatagaaaagacaggtcttgctgactgatactatgtggaaggtgagtggggggaatctacaatctaccttgatgctgaggtttctatcttgggtgactggatggatttcttaattaatccaacaaatattgaggacccatgtgccaggtactggggacagtgatgaacaagacagacatggtcccaactgtcaaggaaccagtctaccaagagaagcaacagggcaaacaaatacagaaaatattatttatttaattataatcttaacttgccaggcgagggtgtaataaagaatctaacctactctgcagtcagggacagtataaatgatggtgccattccctgagacaggaaaacatgaggaggatctggttgtagtgggggatgagtatagcttggaatgtaatgaatttgaggcaactgttggtatacctacctggggatttgcaagacagggaaacttggaaagaggggctggagatagagttaaatccagggaagactaaggaatatggtggagaataagttcctaatgcatagccttccacttgggagaatgagctaggccttcctggagacatcaacaggacaataccacattcagatgtcagcgtttgatgataccacgaaggtgaggctaaggcaagggctaactgcccaagtctactggctcaagaaaagagaaacattgccaacaaaatatctgtgaaaagtggctggagaaagccagacgctgtaatttgctggcatgaaagaacctaaagccctgatcagccttttagtaaccatcaacttgggttctgaaacgctaaataaaggtagggacaaacggccaa

SEQ ID NO: 242186 - DNA, 1484 bp, Homo Sapiens
ttggctgtcaaagtgcaaatacacagcagagcttcagaatatatcactgatgtccattcgaatgacctgtctacaccacagatccttccatcaaatgaaggtgttaatccacgtttatcggcaagccctcctaaatcaggcaatttgtggccaggattggcaccaccacacaaaaaagctcagtctgcatctccaaagagaaaaaaacagcacaagaaatacagaagtgttatttcagacatatttgatggaacaatcattagttcagtgcagtgtctgacttgtgacagggtgtctgtaaccctcgagacctttcaagatctgtccttgccaattcctggcaaggaagaccttgctaagctgcattcatcaagtcatccaacttctatagtcaaagcaggatcatgtggcgaagcatatgctccacaagggtggatagcttttttcatggaatatgtgaagagctggttttggggtccagtagtaaccttgcaagattgtcttgctgccttctttgccagagatgaactaaaaggtgacaatatgtacagttgtgaaaaatgcaaaaagttgagaaatggagtgaagttttgtaaagtacaaaactttcctgagattttgtgcatccaccttaaaagattcagacatgaactaatgttttccaccaaaatcagtacccatgtttcatttccgctagaaggcttggatcttcagccatttcttgctaaggatagtccagctcaaattgtgacatatgatcttctgtcagtcatttgccatcatggaactgcaagtagtggacactatatagcctactgccgaaacaatctaaataatctctggtatgaatttgatgatcagagtgtcactgaagtttcagaatctactgtacaaaatgcagaagcttacgttcttttctataggaagagcagcgaagaggcacaaaaagagaggagaaggatatcaaatttattgaacataatggaaccaagcctccttcagttttatatttctcgacagtggcttaataaatttaagacctttgccgaacctggccctatttcaaataatgactttctttgtattcatggaggtgttcctccaagaaaagctggttatattgaagacctggttttgatgctgcctcagaacatttgggataacctatatagcaggtatggtggaggaccagctgtcaaccatctgtacatttgtcatacttgccaaattgaggcggagaaaattgaaaaaagaagaaaaactgaattggaaatttttattcggcttaacagagcgttccaaaaagaggactctccagctactttttattgcatcagtatgcagtggtttagagaatggggaaagttttgtgaagggtaaagatggagatcctccaggtcctattgacatactaagattgcagtcactaaatgtggtaatgtgatgcttagcaaggagcagattctggccagatttctgaagaa

SEQ ID NO: 242187 - DNA, 925 bp, Homo Sapiens
ttggagaagccattcctgtactgctttaaagttagactaatattctcagcacgggtgtatggggacctcattacctatttttttcatcatttaccctaggtaagaactttgatcactgcttactaggtaaagaatgtttgtactgttccaaaacccaggcttctttattcctttaccactatccatgtgagcattgacaaatcatggcttagaggtgctcactgactcgctaagacgactttggccctgttgatgactggtgctgtgctccagccttatcagttaggggacccaaggtttgtttgggacctgggtacaggtaaaagccagacttggcagggacccctctttctaggctgaaccttgagtccccctgctttttggcagacctaatggatcactgtcttgcagctagttcttcatgtggggcctcttaggccagtgccggaggaggcatgctcctctttctatgccacagaacaaacactactctagcagagcctttcttgcactttaaagtgagattaatttagctgtaatttggttaaaaacttcctaagagagaaaattaagtctactgatttggtataggtaaatggacattaaacttttttaaagtaaaggagatggtagataccgttagattatagtcttgaggttcatgtgaagccagtggtgttaacttactttgatttccttgttcaggtcagggcctggaacgcctgtgcggggaggtcactcaattcaaaattttctgtatgaaagcatttttcaccaaaatgagcctcatccctttatgcaacacataaccttactgagggagggaaatacggaagccacctttttatttctcttcactgtgtacaagttcacttgttgtcttgaacactgtctcaaatacctgctttttgttttggatagtacc

SEQ ID NO: 242188 - DNA, 1983 bp, Homo Sapiens
  misc_feature (1013)..(1309): n is a, c, g, or t
gtgcccaaaccgggtgaaggagtgtttcaggtaagaagaagagtttatatataggtgttgatacagatatgtataacaaaatcctcagtttggttgggtctttaaaaaatacctttttagcattgtatgatcacatgcattaaagaaagtaagcatactagttatcgtagcatataagattcataatttaaaatgcacaactaccaaagtcaaacaaaattttacacactataaatactgcaacataacttggaaaagttccttttctataaagggattggactggataaagttcccttaaaacactaaggtatggttatgactcacatttctcatcttctgacagtcttaacctctcattttctctcttttagttctacttgtctcgtatcaaggacatggcaatacagtaaaaataagcagaaaaattaatggacaaaccaaaataaaacttcattagctattaatggcttggaagcagagaggtatttgcaaaacattctcaaactacaaacatttggctggcccatacaggatttgatctgtgctagatgataaaaagagaaactaagttttggttaaaaaaaattaaatccctcgatacacagattatctgatctctacaaggcaaaggttatttttgctcttaatgtatctaaaataccactgttaatcattcttgaatttacttctgacaggctcagagcagtctaaatcagtataaagtaacacctcttctagaaataaaaaagatcccttacacactgtttcagtcctattcctatagtctcattctagcagttcctttaccaaacgctactcagtaagatgctgcaactttgccaacaaacgtccaatgaagactaattgagatctctggcgagaacatccccaacaaggtccaggtacatgacttgctactaaagactttattcatgcatttaccaagaaatatccagcatactacagggaatcaagtatgaagatttcctctttacctcttttaaaatacnnnnnnnnnnnnnnnnnnnnnnnnnnnnnnnnnnnnnnnnnnnnnnnnnnnnnnnnnnnnnnnnnnnnnnnnnnnnnnnnnnnnnnnnnnnnnnnnnnnnnnnnnnnnnnnnnnnnnnnnnnnnnnnnnnnnnnnnnnnnnnnnnnnnnnnnnnnnnnnnnnnnnnnnnnnnnnnnnnnnnnnnnnnnnnnnnnnnnnnnnnnnnnnnnnnnnnnnnnnnnnnnnnnnnnnnnnnnnnnnnnnnnnnnnnnnnnnnnnnnnnnnnnnnnnnnnnnnnnnnnnnnnnnnnnnnnnnnnctcaaagccatgtgcattccttctcatgcagccccctctaccttaaaacagcaatggtgcctgaggtccttctgctttgtctcttgacttctgccaccagcccgagaaaactctctgcttttaaaggagtcacaagatttgattagccacccccagacagtcttccttttgctacataacatgatataatcatggatcaaacaggttccacccatgctcaaagtgggaggatattatacaaggtcattggtgggggtgtcagtaggggtcattcttagaaatttgcctaccacaaatatacactgttattcactagaataatctctccaaacgtgctgtttccacataaccagtcttttctttgagggacagcactgttgggagacaacctctttttcattattatgatagattttttaaaggccttcataattttgcttatagttttaaaaataacaacaccttctaattattgactagtgcaaccactgatttgagaagatacacactttgttcaagggtattcaaccatctccaattgttgaacaaatacacacatacgtatctacagcctatgtgctaaataatcctttgtgttaactttttccaaagcttttcaatcacactgtctgttctgactacacagtatggtacagcgcgtgatgtggagccaa

SEQ ID NO: 242189 - DNA, 887 bp, Homo Sapiens
gacttctctaaccctggattcctcatcatggccagctcataatgacttccactgcccctgctccattcttcaataaattcccgcccacccctcttcagagtagaaactcattgtcgtctcccaacccctccaaaacaaacttgtgtccaaaccgtgtattaggcaatcacattgcctgctgacttttctcaaattagcaaaacagactgaaacagacattgctgtgctctgaagggcatattaaaacaatagaattattgcatccagctgctcggagaacattttttccagattatgatctctaccatatttttttaagaagcattttccatttgggccatcaacggcctccagtttcctttcggctgaactcaccacagtaagcaaatttcagggacagcacgcagctctcatgcaggtgcagctggtacttgtcaggcttgttcacgtgcagcacctccacattgctgctctccatgcccactgccagccactccccggtggggcagtaccccagggagaagatctacaaggagcaagacaggctcactcattattccgcctgatacacttaggaagggaagacgcaatgtgaaaagtggggaaatagcaagaatggggggaagtaatcagccaagtccagactgtggggaggtccacagggcaagtgatctaacgcagatgaaccaagtgtcaaaacctttaggaaactggaaacatttgaacccctctgtcttttgggataaaattaagaaatgattcctaataataatggcattcatctgtacattttaaaggaggctttaccttttagagacactaactgaaatacgatcatatatcacctatcaagggggatacattctgagaaatgtgtcgttagccaa

SEQ ID NO: 242190 - DNA, 864 bp, Homo Sapiens
  misc_feature (157)..(219): n is a, c, g, or t
  misc_feature (248)..(267): n is a, c, g, or t
ctgtcaaggtttagcttccttgagactcagaggatttgtagttgtactaatatactcaatagccaaatttccttaactttcataaattttgctaaccaagggccctaacaaagttaaagacacccacagggttcaaaagtgaacaaatatgttgttnnnnnnnnnnnnnnnnnnnnnnnnnnnnnnnnnnnnnnnnnnnnnnnnnnnnnnnnnnnnnnnacttggggacagagcgagactctgtcctnnnnnnnnnnnnnnnnnnnnctgtaaatgcttgagttctacctcctccagattctaattttatttaattggacatctggttattgtattttttaactcctcaggttatgtaataatacgcatccagtgttgaggaacactgacaaaaaggttagagttcagtgagacactgaggcctcttcagtacataaaaatagggttggaagttagcatcttgacactctttgggggattctatatctcttcacttgccattaagtgaaacgttcagaaatttaagagtcaacaatgccaccattactgctgtcaaagtccttcagtgattaaaaagataccagaaagataccctgatcccttgatcatctggtggtgttaaactacttcagtaagaacaaaagatgtgctttccaagggtggagacatccaacttgtattcagttccccattacattctggatttgggtcaatgaaagaagcatccattggggtgatagctaaggcgtgtcctcgccacatatcaatgagatttctggaggggagtagtgtgggaaagtggttataacattgcgcaagcagatgtcagagaatttctgaaagacagggctatctctagaccaa

SEQ ID NO: 242191 - DNA, 1210 bp, Homo Sapiens
  misc_feature (897)..(920): n is a, c, g, or t
aagtaaacatttttaaagctacttttactcattctagccttgtagaatgaccattgcagcttgagggacctagttcttaccttttcttgcaaccaacacacttgcaattgtgtctggtatgcttgttcctgctgctaataaagtaaggcccattactgtatcgggaatttctagtgtttcccctgtaataaacagatatttcaagttacaaatcttaaagattcactaaccatcctttgcagttattttggatatttccttcgtgaacaaaaataaaataggcacatttagaattcagagccaatatgtgcttgcttattagttttttagctagcaacatatttgaatcaggctggtaattcgggtaacccaggtagcacagatttttaatgacatatctaaagatacgtaacagctaaaattctgccagtgagaaattttcctgtttgatattcttacaaaagatgtttatgtccaccattatctcatcagggctgtgctgaatatttgataatgagactgatcattccgctttttctttcttaaaaatattagtcagagttaagcaaattaattatagctatctttaagctataaatgtgttaacatgtatatataccatttattatgttctactttagtgatataccttaatttagtgggctttggcagggcgggggagggggaacgttcattaatctctgaggaaaacaaaacctgttttctacttgagtctaacatatggtcccaatttattaatacttctgttaaatttgatgtcaggtcaacatttttcagaaatgtatttattctcagaaacagaaccagagagaagttaaacaaaaggttatgtaactgttcctttaatgttgtaattgaaaacttggtttagcgtcnnnnnnnnnnnnnnnnnnnnnnnncttaaaatgccaactaaaataattagaaagtagcttatttattgcatgcttatacattgatattggaattggaattggttgttaatttctgttactggctttgctagaattcatatgtgcataaataacactaatatttatcatcttgggggctgttctgtgatctattacatgattttgctctctttttatttttctagtatcaaatgtgttctgggctgagtgaatttggatagatataatatgcaagcctaagtgggactttttcatttttctccattaaaaaaagg

SEQ ID NO: 242192 - DNA, 1235 bp, Homo Sapiens
  misc_feature (1177)..(1191): n is a, c, g, or t
cccccaatacacacttccttcttctatctacctgtatgatttccactcatccattctcagctcctgttggtctgagaccacatgcaactggatttgtcaagcccccttttcacaacttgttgtcacagtccattaccaaattgcatatagttatatattccactaattaggcttctaaaatatcattaacatgtctcttgatcattagcataacgtatgaggcgacgtcgttaggcacgactcgagtttgttaacgtggtaatgaaaggcacaaggcaggctctgcaggaaccaagaagcacagagaagtggggaatatccaagcaccaagatgctagccacaaaggcatagacagagacacagagagacaaaggcaagcacagagaggagatgcaaggcacgaggaaaaggcagagaaacacagtcaaaggagtgcatcagtaagcacgactttggcagtgagatggctgcttgggcgtaaaaaggtgaaacctaatgcacccactcccacctgtgtgggaattagaccctggcaaggctctaagcagaagaagctttaaaaatttcctagacaagaaaaaaataaaattcagaaatctccttctttcctgccacctaacacatggtgcacacgggtgtgcccatctcccccattcccacaccacgccctctccagcagtggctacagaagactgtgggcaattacctgggggtgacgttcttcgattccctatcaggccctttattaacatgctggtagatatctctatctatctatatacaccgcattagtcatgatcctcttgtgtgtaacgaggcggggcttacctccagagattatagacatgctacatctagagaagagagaaggaaggaaagcacataaaaaagatggcaactggccaggcgtgttggctcatgcctgtaatcctagcatatatactattttttaacctgagtgtttctaagatgcactgggggaaaaaagatgcattgaacatctctttatggcaattatatagttttgcaacataattttaatggctgtattctatcaaatgaatgctttataatttatttaaccaatgtcttactgttttgtacatacataaacaatgtcctgcttcctcttcctggaattattttcttatttctattacagtatcgtagtttgcnnnnnnnnnnnnnnncatatctttctgatacttctttgtctgttttgctagctctccaa

SEQ ID NO: 242193 - DNA, 1648 bp, Homo Sapiens
  misc_feature (157)..(171): n is a, c, g, or t
  misc_feature (823)..(840): n is a, c, g, or t
ttgtaatgtctgccaaaacacagactatgattaaagaataaacatggtgtatctttgtatcaccctgttgcattctctctcctttttaaaaccatgcactagtgaaatttatttttaaaaataatataaattgttgaaaatggctgatttttattcnnnnnnnnnnnnnnngcaagttgcagccccaagaaaataatttaagtattcagctaatctgtgtccatgcaaaaaaagtttctttaatttcattcagtacagtgtagccacagaattttgtttttcagagtccaacacatcttagcattagtaaatgacgtgcccatggagctacaaagtctgccactcttcctgctggactgactgctctgattcccgcccagaggagggctgatgattgttcctgaccacttctttggtctcctgcttttcacctgatgcttcctaggattacactcctcacctgtaacaccgcttcatggctgtatagctccatttctgtggcatatcagggctttggggttagataaatgaagaaaaaggaatgataaaaatataaaggtgccattgaaaagggcttctgttgcatgaaactgactgattctttgagattaatccatggcttcagattggaccagaactcgagtgtcattgaattccaaatctgatagttcttcacagctctgctctttcacctgagggccttctttagggcacaatgtgtgcaacttcctctgagaacacaggattgctttgtatccctagaaacaggctcagaagacacaacattaagcatgcagtgttaccagggtttgcaacctgtgannnnnnnnnnnnnnnnnngtaacgctggttgctgtgacaacaatttttttacagctgctatgaacgagagtaagaaggtccagttgaactttccagagatgattgggaagctcttcttgtcagaggggccaaggttggatctactagggaggaaggtgggaaaagtttgaaccatccgatcaccatattggatagctctagttcatctaaaagtatctgggccactcccataaaagatttgtgatccatgcggccataatctccccagacgatgatctgtaaaacttttccttgtggactctcttcgaaagataatagctgctggtaaaggggttccagcgtttttcttgccacttttgttttctttttggctatgcagactccgttatctaatagatacacttttacatacggtgctggcagtgtcttggaacctggttttacaacaaggccacgggcccggatgatttctacctccagctgtccctttttgtccatcattcctacctgaatgtcacccattgcaggtgttgccagagtctggcgtcccactagctgagcagggccaaggccatccaggaaatcactgaactggctatcagaggccaagcgaacaccagggaaaatcagactgaaagcaaaataacatatgagattaaatccccaacccctatttattttcaggtaagcttggtttcattctagcctcattattgtggcaagactagtcctattattttgtcacttatatttactggatccaaatacccagttccacctcccaggactcttccttcatattctcagcagcccaagtatgacccaa

SEQ ID NO: 242194 - DNA, 1026 bp, Homo Sapiens
  misc_feature (245)..(245): n is a, c, g, or t
  misc_feature (247)..(264): n is a, c, g, or t
  misc_feature (824)..(876): n is a, c, g, or t
gtcatttcctaccagcaattttatttacacaataaaaacatacaggtatcgtcagaaatcatctctacatttcaaatcttgactcagtttaagggccaacaaaggaaggcttttctctttccgttgtttcttgcctctgttttttgttgtacaaagtgtgtagtactagcaagtgcattacccatagcatgtctttaattttcaatttgaaatctgatgtgctggagaaaagtgcatcgtaaggngnnnnnnnnnnnnnnnnnnccccttacaaattcaaaggactagaataatgatagtcatctggaaaaagtaaatcatgaatggctataattttgaaactgatgcttaatgatggcagtgatttttaagtgtggtaacaaacgttttgggagcatgtatcctctgtcaagatggtactagtaacagattcaaagtagtaccatatcgtatcagactgatgtgggggtttttatgtttgacatcagttggtgagcctgttgttccttagtaaattgatgccataagctaaagttaacatattcatattttccctgccaatagtccttcataaatacctggtcataaactgaaaaaaaagtaatatctgcaatataaatgtgttgtctattagagacggggctagatgtcttaaggatttctaagtacatcttaaaatttataatatagtcgttcataccaagaatcatctggggaattttaacaaaatatgtatatgttctaaacctcatcactaccccataaatgcagcttaggtctgtaagtctgaaggagtatgtgtatctatctgggtgttgttttannnnnnnnnnnnnnnnnnnnnnnnnnnnnnnnnnnnnnnnnnnnnnnnnnnnnagactctgtctcaaaaaacacaaaagaaaccccaaaacctggtggagacagacacataaacaaatcattaactaccagttgacaaatactaactggagagtgtacgaatcagttaagacaagagggatgaaatgtctagacaagccccaa

SEQ ID NO: 242195 - DNA, 1070 bp, Homo Sapiens
ttggcgaagctcggctcgtgaacacacactgacagctatagggcaggcggcggcaccgtccccgcttcccctcggcggcggggtgtcccgtcggcggccctgaagtgacccataaacatgtcttgtgagaggaaaggcctctcggagctgcgatcggagctctacttcctcatcgcccggttcctggaagatggaccctgtcagcaggcggctcaggtgctgatccgcgaggtggccgagaaggagctgctgccccggcgcaccgactggaccgggaaggagcatcccaggacctaccagaatctggtgaagtattacagacacttagcacctgatcacttgctgcaaatatgtcatcgactaggacctcttcttgaacaagaaattcctcaaagtgttcctggagtacaaactttattaggagctggaagacagtctttactacgcacaaataaaagctgcaagcatgttgtgtggaaaggatctgctctggctgcgttgcactgtggaagaccacctgagtcaccagttaactatggtagcccacccagcattgcggatactctgttttcaaggaagctgaatgggaaatacagacttgagcgacttgttccaactgcagtgtatcagcacatgaaaatgcataaacgaattcttggacacttgtcatctgtgtactgtgtaacttttgatcgaactggcagacggatatttactggttctgatgactgtcttgtgaaaatatgggcaacagatgatgggaggttgttagctaccttaagaggacatgctgctgaaatatcagacatggctgtaaactatgagaataccatgatagcagctggaagttgtgataaaatgatccgagtctggtgtcttcgaacctgtgcacctttggctgttcttcacggccatagtgcatctattacatcactacagttctcaccattgtgcagtggctcaaagagatatctatcttctactggggcagatggcactatttgtttttggctctgggatgctggaacccttaaaataaacccaagacctgcaaaatttacagagcgccc

SEQ ID NO: 242196 - DNA, 1319 bp, Homo Sapiens
  misc_feature (1083)..(1164): n is a, c, g, or t
cccccaccataaaagagaaattatatataatttttttccaatttccttcttacacccagagaagagggggacaactgggagaacaagttaaaaaactggggtgcaggaataaatatgacttttcctttccccaaaatgggatgttgacagaaaagcagagtatgtgcttagaggaactggtgggtgggaacagctgttatctttgacatgatgtgtaaaaatcagggaacaagtggacatcacagtcagctgcctgcaagtttaaaaacctcagactaaacagacagttcaagggaggaacagacaaattactaatcacattgatgctgtcacatgcacaatgatgctgactgcaggccagcctgtcaccatctcagggctaagccaacagagtaggaggggtggcttcaaccccaagtcccactgcagtaagaaaatgaatattccacacatgaagcactcactacacatagataaaccccctgctcacccccaccttcttagacttaacccaatttagaaaataatagcaaaacccactggggagattggaagaatggcagagaggattctcctcaaagccatgggggctatggatgtgaatcttagcagacttgagactcccagctccaggccccttaaaaccagatcaggtcttgaggggaaggagagagaagctaggatggggattcaagtcccatgaagccttttgtagcctctggagctgcacctggatggtgagtctgatgttttaggggtgtggctactggctaagcagatgtgagggtgggaaggggaagtgacaccaacttcccacacgggggacacacaggtgggaagacaggtagggctggatcactttgcagtcctggcatgggaggccccaggaagcctacaatctaactaaaaagattttcccagtggtaatttcttttcctttctgtttttacttcctattatcagtgttgttagacttaaaaaacaagatacagactagtcccaaagctggactctgtgaataaagttgtttcttttataaatattttaattacaagtaatcctcactccaggtaatttcagtgnnnnnnnnnnnnnnnnnnnnnnnnnnnnnnnnnnnnnnnnnnnnnnnnnnnnnnnnnnnnnnnnnnnnnnnnnnnnnnnnnngctcccaaactttcacagaaagtctgagagcaaccatgtaattataaaggagccctacctctcaagagtgaagtaagggtgagaaagactatgtcatttcagcctgaagaagccagagacaggagaatgtgtgtcacttaaagaaaaatagccaa

SEQ ID NO: 242197 - DNA, 1256 bp, Homo Sapiens
catgagtctagctaagatttaaaaaatacaaaatgcagcacaaagaaatgattatgatcaataggtaaatgttaaagaatactgtttcaggcctgagcaattccttgggaaaaaatatttagcatagcagtaaagattgataggatgcctcaaaattcttaagttcacacgtatttcttaacgaatatactttccattacaaggttctatattatagtttttaatgacaaacttattaaacatctgggaaaggtccacttccttaaacctcttctccaaatcaggaacaggttagattgatatatttaacaggtagatttaggcatggtgtaggaatcatatcacctgggatttgtggtataggcacatcttattgaaatgaatgttttatgactttacctgatgaaccattaaggactggacctgccgtttgaggacctgcattctagctgttgtgacaactgaccgaacgtctggcaccacactctcactaagaatttcactgatgaggcggtggtttctctggaaacgggcggtggctgtatgcttcattgaaaagccatcatcataatctggagtgaacaaattgttctggaaatcaggtcaccagtaaccataaaaaggagtgtaacaatgttaacacttaattaccaacgaactatggccctcactggcctaacaagtggacctgcccagcgtcatgggagcactggggcagttacttgataaaaaccatacagaggacgtaatgtgttcattggccaaggtagtaatttatctcacagtctttaagtgataatgttgtgtctgagaaggatttggctaaaacataaacgagatacaacatgtctcttctggcttcggaatcaatgtgaaggctgtatgtgatggcagtaattgaaattctgcccaatgtttcactctcttggtagtaacttaaggcatttaacaactaatgaacaacatatgaactgggcagtgactttgtcacttgtagcactttaaaaatgaatgaaaatgcccatttgtaaaattatgacagcagagaatacatcacctctaacaatattcagtttcccaggccctcaagtaattttatagaagaaaaataaatgtctgattccaaatttaatttttgtcagtttacacttagccagctgttgtcagtgtgtaatggtatgacccaagttcatacagtatgggtctggtttatatgcttctgtttcgttttgagacagaatctccctcttgtccaa

SEQ ID NO: 242198 - DNA, 1528 bp, Homo Sapiens
  misc_feature (113)..(123): n is a, c, g, or t
ttggcacttacttagcttagactgccaagttacttacacaagccagagtaagtctctctgccccatcattgcatacatattacagtcagtcacatggaccctagaatccacannnnnnnnnnnggtctagctttgccccagacataccattctaaagcctacaaagcctagctcttagcagctggggaaggcaattatttcacctcttgaaaaatgcatagaagattaatttggtcagcctttggcaaccaatggccaatgacttgcctactacctgtttggtactattgtgtgggaaacagacccaggatattagtcgtaattaaaccttaggttgtaagtattagaatattttgaaacatgttttagcaaaaagctctaactttaagaaagttctacttaaaatctgtgtgctatataatgaagataccttctacgtctcacagaaggaatgtagaacccaatcaaaggctttatcatatttagaggaaaggggttgttttaggcatacagttatgatactaatacattaggggaaaactggtgacatcaaaatgaattctaatatctagactgatggaaagttttctaaagttttctttggacaagtgttgattttacacatatgttgttattaagataataccctattagaaaactgactttgtgctgctagcaagtgtatctatgtgtctcctaactaatcattgtaaggtatatgttttgatgtgttaaataagttttcaataagtgttaaactgtattttaaatagggcatctataactgtgtcttgtctctttgctttaaagtgtcttttgtttgactataatttagtgttgcaataggattgcaagtaataattttgtggaattgtgaaataactgtgggtacttttaatgtgagagtcttatctatagtatttgtgcttagtattttctagattagcatgaattacacttcctaaggtcactttggaagatgattgatttgatttaattaacatattgatttcactttgactatatttttcttaaagaggaagggaaatattttcaggagatgtttgaccttcttagatgaatggttgagggtagggcccatttgttaggcagcccatttacatcattccaaaaaaggaccagtattcagtgttatgctgcttagctgaggacaccctttttccccaggcctgcccatctacgtttgtattcagtgctctgatttactttattcaccccttatcccatcaatatgttttgtcttctgcttgattcccttgctctcccaggcagcaacctgatcaattcattcacaccatggtgctaatagctaatgttaggttcatattaatttacccaggaatatctgaattccaggctttaggactaggcattaaaccaaagtggtgactttcaatggagggctaatacatactgaagcagacagactggagggaaagaaattttggataagtgggtcccacagcactgcctttcatattgcatacagtaagcaaacacctacttt

SEQ ID NO: 242199 - DNA, 1051 bp, Homo Sapiens
tttttctgttatttatcatttggaaactgtcagcctgtctctttcactttgggcaagtgaaagcaaagacgtccagtcctatcagcaattaggctgaaagtcaacgccaagctggcgggcaagggctggtctgagtagaggttccctaggcaggcaagagagagactcccactcgatactcccagctcggcaactgctgaatgccaatgagcactcattataacccgccctattttataggatttaattttacacttcaggcttaatcagtctgaaagttaaactgacagtgttaagttacggaatcaatgacatttaggctttatgactttgtagctgaatatctatgggctatatttccattctaacagtgatatcctgttccagaatctcattctttggtgatggcactttctagtggagcagtcatggtaacagtccacacccattaccatgtgggtgctttacagcatactgacggaaggactgaggagccaccggagcaggagttcctctcagggaggacgctgacacttccacagctgccctaggtatgggcacctgatgccaacgaagaagcccaaagcgcctctccacttcacagatggaagcctgcccccagcactgggctgacagcatctggagctgtctcctggtctcaaatctcttttggagactcagaatatgcgtcgatctaggtctctggggaccgagaataattttcaacaagatatgaaaagcaagataaatgtaaaacccagcagcgtactgagaagaaggaattactgagtgattgtgaaaatcaaattccaggagctgtccattatcaacatgctggatgggccggttcagtatgtgatggattatttgatgtgaacaggtagatagccaaggatagaaaggatattgttatctgcttcaagtcctgaacaacactgtggagaataattgggtttctggaaattcagctaacactgttcactgagtatgaattgctgaccatggctggaatataaatgctggtttgaatgctaggctaatagaaggccaa

SEQ ID NO: 242200 - DNA, 861 bp, Homo Sapiens
  misc_feature (54)..(78): n is a, c, g, or t
  misc_feature (458)..(493): n is a, c, g, or t
ccaactttgtacaaaaaagttggggccgcacaactttgtacaagaaagttgggnnnnnnnnnnnnnnnnnnnnnnnnngctttttattatgaaaacaaaacaaatgccccaggagaagggtccatgattaccagaaacatcaaagagtactttctaccatttttattctgttgtgttgaggccagcattgcaataaacaagctaaactacttacattggactcattttcagtaactgacatttacaggaatatactaaaaacggcactaaaaagtttaagaaaagttacggtaaacttgcatgcacatcatacagaaaagtaacattttaaatataaaaaagaaaaacttcctggaagcattatgccagtattaaggaacagtgctactctggatgtgacaaattctgtatgtgggtgttactctttcccaaaagactgtcagaggcgtgagtgctgnnnnnnnnnnnnnnnnnnnnnnnnnnnnnnnnnnnntgtgtcttacagtttgtaagcaagatgacactgcccaacacaaagaggggtctggagttcagttcacgcccgaagcctgccccctcggcctccaggggtcattcagagtgttctcaaatccaattccgacacacgacttgtcactactcctctccccttgaaaaaagcatgttagaagctgccctacaggtctcagcagtgggacaatctaattgaatcaccgcagccttctaatacagaagaaacggacgtgactgtcaccctcagcccgccagcaagggcgctgaggaagtcattaatccttcgaaactctgaaaagaaaccagtgttgaagtctggacagaaagccttaaaaaagtgacagcacc

SEQ ID NO: 242201 - DNA, 615 bp, Homo Sapiens
  misc_feature (159)..(198): n is a, c, g, or t
atcggtagcactgaaatgaggatttatgctggtaagttcttcaggatagacacagacacaggtccactttccaagcaagacatgtgctcactggaaacggagtgaatgcatagctggtgacggcggcgggcactgctgagtcacgtgaaacacaggttnnnnnnnnnnnnnnnnnnnnnnnnnnnnnnnnnnnnnnnncgcgtaactctggctgcagcacctgatcccgggcgactccgggcagcccgagacactcgtgctgcgggtaagacccagcttctgtttgtgcacaagtaacacgacgactgaaatctgcaactattgcaaagacgcgggcacttttacagtgttctgctacggagccaggacaaaggccggtcagaagccggaccagcagtcagctggtgacgacgagcctccctccagcaggcaccacgtcagagaggccccaggcccactgagcccgggaggagacccagccggccagccagacgtgtgcctgaatgccacagacttcaagcagtttacaaacgaaactcactgttaaaagctgttaaatctcattaaaacagtagattgtttttttgagattctctccaacttttttgtacaaag

SEQ ID NO: 242202 - DNA, 967 bp, Homo Sapiens
aaagtgttcaatgagattgctccactcaggctgcaattccaaggattctaagtactgtataacttctggtgtcactgttcaactcttaagtcctagaggaagtaatcgtttgctaacactttgcagatctttatcctggacatgcacatcccagtacccttgacaagtctcatgcagatttctgcctctcttcccaatcttgaactctatcttataaattccagctgttttagtaaccctaacctctgttgcatcagagttgccactctctgactctcctggggctcaactcccacggtaatgctgggagatacccccaggtagaatcccacaatgaccatctgtgggatttaacatcttgtgtttttcttctctcagggatcacaatccagtgttgcttgttgctctatgcctgaaaataatggcaacatatattttgtctggttttaaaactggttttggcaaatgcacaaatctggcactactttgttagggtaagaaaaagctgcttttgcaaaacaaaaggtcttaaaaaacagaatattctgatggttccactgatggttccactcacagccttttatttatctgacactcattgagttctccaagtaatttttttcaggttaaccatgtccaattcccttaaccatccctcacagtaaaaactagacactatgaaaaatcataacatgctgatgattaacaaccaagacagtccccatcttcagttcaggctagtaaacaagacagacaccacacataacttgtttcccttttaaaattaacatctctgaagtatgcagcgtgaagcagggcatacagaactaaaggtaattaaaagcagaagactgcctttcctttcttaccctcatatcactcttattaggggtaggaacagatgtagtattatgccaacttttttgtacaaagttggcataatgaaaaaagcattgctcatcaattt

SEQ ID NO: 242203 - DNA, 1041 bp, Homo Sapiens
ccaaggtcagcagtacattttgaaccgtaaaagagaatggggcgattgagttgtacaactggagttatggctaagacataaatctcctctgcattaattatttttcggttcgtcggcagtaggagttagtgtgtgaacaatgaaagagggctttaggttgtgttcagactgtagaaaagtccttaccaaccttcaactgttggtcacgggatcaagacaagaaacacttcatgaattaggaaattctaaaacactcagagcctgggtttgctatagaattggaagcttatgaaacctgggtataaatgagcatttcatagattaccaggactgactagctccaaatcctctctctcctggtttagtcagttccccatggagctcctaaatccaaggtactggcagagtacactacacaacaggcttcttgtgcctgtgctgtggaattagtcctgggtttaattcagtgagcctgagaataaagactgctgtaacccttgctttggaatacttctaggctttaagtttacaagaagatttttcaaagttaaagatatgggaagtgtgaggatgtcacatttacagtaggtccctctcagcaatgttaagataaatatccagtaatttaacagctgaattcacatatatttgacacatgagaatcaacttgcgttgatgtgatctgcatttatgcccctaaagagtcagtattaagaaatggtgacatgcgattccatacattcttacactataaagtaacaaattttacttccagtagctattataaaaccttatgttattaacccctcttgcatagaatgaggtaaacctgtgcgtattaccaatgctattattcccaaaagtagagccaatattttagaaaataaattgctggttttttttaacgttctatgcattttaaaattcaaacaaaagtcttacctaaaatggtctcctggggctttccattaacattttttaaagcattccataggctgaaggactgtagaggttaatcattttgattaatttctaatccaa

SEQ ID NO: 242204 - DNA, 1344 bp, Homo Sapiens
catacttatatgaaagactacatacttaaaatactggtgattatatttaggacctgaaatcataagattgtggtcttgctttttacttatttttgtatcttagcgatgtctagagttaataagtgttgcttttctaatcacagcaagtcaaggtgactgctgagggctgtggccagcctgaggggtggccgtggggctccgggggcacccctggaagtacttcctggctgagtggggagtaaggggtgggagttagggtgacctgaggcctggctgaggcagtgagagtgtagcaggccgtcatacggggccggggcctggggcagagaggatgctgacgtgcaggtaccagcggtgttctgtggagatgtctcaaaggctgttgactttggaatctgagacttagggctcatccaaatggatgttacatttgcgggtgtgtgtttaaggtgcagcgtatgaataaattcatttcctcacagatctatacactgaatttcagcatcactcatctcaagaccttggccctcttccctttcctggcctgcttcctgcagcatgtaatttgctagtgtccagaactagccagtgtgccttttctttccacacgcactgcctggttcaccttcttcctgtaaagtgcctccgtcctttgtccccatctgtcccgatcgtaaataggtcctggctacagaggcatcctggctctagatcattgtaacagctgccgctctcctgtcagtcccccgggccctgccatccactgagagtctgaaatcctttgcactcagttcctgactgtcctccactcagaagcccagggatggctggagtggaggtggaagcggggtgggcctggttgagcaggatcagactctgcccggccaggggaggaggaggaggacccaccaaaggccctggatgatgcccctcctgctcatcaccctgcctgccctagcatcctctcgacacagaaaccagtcccttttcttctatgaaacttctccagtgattgtgacctttgctgatttctcccttctttgaatgcagatgggcctataattcactcttaacttagcacacaccttggcctgtgggggttgccaggtacctgaccccagctcctcagccaggatgtgggcccctcctggcagccacactgccaggcacatggtatacagtgctcaactgtttgaactaaactgatcaaagtttactttcttaatgtaaaagctttctaagaaaatctaatataggaaaattcagttttcacaatattatgatattaaaaattacgattattttaaatgatcagatttgtaggctgtgtgaagcatttcattt

SEQ ID NO: 242205 - DNA, 1837 bp, Homo Sapiens
tttttctcctttttgtttgttaaagtagatttcttaactgatgatttctcttaagtggacataatctcaaaggatgcattctgaagtaagacacctggaggatgaatactaagaacgttttcttgggtttaaagtttccccacactttctagattttgcatagtacagagcccagccgtatttctaagcagcacgctgttattttctgacattgtttttctgagaagactttttacccagggaaagtcataattttagcttaccaaattggattccagttgttttattatatacccttcattagttccaagtatgcttctgaataatctaaaacctctcaaaatttgagtttataagtataatgaccattatctttccaatatcccctgaaagaaagtcgatacattccaggtttataatgcacaaagcctttacagaggtggggctgggatgtggaaaaggggaagaggagaagagaacaaggacctgtttgtatcatgccatggagaactacagttctgaattcagggaagggagggaagatagtctttgtaaaaatgagagttttttaaaaagataagtgacattcagtctagtaagacggtttcttgttcctttttgatggaagctaacactgggtggtcaggctccgttacttccgagtccccactgcccaggagaatggatcgcccttcgtctagggcaaaaacatccgagttctggttttggcatgaatgtttaacaacctcattgggagtggagaatgttttgtcacacaagttgcatttgtagggtttgtttgtttgcaccagcatgttgtccatctgactcccttcttcaaatgtgcagagttccagagtctgtttgtccaccatggtgtaagtgtcgatgctctggttgaggcacacgtggcgggcagcctggttggccctgcaaaagcttttgtcacaagtgctgcacttgaaaggcttcccggtgtgtatgtacatgtgttccctccagtggcttttctggataaatttgcgtccacatattgtgcactcgtacttccgcctcttcacctccctctcctggtcggcctgctccaggttgtcaatgtcagcaatgtctgaggggggtggggtttccgactgctgctgcccatcgatgatgggagaatcagagatgtgctgcagctcactgtcacttatcatcccggcttcaggcacttccatggcatctttcccgaggtcagctgcattgctacagagagtcagggggacgcgactttctccctgttggctagatgtgaaaggtactcctgtgtggatctggaggtgttcacgtaagctgctccggagagtgaagcgccgtccacacaggtggcaggcatagtactttggaaagctcccattcctcttcatgatgcttggcttgacgtgggctattgtgagggacgcaggctgctcatcggaggaagatgcttccagattggtctcctccccgggaggagggggaggaacaggagtggaaacaagttctggagacagcgaggtctgcagggggtctgagggagtcatatttgtccgattcacctgggccagatttgaagtcagctgggagagctgtgaggcctcagggacctgctcctggcttatcctggaggtctgtggccgtggatctcgcccgagtttttcaggtgctgaagcaatcttggtggcttgtctcaactgatgatctgcaatctgaatgccatacaatgaagaagccagtgggaaaacttggtcagggtgagaaaaggctccctggctggcgaggctggcttcctgaatgagcgggtaggcgtgcagaaacccaa

SEQ ID NO: 242206 - DNA, 1234 bp, Homo Sapiens
tactccaaatctgagcaacattcaactcatttgttgttgttctggggttttgtttggttttggttgagacagaggtaaaaagcccagaaaagccatagagagaattttaaatgctgctctcccactaatggttataccttttttatcagcttcttcatctgattggattaaatttaaaattttcctttagcttggatatctgacaagattctttcagtacagtgagactttctccaagaaaaagaatccacttgattggatcagaaaccacaacctgcctctggaagttaaacctttcagtaggtcaggtcatgaatcaggggtggtggcattttatgaaccttgcttggattctttgatcttgccccgtgacccacacagacctggtaaggagcttcttctcattgacggggataggggagtggactctatcttccacttctcttgtctttccttctctccaccttgcctcctctgcatttaacacagtctgcagcacacaaaccaggagcatgtacagtggtgtgctcttgctccctagaatgtttcacggcttccaaggcactttatctttctccctctctaagtattctgaatgtggcattttgaccactcaatatagtttagagacccattgtataagcccggcacaaacaatctatattcttaccatttattccaatgttagggaatcttctgaaagaaaacagaattttggttaagtttgaccagggcagtagattatagctcacatggccacagacagtgagactaccattaagatttggtagatgccccaagacccaggtcaagcaaccataattatctgtcaagttctcacctatactcaagtagttttggaatggtgccttcagttacggacttaacactagatttgaaacttttgacctggttgtgtttaaaattaccaagtgaacaggaatttgtttttttctgctggcattctgtcttgtaaaaataagaagaagggaaggtaattataggtacctaacatcaaatttagtaaaaatcactggaaaaaaccagaagtgtgatttaatgatctgagaaattaggcaagtgtcaagtctgaagaattttaaaatggttataggtcaaagcattaaaaacttctttggggacagagtggctataaggagaacacggtgaggtatctgccaggggttaattgcaaccctgcatgaaaagcagttaacaagtgagaattagccaa

SEQ ID NO: 242207 - DNA, 1452 bp, Homo Sapiens
ttttttaaaaaaggaatgaaaatagggagtatggggaatgagagaggggaagggaagagtcaggctgacagggaagaagagatgctgattcaagctgtctgatcaaactaaaagggacttaatttagaaatgaaaattatttcttctcaattcatgattcaggtgaaccagtttggttttaacaaagaaaaaacaaggaaaaaatatttgctaatgttaacagccctctcacaggctccttttcatctgttcagtaactggagactctttccaacatggtctttagagctttctagagatacgactgtgactttgttggtcttcacgcactgggtgtgtctgtaaatacagcgctgtccacggtgtctgtcctgcttccatcccaaattcaggctttagcttaaaacatctttagtttaattttttaaaaaattcttttctttcccccagataaaatcttaatcttttgcactagactgttagccagggaaaacaaagcaagaaaccagtgtctggaaccgaacaggaacagaacaagagcatggttctccttaaatacatacatttaaatacattcaatctgacatgggtatgaaatttgcctgtcaacatttacttttgcaggagagatctaagttgcactaaggtgaatgcagtgaacagactgagcgactgtctggatgcgagcttcagactgtcaagagaagaggcagctcctcctgccacagccgagtggacgccaccctgggaaccagggccaggcctgtctgctctagcagaaccggctggcaggtcagttgggttgaaacaaatagacacagctctccagactggaagtgttttgagcaagtgagcccggtcagctgaagaagcaactggcttcagcagtgtcagcaatatttctgtaggaaaacagataaaaagttgtgaaacatctttgaggttttgaaaaaaacatcataaagcccaccacaaaaacatcaaaattcctgactgttttcaataaagcaaatcacagaggccgcatctggatgagtacattcgatgtggaggtgaacaggcagagggcgccattcctccctccacacaacgcttccaggagccaaggaggagcccagcgaatcctacatgctatttctcgcaggccatcgtctgcaaatggatgatgaatctctccttaatgaccgctctccaaccaacaacatcctagctcaatttcatttctcccaccttcaataaagatgacagaacaattcacccagctgctttttggcagcatccgatccagaaggggccactgcttcctaattcttcctcaaattcatccagtacaaacccttcttctataaaatggccctcctgattttccctaatcagatactcccaaggttctctgggtgtgttctccctggcttcagcaagctagatcatgatgggttttgactcctgggg

SEQ ID NO: 242208 - DNA, 945 bp, Homo Sapiens
  misc_feature (136)..(170): n is a, c, g, or t
cacccaccactggggattgaagatctaaccccgataccatcacactgggaggctgaagctctaaccctgataccatcacactggaggctgaagctctaaccctgataccatcacactggagattgaagatctaacnnnnnnnnnnnnnnnnnnnnnnnnnnnnnnnnnnntgcagtaccatcacactggagattgaagctctaaccccgataccatcacactggagattgaagctctaaccccgataccatcacactggagattgaagctctaaccgcagtaccatcacactggagattgaagctctaaccccgataccatcacactggagattgaagctctaaccccgataccatcacactggagattgaagctctaaccgcagtaccatcacactggagattgaagctctaaccccgataccatcacactggaggttgaagctctaacctcaataccatcatactggaggttgaagctctaacccccggtgtgatggtatttggggagcaacattcagtcataacacatggcaaaggactgctgaaaaagaaaacatgtttcatgctttgtgtcatgtaaagacaaaagagacaactccccaaaactcattctctttctcgctttttttcctttttgaagatcaaggtatgttaagcatatcaacaacagtgatattcagagagtggtaataatatatgatgctaaactgttttggaatgagattcaagcagcagcagaatgtggagaaagaaactacattacttaatcctttccttttcaactaccagtttactaattatttgggtaaaatataaatactagttttaaagttagaaatacactaggaacttactctactgccttctataaaatgaatgctttaggttggagaaggtgaagaaaaagtccttttgaaaagatatctaaagtaaaacacttggc

SEQ ID NO: 242209 - DNA, 1321 bp, Homo Sapiens
ggttaagatagtaaaatttatatgtgttttaaaaatcacaatttaaaagatgcaaaaaaaagaagagtactttgcccatccccccaaagactataatctcaagtcttcaggtagggtaggaaatgtactaccctaatatataaaacacaattaatcaaaaagtaaaaatgaaaatacctctgaaagaatattctcaaatgatattttttaaaaatcacagtttaacactcaactaagtgtctggattgaatgtagacttcaaaaacttactacgtaaacaagctataactttttaactcttcacaaattcctattttcagtgttcataatgaacaaggtttaaaaaagtggaaaggctcccaaaatactgagaacatatatgtatataaatcaaggatgggttcgctcatttcaagctatgtcaagaagtctatgggatgaagcatgtctgttgtgatggatatagtacagaactaactccacggctgagttcttcagagtgagcctctgtaggctcatagtcctattttaaaggaataacctattgacccaatttgctggtgttataagcttggaggaatagcacaatttcaagttcctttcacaggtggagtttctgattagtctgtggttatttgaaacatggtctacacctactgcagaagccagcattattaaaagcatacattttcattgtgcaccataacttttggatttggggtcgtttcatactttttcagaaatactgtcttctaaattaaacagaaaaacatctatgtgaatatagcgatgcaacagttgtgatatgagaccatgtgatggatcaactaggtcagaatatttgtaaaatccagagtggcaaggaataaaaatagagaaacttactaaaaatcttctacaaaatagtgatgtaaaatgtgacgtattaaccaatttctactgtgtcattctagcttgttttcattaaccatagcagaacttctaaaagtgagctctaaaatgtggcaaatttgataataaattaaggaaaaagtcattagtctccaaaaacaagaattgaaaatcatttggcactgaagccagatggcaaagactaaatgctcttcagaaattatgaacaattattcagttacatgagactgacataacagtgtcaagtagaaaaacatttaagaaaacagaaaccattaaatttgggggagagtttaatttggaggaagaagttgattttggggttttttagggctaagttgcttcagctaaaaatatagaactgataataaacaagaatagctctcttcactggcaataatatttccaa

SEQ ID NO: 242210 - DNA, 986 bp, Homo Sapiens
ttggtttcaagtcataaagtcagctaggaacaggccgaggcagggagaactctccactcggaggaggagctggggtcctcttccatcccgtcttcatcctgcctggctgcgtgacctcgggaggcaccatgcaggagctgcatctgctctggtgggcgcttctcctgggcctggctcaggcctgccctgagccctgcgactgtggggaaaagtatggcttccagatcgccgactgtgcctaccgcgacctagaatccgtgccgcctggcttcccggccaatgtgactacactgagcctgtcagccaaccggctgccaggcttgccggagggtgccttcagggaggtgcccctgctgcagtcgctgtggctggcacacaatgagatccgcacggtggccgccggagccctggcctctctgagccatctcaagagcctggacctcagccacaatctcatctctgactttgcctggagcgacctgcacaacctcagtgccctccaattgctcaagatggacagcaacgagctgaccttcatcccccgcgacgccttccgcagcctccgtgctctgcgctcgctgcaactcaaccacaaccgcttgcacacattggccgagggcaccttcaccccgctcaccgcgctgtcccacctgcagatcaacgagaaccccttcgactgcacctgcggcatcgtgtggctcaagacatgggccctgaccacggctgtgtccatcccggagcaagacaacaccgcctgcacctcaccccatgtgctcaagggtacgccgctgagccgcctgccgccactgccatgctcggcgccctcagtgcagctcagctaccaacccagccaggatggtgccgagctgcggcctggttttgtgctgggcactgcactgtgatgtggacgggcagccggcctctcagcttcactggcacatccagatacccagtggcattgtggagatcaccagccccaacgtggg

SEQ ID NO: 242211 - DNA, 1264 bp, Homo Sapiens
  misc_feature (236)..(251): n is a, c, g, or t
  misc_feature (1061)..(1111): n is a, c, g, or t
taaaaacaaatccaaaacttttcagtagggaatatctagttagaagcttcaaatggcaagttaatggaccaactctttatgcaaaaaagccagaactgacaattaacaaatttaatagtaaaaatcaagattgcaatatttagaaataccaaaaagtattggccagaaagaaataacccttccatatcagcctcaatacaatcaggagaaaaagcaacatattttcaaagtgacannnnnnnnnnnnnnnnttaaatactccaaactcctcagggaggaaagcagaggttatctcctcactgcctgaactggataagcacactaagggctttgaagccatttgccttttgcctttgacccatgtggtcagaagtcaggtttgtgtttcaattctaccacctgaagtgtcaccaggagttatttaactggcaaggtgaggaaagggaaacaagaattctttttcctgaatacccatttaagttccttgacaactggaacaaagtcatagagagcaaagggacaatgtaacaaatctacccattttcctagtagacactgaattcagctggtagtcgagggcttttaattaaaacattttattgtttctaagaatgttcacacaatccaagacttcaaaaatgagtctaaagccatggaaacacatttatcaccttcatgcttgttgaaggacaccagcaaaaatcaatgctaaacctatcagcttcatccattaaagcatttgcatagagaaactaacttccattttacaactctttaatgacagggagaatatccaacaaatcgcaagtaaaatagcatagaccacaaggaaagaaactaagacaagtcaaaaatccaccaagtaagaaattcaatacaactggaaaacatactcataggcaccaacattcctcctttggacacctgttccttactgccctcagatgccccaggacagggtaatggctgagcatggaaaaagtaggtaatgggtcacacaaacttggtggtcctgcaccaaactacaaagattagctcaattatagcattgtgctaacagnnnnnnnnnnnnnnnnnnnnnnnnnnnnnnnnnnnnnnnnnnnnnnnnnnntcctacacaaagtttctcgagtacagaggtgaatgtcttctcctcggctatagcctccaccccaaatacaacccaccagttaagagggataacactaaacaatgctgtttagtgtcatgtgcacccatctacatgaccagaaaaatactccaa

SEQ ID NO: 242212 - DNA, 1313 bp, Homo Sapiens
  misc_feature (1140)..(1163): n is a, c, g, or t
cccaaacaaccagatcctatgaatgaaggccagaaaaaggggagagaggtggactcaaatgtgaattttctttctattggtcctcctctcagctgggtgagtcagtcccacgcaagaatggcgacggtcatcctcctgtcaagagggggcggttctttcacacactaccttggagaggaatgtggcttctacatcctcacttcttttagcttcagttccagatttctgaccttcttcctgtgatactgtggagcatgcctagttgactggtagctgagtggaacaaaacttgtagatgtaattcaaagaaaactgattgaaagggtcagttgcattggttaaaaaaatccaagagcctcttattactcatctgttccttagccccaccttagacaggctcagaatttattcctctactaagtcttcagtcactctctgcatgtattcaagctctcagcagtcatacatcaaacaatagtagttgtgtggtacataataattataagctattttgtaagtggctcttgttctaggaaggcacctcagtaagaacaatgatcaaaaagaataaaaagcctgggtgccagaccatcccaggaatgcactaagtgagccagcaaggaagcagcagcttgtctgttccaggaaatgctggctgggtgggagcgggttctcaccttcttcagtgtttggctttagatgatatactctgccaatttagccttagaaataacaagagaatatcactgtctgaaacattagggtattctaaaagaatacagataagaaaattaggatactcttttagaatacctattattttaaacttaagcttggtgaacatctgaaaaaaagccaaaagaagcttaccttaaaagctcaagaaactggatgtgacagaggccaaaataaatatcacttatgccaaccacagcccaaacaaccagatcttatgaaggaaggcctctcatctagatattaggatatataaaagaatatcctaaatttttaatccatattcttttagaatatcctaatttttcttcctaattctaaaagaatatcctaattttttagaccatcctaagtttttggaaagccctctaagtgagttttctcaaagccaaaagtcttgccatnnnnnnnnnnnnnnnnnnnnnnnncctctaacagccctgaaaaaccagccagcacaccaggaatccaccttctccccacgggcttcttctgcatgtgtgtcccccaactctctcatagtcaatggagagaagggaacactgccttcaaaatcaacccaacttttttgtacaaag

SEQ ID NO: 242213 - DNA, 853 bp, Homo Sapiens
attttccctgatatggaaagcgtatgttatataaacattctacaataaacataaaacatgcggaacaaatcataaaactaacatgatttgtaaggtagggaaagacaactagcttaacaccagaaaataaaaaaggtgtgtatgttgcaatttcatgtaaattcatcttctcccaggctctgtgatattctcagagaatgaaatccagagacaacctttgctaactccaggctcctaggaagtcggaccggaaagctggagtattgttatgatttggtgaaaatgtttataatccacttgtacagagagaaacctggtcttattattttaaattttagcttggtgaacatatgaaaaaaagccaaaagaagcttaccttaaaagctaaagaaactggatgtgacagaggccaaaataaacatgaattatgccacctacagcccaaacaaccagatcttatgaatgaaggccagaaaaagggggagagaggtggactcaaatgtgaattttctttctattggtcctcctctcagctgggtgagtcagtcccacgcaagaatggcgacggtcatcctcctgtcaagagggggcggttctttcacacactaccttggagaggaatgtggcttctacatcctcacttcttttagcttcagttccagatttctgaccttcttcctgtgatactgtggagcatgcctagttgactggtagctgagtggaacaaaacttgtagatgtaattcaaagaaaactgattgaaagggtcagttgcattggttaaaaaaatccaagagcctcttattactcatctgttccttagccccaccttagacccaacttttttgtacaaa

SEQ ID NO: 242214 - DNA, 1258 bp, Homo Sapiens
ttgggatggcagagggcaaggcaggcggcgcggccggcctcttcgccaagcaggtgcagaagaagtttagcagggcccaggagaaggtgctgcagaaattggggaaagctgtagaaaccaaagatgaacgatttgaacaaagcgctagcaacttctaccaacaacaggcagaaggccacaagctgtacaaggacctgaagaacttccttagtgcagtcaaagtgatgcatgaaagttcaaaaagagtgtcagaaaccctgcaggagatctacagcagcgagtgggacggtcatgaggagctgaaggccatcgtatgggtaagagtggcttgagttttacaacttattggcacttactcctgtttgcatctcaacctcagcttagcttctctatccaagaaaataggaaaacaaaggagccagttcacactgtgcatttgtgtagcctcagtcactgggtggtaggaagaagctacaactgttaaggtaaaaacaagttttccctaatctgtggatccctctaattttgaccctcttctcctctttaaaacattatgggaagttttacctcctaaagattggttgttttttaaaacaaacttcatgcagttatacactcttaaactttcccatctaagctctggagtccaaggctttgaccttgtgccctgttcttaatctctgaatgtatgttcagactcccatagagcagttccttggggtaggggctgtctcttttcttcctctgactagtccccagaatccaacatggtattctaaatacggtgctacaaaaaaggtttttgcagggagaatttgggtatttccctggtaggcagttgttgttgggaagtggagccttcaccagcctctgactctatcctacagaataatgatctcctttgggaagactacgaggagaaactggctgaccaggctgtaaggaccatggaaatctatgttgcccagttcagtgaaattaaggagagaattgccaagcggggtcggaaactcgtggactatgacagtgcccgacaccacctggaggcagtgcagaatgccaagaagaaagatgaggccaagactgccaaggcagaggaagagttcaacaaagcccagactgtgtttgaagatctgaaccaagaactactagaggagctgcctattctttataatagtcgtattggctgctatgtgaccatcttccaaacatttccaacttgagggatgtcttctacagggaaatgagcaagctgaac

SEQ ID NO: 242215 - DNA, 1060 bp, Homo Sapiens
aggggagagagaaggctaggtggtcgattacacaagcatcccatgtaatgcccccatgccccaaaggtacctgttttgccatggcaatgggaggggctggaggaacagcatgttgcatgtagggatggtccggtccctgccatggggagtggggagaagaggagaggttctgtggcattttgagccttgcaaagatttggactgaaaagctcagagactcaggtaggtcagcctgtcagggacaagtacactccaccggctctcttctcgctttgcagccctagcttacgcgtgtcagccccaggtttgctccagcgattcacaagcagaatataacacaagaaaaacaattcatatcccttagggaaaaaagaggatcaattcatcactcaatatataatacagccaaaatgagctgccaaaacaagcacacacacaaatactgtgaacagaaaaatacaagaaaatgactaagctgggagtcttgacggggtatggacattgcttaaagcacttatcagtccccagaaaaaccaaaccaaaaacattttttaaaaattcagaaactcatgtaccccctgggaaactggtgttggtaacaaagggcagggggtggggagagaaaagagaatcactgctccctttttgctcgccagtgtgagtggagtcctcaggtcaccggcatgtacacaagtaccagacaaggaggaccaagtccctctgctggtggcctcctaaaaggcaaggcttgagttttggctgatgagcagttctctccgttaccaatccctgccaaccagcactaccatggctgaattgatctaccgttttcctgagtaaactgtaactggctacagtttcggtaacatggaaaagaactcagctactacagccaactgcaatacttcaggaaccccctccatccctgggctcctcactcctagtgcatctgattgaggaatctgataacttgctgcagtctggtctgttagcctcatttgcaaagaaaggtgccccaacttttttgtacaaagttggctataataaaaaagcattgctc

SEQ ID NO: 242216 - DNA, 1022 bp, Homo Sapiens
ttggcatcagtcggttggggggcttcgaattttgttgttggtttgcattgtaaacagtcctgtggtatcacagtgattagctatgtcttacactttgggatcacattgtaaccacggcctccgagtaagtgtggtctcttcttatgacttcctggcaagaggtgtctcctgcagaaaggaagaagcgcattgaactagtggatgctgctttgttttcttggtcctgaaactttccattttctgtaaaggtgggaagggcatgggaggatgggaaggtgggatccgcgtgcccgggatcttccactggccgggggtgctcccggccggccgagtgattggagagcccacgagcctgatggacgtgttccctactgtggtccagctggtgggtggcgaggtgccccaggacagggtgattgatggccacagcctggtacccttgctgcagggagctgaggcacgctcggcacatgagttcctgtttcattactgtgggcagcatcttcacgcagcacgctggcaccagaaggacagtggaagcgtctggaaggttcattacacgaccccgcagttccaccccgagggagcgggggcctgctacggccgaggcgtctgcccatgctccggggagggcgtgacccatcacagaccccctttgctctttgacctctccagggacccctccgaggcacggcccctgacccccgactccgagcccctgtaccacgccgtgatagcaagggtaggtgccgcggtgtcggagcatcggcagaccctgagtcctgtgccccagcagttttccacgagcaacatcctgtggaagccgtggctgcagccgtgctgcggacatttcccgttctgttcatgccacgaggatggggatggcaccccctgaatgccaggactgtgagagaggatccaggagagcctgactgcgttgcaaacaaaattctccaagcttggttctatcttcagcttccctttttgcaaggaacatgccctggactgagagtgggtcccca

SEQ ID NO: 242217 - DNA, 1104 bp, Homo Sapiens
catcccaggggttagaagatggtgctttgaaagaacaattgctcctacaaccatcaaatcaaacttttggaagctgataaagaccttaaaaatcattcaatctcctcttctttctccttctgtagatgaggaatctgagggtctaagaggagacatgagctgctgagattgactgagctaggcagggccagacatagactccacgggcaggcccgcagtctttccaccaggtcaggccactccctcgcccagggctcaagattccttttagagttcaacagagcagctcccgagaacagaccagccctcaagactcaaatttcagtggtttccagttctttctccctgcactcagctacctatttattttgagactggctgaatcacccgaagaatagaacgggtttctctgaagctgctcccggcagcatgtcagcaaatgaacaggacagcgagctggcctctggagccttggaagattctcacctccaagcagctgcagtttttgactcgtcctgggaaactggcactgagactcaggggtctaacatttcacctccctgaaatcaaatccagaaatctcaggcgagcagcgtatataaaaagccacaggggaaaaaaggaatacggactcagcaactcttaggtgctctgagcctcttcccaagccttctggttctgtgagcatttcattgaaagaaaatggaataacagagttttagaagaaaaactgtatttggtcttgcaagagaaaagtatattcatataaaactcagttctcaactatttgccaaggttacttcttttgtttccaacatttaaaaagggtatctagttgtaggtggagaaaacattaagatatgtgaatggaaaaaggtaaaatttctaaaagtatggattcacagtggggtctgatttaaatgtttaaattttttctctttaatttcttctcaccaatcctgaaagacacgacgagataatatctactttcaagaaatcaattaattttatttaaaatccctaagattttaatatagtacatgcaaaacaatagattttctattttttaattatctaattatatttatattatctaattgccaa

SEQ ID NO: 242218 - DNA, 917 bp, Homo Sapiens
ttgggccagagaagacaagggcagaaagcaccatgagtgggggcccaatgggaggaaggcccgggggccgaggagcaccagcggttcagcagaacataccctccaccctcctccaggaccacgagaaccagcgactctttgagatgcttggacgaaaatgcttgacgctggccactgcagttgttcagctgtacctggcgctgccccctggagctgagcactggaccaaggagcattgtggggctgtgtgcttcgtgaaggataacccccagaagtcctacttcatccgcctttacggccttcaggctggtcggctgctctgggaacaggagctgtactcacagcttgtctactccacccccacccccttcttccacaccttcgctggagatgactgccaagcggggctgaactttgcagacgaggacgaggcccaggccttccgggccctcgtgcaggagaagatacaaaaaaggaatcagaggcaaagtggagacagacgccagctacccccaccaccaacaccagccaatgaagagagaagaggagggctcccacccctgcccctgcatccaggtggagaccaaggaggccctccagtgggtccgctctccctggggctggcgacagtggacatccagaaccctgacatcacgagttcacgataccgtgggctcccagcacctggacctagcccagctgataagaaacgctcagggaagaagaagatcagcaaagctgatattggtgcacccagtggattcaagcatgtcagccacgtggggtgggacccccagaatggatttgacgtgaacaacctcgacccagatctgcggagtctgttctccagggcaggaatcagcgaggcccagctcaccgacgccgagacctctaaacttatctacgacttcattgag

SEQ ID NO: 242219 - DNA, 1539 bp, Homo Sapiens
  misc_feature (1038)..(1115): n is a, c, g, or t
ctttgtacaaaaaagttggcaaattcacattcctttctaatccaagcaataacccaagcaaaacttcagatgcaccttatgattctgcagatgactggtctgagcatattagctcttctgggaaaaagtactactacaattgtcgaacagaagtttcacaatgggaaaaaccaaaagagtggcttgaaagagaacagagacaaaaagaagcaaacaagatggcagtcaacagcttcccaaaagatagggattacagaagagaggtgatgcaagcaacagccactagtgggtttgccagtggaatggaagacaagcattccagtgatgccagtagtttgctcccacagaatattttgtctcaaacaagcagacacaatgacagagactacagactgccaagagcagagactcacagtagttctacgccagtacagcaccccatcaaaccagtggttcatccaactgctaccccaagcactgttccttctagtccatttacgctacagtctgatcaccagccaaagaaatcatttgatgctaatggagcatctactttatcaaaactgcctacacccacatcttctgtccctgcacagaaaacagaaagaaaagaatctacatcaggagacaaacccgtatcacattcttgcacaactccttccacgtcttctgcctctggactgaaccccacatctgcacctccaacatctgcttcagcggtccctgtttctcctgttccacagtcgccaatacctcccttacttcaggacccaaatcttcttagacaattgcttcctgctttgcaagccacgctgcagcttaataattctaatgtggacatatctaaaataaatgaagcagctgtgacacaagcctcactgcagtctataattcataagtttcttactgctggaccatctgctttcaacataacgtctctgatttctcaagctgctcagctctctacacaaggtattcttactcatcttagatatctctagaatggcatcttgattttgttttggaattaatagcccnnnnnnnnnnnnnnnnnnnnnnnnnnnnnnnnnnnnnnnnnnnnnnnnnnnnnnnnnnnnnnnnnnnnnnnnnnnnnngtaacactggcatatacagtagtatttttatttcctttctttttagatgaagcaagctttgacatttgtcttaaggtattgccatcaaatctgtaattatttaagacagtatttaattcagactttgttattaatgagtttttttatgccaaagctgaaagtaaactatgatgtgccatatatctttgtgaaacattgcatgtatttgaagagttgaagtttggttcagattgacgttagatgttttttgactggataatatggaaatgctcattttctgccttgaattagatatccctcttcatgaaatatccaaatggagagagatacacataggagcaaatgggaagtgaaagggtcactttgtcagaaagctgataaacagcaggaatgccttgtctggaatggaagtataatggtgcaa

SEQ ID NO: 242220 - DNA, 1164 bp, Homo Sapiens
  misc_feature (140)..(201): n is a, c, g, or t
  misc_feature (852)..(876): n is a, c, g, or t
ttggcccagtcacagtggggtttttttgtctttctattcagcaaaagttaatattcagatgttggtcttggtcatttgccaactaattttaaagtaaaaggcactgcacataatttgcataaagggccccatgagggtgnnnnnnnnnnnnnnnnnnnnnnnnnnnnnnnnnnnnnnnnnnnnnnnnnnnnnnnnnnnnnngggtgggagggtgggaaatttgggttggtttaagtcctctaaacacacttgggcacggaaatgcagtactgtaaggaagagggacctccagcttccacaaacaccatcttcagctgtatgaaagggacggttgtggtgaagtttgtcaggcacggtaagcatgctgagtggcggggatcagaactctcctatctgaacctactgaggagcaaagcagcaattacatgggatcctgtggctctcccgttgcagaggccacaggaagataggatggaacgtgactggtctcctaaccaaggtgcactgagaagcaatcaacgggtcggtcgtggccagtcctggggaggtctgagtggtggtctttgggataacctttggccttatggatttggactcgaaattagaagagcctaccatttcagatgcaatcacttttggacatgcttttgcagacagtccttaatgctgaaaacacagagaatgggtaattcaagaggcctttcttttaaaatagacttttgtgacccactaattgtaaggtattgcaaggtcactttgcgtgtgtcataaagttgacttccttattggttgaaggtcacagaagtagtggtttgctttgatggaaatagctacagctgtgtcccttcctgnnnnnnnnnnnnnnnnnnnnnnnnnctcggcacgtggtatctccaccatttcttctgcacaaagatgtcttctgttcatcctgaacatttttaaaaaatgcagaattttatgtgactgcttttttgcctcacaattatgctgtgaattttacaaaaatttattttcttttttgataatttattgtaccaaagctgtttttatagcacatagatgtctgtaaccaataatgtagcagttctgcactttgacacaaggtgtaactagaccatttttaaatgtcagttgaaaattatggctgtactattgcttaaa

SEQ ID NO: 242221 - DNA, 946 bp, Homo Sapiens
gaaatatactgcccccatcgctgcagactgacaacttaaagggatctgttgagtacaaagactagtttcctaactgggtcatgcggccccttcctgtccacagacccaattgcaaaatatacagtgaccacagcagcagcagcatttccagaccttttcagtctcctccccttaggagaccttaaagcccagaaccaaacagagttcctaccaatgctgcaccccttgaaaggccagtctttttgccccctgccaggccctcagcccctcaatcccattaactttcccaatcacctgcctactgtccccagagatgcccagggtcaaccaggaataacagggaggggaggagtttagtggacaagtgacaaggacaaagcctcccaactttttacgctggtcaggctttctttggagattcctttgcaccttctttcatggctgcacactgtcccaccaccaccacaaccacggccgctcccaggaaacttacttacaagctttggcaggaactggttggaagctgatgccaatcccagggtcagggcagggtggtgtagcctatccctggatctgtcccactgccaaaggcctggccccaggtctaggtgctgtttgctaaatcagccagagaggaagtaccacagagcagaggacagggaagacgcatcttcctgagggtggggctgaaacccctacccactcccttcactaggaggggggatagtctgttttccagggcaacccagaaggcaggaggactccttagaggtggggccagatgagaagagaccaggaaggagcagtgagagaggaaagaggggtgtggggagtgagaaggctgggtgtggcctcaagatgcaggtctagactggataattgaacaaagtagtgaatggtatcatataggagaaggaggtatggtagccagagaagggaaatccaa

SEQ ID NO: 242222 - DNA, 1583 bp, Homo Sapiens
aaaagaggcaaatgattaaaccaacaacatggcccagcaccattataccaagtaatgttattgagtttacaaactgaagttctgtaaaattgttctagatcgacaccccgaggagcaacttgcattattatatcaaccttttcccctcccgtaaaccgtccccaaacctgtgacttttccttgctgagaagctatctcccaggttctggttactaatgtttgttttgacagcttaaaaggcaaacccccttaattactagcaagcaatcaagttcctgggaagcctgatttttattagaactaaactctcttagctgatatactgtcttttgctactccttgtatattttataagttcaattgagaaagctttctgattcagattttcagctcactgaacagttgcagcattgtaagaccacatgttgagggtcccctaataaatattttatgagccaagacgaggtgttttcctgggggacgattcttcttcttcatcttcctcttcatcatctggataatccactaagccaaccaaacttccctattgaagaatttaaaaattttttctttaaacatatataacaaaaaagagcttttagtacaaatacaatcacttgtaaaaatatcagaaatcgtttttctaaatcatatcagaaattaacatttgaatttgataaaggaactgcttgaaattatgaacgtttgagtagtaattggtagcacttgcagtaacccttaacttttctatctggttcttggattattaatgatacttcaaaactcaattctgcaaaattttactgtgggaaaatgtctacttttccaaacagtagggataacaattaataacatttggaagctggaaaggacattggagatgaactggttcatttctctaatttcattaccacaagaaagccccttgtagtctttgttcatcttgtgtatatttcatcactaagtacacattattttcattgtgcttttgaagtacagcttaaatggctggagataaacacatgaaatgattcctataaaataataagtaaaacatttagggctagctcgctgaccaaaagaacaataaggatgaggtaattcgtggtcttggcctttgatgagtaacagacctctgtgaaaatcctagaaaaactctgggtactctccagaaaattacacatccacagggtttcattcattttgagccaatcccatgaaaacttatgtcctataggttaagagggctactgtaaacactgtatttagttcaaacccttcagacctctaggagataaaacaaatacaactgaagtaactcatacttcatacctgaagtactgaggtatcgggttttaccagaatgtaaccaaatcagtataatattaaccaaccaaaaaaaggcctctgggcagctagaaacagttatcagaaagacttatatacctgtctgagaatctgtttctcaacttaatcacacacacatcttaagtctggatatgcaagaagcaatatggctaaattgttaaaaataggctaactgtaggtctgatgtcaaattctaatgacaccacgttttatgt

SEQ ID NO: 242223 - DNA, 1086 bp, Homo Sapiens
ttggggatgatttagccgccaaaaaagtgcctgcaccatttaagccagtcattcgagatgaattagatgtgagtaactttgcagaagagttcacagaaatggatcccacttattctcccgcagccctgccccagagttctgagaagctgtttcagggctattcctttgttgctccttccatcctattcaagcgtaatgcagctgtcatagaccctcttcagtttcacatgggagttgaacgtcctggagtgacaaatgttgccaggagtgcaatgatgaaggactctccattctatcaacactatgacctagatttgaaggacaaacccctgggagaaggtagtttttcaatttgtcgaaagtgtgtgcataaaaaaagtaaccaagcttttgcagtcaaaataatcagcaaaaggatggaagccaatactcaaaaggaaataacagctctgaaactctgtgaaggacaccccaatattgtgaagttgcatgaagtttttcatgatcagcttcacacgtttctagtgatggaacttctgaatggaggagaactgtttgagcgcattaagaaaaagaagcacttcagtgagacggaagccagctacatcatgaggaagcttgtttcagctgtaagccacatgcatgatgttggagtggtgcacagggatctgaaacctgagaatttattgttcaccgatgaaaatgacaatttggaaattaaaataattgattttggatttgcacggctaaagccaccggataatcagcccctgaagactccatgcttcacccttcattatgccgccccagagctcttgaatcagaacggctacgatgagtcctgtgacctgtggagcttgggcgtcattttgtacacaatgttgtcaggacaggttcccttccaatctcatgaccgaagtttgacgtgtaccagcgcggtggaaatcatgaagaaaattaaaaagggagatttctcctttgaaggagaagcctggaagaatgtatcccaagagggctaaagatttgatcccaaggacttctcacagtagatccaaacaaaaggcttaaaatgtctggcttgaggta

SEQ ID NO: 242224 - DNA, 961 bp, Homo Sapiens
ttggccacgtgtcctgctttactgcaagcgctcgctgcaggagtgggtctgaccacccagcgctcctgctaacggtgctcagggggcgcctgtggttctgagatggctcccaggggctccctccgcccccaggtaggggcccctctcagccctcacacaccctgtctgccccgccctcattatttatgtccaggtgtttgttttgttttgtttttggcaccttacttgaccatttgtttctgtttccccgactggggcagggtgtttagaattttctaaatgtagttctgctccagacagggaattaggcccccatcatcctctggcttggccacagccaggggagcagaggggcagaggcccacattggaagagcagcacctcctcagcctgaaccccagggctgtaactgccaggctctctttgcccagttggagactgtctggcccccctggtcccctccttcccaagtgagtctctctgggccttaggaagagccttccacccaggggcagccccaggccaaaggggacctggaagggaggtgggccgtggcccttgagtccccattgaggcttggttccttcccaatccagtggacttcgcagtccacttctgacagcctcagtgaccctggctccttgtgccagagaacccagcccacccccggcagcagcccccagctcccacctccccttgggcccacacctccttccctctctggagaaagggccctgggcctgcctcaccacggaccaaagggagtctgccagggcccctctccccagggaagcagcagcctcgcccctggcagagatgcctccctgagctagaaccctctgttccttccctgtgcctcctccctccctctccgactcacaccactagcctcaggggtctgagcaccagctccttagggcttcagctgccaatgtcctgagccccagggatagggggttgg

SEQ ID NO: 242225 - DNA, 1180 bp, Homo Sapiens
taaatggatgcctagccacgttactgttaagaaacaaatgtggcctggagcagacccatcagtccatgttttatgaacagactgaatgagtccatagcatccaccattgtttattacaatgtaggtttaatagttggccttccactcagctcagattcctaatagcaagcagcgtgcttatctgtcttcatatcaccaaggattggaaagcagtagtaagccttgacatacagcaggtacttaataaatgcttaccaaaagactgaaaaaggacaaaaatagggaaaagtatatttactagacttccataatccatacttactttaaattcaatctagaaataacatgactcatattaggcaatatactttgaagatctgtacaacatagtaatcacagcagggtcttgctaactcacaaatttagcatacatgctgcaaaaacatctctcctggagtcccaagggctttcaaatgttccaccaggggcagtcaagactagattcacggtgctctcttcatcatgcgcacaaaatgtgttttcccataacaccatattatcacaagtctatgaacaattctggttagctaaggtaggcagtatagaactctttacaaataacagtatttcaattatgccatgtaagtaaacaatttgctgtgaactgtcctgtgtatctaatcatttaatacattgcttctataagaaaatactatttgttaaattttagtcataatttcattgtttctcatcatagactgcagatgcaaacatttaatggtgaacaaaatgtttatctcaatttttctttgacatttttatgctttgaaaattcagaatggataaaaacaaatgaagtacaaaatatttcagatttacatagtgataaacaagaaagcacttatcaggaggacttacaaatggaagtacactctagaaccatcatctatcatggctaaatgtgagattagcacagctgtattatttgtacattgcaaacacctagaaagagatgggaaacaaaatcccaggagttttgtgtgtggagtcctgggttttccaacagacatcattccagcattctgagattagggtgattggggatcattctggagttggaatgttcaacaaaagtgccaacttttttgtacaaagttggctattatagaaaagcattgct

SEQ ID NO: 242226 - DNA, 1669 bp, Homo Sapiens
acaaaattcgtaataacctttatccattcttagaaaactttaatatatagataaaaataggacaattttcataggtcctacatgaagatgagtatgtctgttccaagggcttgcatagagcgcaaatgtggttataatatagaacaactagacattaatatttttaggattacaaaagcatggaaaccataaaatgggcacattttacttgtttatgccaaaacacaaatttccaaaccaacctgtataactaaaacagggaaaaaattaagttacagacttacaataacatttcatgaattgtaatatttacaacatgttagtaagagtctctcttaacatacagctgatagcttttttctttaatccttgctaaaatttccttttatttcaaatcaaacactaaagcattctcaaaggtcttcaaatatgtattttaaaactatttaatccacataacaggtgactctatgccaggagcagagcaatggctgattctactacatatgtaagttgtaggcttttttaaaaatctttcaaaaaatgtatgatgcaaaaagcttgacacaagtccattcaattttaagtgttgtaatcctttaaagactgcatatagggaaacaaacacatagaactaggaaaagaatcccttgtgctcaaacaacaaaaggtggttatggaagaactatgcttagaaaaccaagtttctacaaatcatttactagcaatactttaaataaaaataatgctccctttgtaagcaagctaaaataggaactgtacatataacctttttatggtattaaaaagatgaacttagctggctaatagtgagctacacaaaagaattatgttccagtattgcaaggaagacctaaaaggtatagaagcgtaatgccagagtatctataatgttaattttttcttaatcaagtaattaatacccaatcagaactatatttaaacattttaagctagttttcttagacattgaagattttgctgttttgtggtaataaataatgttacgatcatacaattttaagatgacagaaaaatcataaaatgtatagtgaccgtactgattcatatcagtctttaaaggtgtaattccagatatgcaaaaaacaaagagaaggtaactttagcatgtaataagcactgtttgccgctttacttccagttatctgcacgaaagtgaaaacacatactgtaactttcaaaaagacagtgaaaataacacatagccacccttccctctgacaagggtgggaagcacagcacattttaactttatcactcagcgctacatggtattggactggtacatcaaggtttgttaggttttgttttcagcaacattaacataatatgacgttaacatataaaaatatttctggtgttttgatttgctgttcagccacaatccattcccaatagtgcagcttggggcactagctagggttcaatatacaaataaaagtggctgacacagagttctgatgtcaccagatgcttaagatctcattcattaatactgtgactccagacaaatatttacatgcctgcatgcgttaaaaccagaaagacatctttctgaccaacagggtgacaaaacatattttctaaaattttcattttcctaaactctagtatactactgcaccaa

SEQ ID NO: 242227 - DNA, 901 bp, Homo Sapiens
aaaaccaacgaacggaaagacgtgccttgaaacatgcgttgctttcagtggaacatctttaacaaacaacagatgtttaatgaggtttgcttggaaaatttcatgccaacaggaagctaacccttttctagaaaacgttctccaagctcccgtcctaatgctgtggcactttctctgacatactgagaacactctggggtgggggtgtgtgtatgcaaatgtatagacactgttcattaaggcttatataaattaaaaaagtggtccaaagaatatcacatttttccccagttttaaaatctaaagtacaaagtggagtttataaggatttgttttttaaaaacacatctcagtcctgaaattggcagttctgacacgacttatcaggatgtaccccaatgcctgaatgacagaggtagtgatcttcggggtcaggggaggtcaggaagggagcaggcgggcagttaccctgcacagcggcaccctctactggcgaggcagcaaatgataccagacagcacctcccacctctccctcttaagtacaggggtgcagggccagggtaaggaggagacagaagaaggagaactagcacagtgtcacgtaggggctgcagaactgattaacccaggctctctttatacgtttttaaatttcagaggtgagtacaagactctcagaaatacaggagtcgactgttaatgggtaactgttagaataattaaaaagttgctgtgtatgaacctggctttcgggaggaccagtgtggatctggcaagatagcagcggtgcacactctctatgcaacaatgggagatgtagaaaatggttcaaatgttttgcatgctgtttctcagaatctgtcactgtgaggccgggtgcggtggctcatgcttgccaa

SEQ ID NO: 242228 - DNA, 1001 bp, Homo Sapiens
ggaagtaggggttgcctgaaagatgaacttgaatttgcaggctgctctggggtgttaaagctccttccacctcccaaatgatcatgtacctcagcatgtcttcatcttggccactgatcataggtgacagctgggggtggtttcgaaaggcagtaacccagaaacctgggatattctggataatgaaacttctgcgctgcatatggagccttcgcatgcggccaaacttgcgctcaagctgaaggaaggccctgtcagcctgggcatttacgtttgacaactcttgatcgatggcctccagtgagtccatgcagttattgatcttcggggccctgggccgtgtctcctctttcacccctcctgccacctttttttccttctgcactaccttcttttcctccatcgccgcccctgcttctccctccttttccactgctgccgagatggcgcgttttttagtcgtcacttccttggccttcttccccggtatcatctgagaccccaagccccctgcgccacaggcttctagagccttctgcccagcagggccacggggctctccaagctgacagccatttttctggctgctgtcagcagcctcggcggcagaggctgcttccagacctttcgtagaaggtggagcatcctcctgcccggctttggtcgctgcaccgccgcgactcccggcaactgggacgcggagcgcggggccacagtcgacaggatcctgggatgcacccccctccgcaacggtctccaggctgcccccacctgtgttcgccatcacctgtgtcgcctcggtttcttcacggagcccttggcactggtctaggtccggatctcctgaggcatggtcgggagcagccaggccgccggtttgggcgagagggagcttgttgcccccatccaggccgctcattttggaagaagtcagactagtgggagagggagagttccttgtcctccgcagcggccgagctctgcccgaaacgtctagccaa

SEQ ID NO: 242229 - DNA, 1121 bp, Homo Sapiens
tccattgcaaagacagcagttacgatcaggattacttaacactttgaatgttcaaaccattcattatacaactgataccaaaaaagaattacaagtagtaaaatggagaagtaaaataatcattataagtcactatatgcagatgatataattttctatctgcaaagccaagagaatgagcaaagcaaatgtggtagtttagtaaggcagctggcttctaattcaacaaacgaagcaaattacttttttgcatacacgctaatcaggtactaaatattatacaaaaattaaaaacacttaatataggtactaaaattccatattcttttatgtactttatctaccagattgagatgtaagtttaagaagcctatttttagtaactgtgtcacatacatacatacacacatgtattttatacattataggttttctcatttaaaaatctcaaaaaaggtgaatgattgatacaaaatctatattatctgtttgtataagaactctttatagtattcgcattcttctctgtatggtaatatacatactttcatatatcctaatttgtgatatgtttggatggtgttgattccaagcatatctttgtaaaattcacaaagttatacacaatgaaagaatcttaaggaagtataaatttatataacatacaagaatttcttaggagctattttttttctaatatattcaagatgattctctaaattctttgtgacctgagggctccccatctttgaacatgtacctcagccacagtagcactgacagagaggcctgtttcagcttcttgtttccaagaatcagaacacatgagtgacatgaaggataagccattcccatcacctgggaaagaataattagattttcctccaacctttcagaggtccaaactgatatgaaaaaagacagagagaaaatggcatagagtaggaagaaagtgatcacacttttaactcctctgtgggctttggtgctggcgtctccggatattttgacagtgtgctgcatcttcttgcgatgtttccacatggagaagatgaggagaagaaacattgccagggacaaagtaaagggtatgaaaatgaacacagtgctggttaatccaa

SEQ ID NO: 242230 - DNA, 1104 bp, Homo Sapiens
  misc_feature (395)..(443): n is a, c, g, or t
ttctagaagtaactcttaaaggtttatactgtaagaatttccaaaagacaagttcctattcatgtttttctcctgttcgtacaatataccaacacttacactttctgtcgtgagaagctgcacttaataattatcatgtctctggcgttaaagacaaaagaagaatgaatatgacttctgaaatgtgggttctttcacaaaacatgattttgctcaatgggtttaataaatcataagtatttttaattattattatccaaaggttgtgacatcctaggataggtttatttaacttctatataatagaatgaattacaaaattcaaactcaacctcaatttacttatcttttaaaaagacaaattcgttattccatctgttattataataataagnnnnnnnnnnnnnnnnnnnnnnnnnnnnnnnnnnnnnnnnnnnnnnnnnatgtaaagtgttgatctccccatctggtacatgtgataaaaattcaataaatgctatagttaattgaaatacatgtatgtattcaaaacacacaaacacacaaatgcaacaataaaataatgaccagaactcgctgtattttgtgagtattcttcctataaaagtggttttattgaccgtatcataacacgcacatacatttatcatttcatatgagtgaaataacaatgttgaacacagttggtactcaataactggtaaacaaactgctaaagttgttggatttttgtatcaattaatttgaacatgcatcacggtattcagaaaaagaatataattcaattggttaaatgtgccatcactaattttcctaacattatgatttgacaaaaatgttatttactattttacaattataattaatactacattgagttacatgcatctttgaacacctcctattatatccttataggtaaatatctaaaactaaaattgttggtcaaaagtgctaatttccatcttacatatattttctactaccttcctgaaagattttaacatatcaggagttgtaaattctccccaccttgttaacacatataatctgttaatctgataggtgaaaaaaggcaaataattgccaacttttttgtacaaa

SEQ ID NO: 242231 - DNA, 1276 bp, Homo Sapiens
ttggatcctttttaacctgactcatcgagtttatttaatgaatccttttagtgtcaactttgaaaatgtaaatgccacaaatgccatcatgacctggaaggtgcactccataaggaataatttcacatatttgtgtcagattgaactccatggtgaaggaaaaatgatgcaatacaatgtttccatcaaggtgaacggtgagtacttcttaagtgaactggaacctgccacagagtacatggcgcgagtacggtgtgctgatgccagccacttctggaaatggagtgaatggagtggtcagaacttcaccacacttgaagctgctccctcagaggcccctgatgtctggagaattgtgagcttggagccaggaaatcatactgtgaccttattctggaagccattatcaaaactgcatgccaatggaaagatcctgttctataatgtagttgtagaaaacctagacaaaccatccagttcagagctccattccattccagcaccagccaacagcacaaaactaatccttgacaggtgttcctaccaaatctgcgtcatagccaacaacagtgtgggtgcttctcctgcttctgtaatagtcatctctgcagaccccaaaaacaaagaggttgaggaagaaagaattgcaggcacagagggtggattctctctgtcttggaaaccccaacctggagatgttataggctatgttgtggactggtgtgaccatacccaggatgtgctcggtgatttccagtggaagaatgtaggtcccaataccacaagcacagtcattagcacagatgcttttaggccaggagttcgatatgacttcagaatttatgggttatctacaaaaaggattgcttgtttattagagaaaaaaacaggatactctcaggaacttgctccttcagacaaccctcacgtgctggtggatacattgacatcccactccttcactctgagttggaaagattactctactgaatctcaacctggttttatacaagggtaccatgtctatctgaaatccaaggcgaggcagtgccacccacgatttgaaaaggcagttctttcagatggttcagaatgttgcaaatacaaaattgacaacccggaagaaaacgcattgattgtggacaacctaaagccagaatccttctatgagtttttcatcactccattcactagtgctggtgaagccccagtgctacgttcacgaaatcacgactccggatgaacactcctcgatgctgattcatatcctactgcc

SEQ ID NO: 242232 - DNA, 1317 bp, Homo Sapiens
  misc_feature (235)..(359): n is a, c, g, or t
ttggattttattttaaagaatctgagaataaaagcctcatttttcctcctccattaagatttttaattaaattaagttaactgattaatttattttttagagatagggtcttcccttgttactgaggccagagtgcagtggtgtgatcacagcctcaaactcctgagattaagcaatcccccaagtagctgggactgattattggtgtgtgtcaccaccctggctaattttcttnnnnnnnnnnnnnnnnnnnnnnnnnnnnnnnnnnnnnnnnnnnnnnnnnnnnnnnnnnnnnnnnnnnnnnnnnnnnnnnnnnnnnnnnnnnnnnnnnnnnnnnnnnnnnnnnnnnnnnnnnnnnncccattgagttttaaaacctccctaatgacagatataacagttggagaattctgttaaggtttaatgacagtattttatatcatgcccagatggagctaagcaaaataagtagatttaactgtgtttatactaagttgcacagccagttttggaatctgaaaagcatttaataaattgctgcctttattctgtccatttcattattgtttatagttattaaatttaagaataaccaggggttactataaggagatatatttataatgtgttaaatatgatatatcttaaagaagatggttaaactaaatttaaaatatttcaatatataaaaatggctcttgaagtccctatcttaaatgaaaaaatttttatatatcaaatctgtctttcatactctcagaatggcacagagaagacataaaagagtaagaacatggactcgtcacataaacatttttaataaagattacatctttgtacctgtaaatgagtcgtctcactggtatctcgcagtcatttgttttccatggttagaagaagctgtgtatgaagattttccacaaactgtatcccagcagtcccaggctcagcagtcccaaaatgacaacaaaacaatagataatgatctacgtactacttcgacactgtctttgagtgcagaggattcccaaagtaccgagtcgaatatgtcagtaccaaagaaaatgtgtaaaaggccatgtattcttatactagactccttgaaagctgcttctgtacaaaacacagttcagaatttacgagagtatttagaggtagagtgggaagttaaactaaaaactcatcgtcaattcagcaaaacaaacatggtggatctatgccctaaagttcctaaacaggacaatagcagtgattgtggagtatatttattgcagtatgtgaaagcttcttcaagatcctattgttaactttgaactt

SEQ ID NO: 242233 - DNA, 1563 bp, Homo Sapiens
  misc_feature (398)..(418): n is a, c, g, or t
  misc_feature (1318)..(1334): n is a, c, g, or t
gatttaaaatagctcttttgctatatggacttcttccattataaacttcagtaaagtaagttgtaattttgtaataagcttataaaggcaaaatttgacaagaaccttgagacttctgtattaaaaaataaggattaaacattgttttcttaatgtatacagtccatacttataagggaaacaagaattgtcttcttatataatcataatgaataagtgtcccaaataacacatatccatttagattttgaaacgtaggttttaaaaaaacttggtcattttctttaaattatttcaaaccctcttctaggattttagctgaaattatattctttcaataaatatttagaatatagtcttattggggttctttaatgatttcttgaacatcttttctnnnnnnnnnnnnnnnnnnnnncatgattggggatgtataaagtggatatactgaaaatgctaataacaatttaaccatactatcactgcttttttccctgattgtgcctggtaatctagtctatcatgaagtaattagtacatgattccttctcagatgaattccaaagctcaacagtgaatttgagaaagaagaaacaaattttctatacagaattcccagttatttatgtagatacttctctgccctaaagaaggggaattatgactcctcactcctgcatgtagtgacttccttccaaaaatgacagcatggaaagggcaggaagaactttagagtgacaaacgctacctcagccaggttatcaaggtccctgtcagcattcacaaatcatgttgacagtacgtacccttgatatgacctgatgaaaatggcactttacttctgtaatcatctcctcaaaacccacaatcccagtctaatcatgaaaaaaatacccaacaaactccaagagaggagcatgctacaatttatctgacagtactcttcaaagctgtcaatgtcatcaaaaataaggaaagtctaagaaactgtcacaggcaagaggagcctaaggagacattccaactcaatatagtgtggtattctgaataggatcttgatgtggaaaatggatattaggagaaaactaagaaaatctgaataaagtatggaatatcaatattggttcactaattggggcagatgtaccatagtaacgtaagatgttagtaacaggggtagatgggaactctctgtactatctttgcaatttttctgtaaatctaaaacttctaaaatacaaagtcaattattttaaaaagtaaatttgagatgatgatatgaagcattttgatagagaattattagttaaaaaaagannnnnnnnnnnnnnnnngtcaggacggtttatgttgtatttggctttcttggggtggacccctaaatagcaaaggcatacagagagactgaaaactcgttagagtgtctcatttgtaaacagaagtcattaacttcacattgtaattcagcacttcctatatttcactgaatgaaaggtaagtgtatatttttatactttttggaaaacatggctatagtgctttatataagcaaattaaatccaa

SEQ ID NO: 242234 - DNA, 1421 bp, Homo Sapiens
  misc_feature (393)..(413): n is a, c, g, or t
  misc_feature (1313)..(1330): n is a, c, g, or t
aaaacagctcctttgctatatggacttcttccattataaacttcagtaaagtaagttgtaattttgtaataagcttataaaggcaaaatttgacaagaatttgagacttctgtattaaaaaataaggattaaacattgttttccttaatgtatacagtccatacttataagggaaacaagaattgtcttcttatataatcataatgaataagtgtcccaaataacacatatccatttagattttgaaacgtaggttttaaaaaaacttggtcattttctttaaattatttcaaaccctcttctaggattttagctgaaattatattctttcaataaatatttagaatatagtcttattggggttctttaatgatttcttgaacatcttttctnnnnnnnnnnnnnnnnnnnnncatgattggggatgtataaagtggatatactgaaaatgctaataacaatttaaccatactatcactgcttttttccctgattgtgcctggtaatctagtctatcatgaagtaattagtacatgattccttctcagatgaattccaaagctcaacagtgaatttgagaaagaagaaacaaattttctatacagaattcccagttatttatgtagatacttctctgccctaaagaaggggaattatgactcctcactcctgcatgtagtgacttccttccaaaaatgacagcatggaaagggcaggaagaactttagagtgacaaacgctacctcagccaggttatcaaggtccctgtcagcattcacaaatcatgttgacagtacgtacccttgatatgacctgatgaaaatggcactttacttctgtgatcatctcctcaaaacccacaatcccagtctaatcatgaaaaaaatacccaacaaactccaagagaggagcatgctacaatttatctgacagtactcttcaaagctgtcaatgtcatcaaaaataaggaaagtctaagaaactgtcacaggcaagaggagcctaaggagacattccaactcaatatagtgtggtattctgaataggatcttgatgtggaaaatggatattaggagaaaactaagaaaatctgaataaagtatggaatatcaatattggttcactaattggggcagatgtaccatagtaacgtaagatgttagtaacaggggtagatgggaactctctgtactatctttgcaatttttctgtaaatctaaaacttctaaaatacaaagtcaattattttaaaaagtaaatttgagatgatgatatgaagcattttgatagagaattattagttaaaaaaagannnnnnnnnnnnnnnnnngtcaggacggtttatgttgtatttggctttcttggggtggacccctaaatagcaaaggcatacagagagactgaaaactcgttagagccaa

SEQ ID NO: 242235 - DNA, 897 bp, Homo Sapiens
ttggtgagaagctcagcggtagcttttgggaagcaggacgttctcaccaggagagcgtcctctcgagatttctgctccctccattcagggcgtttgggagccaccccttcattttttaaaaaaagtatttctctgtgaccgacggccggggccttctgacggtctgaggtcttgcttgggccagtcacctcctgtcacggtccgcggaggggggaaggataagagggcgaggagctcatcgctcgccacccccgtgggcttcttgggcgcaggtcggagctgggtgggccggctccccggcccctggcttgggcgaccatgtccgcatccgcccagcagctggcggaggagctgcagatcttcggcctagactgcgaggaggctctaattgagaaattggtagagctttgtgttcagtatggacagaatgaggagggaatggtaggcgagcttatagccttctgcaccagcacacataaagttggccttacctcagagatcctgaactcttttgagcatgagtttctgagcaaaagattatcgaaagccaggcatagtacctgcaaggacagtggccatgcaggagctagagacattgtttccattcaagagctaattgaagtggaagaagaagaggaaatcctcttgaactcttacaccacaccttcaaagggttctcagaagcgagctatctctaccccagaaacccccctaacaaaaaggagtgtgtcaactcgtagcccccatcagctactctcaccgtcaagtttctctccaagtgctactccctcccagaaatacaactcacgaaagtaaccgaggagaagtggttacctccttcggcttagcacagggagtatcttggtctggagaggaggagctggaaacatcagcctg

SEQ ID NO: 242236 - DNA, 941 bp, Homo Sapiens
ttggcgcaatgatcgactccttgtctatggattcattcctcactgcacacaggcaactctgtgtgcactaattcaagagaaagaattttgtacaatggtgtcgactactgagcttcagaagacaactggaactatgatccacaagctggcagcccgagctctaatcagagattatgaagatggcattcttcacgaaaatgaaaccagtcatgagatgaaaaaacaaaccttgaaatctctgattattaaactcagtaaagaaaactctctcataacacaatttacaagctttgtggcagttgagaaaagggatgagaatgagtcaccttttcctgatattccaaaagtttctgaacttattgccaaagaagatgtagacttcctgccctacatgagctggcagggggaaccccaagaagccgtcaggaaccagtctcttttagcatcctctgagtggccagaattacgtttatccaaacgaaaacataggaaaattccattttccaaaagaaaaatggaattatctcagccagaagtttctgaagattttgaagaggatggcttaggtgtactaccagctttcacatcaaatttggaacgtggaggtgtggaaaagctattggatttaagttggacagagtcatgtaaaccaacagcaactgaaccactatttaagaaagtcagtccatgggaaacatctacttctagcttttttcctattttggctccggccgttggttcctatcttcccccgactgcccgcgctcacagtcctgcttccttgtcttttgcctcatatcgtcacgtagctagtttcggttcagctgctcctcccagacagtttgatgcatctcaattcagccaagccctgtgcctggcacttgtgctgactggatcccacagtcggcgtcttgtcccacaggacctccccagatcccacc

SEQ ID NO: 242237 - DNA, 1132 bp, Homo Sapiens
  misc_feature (875)..(897): n is a, c, g, or t
ttggctgctcttttgggtacctagcaggaatctgaagtcttggttttattgaaaagaattttgagattcataatttctgattctagattatagtttgtaacatgtttgaaacagaagcttcgaaagagtgatttctcaacttagtgttaaatgattttgtctgaagtctgactctttgtaagcttgtttgtttcatcaaattttaagtcattgagcacaatcaaaatggaggctcatatctcaggagtttttgaaattttaatttaggggcacttagagacatttttttctaccccatccaacttctttctttccttttgctatgatgtttgtatgtatgttataagactttagtgacgggatggcgtgtcacgtagattcatcatgatcctttatgtagttaggaaatggttgacagaaggaattgtagtttactgcttttcagagggcgtgaagaacaacaggtcagccaggttgtctttaagatgttcttttagacagctgcacattgtagaccctttcacctgccctacaccaaagatgtactaaagggagacacaaccctatgtgttttttcccaaagcatgtctctagcaagagggtacatagaaatggaacatgaggctttttgtcactgattttatgataaccagttaatgtggaatctgctggttgtcttactacagctttctatctccggtgaaagccataaaaatttaggttaacttttaagctcatgtctatatatatgtgtgtaagctagcatatacatatggtgattgacaagtatagttaattttatatggatttaaaagcaagcaatttttatatctacagacgtactcttcacttatggtggcttttatcccgccacnnnnnnnnnnnnnnnnnnnnnnngcaaacagccttgcaaatcatcggccagaaaagctgcagggcgttgcaatggccttttcctacctgtttgccacctgtggtgagggtgagcaggatgattgaactgctgcatatttcaaacctgttatcactggcagtgtgtcccaagagaagctgaccagattatgcattctactgttctctagcacaagtactcaccaaaaagccaaatttcccctttggagttggtgactta

SEQ ID NO: 242238 - DNA, 1307 bp, Homo Sapiens
ttggcatttaactgttccagtgatcccagatattgcaggagaagaggctgggtccgatccacactcattatgtctgttccacaaacaagtacttcaaaagggaaagtcatgcttaaagaatacagtggacgcaagattgaagtagagcacatttttaaatggataactgctcatgcagcttctcggatcaaaaccatttataatgctgaacacttgaaagaagaatggaataaaagtgatcagtattggttaaaaatatacctatttgcaaaccttgaccagcccccagctttcttctctgcactaagtataaagtttactggaagagttgagtttatttttgttaatgtagaaaattgggacaacaagagttatatgacagatattggcatatataatatgccatcatacatacttagaactcctgaaggaatttacaggtatggaaaccacacaggcgaatttatatcccttcaggccatggattcatttttgcgctcattacaacccgaggtaaatgatctgtttgttttgagcttggttctagttaatcttatggcttggatggacttatttattacacaaggagctaccataaagcgatttgtggttctcataagcactttagggacatataattctctattaattatttcctggctacctgtgttgggctttttacagctaccttacttagatagcttttatgaatatagcttaaaattgttgagatattccaatacaaccacactggcttcatgggtaagggcagactggatgttttactcttcacacccagccctgtttctcagtacataccttggtcatggtttactaattgattactttgagaagaagagaaggcgcaacaacaacaatgatgaagtcaatgccaataacttagaatggttatcaagtctgtgggactggtacaccagctacctcttccacccgattgcttcttttcagaactttcctgtagaatctgattgggacgaagaccctgacttattcttggagcgcttagctttccctgacctttggcttcaccctctgataccaactgattatattaaaaacttaccaatgtggcgatttaaatgtcttggagtccagtctgaagaggaaatgtcggaggggtctcaagatactgaaaatgactcggaaagtgagaacacagacactttgagtagtgagaaggaagtatttgaagataagcaaagcgtacttcacaattctccaggaacagcaagtcactgtgatgctgaggcttgttcatgtgccaataaatattgtcagaccagccc

SEQ ID NO: 242239 - DNA, 1239 bp, Homo Sapiens
  misc_feature (414)..(575): n is a, c, g, or t
tcccagcctttcatgggaggcgccacttggtatctgggaccctccctctgctctaacacaaataagaattcctcaaaagttttctagcacacaacttgttctttcacctcttttcacctctccaagaaagtcaaacacggtccttgcttttccccagtggccatggttacccaagcacaggaggccaaggcctggggctcaggccagcagagcaggatctctgcagacgtgtggtcccaggcttggccagtacagttcttcctggatggccgacacagatcctggggaaaggcaatcccggcactgctctgaaaccagagctcctcctccctccccgggcagggtggagctgagaagggctgctctagcgttgggactccacctccatacacctgatattttgatagggcaggnnnnnnnnnnnnnnnnnnnnnnnnnnnnnnnnnnnnnnnnnnnnnnnnnnnnnnnnnnnnnnnnnnnnnnnnnnnnnnnnnnnnnnnnnnnnnnnnnnnnnnnnnnnnnnnnnnnnnnnnnnnnnnnnnnnnnnnnnnnnnnnnnnnnnnnnnnnnnnnnnngctctagggaaatctgctggtatgagaaccccaactccccactccactgagcctccagatggcgagcaggctgcagctccagcacagacacgaagctccctccagccactgacggtccatggctggggttacccaggcctcacctgccctttcttttgtaactgcgttatgttccaccacaggcacgcccctacagaggacatcactgtgtacttagaactacaccagaatcggggagcagaaaaagcctattttgtgatgggttccccaagaccagaatgggcgctgtaagcccctctgtagatggtgggagcctggagcctggtgggacaccgggtctacacagcccaggggaccaggaaccagccttcgctgagcatgagtaaaatgtctagaagcctgaactggaccctctctaaggaccagggaccatcctgatggcccacgctgctttcccaagagcaggaatagagtggggaaacctgcccattgcactgctggtgggtcagacacccaggcctaagacgggcgcagttttgtttttctttatttgtctacattcagcttaattcagatgtactgcctgaatgacccagacataaaaagaaaccccccactctttcccactggtttttaaaataaaatcttcacttataaaacccaa

SEQ ID NO: 242240 - DNA, 1254 bp, Homo Sapiens
ttgggttgggtttctctaaggacccctcaaacatgtcgcaaaatgaaccaaacttctggctaggcctcaaaactgacttggtcccacttggaggccccaggattggtcctgaggtacagagccactgccaccactggcggcctgggaccagctgggtgtcagccacggatgagccgaatagccagtcagcatgttgctgctggcagcctgtgcctttgtcagctcttctttcaaaagaccccaccgacagaccgcattccacccccaacatcggcactgagggacatcgggggcaagtttgcagtggggccggaaaatatggtggccaccctaccatgagagtcagccgtaggggaccccagaccccttggtttccttggaaacaacatacctcttcccccttatccccagtcctttttcatacctagtgggatacagaagaagccaggacagtggctttgccagctaagtgacttttagagtaacagataacgattagagtggggaaccgtcaaagctgggtacacatttcctatcttcctccagcttccagctaggccagaagggcatgctctggaacccagcaggatcacagctgcctgtgcacgtcttcccttctctccctgctgcggcacttatggagaggatctaaagcagccggtgtggcagctccgatagcaggcacagggaatctgttaaccagacgctagaaactaaattataacttttgcatatgtgagaaaagacaacattggtgctaacagtgaagtaaggcccaaaggaaagacggcttccctggacaaagaagacctcagggctacccaaggaaataggaggagtctagagtagactcacaaatctgaacaagcccaagtcttccagttctgaggagaggaggtcttcagtactattgagggagacattgatcttctggatgtacagttgtgcaggttgttcactgcacaagggcacctgcagctaatggaggctggaattcagcttgtgttctgctcactaagctgtgtgcgtgccctggtgtggggctacttctcccaagaagaaggggtgcctttcctaatttgcaaaggtgccatatgggctcacagcaccctggaggagaagggcctcaaactgtgcatgtaagcctttgttttgttctgctcagatattctggatattacctcttcttggtcagaattctattctcaggtgtgtaccatgatttgtctgctaagaagacgggttcctgctttg

SEQ ID NO: 242241 - DNA, 986 bp, Homo Sapiens
aaaatgatggaaggcgcaggccaaaggaggagctgtaggaatgaaaaggaagagatgatgtgcaggaaatttcagaaatcaataggaaataaccaattagagttaggagacaagactgtagatactagactactgtataattcacaaagacacgttgtaggacgagcaaaaggagcccagttcatttttggacttgaacaaagaaacaaatgttactttctatagtaagtaattgaattcatgggtgcaaactaaacttcctcagatttaagaatgagaagagaacttggggaatcaccaacattaaggagtagattaaaaacatggagaagtacaaagagattttgggaaaatgggaaaaaatattatcagggaagacagaggagacttttaagaagggattgccagagacaggtccagtaaaagaaaaggaacaatttgttggatttgtctaccatcagcccattagagtctttaaaaagagcaggttcagtgatgtgaggacagaaatcagatcatagtgtattaaggaaaaaaatgaaagtaagaggtagaaataaaggagcaaaaacaatgtttcaaaatgagagaggatagcagttacgttcatttcatggaaatgtcaatagtaattaacaaagcagaacaccttcttatttaaagatgaataaatactatttcttagtgtatctggggactcaaagtcaagtacaattttccctaataattttccatttactttcagttaatgtcacatccactgcttatctcttctaaacaagcagaaacagccatccttcctagcccctctcctcccctcagatggactagaatctgttattttcttcttgtatttctagggggtgagagagggaaggatattcaaatgattaatattcagataaataataacaaatactaatcaaaaaagagctaacattttctgaatacctatcatggtaaatgccaacttttttgtacaaagt

SEQ ID NO: 242242 - DNA, 1367 bp, Homo Sapiens
tgcaacaaattgatgagcaatgcttttctataagaagggaactttgtacaaaaaagttggcgcggttataaccgtaaaggaacccgagatctgcgcaggggttccctttgccgatttctctcacctcacctttcaaacctaaactcgagcctactgttcaccggcctagcattgctctcgccatggctctcagcgatgctgacgtgcaaaagcagataaagcatatgatggctttcattgaacaagaagccaatgagaaagcagaagaaatagatgcaaaggcagaagaagagttcaacatagagaaaggtcggcttgtgcaaacccaaagactaaagattatggaatattatgagaagaaagagaaacagattgagcagcagaagaaaattcagatgtccaatttgatgaatcaagcgagactcaaagtcctcagagcaagagatgaccttatcacagacctactaaatgaagcaaaacagagactcagcaaggtggtaaaagatacaaccaggtaccaagtgctgctggatggactggttctccagggtttgtaccagttgctggagccccgaatgattgttcgttgcaggaaacaagatttccctctggtaaaggctgcagtgcagaaggcaattcctatgtacaaaattgccaccaaaaacgatgttgatgtccaaattgaccaggagtcctacctgcctgaagacatagctggtggagttgagatctataatggagatcgtaaaataaaggtttccaacaccctggaaagccggctggatctcatagcccagcagatgatgccagaagtccggggagccttgtttggtgcaaatgccaacaggaagtttttggactaagccttcaggaggtggagctcgtcgtcagctctcctgctgtgatgtggaagcttctgatatttgaagaaacacgaatgtctctgtagcttcctcttcactgccccagtattgctctgtatttatcagcgatgcccctctgtcactcatgccttgcctaattgttcacaatggtggaaagcttcatgtaatatgatcaggacccacctccagttcttctgaaagtgtgacagtgtccagccggttctgcagcactaggggagggggcagatggtggttgcatgggcttcctgggtctccactctccgtctggcctaaaggtgatgtatttggtgtttggccctgcagtccccactcttgaggcttaaggcgcatgtggcacaccactccttccagcagtagtcgctttactgttacctgtttaggcctagaagttttccctcatctgtaaatgtgatttaaaatctaagccatgaatatgctttatttattaaaagagttatgcgg

SEQ ID NO: 242243 - DNA, 989 bp, Homo Sapiens
cataaaaaccaactttgtacaaaaaagttggccgagatctgcgcaggggttccctttgccgatttctctcacctcacctttcaaacctaaactcgagcctactgttcaccggcctagcattgctctcgccatggctctcagcgatgctgacgtgcaaaagcagataaagcatatgatggctttcattgaacaagaagccaatgagaaagcagaagaaatagatgcaaaggcagaagaagagttcaacatagagaaaggtcggcttgtgcaaacccaaagactaaagattatggaatattatgagaagaaagagaaacagattgagcagcagaagaaaattcagatgtccaatttgatgaatcaagcgagactcaaagtcctcagagcaagagatgaccttatcacagacctactaaatgaagcaaaacagagactcagcaaggtggtaaaagatacaaccaggtaccaagtgctgctggatggactggttctccagggtttgtaccagttgctggagccccgaatgattgttcgttgcaggaaacaagatttccctctggtaaaggctgcagtgcagaaggcaattcctatgtacaaaattgccaccaaaaacgatgttgatgtccaaattgaccaggagtcctacctgcctgaagacatagctggtggagttgagatctataatggagatcgtaaaataaaggtttccaacaccctggaaagccggctggatctcatagcccagcagatgatgccagaagtccggggagccttgtttggtgcaaatgccaacaggaagtttttggactaagccttcaggaggtggagctcgtcgtcagctctcctgctgtgatgtggaagcttctgatatttgaagaaacacgaatgtctctgtagcttcctcttcactgccccagtattgctctgtatttatcaacgatgcccctctgtcactcatgccttgcctaaattgttcacaatggtggaaa

SEQ ID NO: 242244 - DNA, 1126 bp, Homo Sapiens
  misc_feature (977)..(985): n is a, c, g, or t
gaacattttcatcacccactactgaaagccatgtataatccaccaccacctgtttttgggggacctgggacacatgaaacacagagaggaaatttcatgggtactggatgaaacaagaaggaaatgtttttgctcattgagtcacagggagaatgagaggtttatagagtttaataccatgttttttctggtaaagtgccatctccgaggaagccttgtaatactcaatatggtctcctgctaacttggcctctctgattcgactggaaaacttctggatctctggcaagtgattgtggatcctggctgcctctcgctggcccgtcacgatgagaggaaaaatcaggcagcgggcaaagactgtacctggaaaatacaaactaggattggagtgaaattaaagcagttctgcagctagaaggttgaaggcttttaggtccttactgaaagggtcttattcttgccttgtccattctatgactcatgcctaagaggcccagaaataaggtcaggggaatgaattagttgctttaaggctcagttctctaatttggcatcacaaaagtatggcattaacttctctaagcagatgattaggaatcctgtttgtttcctcaaacaaaaagctgacaggagtggatttagcaattatgttactggcagttcgaatgaggtgatatgagtaaaagccagacggctgagggagtaaatggaaagaagtaggctaattggatgcagagcagtcttttaagtaacagctatcaaaagaatgaaacccagtcatctgtgacaacgtggatggaactggagatcactatgttaagtgaaataaggcaagcacagaaagacgaacatcgccatgttctcacttatttgtgagatctaaaaatcaaaacaaatgaaatcatgggcagagagtagaaggaaggtaccagaggctgggaagggtagtcagggttgggaatagttaatgggtnnnnnnnnnttagaataagatctactattgattgcacaacagggtgactatagtcagtaataatagcatatttttaaataaagaacgtaaaaattagccaggtgtggtggcacacctgtagtcccagctacttgagaggctgagacccaa

SEQ ID NO: 242245 - DNA, 1950 bp, Homo Sapiens
  misc_feature (1801)..(1809): n is a, c, g, or t
aagaacccctggctgctagctccaactgattccgcatgcgttgttcacgctctcgcagctgacgcgtcatttcagcatttttccagccttttttgaagctctctaggaagccttcccgtggaggtaatttgtccaggtcatgtacaacacgctgggggattttaagtacagtgcgtactgctggaatccggagacaggatacttggaccagggaaaacaaattggaggagagccagtacataaacactgccgtggggaaatgcatggttatgggcaaggttatcaggggcatcattctgatgacatttctcatccactgaaggtcagaactttgcacacctgtctcagcacctagctcaagaacagcccacattgtagcagtgactgccagtggtaatatgtagatgggatcggataccgtgagatcctggaaccaccagaggccacctgtctgcaggctgggcacaggaaggttggccatctctctcaaagcaatgaagaaggagatgaagattggggcctattacacaagataaacagtgtcagcatgctttaccagagagaacattttcatcaccccactactgaaagccatgtataatccaccaccacctgttttttgggggacctgggacacatgaaacacagagaggaaatttcatgggtactggatgaaacaaggaaggaaatgtttttgctcacctgagtcacagggagaatgagaggtttatagagtttaataccatgttttttctggtaaagtgccatctccgaggaagccttgtaatctgtgaggtgaggggaaattaatggttggggtaacagttacatcagtggaggtgaacatcctcattatctacctggcctgtgaaatttctaaccaaccctggccactccttgggagcattaggtctaagaaacagataaacctttagaactttcccgactgtggcaacttctgatttacattgttcctttcccccagcagaatgtaaggaaaagtgcaaatgtggacttctcccacgctcattctgcaactgactcacactcaatatggtctcctgctaacttggcctctctgattcgactggaaaacttctggatctctggcaagtgattgtggatcctggctgcctctcgctggcccgtcacgatgagaggaaaaatcaggcagcgggcaaagactgtacctggaaaatacaaactaggattggagtgaaattaaagcagttctgcagctagaaggttgaaggcttttaggtccttactgaaagggtcttattcttgccttgtccattctatgactcatgcctaagaggcccagaaataaggtcaggggaatgaattagttgctttaaggctcagttctctaatttggcatcacaaaagtatggcattaacttctctaagcagatgattaggaatcctgtttgtttcctcaaacaaaaagctgacaggagtggatttagcaattatgttactggcagttcgaatgaggtgatatgagtaaaagccagacggctgagggagtaaatggaaagaagtaggctaattggatgcagagcagtcttttaagtaacagctatcaaaagaatgaaacccagtcatctgtgacaacgtggatggaactggagatcactatgttaagtgaaataaggcaagcacagaaagacgaacatcgccatgttctcacttatttgtgagatctaaaaatcaaaacaaatgaaatcatgggcagagagtagaaggaaggtaccagaggctgggaagggtagtcagggttgggaatagttaatgggtnnnnnnnnnttagaataagatctactattgattgcacaacagggtgactatagtcagtaataatagcatatttttaaataaagaacgtaaaaattagccaggtgtggtggcacacctgtagtcccagctacttgagaggctgagacccaa

SEQ ID NO: 242246 - DNA, 1181 bp, Homo Sapiens
ccctctagaggatggatcaggccccagcaccacctcagattcagtgcctgctgctcttcctctttccacatggccctggtgacagacagatagaggccccagctgacgtgtctatcggaacgactttattttcagtacactgggccccaccaggcaatgtggtttgtgcgaggctgtgcgagggacaggcttgggctaagagaagggaggtgagttggttaagcgcactgcagtccgcggggcgctacgttgctttcacacatacctgctgctgtggcccacacctggcaggggcctttggtcataggacggcgtgggggagaatactgtgtgaagtctgggattggggtgggtcttggtgtcacaggtgagggtgccggtgaagacaggctggccccagctttgcaccatctaggctgaaggcctttggaccactcctaggagtcaggcctggctccattagctcctggcactctggtctggcccactccctccttaaccaagcaggtccaaggtcaagaatggcacaagatcagcccagagggggccttcccacctctacaacctagtcccctggtcagctacagtggcaaaaggcaacttggtaaattgcagctttctccagtcttaagggcactggctctccaacacccctcccttgcttaggggcctctgccaaagaaaaattttacctcctgtttcagaaaatctaaccagcaaccagcctgttgattccagggcagtgagcaagaggaaaagggagaaagagcctggtgggagtgtctttgagtgtagcttccaatctcaaatggtcctggaacctgtggacactgtcagctcaccatcagctgggagaggtggggccctggaggctaagcttaggtgctgtaaacattagtgtagcaaggcaggaggcagcaagctccctctctccagcccctaactgaacaaacacttcaataaataaaacggtttgaagatggcattgcaacaagaacagatggaaagcgaggtcctggaaccagcaggtgccttaaactctcccaaggcccccgaaaggggactgggctgggaacattaactgtgcagccattcagagggaggactgctcctgccctccttcagtggccggtgtggtcctgttccctggtgaacatgagggcctcctgctctctccccaa

SEQ ID NO: 242247 - DNA, 1495 bp, Homo Sapiens
  misc_feature (551)..(598): n is a, c, g, or t
  misc_feature (1043)..(1090): n is a, c, g, or t
ttggcctattcagctcaaaacctttctttttctagctggaccagtccggtacgctccgggcctcaccgaggaagtcccaccctgcaggggaaccgactctggccggccctaacccctctcgagcgagtcccgccccatctccggtctgtcctgaaggcagagggaagaccctcacccaacccctgcccgctctcttctaagagctgctagtccttctccaccccaggcgctccctctggctgcccctcccactcgctctgatctctctccgtccgctacttgcggtcgagccttcttgggggagccccgccactgaataccccctttgccatactcccacctctcttaccccaaccctggacttccagttggccctagctataagccccgcccctctccgagggacagcccccgctccagtctccgcggtcccacttaccctagcccctccctcgggcagcccctggactgtgacccagccagcaccgcctctcctagtggcaactggctgggaatggctgaggggctacctactgcttgcggcctgccannnnnnnnnnnnnnnnnnnnnnnnnnnnnnnnnnnnnnnnnnnnnnnncgggcctggacctggggagtgaaagcgaaagcccgggcgactagccgggagaccagagatctagcgactgaagcagcatggccaagccgtgtggggtgcgcctgagcggggaagcccgcaaacaggtggaggtcttcagacagaatcttttccaggaggtaagtctctggatttgagcgatttgacccagaatcttggaccaatacttgaggataacagcctctcagaatgacccccccaagtcaccctagacttaaccctacttcccttaccaagccttcacccaaagtaaccccggaattattgatagctacctttaatctgacctttcttatgactctcccgacttctggcacttctcccgtcttttgatgtggaggaaaaaaaccatggcttccaaagcaggaatatcacagtcctaaccttcgttctgccatttaccagnnnnnnnnnnnnnnnnnnnnnnnnnnnnnnnnnnnnnnnnnnnnnnnngtcttggacccagtgatttccaaaggcccttccagttccatttgtcacacatctcattgagcatattctgtgattcccctcccttgcaatgtaacccacaggctgaggaattcctctacagattcttgccacagaaaatcatatacctgaatcagctcttgcaagtgagtagtgtgggccccttctgccccatcctatgtcctctatcccctttgcccaccctctctagctaacaactggattcagcatgcagagaatagtttcaaatagtggagtatgaacattatgatggcgtgaggcatgagcctatgttgggaggcacagtgcaagtgggatgtatggatggaatgctgtgacctccatgaaagcaagacgttgggcagcccttgacagtgagctctgtgc

SEQ ID NO: 242248 - DNA, 728 bp, Homo Sapiens
  misc_feature (539)..(582): n is a, c, g, or t
actttgtacaaaaaagttggcagtccggtacgctccgggcctcaccgaggaagtcccaccctgcaggggaaccgactctggccggccctaacccctctcgagcgagtcccgccccatctccggtctgtcctgaaggcagagggaagaccctcacccaacccctgcccgctctcttctaagagctgctagtccttctccaccccaggcgctccctctggctgcccctcccactcgctctgatctctctccgtccgctacttgcggtcgagccttcttgggggagccccgccactgaataccccctttgccatactcccacctctcttaccccaaccctggacttccagttggccctagctataagccccgcccctctccgagggacagcccccgctccagtctccgcggtcccacttaccctagcccctccctctggcagcccctggactgtgacccagccagcaccgcctctcctagtggcaactggctgggaatggctgaggggctacctactgcttgcggcctgccagcgggaggannnnnnnnnnnnnnnnnnnnnnnnnnnnnnnnnnnnnnnnnnnnctggacctggggagtgaaagcgaaagcccgggcgactagccgggagaccagagatctagcgactgaagcagcatggccaagccgtgtggggtgcgcctgagcggggaagcccgcaaacaggtggaggtcttcagacagaatctttt

SEQ ID NO: 242249 - DNA, 1495 bp, Homo Sapiens
gaaaaaaatctttcttatcacagcaaaaaagaacaacacaacttatttcattgttttcctgttttattttcaattccactaatagagataagggaaaagaaggctctgttctccaactcccagtcactatctatcctgtctttaatattcaatggctgttttgcctcttattctaccctaacttatttccttccctgccatctctccccaaaaaaccctcaccttgtatagccccaactcagctaatcatacctatcctatggatcatccattcccatcaatttataacttttcacctaatggaaattctagggccacttcctgcttctcattttccctcctattctaacatttggagtcactaatattaggtttggagttgggggtggggaacctatattattcccataaaatatgtatagtattaataatgaactaccaaagcatcaagaaagttattttaatatttttaggactccgctcacttatctgtaaaatgaagaagctattagatcaccactctaatatctggctgacaatttccagttcctaataatagggatcttaaactatagatctgaggtagaatacaggaattgtctaagaggcacccagttgaatctgctgatcagccatgtttgggaatcactgctaaatgctaagaggttccttctagtctaaaactccaagatcctaagctggaattttcactgcatttgctggtagaagaattgtgataaaaggggtacagtttccatagttattggtgctatagttcaggtatgttattgattcaatgggcctttgcagactgatctagcacttaagcaatcttcagattacaataacagctgacttgcaaatgaacttgtaaaatatgtttacagactggggaccatcagcacaatactaagccctcaaagtaaaacactaaaaattatttccttagtattattatgtgcacagagtttttcacagatgacttttttactactaatatttagcctatatgtcagaaataaaggtagaaggagcatgctcattaggatcacttattctgctaattcactgatggggctttgtatatcattcaagcaaagcctagagaagtctagatcaccggtgaaattcagggtattaaagcgcctaaagaatagtctcattcaaatgtttaaactgccaggactttaactccccagaagcatactagatcattcacttatgaactccatgtatctattctagatctggtaacttccgattctcataaacaagagttcctgtggttaatactcaggcttaaaacatggttaaacatgtgggaactaagcacatataaacagcacttgaagagatgccacattagtgtgttaatttgagtggaacctattcatttatgaataaatgaataatgaaattattaaaaggtaaaaatagaaatggaattctatgctagtcatttttctctttagaaagatgcacttaaatttgccaa

SEQ ID NO: 242250 - DNA, 1465 bp, Homo Sapiens
  misc_feature (1024)..(1033): n is a, c, g, or t
ccaactttgtacaaaaaagttggcaaactcctgaatctgagaactctcgagatttccatgcgacagaatcccaaacagttctgaatgtctccaagggagaagcaaagccaactcgggcagatgcccatgtgaacagagtacctgaaggaaaagccaagagtctccctgtacagggtctgtcagaaactgttggaatcttacataaagtcaagtctcagaaatgtccgatgcttcaccatattcttatattctatgcaattgttgtctgtgcactaatcatctcgaccttctacatgagatacagaattaatactctggaggagcagctggggttactaacctccattgtggacacccataatactgaacaggcagcaccatctggcctgaggtcacaagtacaattcaatgtggaggttctctgtcaagagcttacagctaacatagtgaaattagaaaagatacaaaataacttacagaagttgcttgagaatggtgactgatcgaccagattgcttgggccatcggaatacctcatgtttccctttgaagaaggtgcttcctgaggcgttttgtttgagtgcaccctgctggtcagaggtgcaagcagatgagaatccagacattgcatgtggaggtctccagctcaggaaagtggggagggaaataattttggttcttgtgcaataaaagttgaccttgactctctgaggaagattttgctgcttttgcctgaagaaaacagacccatctctggaggtctcaggaagggcccagcgaacacactctcttggataattaccacgatggcgtcagcaaacactccaccctgtgcctttttagtccttcccgccctcctgcctctcccttacacccctcttaacgactttcaaactaaaggatacatcatatactgacaaactcaatgtggtcctttcaagaattagccatgagtctcaaaaaggcaataaatggctctaagtggacaggtttgcttcaaacaagtaacatctacattttgtcnnnnnnnnnncagttctcctgttatgttctggttgaaatcacctgtgtgtcttaatttctcaattcctttttggcaagaatatcaagcaaggtgaatttaacattatgtttatgttttgttttgttgctgtaactaatagttaattggactgattcttacccagccctggtcaagaatctgtgaggcatgtgactgaagtactaaattaaacttattttgaaaccaaacctaatttttaagccaaaaggtgtaatagtgatttaatacaggatgaaaaacactgaatttttaagactgtagtggactatgttagtagttttcaagcacgatgtctgtattcagcattcaataatgctaaaatccctttcagcatgaaatttgtatgtttttatcctttgctgactaaaataaaataactggtggtttgctaactatttacca

SEQ ID NO: 242251 - DNA, 1388 bp, Homo Sapiens
  misc_feature (1291)..(1303): n is a, c, g, or t
ccattcataaatcaatatagcatatacaaaattaatttacagtaagtcatagcaacattcacagtttgtatgtgattgagaaagactgagtgctcagccctaggcttagaatttgctgcgtttgtggaataaaagaacaaatgatacattagcctgccatatcaaaaacatataaaagagaaattatccctaagtcaagggcccccataagaataaaatttcttattaaggtcattagatgtcattgaatccttttcaaagtgcagtatgaaaacaaagggaaaaacactgaagcacacgcaactctcacagcgacattttctgacccacgaatgatgccttgggtgggcaacacgattgcatgttgtggagacacttcggaagtaaatgtggatgagggaggagctgtccttgcaatgttgagccaagcattacagatacctcctcttgaagaaggaataataagtttaatcaaaaaagaagactaaaaaatgtaaaatttggaaggaatccataaatgcgtgtgtgtctaaatacaaattatcatgtgaagaaaaggcccaagtgtaccaataagcagaccttgatttttggatgggctaattatgaatgtggaatactgaccagttaatttccagttttaatgaaaacagatcaaagaagaaattttatgagtaggttaaaggtctggctttgaggtctattaaacactagaaaggactggctgggtgagataaaatcttccttgttgattttcactctcattctataaatactcatctttctgagtagccatgatcacatacaaatgtaaattgccaaatcattttatagtaccaaggtgaagaagcaggaactagaaagtgttgataatagctgtggagttaggaaaactgatgtgaaggaaataattctttgaaatggcaaagaattaaataccatcattcattatcagaagagttcaacgtttgaagtgctgggagataattctaattcattcttggatagtgaagcaaaactgattgaaaataccaagataagacagaaaaagtgactggaaagaggagcttttcttccaggcatgttccagtttcaccctaagactgaccttcaaataatcaggttgtactgaaataaaggacttgttaaaaattaaaattatgtcatcgagatgatagcttttttcctcctccaacagtttattgtcatgtgttgtgggagagctcgagtgaagagcaataaactccaggtcttataagaatgtacatacaataaaggtggtgccagcagnnnnnnnnnnnnnctaaagagtcacatgtagaaaagcctccagtattaagctcctgaattcattccttaaataaattggctctctctctcttctataa

SEQ ID NO: 242252 - DNA, 1306 bp, Homo Sapiens
  misc_feature (611)..(937): n is a, c, g, or t
  misc_feature (1015)..(1056): n is a, c, g, or t
tttcttttttcacatatcccatatgtaacctattgacaaataatgttggctctactttcaaaatatatttcagagtccaatcacttttttactgcttctaccacccccatctttgttcaatgcactggcatttctctcttggatcactgtaacagctttctcactcaatgaggcagtcagagtccatttgctaacacaagccagaccaagtcactcctgagttcaaaactctctagtgacttcctatctcactcagtccttacagtgacatgcatgccccagctccattggactcccagctacctctctgatcttagcttttcctactcttctctcaatcattccattccagtctctgtgctgttctctgatattaacatgccagccaggctgtctaccactgggcctttccgcttgttctctctgtccaaaggggtttttctctaggtaaccatgtggctgcttaatccccttcagttagttgttcaaatgttaccttatcagggaggctttcaaagattaccctatttaacactgtatatctcccacctggagctttatatccttcctcttccctattttatctttcttcttcatatctatcaacatcnnnnnnnnnnnnnnnnnnnnnnnnnnnnnnnnnnnnnnnnnnnnnnnnnnnnnnnnnnnnnnnnnnnnnnnnnnnnnnnnnnnnnnnnnnnnnnnnnnnnnnnnnnnnnnnnnnnnnnnnnnnnnnnnnnnnnnnnnnnnnnnnnnnnnnnnnnnnnnnnnnnnnnnnnnnnnnnnnnnnnnnnnnnnnnnnnnnnnnnnnnnnnnnnnnnnnnnnnnnnnnnnnnnnnnnnnnnnnnnnnnnnnnnnnnnnnnnnnnnnnnnnnnnnnnnnnnnnnnnnnnnnnnnnnnnnnnnnnnnnnnnnnnnnnnnnnnnnnnnnnnnnnnnactgccttctagaaaaatactatttttttcagcattttgattatccatagaatgatggtaactaaatccctatttccnnnnnnnnnnnnnnnnnnnnnnnnnnnnnnnnnnnnnnnnnntagtttttcttttttactttatgatgtattctagaaatcttttttatctcagtacagtaattatagtatttccctattttctttcttgtttcttttctctttagcagccagtagacagagtaatgggtcccaatgacttctaggtcttaaaacccagaacttgtaaatatgttaccttgcatggtgaaaggaactttgcagatgtgattgaaattaaggagattatccttaattaattggacagatccaa

SEQ ID NO: 242253 - DNA, 1312 bp, Homo Sapiens
  misc_feature (289)..(347): n is a, c, g, or t
gtatttaaagctgtgggagaaatactgagtttactatcatctttagtaaactgatcaagatctgatgaaacagtcactgtatcatgtttacctgaaaggtcctcttcactggatttctcagtttttagaatattatcttttatggtttcattgttttcagaaacttttttctcttttgattcctgagtaacttgcttgtcatcaatctcctcctcctcctcttcaccaaattctagtggaggctgccagtgaaatgcttgctttcgttttggagccttatgctttttgnnnnnnnnnnnnnnnnnnnnnnnnnnnnnnnnnnnnnnnnnnnnnnnnnnnnnnnnnnnctttgacccatgtttgtgcttttgtggctttcccctattgttttccgaattggaacaggacccctcagagtcagaagttgatgtgcgctgtttgcttgatttccaagcaccattatcatcaggcagtgaagtatttgtggacgacttggttgtgggtttgactttgatgtgaatttcactaacctctgattcagaatcggatgtggcctcaccttcttccttgtcagaggatggatgggagtcatttttactgtttttagtgacatctcgttctgaatttgactcagagtcccatttactaccagcataattcttccttttgggcttactgccatttctaaggtgatcagaaagattctctttcaaagttcttttttttgaatgagggcattcccgttcagacttggatttttcttcacctctgtttttttcttgtttattatgtgttctttccatttggccctgcttctctttttcctgggctgactgtgtggcctgaacacttgactgctcactgtctgaagaataatctaaagatgatctgctctcgctatactttctcacacatgaagacctgtctctacctttgacatatttactgtgaagtgtcttttcagagctgctgctatgctttttatgtgaaacgctattttttttcccactggatctaagtctcctcttagctcgccttccatcatcactgctaatagaagtatatgaagatgatctactacactgtgaatgatcactgtatttatttcgtgaatgagatctagatgatggagacctagaccttgaatgtgaactagctagactacgtgatcttgtatatgatctggaataagatctactcctagaagatctgctccttgaccttggtgagctttctgaacttctatcactgtattttgaataagtgctctgatcactttccgaatttttttctcttttatggtaggatccaa

SEQ ID NO: 242254 - DNA, 883 bp, Homo Sapiens
ttggcgctgagtggagctcggggctgcgtaggggagctgagccgagcggctgggcgggcctggccgggccagcggaggggagacgtcggttgagcggcggcgaacatgcgcttttgacacattggaggctttcttgatcatggatggtgaagatataccagatttttcaagtttaaaggaggaaactgcttattggaaggaactttccttgaagtataagcaaagcttccaggaagctcgggatgagctagttgaattccaggaaggaagcagagaattagaagcagagttggaggcacaattagtacaggctgaacaaagaaatagagacttgcaggctgataaccaaagactgaaatatgaagtggaggcattaaaggagaagctagagcatcaatatgcacagagctataagcaggtctcagtgttagaagatgatttaagtcagactcgggccattaaggagcagttgcataagtatgtgagagagctggagcaggccaacgacgacctggagcgagccaaaagggcaacaatagtttcactggaagactttgaacaaaggctaaaccaggccattgaacgaaatgcatttttagaaagtgaacttgatgaaaaggaatctttgttggtctctgtacagaggttaaaggatgaagcaagagatttaaggcaagaactagcagttcgggaaagacaacaggaagtaactagaaagtcggctcctagctctccaactctagactgtgaaaagatggactccgccgtccaagcatcactttctttgccagctacccctgttggcaaaggaacggagaacacttttccttcaccgaaagctataccaaatggttttggtaccagtccactaactccctctgct

SEQ ID NO: 242255 - DNA, 2141 bp, Homo Sapiens
  misc_feature (2024)..(2054): n is a, c, g, or t
aaaaaaagctatttaccagcaagaaaaaacaagtactagaaattataaaactcagaaattgtatacatttttacaagcacaattttgaatgacaaacaaaatcaaaatgtgcatgaaatgttgcacgtaccacactgtatctggcttctggtaggttttcctaatcacactggttccttttaacataataagcttagtgacattcaacttcaacagtggactttattcctaacacgagtaattttacatggtaccgcatatttaaaacaaagttttctttaatactacattgtctgattggaaatttcatttccaattctttttctgccagttacttaaaacacacagtacaatataaagacacacaacgtatgtttggacatttcaaaaccaatttatagtcaattacaaagaatcacaatatgccaatatattgttttataaacccagtctgaccttgcccagtgatagaaaaactaaaagttgaaatcttttggggtggaatacaggaaatattcaaagacaacagtaggacaggccaatagcaactggagatagaaaaatcttgacatctcgagacaatttagtttctcacatttttccatagctctgagaattcaaaggccatttttagcggtgtgtttttgctactgcttaaaacctatttttcccttaatttgcatttcacggaattctcaaagagaatttaatgctttttcttgcaagagtattttaattgagctctaagtatgacttgcattcaattctgaaaatacaaatacattttgaatggctaaaaacaaaattttaaaaatacttttgatcagccagctgaaaatatattcatatagtaaataatctctcagaaagcttttatatatatttaattatcacaactaaacagtacccttataaaacaagttcataaaaatgtagaaatgaaatgaaaataagaacttactgggatatatacatgtgcctacagacagaaaaaaacatctccacacaaacatacatcccctgatacacagagttaaaagcatactttcaacttagtaatggattttataatacattataaaattttctaatttctattaatgtcgaactcctgagttcttcaacaaagaaccatagataagtatagtttgtaaaagcaaaaaggtccatttaagtcagtaatagcagtgcagtaactgatggctacatcttgaaagaagttaaaacataaagacacagacagtagttcaatgcacgcattcatgatgctcatacactcatcaacaattattggtcagagtagtaaatcagtgtacaaattaaacatttccaaaaatgtgcaaaaatgtcaatcttaataggaaaaaaaccctttgtacataattataaactgcccagcattcaactgagattaaaaacatttagagagaaaccaataggttaaatatagagaatttaatggctacatttaaaaatgtacattattatgtcaaagggtaaatttacaaattgataatcatagtttgcaacaattcaaagtttattctcaaatttatccaagtttacttttatttacaatgaataaaaagaaccatgtgaaatgtaagagatgtcagacattaaaagtatttttggtattaactcttataatatttcagaattcagggtagcaaattttaaaaccaataacaatagaaaaaatgtaaaccatttactaattaagattgcattaaaacaattgttggtctttaaagaagtattcttatccttagacactgtactttcaattgaatagggtgtattgcaagaatttggcccacttcatattgcccataagcctctccagctcaaatgtttcaactagtcctctcttcttattccaggtggaaaaaattctttggaaaagtaagaatacatcaaatccattttgtagtctatctaatagagtttaaggtgtaattttgtttcttctcccctccaagtaaagctaatgctaaaatcatcactagttacatatgcttttnnnnnnnnnnnnnnnnnnnnnnnnnnnnnnngaagtgaacttaaaagtgcttttcggtatggtcatgaactttactgttctcaactgcattaagggattctcaactgcattaagccaa

SEQ ID NO: 242256 - DNA, 893 bp, Homo Sapiens
  misc_feature (74)..(83): n is a, c, g, or t
ataaatggttgacaataaaagtatataagtattttaaaagaagtaaaattcattcctatccaactttttacaannnnnnnnnncattcttaactttagtatctgatttgttttactatcacagaattggatttgtgttacaattaaactagaaaaggaggtggtgcacagaaaggccctgcaaaatcttgatataatttttaaagctggatcccaatatttcctttcttccttcctactttcctaagaatttctatctatctatctacacatgtgcaaccaaaactttttatgtaagtggaattgtttgggaacaactagacattctatatatacctttacatacccaacataaatgaatgcttctatttccccaaaaagacattacaaaaatattcatagcagctttcttcatagtcaacaattgagggaaaaaaactcattgtgcccattaacagtgattaaaaactgtaggaaatagttatgaataagagcaaatgactacacttaacaaggtggatgaaaccacagacaagatgtagaacagaaacaagttgcaaaaacaaatgtgtgtgtttatggatcttaaattcaagagcagacaaaactaatctacgatgatccagttcacaagagtggttacctctggttggggtatgactcagaggtaggaagagggagacatttctggggtgttaaaagctttacgtcgttttatcttgatctgagtaacgggtacgagtatatatgcatggaaaaattcaacatttgagcatttccacatgtataaattataccccaatagaaaaagtttatttaaatgagttttagattctcttggcattcaacaattttctggactttgatttgagagccaacttttttgtacaaagt

SEQ ID NO: 242257 - DNA, 1193 bp, Homo Sapiens
aatagccaactttgtacaaaaaagttggcggagcggcgctgggcgaccagagcagggtcgagatgtcctacatcccgggccagccggtcaccgccgtggtgcaaagagttgaaattcacaagctgcgtcaaggtgagaacttaatcctgggtttcagcattggaggtggaatcgaccaggacccttcccagaatcccttctctgaagacaagacggacaagggtatttatgtcacacgggtgtctgaaggaggccctgctgaaatcgctgggctgcagattggagacaagatcatgcaggtgaacggctgggacatgaccatggtcacacacgaccaggcccgcaagcggctcaccaagcgctcggaggaggtggtgcgtctgctggtgacgcggcagtcgctgcagaaggccgtgcagcagtccatgctgtcctagcagccaccaccatctgcgactcctgcctgccgcctctctgtacagtaacgccacttccacactctgtccccatctggcttctgctgaccagctttctctcctggacaccgaggattggaaataagggcctggagctgagtagtagccagtctgctgtgaccacaggctcaggtccgaccctgctgcttggccacagcagtggctgggcaagtgggaaccactatctcttgggagcccccaaaagctgggaaatgctggaggaaccaggcctttcccgcttttgcctggctgcagggttcggctccgcccctgccccccagccctcgtgtgtccacaccgcagtgcctctgcccctcgggggactggacacacatcctgccagaggcgctacgaagctttgcccagatgaagccaggtgggctccgcgttcactcccactctcccgaggggtgctggcctccccagggtttgccttcttacggatttagacgaggttcgaggctcacctatcagggcagctctcaggattgtcattttcctctttgcctgtgggtttaacttttgtatttttttaatcacaagtttgatacaaaatgtttttatcgtactctttggagatgcccattctacttttgaatttagcttttactaattcgcatctggaagctcagcaagtgcacaagccttactttgggttaccgtggaaaccactgccacccctccccgatgtggtgcgctcataaaatgctggaattc

SEQ ID NO: 242258 - DNA, 1376 bp, Homo Sapiens
ttgggctacctacaggggctgggctggagcccaaatctgcccaagataaggcgctcctgcagatggtagaggcggcaggggcagctgaagatgatccccttcggcggacggggcggccctttggggggctgatccgagatgtgcggcgccgctatccccactacctgagtgacttccgagatgcacttgaccctcagtgcctggccgcagtcatcttcatctactttgccgccctgtctcctgccatcacctttggggggctgctgggagagaagacgcaggacctgataggggtgtcggagctgattatgtccacagcgctccagggcgtggtcttctgcctgctgggtgcccagcccctgttggtgatcggcttctcagggcccctgctggtctttgaggaggccttcttctcgttctgtagcagcaaccacctggagtacctggtgggccgtgtgtggatcggcttctggctggtgttcctggccctgctcatggtggccctggaggggagcttcctggtccgcttcgtctcccgcttcacccaggagatcttcgccttcttgatctcactcatcttcatctatgagaccttctacaagctggtgaagatcttccaggagcaccccctgcatggctgctcagcctccaacagctcagaggtggacggcggtgagaacatgacatgggccggggcaagacccacgctggggccgggcaacaggagcttggctgggcagtctgggcaggggaagccccggggccagcccaacacggccctgctgtcgctggtgctcatggccggcaccttcttcatcgccttcttcctgcgcaaattcaagaacagccggttctttcctggccggatccggcgggtgattggggactttggggtgcccatcgccatcctcatcatggtgcttgtggattacagtattgaggacacctatacccagaagctgagcgttcccagtggattctcggtgactgccccagaaaagaggggctgggtcatcaaccccctgggagagaagagccccttccctgtgtggatgatggttgccagcctgctgcccgccatcctggtcttcattctcatcttcatggagacacagatcaccacgctcatcatctccaagaaggagcgcatgctgcagaagggctccggcttccacctggacctgctgctcatcgtggccatgggcggcatctgtgccctctttggcctgccctggttggctgctgccactgtccgctctgtcactcacgccaacgcgctcactgtcatgagccaaggctgtggcacctggggacaagcccaagattcaggaagtccaaggagcaaccgggtgacggggctgctggttgccctgctt

SEQ ID NO: 242259 - DNA, 1561 bp, Homo Sapiens
ttttgttttttcaggtgtacttaaaccacacagaaagtagaggaaaggcagagagtgggagtatggttgaagggtttgtgccttttgtaatcagtttacttttggttttaccaagagatgatatcttgaattcattcaaactagtgtctattgcagtacactaggaacatttgaattacaaaaggagaggaggagcctccacttcccacagttgctagtttacctgcaatcctttgagggcagtggtaatctccatgtgagctttctggtaaattccacactaggaccacattcagaacttacctgtttcttggccgtttattcctctagacactctctccctttctactttcgctggaaaatgaaagttttcctcccccacacctttttcagagcaaaagatacgagaaccttaaaagcaggtggtcattgacttcaaggggacgagatcgccctccccactgcctctccccatacagacgctgacagaatagacggggaagcaactatgagagaaacagaagcaatcagaactccagctcagacgacctcaggagttttaccaacaggatgattcaggaccacacacaaaaaatggcagggtgccatttcccccgaatctctcccgcataagatggaaacaacaacttgaggtggcaactgagcaattagttactgatcatttctatgacaattctctgaaggctccaaaggcctcctatcttgaaacccaggtcatctctgcattgctattattgaaaatctttatccagttgctctttgaagccactacttggagcagtaatgttgggaccaacacacaccttttatgatattaaaccagaaaatcagcatcatcattaagacacagagactgttcccaagagggaaagaaaatatatctcctaatcaggccagtagctgaaacactgcaatataacctgtagcttggaatcacggtgacaagcacttaaagctgcatttaatgtcttcattgtaacttcatcaaagtttggcacacaaattctacctttattctaagcataccctttttctaagtctcatgaatcccaaacttaaaccctcttcagagttttttttccccagaattatgtatcttctgggattacctaatcacagtttcacttgagcctgggtccaattttaagaaaatctccctcccttcacgcttatatccactcccctgaccttttctgaaaaatcaagagacttaagatgtggaggcggaaacttactgaaatagccaaatgcttttctatagcaatgaaagctcagtcatttgggacatgatttaatcttgagcttcagagcagaatttgaaaagcaaattaaatccttttgtaagaaaataatttcatcttaacccaatcttttaaaaaatcattacctagaacagtaaaccaaatagtctaatatgaatgttcttatcatgtgaggaaaaaaatgagtagtctttaacactagttagagcaagtctatagaacacgtgtccagaagcatgtagttcccttgctttctgtctttatttcatcctcaccaa

SEQ ID NO: 242260 - DNA, 702 bp, Homo Sapiens
aatttaatagcagctctgtgttgtgattttaaagaacaagataaaatgtgtcattcagcagtcatttaaaaaataaaagactacagatacaaggaaataaaaaccacttttaggagatgaaaacacaaagtagtaggatacccaacatgtacacatcccatcttcaaatttaaaatcatattgtcagttgtccaaagcagcttgaatttaaagtttgtgctataaaattgtgcaaatatgttaaggattgagacccaccaatgcactactgtaatatttcgcttcctaaatttcttccacctacagataatagacaacaagtctgagaaactaaggctaaccaaacttagatataaatcctaccaataaaatttttcagttttaagttttacagtttgatttaaaaacaaaacagaaacaaatttcaaaataaatcacatcttctcttaaaacttggcaaacccttccctaactgtccaagtatgagcatacactgccactggctttagatactccaattaaatgcactactctttcactggtctgaatgaagtatggtgaaacaagtaccaatttttagaaacatattgtcttctcagattgaagtggagggtccagaaatgcaacacccagcattctttaaagaaaataatagctagaatctttctgatacagattccaatccaacttttttgtacaaag

SEQ ID NO: 242261 - DNA, 1226 bp, Homo Sapiens
ttggaattgactaaaagttcaacacattctgatcatgacaattccacttccctcaatgggggaaaacgggctctcacttcatctgctcttcatgggggtgaaatgggaggatctgaatctggggacttgaaggggggtatgaccaattgcactcttccacatagaagccttgatgtagaacacacaactttgtatagcaataatagcactgcaaacaaatcctctgtcaattccatggaacagccggcacttcaaggaagcagtagattatcacctggtacagactccagctctaacttggggggtgtcaaattggagggtaaaaagtctcccctgtcttccattcttttcagtgctttagattctgacacaaggataacagctttactgcggcgacaggctgacattgagagccgtgcccgcagattacaaaagcgcttacaggttgtgcaagccaagcaggttgagaggcatatacaacatcagctgggtggatttttggagaagactttgagcaaactgccaaacttggaatccttgagaccacggagccagttgatgctgactcgaaaggctgaagctgccttgagaaaagctgccagtgagaccaccacttcagagggacttagcaactttctgaaaagcaattcaatttcagaagaattggagagatttacagctagtggcatagccaacttgaggtgcagtgaacaggcatttgattcagatgtcactgacagtagttcaggaggggagtctgatattgaagaggaagaactgaccagagctgatcccgagcagcgtcatgtacccctgagacgcaggtcagaatggaaatgggctgcagaccgggcagctattgtcagccgctggaactggcttcaggctcatgtttctgacttggaatatcgaattcgtcagcaaacagacatttacaaacagatacgtgctaataaggggttgatagttcttggggaggtacctcccccagagcatacaacagacttatttcttccacttagttctgaggtgaagacagatcatgggactgataaattgattgagtctgtttctcagccattggaaaaccatggtgcccctattattggtcatatttcagagtcactgtctaccaaatcatgtggagcactcagacctgtcaatggagttattaacactcttcaggctgtcttggcggacaacattccaggggacagctctgatgc

SEQ ID NO: 242262 - DNA, 1131 bp, Homo Sapiens
ttggtgtcttccctacagaaatcagtgcttccctttctcagatcatgctaatattagtcatagcagcaatataatataaaaatagttgaagaagtctgtttaaacatttctttgtactaatttttgtttttgttattcaacaggtttgatctgtggatgaaatgaatcatgattttcaagctcttgcattagaatctcggggaatgggagagcttttgcctaccaaaaagttttgggaacctgatgattcaacaaaagatggacaaaaaggcatatttcttggggatgatgaatggagagagactgcatggggagcttctcaccattcaatgtcccagcctattatggtacagagaagatctggacagggttttcatggaaacagtgaagtaaatgcaatactgtctccgcgatcagaaagtggaggccttggtgtgagcatggtagaatatgtattaagttcttctcctgctgataaattggattctcgatttaggaagggaaattttggcactagagatgctgaaacagatggacctgagaaaggagatcaaaaaggcaaggcttctccatttgaggaggaccaaaacagagatcttaaacaaggagatgatgatgattctaaaataaatggcagaggtttgccaaatggaatggatgccgattgcaaagattttaatcgtactcctggaagtcgtcaagcctctccaactgaagtagttgagcgcttgggccccaatactaatccctcagaaggactggggcctcttcctaatcctacagctaataaaccacttgttgaagaattttcaaatcctgaaactcagaatctggatgccatggaacaagttggtctggaatccttacagtttgactatcctggtaatcaggtaccaatggactcttcaagagctactgtaggcctttttgactacaattcccagcagcagctctttcagaggactaatgcactaacagttcaacagttaactgcagctcaacagcagcaatatgcattagcagcagctcagcagccacatatagctggtgtattctcagcagccttgctccagctgcatttgtgccaaatccatacattattagtgctgctcctccagggaccgatccgta

SEQ ID NO: 242263 - DNA, 1842 bp, Homo Sapiens
tgtacaaaaacgttggccctcctttccacctcgggagggagggaaggaggggagggaaaagtcccacggaggaggcagaatggccagtcgaggggcgcttaggcgctgcctttccccagggctgcctcgactcctgcacctgtcccgagggctggcctgagacgggactcccggttctcccgctgcgaagcagcgcggccccccggggccggggcagcggcgccggcatgtcgtctggcaccatgaagttcaatggctatttgagggtccgcatcggtgaggcagtggggctgcagcccacccgctggtccctgcgccactcgctcttcaagaagggccaccagctgctggacccctatctgacggtgagcgtggaccaggtgcgcgtgggccagaccagcaccaagcagaagaccaacaaacccacgtacaacgaggagttttgcgctaacgtcaccgacggcggccacctcgagttggccgtcttccacgagacgcccctgggctacgaccacttcgtggccaactgcaccctgcagttccaggagctgctgcgcacgaccggcgcctcggacaccttcgagggttgggtggatctcgagccagaggggaaagtatttgtggtaataacccttaccgggagtttcactgaagctactctccagagagaccggatcttcaaacattttaccaggaagcgccaaagggctatgcgaaggcgagtccaccagatcaatggacacaagttcatggccacgtatctgaggcagcccacctactgctctcactgcagggagtttatctggggagtgtttgggaaacagggttatcagtgccaagtgtgcacctgtgtcgtccataaacgctgccatcatctaattgttacagcctgtacttgccaaaacaatattaacaaagtggatggcaaagattgcagaacagaggttcgggatcaacatcccacacaagttcagcatccacaactacaaagtgccaacattctgcgatcactgtggctcactgctctggggaataatgcgacaaggacttcagtgtaaaatatgtaaaatgaatgtgcatattcgatgtcaagcgaacgtggcccctaactgtggggtaaatgcggtggaacttgccaagaccctggcagggatgggtctccaacccggaaatatttctccaacctcgaaactcgtttccagatcgaccctaagacgacagggaaaggagagcagcaaagaaggaaatgggattggggttaattcttccaaccgacttggtatcgacaactttgagttcatccgagtgttggggaaggggagttttgggaaggtgatgcttgcaagagtaaaagaaacaggagacctctatgctgtgaaggtgctgaagaaggacgtgattctgcaggatgatgatgtggaatgcaccatgaccgagaaaaggatcctgtctctggcccgcaatcaccccttcctcactcagttgttctgctgctttcagacccccgatcgtctgttttttgtgatggagtttgtgaatgggggtgacttgatgttccacattcagaagtctcgtcgttttgatgaagcacgagctcgcttctatgctgcagaaatcatttcggctctcatgttcctccatgataaaggaatcatctatagagatctgaaactggacaatgtcctgttggaccacgagggtcactgtaaactggcagacttcggaatgtgcaagaggggatttgcaatggtgtcaccacggccacattctgtggcacgccagactatatcgctccagagatcctccaggaaatgctgtacgggcctgcagtagactggtggg

SEQ ID NO: 242264 - DNA, 910 bp, Homo Sapiens
ttggggttgctgttgcagacccaggagtctctgaaggcttccgcggctttggggccggttgtgagatgccaggcagaggccgctgcccggactgcggctccacggagctggtggaagactcgcactattcgcagagccagctggtgtgctccgactgcggctgcgtggtcaccgagggggtccttaccactaccttcagcgacgagggcaatctccgagaggtaacatattcccgaagcacaggggaaaacgaacaagttagtcgcagccagcaacgaggtctccggcgagtgagagacctttgtcgagttctgcagttgccaccaacatttgaggataccgcggttgcctactaccaacaggcatatcggcactctggcatccgagcggccaggctgcaaaagaaggaggtgttggttgggtgctgcgtcttaatcacctgccgacagcataactggcccctaacaatgggggccatctgcacgctgttgtatgcagatttggatgtgttttctagcacttacatgcagatagtgaagctcctgggactggatgtgccatctctgtgcttggcagaactggtgaagacctattgcagcagcttcaaactgttccaagcttcaccttctgtgccagccaaatacgtggaagacaaagagaagatgctgtctcgaacaatgcagttggtggagctggcaaatgagacgtggctggtgaccgggaggcatcccttgcccgtcatcactgctgcgactttcctggcttggcagtcgctgcagcctgcagatcggctttcatgttcccttgcccgattttgtaaattggcaaatgtggacctgccctacccggcgtcctcccgcctgcaggagctgctggctgtgctgctgcggatggctgagcagctggcctg

SEQ ID NO: 242265 - DNA, 1586 bp, Homo Sapiens
cattatgaatggggctgggagattataatgtatgctttaaataactctgtagaatgtgtgtaagtaagcttgattgaggagttttcaatcattaggataatgtaagaaatataaaaatactgtaaataataagataaagctttcaaacgtattttctagtaatacttagaaatatccacctgaaatattggtctgaatgcaaagacatcaaacatagggtaactttacttggtagataggagaaatattttaaatcgacaaaattttctaaatttcagtgtctttctccattactttcattttgagactagagcttgtgtaactgacaccataattttgcaagattgttgtattatattttaagattgaaaatgatttcatcataatccatccccaccccacactccctgctcccttccctgagtccctttcctccaagcgtgttgatataaaatgagttgcgtcttaatgttttgttttcttaaaaaccaaatgctataccttatgttcagacaattgtggggcatggaaatggaagtgcaacaaaggactaaggcaccttttcttctttcctttcctttccttgtttgccttggggatggaaacaaacaccacaagaacagccagggtggctggtcggtcttatgtctcttgacaatctacgtaccagccactttcactgggtactctgtgtcacaggctgataagccacagacttcaaaccctgctaggaaagaactttcttcttttagaaatacagaaataaaggtacaacacagtaccttacatggggaaattggtgaatacctgaaaatcttaatgatttaggaataattttgaagtgttctggattattttacaacagaagtcacctctttcttgattatgacacccaagaatatgtatttatagttgtcttcttcccagccagacccataaccataaatcttcctccaattaataatccctggtactagatgtctgagtgtttatcagcttgacttaccagcagatattgccttaggaattgtatttattttttaaatgatggatcaaatggatcaatatagtgttttcaaatgagtaatccttgaaaatgacccatttggggacaacactgtaagcaaaagcactgggaaatatacttcaagagttagaaacatatcaaggattatagattcttctataataatgtgcaaaatcagaatatcgtttgtgtcatctagatacaaaccttagtatggccccaatgctgatcagtggttggaaaggctttttacattaggaaacactgttctctgagacagtagtagtagtttaagtggggctagtggtggggaaaatgcaacagctgtattggcaggactctaaccctcactactgttatttggtgggagagtagaacaggagtcggctacacaatgatgtcatagacacggcccaccctgcccagccactccctcacagcctggcgaactctgatgtcggtcacgtgacaggtcagctgactgatgcacgggaacactgcgggctggagggccgtgaaggtctggtctgggagaatctgaatgtgattgagaacccaa

SEQ ID NO: 242266 - DNA, 1658 bp, Homo Sapiens
aaagcatgtctttttgcttccaacccaaaatacagagggaatgccaactatgagagccatcaggtatttcatcagaaagagaatcaagtctggacgactcatttgagtaacttgatatggacatggaatgtgatattctctgcagcgttcttgtatccacgttgtttcccagatgccccggtaagcttgctcataaaagtagcatccaattacaaccaagagtggtacgagataaagaatgctgaaaacaccgatccggatcataaacttcactaatttatcttggttctccttttctaatggaatctcaattcgaactctgtttagggatataatgccagctaagaggagagaaaccccaactaccacatacaggcagaggggagcaagaacaaaatatctcaatgcatcaacatcgtagaggccaacaaaacacacgccactaatattgtcaccttcaattttattcatcgctaaaaggatgatggttagagttccggggatgccccatgcactggcgtgaaacagcaatgctttcttctcaatagcttcactaccccactttggcacagctgctaaaaaccatgtgatggtaagaattacccaccatacactgccagccatagtaaaaaaatagagtatcataaaaagcatggtacaggctttattatgagatccttgtgtcactgtggaagccttatattgtgcagggatggatgcattgcaggctactcgatcttcaagcaaaaatccaatgaagaaaattaaggataccatcatgtagcagactgcataaaatataataggcctttcaggataacggaatcttgtgacatcaatcaaaaaagttaaaaaagtaaacaatgtggccgagaggcaaatgattgaaatcaatcctatgaaatagcgagcaaatgacagttcttctcttctgaagtacatatttggacaaggaggtgaacaatcacgcacatgcagaaaagaataacccagatcaggatcaatttttaactctcggggacaccaaaaaccatagtctctctgcactgccactggggctccttcagttggttctccagccaaattcagatccacaagtcgaggatatggctcatcacaatctgggaacctaaaaaacaaaacaagatgagaactatttttacttatggggaaatctatcacgatctaacagtttggatttccaaatctggcactcacaaccttatttattcctggagagcaaatgtaatatgtagaaataaagtaaatggtgatatcttgtttgtggtccatacaactagattttcgacagttgagcaaaaaatactagttgtatgtcttgaaaaagtatgatagcctcgagacaaagaaaacaaggttgtgttgcagacatttatgcaactaaggagaccgttgtcatgaattcccttcatctttaatttttttgccaatatctgtttctaagacttcagactcccagtaactagctgtttactgttttatatgcatcaaatagtttctaagaaactatcattaagtttgccaaacacatacataactttatgctgtagctgatttgtatcttcaaatctttcaaattttctaatacaaaccattttcttcacagagaattataaagccaaatgacagaatgccaa

SEQ ID NO: 242267 - DNA, 1246 bp, Homo Sapiens
aggaacccgtgctatgaggcgtgagaagcccctctgcagcccggtctgagagcatatgcaagcgaggctaagagcgtcctgcagagagctctgaggtccgcgctgtgctcctcacctgctcatctgttggcttacagaagcaactccacccaaggtgccacggatgtgaaaccaaggactgcaaagcctttggccatttggagtttaaggggctttctccacgtttagaagagcagtgacacagctgtgccacacgacaagggagcggtgtgcgtcttccgctcagtccctctgtgtgggtggcacgctcactgcccccacagcccctcagcgtagcttggctcctggccatcagcttgcagaaacgcagagctgggaggcggcaagccccaaatgcaagagagctccagctcagtgctccttcctggctcttctgcctccggagttcaaggttaatcctgcatcaggacacacctcactgtctgaagatgcattttaaaagccttctgctctgtttctatcacagactccaaacaggctacaagatcaggacttttcttctgaatacaaaaagggaaatcaaacagggtttgcaagaaagacaaaagatactggcctggtcaccaaactgtctcagaaggagcatttcagatgcacctgtgaggcctctgagaaccaagtcaaaagcagccccagacactgcccttcagggaaccactctccacacgggcttctgggaaggcccttgcctgccgagtatgtggggattcgcttgcaaggaagcaggaagaagtctagtttgctgactcagtgataaacagatgcccagtgaaaagattctagtgaaacagattctagtgaaaagaacatgggctctggagcctgacagatgtgacatgtgactgatacagagcacgcggcccctgtggccttcagctgcctcctctccaacagggctgataacacctgccctaagggatggggaggggcaggggaggccacccacacagggcactagcaaagggtgcagaatgagcagttctgcatcctacaggtgatggaattacttttgaccagctctgaaactcatctgcatctgcactgtgcccgcaggagagaagacccaccaaggcggagaaccgaggaacttcaggtgtctacgccagacacgtgtggccaagattataaatacattgcactaagtgacctgggccctcttcaacgttacgctttgcaaaaatgccaa

SEQ ID NO: 242268 - DNA, 1511 bp, Homo Sapiens
ttgggggagctccttcccagtcctgaggactgtgccctgagaggcagccgctatgatgggcaaattgcagtgtttggggctggttttcaggagaaactgagacgccagcactacctcctggtgggcgctggtgccattggttgtgagctgctcaaagtctttgccctagtgggactgggggccgggaacagcgggggcttgactgttgttgacatggaccacatagagcgctccaatctcagccgtcagttcctcttcaggtcccaggacgttggtagacccaaggcagaggtggctgcagcagctgcccggggcctgaacccagacttacaggtgatcccgctcacctacccactggatcccaccacagagcacatctatggggataactttttctcccgtgtggatggtgtggctgctgccctggacagtttccaggcccggcgctatgtggctgctcgttgcacccactatctgaagccactgctggaggcaggcacatcgggcacctggggcagtgctacagtattcatgccacatgtgactgaggcctacagagcccctgcctcagctgcagcttctgaggatgccccctaccctgtctgtaccgtgcggtacttccctagcacagccgagcacaccctgcagtgggcccggcatgagtttgaagaactcttccgactgtctgcagagaccatcaaccaccaccaacaggcacacacttccctggcagacatggatgagccacagacactcaccttactgaagccagtgcttggggtcctgagagtgcgtccacagaactggcaagactgtgtggcgtgggctcttggccactggaaactctgctttcattatggcatcaaacagctgctgaggcacttcccacctaataaagtgcttgaggatggaactcccttctggtcaggtcccaaacagtgtccccagcccttggagtttgacaccaaccaagacacacacctcctctacgtactggcagctgccaacctgtatgcccagatgcatgggctgcctggctcacaggactggactgcactcagggagctgctgaagctgctgccacagcctgacccccaacagatggcccccatctttgctagtaatctagagctggcttcggcttctgctgagtttggccctgagcagcagaaggaactgaacaaagccctggaagtctggagtgtgggccctcccctgaagcctctgatgtttgagaaggatgatgacagcaacttccatgtggactttgtggtagcggcagctagcctgagatgtcagaactacgggattccaccggtcaaccgtgcccagagcaagcgaattgtgggccagattatcccagccattgccaccactacagcagctgtggcggcctgttgggcctggagctgtataagtggtgagtgggccacggcctcgtagtgcctttcgccacagctacctacatctgggctgaaaactacctcatccgctatatgcctttttgcccc

SEQ ID NO: 242269 - DNA, 922 bp, Homo Sapiens
taactcaccattccccatttaagaatcaacataactgttaacttgtataacagttggcatgggtttcctctgctgttgtacagttaggtctgtttcttcaggaaacctcttctatacctgaaggcaacaggcacttgagtaggaggtctcagctgtcagtagagaattagctgaccggctgggggtaggggcacttatttccactagaagagaaatttttttctagagcaccaactcttatctctctgcaagcagcctgttcaattcctttatacaaacaacaacagcaacaataacaagaaatttttaactggtatcaatagtggagactgcctgtgttctgtgcataagagttgggggagagtaggagagggctcaatcttacaactggagtaattcttcagtagacaagcttttcaggtgcgcaagtctctttggggttatgttgttcagatcagcttacattttatctgaaaggttcttcactctttcattatcatgcttcatccactttctatcttccagaaatatgctgagatcctctccacttataaccaaatcccttcagttttctttgctgagatgtgtcagttcctttttgcatttcttgacttcaatttcagtggggcctggggagggagggaaggtaaacttatgtttactccattatctcaaattagaaattccagtggaggcttttagacacggaagtaacatggataactttatattttaaatatatccccgggatgtactgctaaaaatatattaaagagggcaaggatggatacacatattctcaaagatggaggatctaatttcctctctgagaacatgcagtgtttgggatctctgggagtcaggcacttcactgaaatagtccatcattcaaaatccaacaaactagagaacactttcccaa

SEQ ID NO: 242270 - DNA, 1097 bp, Homo Sapiens
  misc_feature (213)..(307): n is a, c, g, or t
  misc_feature (607)..(641): n is a, c, g, or t
tcaaatagggacgaacccaggcttttagcccatgcaagaacaatggcgagtcttagcccgatcaggagcagcaatgggcacctcgctggatcaggagcacagcggacaccttgctggatctggaggggtggaagtcagcagcaggtgtgcgacgacagcaaacagcagtggtggatggcgagcgaaagctcagctcgagaagtaacaaacacnnnnnnnnnnnnnnnnnnnnnnnnnnnnnnnnnnnnnnnnnnnnnnnnnnnnnnnnnnnnnnnnnnnnnnnnnnnnnnnnnnnnnnnnnnnnnnntaatgcctgggtttatatcccaatcattgtccctcccactgggctctcaggcaatatacgatttgactatttctttacatcaaagctttagagtaatttgtattttagtgagccctctttactacctgattggttgggtatgagctgagttacaagccctgtgtttaaaggcagatgcagtcaccttccccagctaggcttaagaattcttagtcggcctaggaaatccagctagtcctgcctctcataatcatatcactgcactcccagcctgagtaacagagtgagacccttgtctcnnnnnnnnnnnnnnnnnnnnnnnnnnnnnnnnnnnggtagatctataggtacacacaaacttgcacacacacatgccacaggataaagagacttaaattaaccccaatcttagagaaatgaaggtgggtgaggaggcaatttgacccaagtcttcctaagtcaccccatctatttataaaaatgagcactcttacctttagactcttgttcctcatggaagtaaaaggggtctagtttaatgaatatgcagtagacaaacatggaaatagtggcactacctttccatctcctatcaactccacgtctccaaccttgttccccaaagctccaccagggatccaaggcaatcaatccactatcccatcccaggatggcaagagatgtaacgttaggaactcctctagaacttctgccaggtagctgctgggacacctccaaagtctcaatataaagtcaaaacacttcctggaggcctggtgcaatggctcat

SEQ ID NO: 242271 - DNA, 1141 bp, Homo Sapiens
  misc_feature (1004)..(1029): n is a, c, g, or t
actttgtacaaaaaagttggaaactgacacgccttcattcaaaaaagtatttattgggctttagggattagatacacaacagtggaaaaatggcatcttagcacactcagaatttattgtgcagcagttgtgtattttaaggaatctgtagttaaaaggaagagatccaaaggtcctgataacatttcctaacgtttcagaagagttgtcattgagtagtgtttggatttcctctctgtatccctcaccctaccattttctcctttattcttctaagattgttagcgttgttactcaaaacatacacatacaacataccagatggtgctgttctaatggtatttgttcacgtaatttaacgttcttactgcttatactatatacatatttaattttgttgggagcaagaaggttttcaagaaaagataattttgtattagtgtaggaatatattagacaaatgtttagttggtcaaattatgcataagatatttgtaactttaaacattgcaaattgaccagctagctatggaagcataaaattaattgataattaatgttggaaatacatttctaaaatttatatttttatggtgttagcctgtaagagcattttagcatattgaaatgcatgctgcttaagatgtgtctggttcaaatatcaaaacttgctgggtcatttttacatagtagaaacatactgtctatgtgttgcccaattgctgtttgtccactctgaattctggaccctttttggactaagaattagttaaattcatgaactaagagaattagagatggggtagagtaggatcaggacagtggggttacaacagataggaaaggaaagtcagcatttgagtgtagagaaaaaaaaggatcatacagatgtcatcaaattataggctttaatacaggttgctttttttatccaaaaggaaaagcacttatcctatcagaatgtctaccatgttttatagtaataatttgtgtaaaaattgaannnnnnnnnnnnnnnnnnnnnnnnnngtgatgaaaaactcataacataaaatttaccatattaactgtttctaaagaatacagttcagccatgtgaagtacatttacactgtgtgaaacagatctccagaactttttc

SEQ ID NO: 242272 - DNA, 1658 bp, Homo Sapiens
  misc_feature (950)..(975): n is a, c, g, or t
ttgggtattttgaaaacaaaattgcaataaaggatgagcttccatcggtgtgtatggtataccagatacagatggttgcaaggaaaccttttcccccactagaatagtctattagtaactgctaagtcctagcttgcatttttgaaaatgcctttctgcatgttagcacccagactttcctttgtcatattcctttatagctacaacttaactgtagcttatcagagaagctctgtagtcctacactgaagtgtgttcccttggctgttcatatggggctgggtttggttgaacttccattctgtataaatgctagaacacagttactacagattgattcacaaactgcatgtgctggtgcttgaggcagccaaaatggaatgctgtggaaagcatatctatatcttaaaaaacactcagacaggagttaaggacagctttaataatttttttgtttaccacttaatctttatcaactttgattttagttagggcttagctcatggttgaagaaaagtggaaaataacaagtgcccatttaggtttgaagaatccagaatgttttacctttgactttatgagttatagaagcttggctttgctctaggcttcatgttcccaaatgagccatctgtcagtatattcacttaattcttactaatttcagtttcctgtaaaggaaacaacttacatattgatgcttaaatccagaaagtgtaaaaggttttcttaaactgttaaaatatagtgtctgatataaaggatgtaagttactcagctttctgctccctaagccaaacagtgtttgtcttcagtgtgaaatttaactgtaaaaactacttgtaatgtcaagagattatagatcatattattaataaaatggacctgggtctaatattttttttcttcaaagggagtgtgaagctgtttattcttttatttgcatatgnnnnnnnnnnnnnnnnnnnnnnnnnncatgttcatatttccactgatttgaaaacacaaaatttatttttataattttgttgcttgtagcataatcaagtgcaaaatcaagtgcaacctacttgtgactaaatctctttggatttatagctgaggatattgttagctaggttttgtcaatccctaatcattttttaaaatcaatgctgtattcccaggaggctttgagactcctatgaacctgaagcactcccttttgaaccttggaagatcctcaaagagtgagcactcttgtgctcttctaatcataattaattccttaacaaatcagagtaaggaccactgacatatagaaccctcaagccaaagaaccatcacagaatttagtaactttagttctgtgaacatgaaaagatttcttttttggtttccaaaggagattatttatttttccacaaggaaaaacatcttgcagagactctgaattccaaatctgagtgagaaagaaaaggaaaaaaatctgtttcatggtggatttctaagcaacatatatacatgtttttaagacaaccttttgttggcagtgtttttcctgaacaccatatgcaccctaggaaacatgtttttcctttaatcttgttcacatatcagaaagggacatgaaatgctcatactgggcatacaagtttctataagtagttattttttga

SEQ ID NO: 242273 - DNA, 1127 bp, Homo Sapiens
ttggccgcatcgcgcaggaccttagggctggagctggcggagctggtgccgcgctgttccgggtggcgtccaagggccgcggggatttctggaggtaaatctgcagaatggcattttgtttgtgaattctcggatcgaccgggaggagctgtgccggcggagggcggagtgcagcatccacctggaggtgatcgtggacaggccgctgcaggttttccatgtggaggtggcagtgaaggacatcaatgacaatccgcccaggttctccagacaagaacaaagattattcattttagagtcaagaatgccagattcgcggtttccgctagagggcgcgtcggatttggatattggagcaaatgcacaattgagatacaggttaaatccaaacgaatattttgacttagatgttaaaacaaatgaagaagaaacgaactttttagagctggttttgaggaaatccttagatagagaagaaacacaagaacaccgtttattagtgattgcaactgatggaggaaaacccgaactaacaggtacagttcagttgttgatcaatgtattggatgctaatgataacgccccagaatttgataaatccatttataatgtcagattgttggaaaatgcaccaagtgggacattagttattaaactgaacgcctcagatgcagatgagggcatcaataaggaaatagtgtatttctttagtaatcttgttcttgacgatgtaaagtccaaatttataattaattctaatactggtgaaataaaagttaacggggaactggattatgaagactataactcatatgaaattaatattgatgccatggataaaagtacattcccattatcaggacactgtaaagtagtagtgaaactcctggatgtgaatgataatcccccagagatggccataaccacccttttcctgcctgtcaaagaggacgctccactcagcacggtcattgctctgatcagcgtgtctgaccgtgactcaggtgccaacgggcaggtgacctgctccctaatgccccacgttcccttcaagctggtgtccaccttcaagaattactactcgttggtgctggacagcgccctggaccgcgagagcgtgtcgccaa

SEQ ID NO: 242274 - DNA, 834 bp, Homo Sapiens
gtacaaaaaagttggcctttgccgcctaccgaaaaacggcgctgctctgtggggctctggccgcgcctggcctggccgggaccatgtgcgcgtcccgggacgactggcgctgtgcgcgctccatgcacgagttttccgccaaggacatcgacgggcacatggttaacctggacaagtaccggggcttcgtgtgcatcgtcaccaacgtggcctcccagtgaggcaagaccgaagtaaactacactcagctcgtcgacctgcacgcccgatacgctgagtgtggtttgcggatcctggccttcccgtgtaaccagttcgggaagcaggagccagggagtaacgaagagatcaaagagttcgccgcgggctacaacgtcaaattcgatatgttcagcaagatctgcgtgaacggggacgacgcccacccgctgtggaagtggatgaagatccaacccaagggcaagggcatcctgggaaatgccatcaagtggaacttcaccaagtttggacaccgtctctccacagttcctcatcgacaagaacggctgcgtggtgaagcgctacggacccatggaggagcccctggtgatagagaaggacctgccccactatttctagctccacaagtgtgtggccccgcccgagcccctgcccacgccctcggagccttccaccggcactcatgacggcctgcctgcaaacctgctggtggggcagacccgaaaatccagcgtgcactccgccggaggaaggtcctatggcctgctgggcttggctcggcgctctcacctctggctaccttgtgggaataaacagacaaattagcctgctgaa

SEQ ID NO: 242275 - DNA, 1485 bp, Homo Sapiens
ttggctgaatagttaaactctcactgccactaccttttccccacctttaaaagacctgaatgaagttttctgccaaactccgtgaagccacaagcaccttatgtcctcccttcagtgttttgtgggcctgaatttcatcacactgcatttcagccatggtcatcaagcctgtttgcttcttttgggcatgttcacagattctctgttaagagcccccaccaccaagaaggttagcaggccaacagctctgacatctatctgtagatgccagtagtcacaaagatttcttaccaactctcagatcgctggagcccttagacaaactggaaagaaggcatcaaagggatcaggcaagctgggcgtcttgcccttgtcccccagagatgataccctcccagcaagtggagaagttctcacttccttctttagagcagctaaaggggctacccagatcagggttgaagagaaaactcaattaccagggtgggaagaatgaaggcactagaaccagaaaccctgcaaatgctcttcttgtcacccagcatatccacctgcagaagtcatgagaagagagaaggaacaaagaggagactctgactactgaattaaaatcttcagcggcaaagcctaaagccagatggacaccatctggtgagtttactcatcatcctcctctgctgctgattctgggctctgacattgcccatactcactcagattccccacctttgttgctgcctcttagtcagagggaggccaaaccattgagactttctacagaaccatggcttctttcggaaaggtctggttggtgtggctccaatactttgccacccatgaactcagggtgtgccctgggacactggttttatatagtcttttggcacacctgtgttctgttgacttcgttctccaagcccaagtgcaagggaaaatgtccacctactttctcatcttggcctctgcctccttacttagctcttaatctcatctgttgaactcaagaaatcaagggccagtcatcaagctgcccattttaattgattcactctgtttgttgagaggatagtttctgagtgacatgatatgatccacaagggtttccttccctgatttctgcattgatattaatagccaaacgaacttcaaaacagctttaaataacaagggagaggggaacctaagatgagtaatatgccaatccaagactgctggagaaaactaaagctgacaggttccctttttggggtgggatagacatgttctggttttctttattattacacaatctggctcatgtacaggatcacttttagctgttttaaacagaaaaaaatatccaccactcttttcagttacactagttacattttaataggtcctttacatctgttttggaatgattttcatcttttgtgatacacagattgaattatatcattttcatatctctccttgtaaatactagaagctctcctttacatt

SEQ ID NO: 242276 - DNA, 1602 bp, Homo Sapiens
ttgggtactaaactccaagatgaccagggatattttgagcaagaagacgacatgatggaagttccatatgtgactcctcaccctccttatcatttgggagcagtggctaaaacctgggaaaatacaaaggagtctcctgctacacattcatcaaactttctgtatggtaccatggtttcatacacctgtaatccaggatatgaacttctggggaaccctgtgctgatctgccaggaagatggaacttggaatggcagtgcaccatcctgcatttcaattgaatgtgacttgcctactgctcctgaaaatggctttttgcgttttacagagactagcatgggaagtgctgtgcagtatagctgtaaacctggacacattctagcaggctctgacttaaggctttgtctagagaatagaaagtggagtggtgcctccccacgctgtgaagccatttcatgcaaaaagccaaatccagtcatgaatggatccatcaaaggaagcaactacacatacctgagcacgttgtactatgagtgtgaccccggatatgtgctgaatggcactgagaggagaacatgccaggatgacaaaaactgggatgaggatgagcccatttgcattcctgtggactgcagttcacccccagtctcagccaatggccaggtgagaggagacgagtacacattccaaaaagagattgaatacacttgcaatgaagggttcttgcttgagggagccaggagtcgggtttgtcttgccaatggaagttggagtggagccactcccgactgtgtgcctgtcagatgtgccaccccgccacaactggccaatggggtgacggaaggcctggactatggcttcatgaaggaagtaacattccactgtcatgagggctacatcttgcacggtgctccaaaactcacctgtcagtcagatggcaactgggatgcagagattcctctctgtaaaccagtcaactgtggacctcctgaagatcttgcccatggtttccctaatggtttttcctttattcatgggggccatatacagtatcagtgctttcctggttataagctccatggaaattcatcaagaaggtgcctctccaatggctcctggagtggcagctcaccttcctgcctgccttgcagatgttccacaccagtaattgaatatggaactgtcaatgggacagattttgactgtggaaaggcagcccggattcagtgcttcaaaggcttcaagctcctaggactttctgaaatcacctgtgaagccgatggccagtggagctctgggttcccccactgtgaacacacttcttgtggttctcttccaatgataccaaatgcgttcatcagtgagaccagctcttggaaggaaaatgtgataacttacagctgcaggtctggatatgtcatacaaggcagttcagatctgatttgtacagagaaaggggtatggagccagccttatccagtctgtgagcccttgtcctgtgggtccccaccgtctgtcgccaatgcagtggcaactggagaggcacacacctgacatatagtagggactcaagaaccattcccttctcccagttttccccaa

SEQ ID NO: 242277 - DNA, 1101 bp, Homo Sapiens
ttggctgttccctaagtgtccaatttggagaaaacacccacacgcaggataaccggcgagtgacgcggagtggctgcgagtccaagttatcactaacggatggggagcttgggctgggcacagtccagcgtactgaacccttcccccaccgtttcacctgcatacagagccgcccacggacgccagagccgggaaccctgacggcacttagctgctgacaaacaacctgctccgtggagcgcctgaaacaccagtctttggggccagtgcctcagtttcaatccaggtaacctttaaatgaaacttgcctaaaatcttaggtcatacacagaagagactccaatcgacaagaagctggaaaagaatgatgttgtccttaaacaacctacagaatatcatctataacccggtaatcccgtatgttggcaccattcccgatcagctggatcctggaactttgattgtgatatgtgggcatgttcctagtgacgcagacagattccaggtggatctgcagaatggcagcagtgtgaaacctcgagccgatgtggcctttcatttcaatcctcgtttcaaaagggccggctgcattgtttgcaatactttgataaatgaaaaatggggacgggaagagatcacctatgacacgcctttcaaaagagaaaagtcttttgagatcgtgattatggtgctaaaggacaaattccaggtggctgtaaatggaaaacatactctgctctatggccacaggatcggcccagagaaaatagacactctgggcatttatggcaaagtgaatattcactcaattggttttagcttcagctcggacttacaaagtacccaagcatctagtctggaactgacagagataagtagagaaaatgttccaaagtctggcacgccccagcttgtgagtatttttgcctgggttatttcatgtggaatattttataaagttgcatagaaaatgaacagtttaaaccgtggagggcagcttcattcattccattccttactgtagaactgtttctctacagcctagtaatagaggaggagacatttctaaatcgcacccagaactgtctacaccaagagcaa

SEQ ID NO: 242278 - DNA, 1529 bp, Homo Sapiens
  misc_feature (1067)..(1081): n is a, c, g, or t
ttggatcagaaccagataaggctgatcccttttcctttgaaggtcctgagattgtggactgtgacgggtgtactattgactggaagaaaggaaagaatgttactgtcaaaaccatcaagaaaaagcagaagcataagggtcgaggcactgttagaacaattacgaaacaagtacccaatgagtcctttttcaacttcttcaatccattgaaagcatccggggatggagaatcactggatgaagattctgaattcacattagcctctgattttgaaattggacactttttccgtgagcggatagtcccgcgggctgtgctgtacttcactggggaggccatagaagatgatgacaattttgaagaaggtgaagaaggagaagaggaggaattagaaggtgacgaggagggagaagacgaggatgatgcggaaattaactctaaggtgtaatttttgtctgttaatcattcatacgtttctagaaggaactcagccagccggcggaatgcaagcagcagtaggaagcggaggcgggtgcctggcagaccggctgtcgggactccaggcctgtgggcggggcctcggtccttgccgcagcacaatcccgtggacagagcttactccatctaactcgttttcaagtgcatgattttcactttcacttttcctttttccttattattttgcttaacttgtacagtggcaactgaaatgcatttcagaaataggaggtttcgtccagcaccctctgcagccttggtgcctgtagctctggacttccctgggcctttccctgtgggagggccctgtagaccacatcagggtggggtgggggtcacttggcaaaaagggccgaggtctggtgatgtggttcccaggatctggaacctctcccacccctcctgcagttggactgaattcttccctttcatccgaagaaacccacttgctgtttccagccgctgaatctgctgagtgtgcagcctgcatcacctgctgtatgccgatcatctcagaaagggctgtgtagagtagggccctgttctccttaggatgttgcttcttgannnnnnnnnnnnnnnaggggtgggtcagggttgtgacacaccagcccaggtgagagctgctgcgggtcacctcatatttatttatcccttcttgcctgtgaggactgcggcttttcgctgtggctcgtccttaacgtttctgaaccaccttggtgccctgagcaggaagatgtgccacttcctagcaggcgcaaggcctgtgcggaagaaacgccgctccctgccaccagggctgaagatgcgagcccgtcctcatgacgcaggcgccaccctgctgccggagccgggcttcggcagtcttctccactgagggactgggctgggaaagtcctgcgtttcagtggagcgtatgagcgtcaagtcctgctttctcagtagccccattgcggggccccaccattcatcctgtctgaaagtcctgggtttggtgtgaccgcttggcggctgtgggtggggttttcaa

SEQ ID NO: 242279 - DNA, 1460 bp, Homo Sapiens
  misc_feature (96)..(113): n is a, c, g, or t
gcttcaggtgtgtatcccccaagaatttcaaatttatgtggatttattttattggtacataatctgtaaacttcttaaggcattaacatgaaaagnnnnnnnnnnnnnnnnnnatattgtggctcaggttatattttgaagatgttttgagtttatcctccaataggcaatgaagttgacaaggttttatgaaggaataaccaagtccctggagtcctgtggctgttgccacagtaatgcgtcctgctgtaaacaggacaggtgtgtcctgttgagaatgtgagcgggctcttccagcctcctggtccctcctgactctgccacgcccctcacctcactggcacttcgataactgactggacgtgttaatgggtcttttagggttctaaagggtgaaccacacttttaaagccccggctgtggttcggagggttagtgctgtatgccttttatttccctttccctttgaggtactgaaaggatgaaaaggtggtgtcatgttttggggagaatcttacttctcaaatggaaattgcactttttgctgaatcctttgcatttttttggtagtaagcagttcattgagtatcaggtcctcaaaggaatgagttggcccggctagggtgggccctcttgacctaacttcagagggggccttggctcagtaggtgtgaatcagggaagccacattgtcctcagggtgctgtatgaagctgggtgtgggcggattcctcccacaccttcacactggcctgcctccaactcatacagatctcggagcggtcggtacttcattcataggtccctgttcaggcagcagttctgtgggctgtggccctctcccctccaatatgtccgaaaccattgtgatgggtggcaaatcccagggagctcctaagccctgctctgcccacatcactgccacagagaagtcagaggaagggacttgttgctaaaaaatcctttaaaaggttaaatactttaaaagattaaagcaacataactgtaaacatatcgtataaaaatgaaaaacacaggaaccctcttcccttccgcctggtgtgggcttgggaaatgggcaagcggccccagcaatcatgggaggaactcttgcgggggagcggtctgggattccaaatgggcaggtcacacgaaggtcacgatgcttctctgcatcctgaaaagggctggggacagggccagtgggggtggtaagggtatttatagcacagtgcttgaaaagggaagattaatgtgtaaatataaaggacacacaggctgggggttggtcagaggcaagaggagggtgcctctgagcttcaacccctcccaggaacaatgagctcaaattggaagagtccaagtggaatcggggggatggtgtgagcgccccctgttcagtctttgacaattgcatacagaaaagcagctggtatggggtttgggtgtcaatgaaaggg

SEQ ID NO: 242280 - DNA, 1109 bp, Homo Sapiens
tagggccaggtttgactcccagctccccactcgttagctgggacccgatcgtctacgtttattatgaatgtggaaatttcctaggaaaatgcaaggaactttcccacgtgtggcagatgattttcaggagaaggagaggccctagaggccgtggggagagggttggggaagggccttccataaaggaggctcaagggcagggaggtctggggcaggcggtttctctccttgtggtcagggtctgatagaggccacaggccctgaaaagatatgttcgtgtttgaaattttactctaataaaaagtttttaaacttctgagatgtagtctctaccaagtcaatgaaaccttagggagtggaggtgaccctaggggtctgggaaggacactttggaatctcctccgtgtggccaaggacccaggaacagcctgagccccaaacctccgatctcaccagggccggaagccaggcacctgggcaaagccaggttgggcggcagagaagcccatgggccctgacagtcagcttgcagcctctacgtgtgtttgcagggggactatttcatgcctggttccaccccaaattcctagcccttgaagccccgggaatggggtgagggctccctgtttctctaggctgcccctgcagaccccagaccaatgactcttgcaggttctccccaactccactgccaccccaacttcaagaatgaggaatgcggcccctctgagccaccatgtaagccatgtggacactggtggcaaagacagagaacgcattttaaggacatacatcttatcctcattgcctctgagggaggtaaaggaggaaagattgtgataccccattttacacctgagaggcccagggctctaagggggatgaggcatttacccacatgtcatagctaggacgggctggggctaaagtcaggtcaccttcctctatccccgaactgcctccctaacatgtgggagagatgtgaggacacacagccccatcctagagacagagaaggtaaatacaaattaaagatcaaacagggaccccacatacaagatccggcttgcagggtgtggctggtttggacagcactgggtttttgccaa

SEQ ID NO: 242281 - DNA, 1520 bp, Homo Sapiens
  misc_feature (754)..(817): n is a, c, g, or t
cctataaaagccaactttgtacaaaaaagttggcaccaactggccagcctcggtgcaggtcagcgtcaatgccacgccgctcaccatcgagcgtggcgacaacaagacctcgcacaagccactctacctgaagcatgtgtgccagccaggccgcaacaccatccagatcaccgtcaccgcctgctgctgctcccacctcttcgtgctgcagctagtgcaccgcccatccgtccgctcggtgctgcagggcctcctcaaaaagcgcctcctgcctgctgagcactgcatcaccaagataaagcggaacttcagcagcggcaccatccctggcacccctgggcccaacggagaggacggggtggagcagacagctatcaaggtgtccctgaagtgccccatcaccttccgcaggatccagctccctgcccgaggtcatgactgtcgccacatacagtgctttgacctggagtcgtacctgcagctcaactgtgagcgggggacttggaggtgtcctgtgtgcaacaagacagctttgctggagggcctggaggtggaccagtacatgctgggcatcctgatttacattcagaactctgactatgaggagatcaccatcgaccccacgtgcagctggaagccagtgcccgtgaagcctgacatgcacatcaaggaggagccggatgggccagcactgaagcgctgccgcaccgtgagccccgcccacgtgctcatgcccagcgtgatggagatgatnnnnnnnnnnnnnnnnnnnnnnnnnnnnnnnnnnnnnnnnnnnnnnnnnnnnnnnnnnnnnnnnagcgactaccctggccagggtaagtacagcaggctagccttgaacctcagatgaccctgggcatatggctcctctccccagatcagtctcctcacctgcaagaatgtggctatgcaggtcacacacctaggttatcagtgttgccacacaaaacatgccgcggggcacctccagcccctcccatctcagggacgtggcggtgaaggcacagtctcagctatggtcccaggaaacagacagtggggcctccacccttccttccccgtttggattaaggggctcctggctggaacacctcacaggactggccccatctggggcccccctctgggacccacctcacacgcgtggtgcgtttgtttgtggctgctcccattcctataacctccgagaccttcactcctaggaatgtcccaaggccaattcccttggcagcaatgagaagaaatgcccttttccaaatagcgacttctgcaaaacccgctgttgtttgtgggtgagcactgcaagtcccacccatgccacagccagcctccctcctggctcctctgccagcggtggccttccccagccctcacccaggccccgactctcctctcacaagttccagcttcctggggcctggaaactttccctgagtccttcccacccaccacgcccagcaccccaacccttgctgagttcaccccgggaccaccccccc

SEQ ID NO: 242282 - DNA, 1613 bp, Homo Sapiens
  misc_feature (130)..(185): n is a, c, g, or t
tccccaattccctgttaaactgaactctgtaacccaacatccatactgtgtttcatctacacatcacttttcaaggtctttcctatccaccaattcccccaaatttagccactcttagtgtgcctaattnnnnnnnnnnnnnnnnnnnnnnnnnnnnnnnnnnnnnnnnnnnnnnnnnnnnnnnntgactgctttgagattcagtgtgaaataacattcatcagttatttaacaagtcaacctcagaggtattttctgtacatgcaccttacagtggcataatgtctctgcagaagggaagagacagtataaatttggaattcaatcaattaaatcctacaattgcgaagttgtacatttactgtgggcaaaacgtagaaaactttacaataaacacatcttaagaataacccaatggggaaacttttcatacattcacacacacaaacgcacactctcgccgaatctagactccctcccgcctttccaaaccctttgcttacataacatagtttaggcaacaatataaactcactttgtaggaaaacttttaaattacactatatcggataaaaaataccattgcttcattttacaaagcaattaagcagtgacccttcttaatgtgctttaactaaagagcactttgcagcaaagttcagaaataactactgaattgttcagtagcactaaatagatgcaacatgctctaacagtaaggtgcttccactttctcaccccttttccatctgaaataaatcttgctggtcactcctctaaccatagctctttttctatgctaagcagtaagtgggaaatagaatctgtttaaaatgcacacttaattttatgttatcatttacatttagtgcaataattaggtaaaacttaaggtttctgctttcattatcaaatggctgcattttaacaatgtgtctgcaatggttttgaaatgtcttacagctgttcattttttacaagtaacctggtaaagcgtatgaaatttcaactccctgatagagcccttaaggacccaatagtactttttacacattggtatctgatgttaagtttgtaatacttcaataataaagctgaaaaaagaaaaccccaaaaaccttgtatttagctttgcctaggctaaaagcattgacttaaatttatacaaacactcatgtgactgtaacttaaaaatggtgtcttagggaatgtgtaaaattaaattgtattaattgtatactgatcccattccaaacagagagaatgctgcccattagtttttgtttcactgatttaagagttttaattcttagtgtctgctatggcccaagtatgctttgcaacttgacacacattctgtgatataaagtggccatgccatatgttaccaaatattactacatagttcaactttgtggaaacaatttttttccttattacatagagtaagtcaaagtgctgaaaattattttctggttttgtgttatgagaaaagctctacatttctattcccactattacagctgtgtctaggagtctccttttaaaaaatgcattacagaaatatttcagttccacaatgaagaattaaggaatgattgtttttatgccaa

SEQ ID NO: 242283 - DNA, 623 bp, Homo Sapiens
ttgtacaaaaaagttggcgaacattcatgtacagaccaaacggaccctgtgagcatggggctgccagtgaaaggaggatgcctgggaatgaaatcaatagaagagatgcagaaagcctacggaaaaacagcgtgctgatactatttgacacagcaatgattatttcttacctttggcaccttcctgcatttttattctgttcagcctcttctgctgctctcttagcagggcttgctgctgaatctctaaggtgtgatgatctcttggaggatccaggtacataaatttcagatcaactcgtgtttctgaatctggtataaaaaatatgttatataactaagttaaatgttgttttcaaatgggattttgtaaaacttcactgtaagtaacatgagtaacctaatttcaaaatcaaggaaatgatagaaatagtgaaacatcactaaagtcaaaggacagtaaaatagccacaaaactaaagaatatgaaattaatattctttaataagtgtcttttcacaaacttaccaacataaggaataccccagaacaagcagtggatgttgcattgtccatctctacctgtcctagccctgccaggatgccacccagaacacagactac

SEQ ID NO: 242284 - DNA, 2299 bp, Homo Sapiens
  misc_feature (355)..(370): n is a, c, g, or t
  misc_feature (392)..(400): n is a, c, g, or t
  misc_feature (2112)..(2128): n is a, c, g, or t
  misc_feature (2241)..(2249): n is a, c, g, or t
tacagtgtattgaccggagggcagcagagccctccagtggcgactggctaatgcacgcgctgccctcctcatgcagctgttgagctcccacttcggtcgacaaagtgaaggactaagctggctctaaccacacacacacactgcgctgcaatgctcacaccttgggggaaaggacttctcattattaaaaaccaaggactcactggcggacgggcaggccttgtgttttgggaatggctgatggcgccctggcccttccgtagcgaagatgcagctcgtaggcccaggcctcgaggttgcctcccagctttctgagtattgagagtttgggtttcacagatcaattatttctgannnnnnnnnnnnnnnnggtcagtgaactgacaactacnnnnnnnnntccccatgttctttaaaatgcatttgaaaaacactagccctgtggctatttctctgtatttgaataatggcaactgctttaaaggaaatggtcaaataggcatgttttcctctggcagggtcaatcatgcttagctgcaggtgatttaaattagattactagtcaccttcacttacgatcctgccagtttttgctctctatatactttaaaactctttcacattagatatgattagtatgcatttacatacattttaaaagagtatgaaaacatctggaggcttttaataagactttccaattcccttttgcagcaaagaggcagaatcagttcaacacaccgatgtaagagaaaaaagaaaatctcaacaaatcaaaataatattcaaaccacaacatttagtttatctacatcccgctcaacagcaacatttataatatatcaataatctgtatcagaattttctctgtagggtacctttttcatatgttctgattatttacaactgtacaagcgaagcacactccaagtgcacgtatttaatacagtattgactatttgcatttacaggattttccaacattctgaaaaaagatcaactgttgaagatctttaaggtatattacaaaaactactactagctcttgtactacagtatgcttactcagtaaaactagcgacaggagatccacgcagtaactgagtaactctgacccactcacgccaacccagggccgggctccatggactctaagctgtcttatacaaaagttaaggcaaagtcattttcaagtttaaataaaattcaagtctttaaatattggatggaaataattttttcttaaaaaaaaccctcagtcttgttaaataacattttgtggaataaagtgtatggttacatttagcaggaaatattcttattttaatgtttgctgcttagaataaagaaaaatttgaggcattttaaaacaaaataatttatatttaactttattataaacttgctaactttagtgcatccttgttcttcagaagtgcagcacttctggaagtgaatcaatgaggccctcgtcttggaggtaaaagagcaggaactttatcctccaccagccaaagagggggaaaaaccacaaacaccattctctcacgattacataactcttaaatccatgtgctgatgcagaggtacagggagatgtccacacggagctgaagatgtggactctctccaaccagagtgctggggaacacggacagaaatgtgcacagagcagggccggggccatcagctcacaggggtcaaaacaacatcatggtacaacttctggtaacatgtcagtgggcaacaaagtgtatgttttcatgtaggttctattcacaatgtgctttgaatttatattacataatagccacttgaaactggagtgagaagctggttacttgcttgcagtgcatcagaaccaaggtttctggggtggcccctgcaggttcactccgcccaggagatcaaaaaggatgcgctctctacattcttaaatgccacagtcccctaccaacggcttaggtggaagcacagctcccacatcagcactgatgccctggcgcggccagcactgcctttacgaggccacacctgcctctgccaaggccactggccctcattcatttgcggggacgttctagagatatgcacttacagaccagttacttnnnnnnnnnnnnnnnnngcagagttcccttaatttagaaaaactcactatatatagcttgcattcagagccacatggaggcttaataaaaaataccaatttgttaggataaatgctttttctatcttggnnnnnnnnntcagacttatgcatcacctccagttaagcaccaacctaaaataaggccaa

SEQ ID NO: 242285 - DNA, 768 bp, Homo Sapiens
tgagaatctaggtctgtctgcttagaaggccttggaggccatgacaaatctggcagtgaacacacctagttctagatcttggtttctaaataccattcttcattcaaagaaaccaggcatgcttggagaaacagttcattctggccctggggaggggaaactacaggttgaacatgaaacatcttgtgtcagaaagtcaggaagtgcacaaggaacaatgaaaacacatcaaaagctcacaggagtcagatctgcaagcagggttaggtgggcctgtttttcatcccttccatcacccatgcctgaccccagagagtcttccatggaaagagagaaacagaggacatgcaagagccagggaaatgggaagcagatatggcaaaatattaaaaatgggtgaatctaggtgaagggcacatgggtgcttattgttctattcattcgatctgagatttgaaaactcttaaaataaaaagttaggaataaataataaactaccctgcaagtaaaacctgctcttatcacccacctctctgggttttcaattccctccctgtaacatgggcatgctgatagtttgtggccagtgccaagaaggctggatcagactttcctcagcacccaggaaaaaaaatcagagcctgtgatcttgtccccaggaagtatagagaggagcaaggggacccaaatttgtataatattccttaagtgattctgggaccagcagatgatctcctttcatgattttaatttctaaggccaagaaga

SEQ ID NO: 242286 - DNA, 1755 bp, Homo Sapiens
ttggatcttttccctgacactcccactgatagttgacagggagcattgagggacagactcataactttgcagcatcctgctctttattccaaaagagttccttaacaaagttttatgacccagaacgaaacaaaacaaaacattggtgttattgagggaattaaatctaacattgagagaaatttggatttaagaaatatgttatttaaaaagtatgttacagtattaacatctggcaatatataatctattcagtcctttctagccatttgttggcaagaaataataattaaattttttattaaaacaaaactttttacattgggagttattaagagcgcctccttttggtgtattcgtttacaaataaaaatgaaatatttatttgcatttttattgtgctttatgttgtttgctttatgttgttctcttgggcttacttccgagttggagatgggaaagtgcccaatgaaagaaatataaaagaatactaattggaagctgaacaattattttgctttataagggaagtcctgcaaagtttgtcatacagtttacgtcactataaaccaaaatacaatccatttcactttccatttgaagacttggaatgtatcatcatctgcgtttctgtcatttcacgtgaattttcttcaggggctgacttcacagcactagaaatcgatacactgacttgccgtttcagcatcctcataacctttctcttataccctttacatgcaaagaagtagataaaagggtccatgcagcaattgaagttcatcacgcatactgtaaagtgcagagaaatctggaacgaatgtctttggctacattccaggaaattagagaaacgaagcttcttaatcatatgttgaataattgcaacatggtaaggtgtgaaacagagaacaaacacaacaataataagaataattgtgttgagagccttttgtttacaccagatttctcagtgagtgggttttgtttggcagttctgaagagtttgcagcagatctgagaatagcagatgagaatgattataagtggaagtacatatcctatgaaacatgccccaagcagaatccagggaagagatttagtttcttcaaagtttggatactccatgcatgtaatcctttcagcctcctgctttgacatagggttgatgaggagtgggagtgtctgagcaaatactagaatccagacaaatatgcacacgccttttgcatgttcaatcctttttatcttgttgtagcgtagagggtgcaccacagcaatgaagcggtcaatactcaggcaggtcataaagttcacacctgcatatgtgttgatgtaaaacactagcgcagttatcctacacaaggcatctccgattctccagtcaaagcccattgcatagtaggctattcgtgtaggcaaagcggtggtaaaaagtatatcagaaatcaccaaatttgttgaatagagggtggtagagttgatttttttcctgttttgaacaatgacgaccaaggctagtaagtttcccacgagcccaatgatgaagacgaggctgtaatgcagaggcattactatcctggccgtgctgtgatgtgcatagaggtcacagtcatttccctgaggagttgcagagggcggagtaaaattgtttgccatttgtatatccattggtggtggtccaggtgtatatcagtgactcgttcgggtctctgtgtagtagctgtgagtagttgccaacttttttgtacaaag

SEQ ID NO: 242287 - DNA, 961 bp, Homo Sapiens
tacaaaaaagttgggtcatgtccacagcaactcagcatcagacagtggtgggagatgctgttgcagagactcaacatgttctgtctaaagaagattttctgaaattgatgcttcctgacagccccttagtggaggaggggcgaagaaagttttcgttctatgggaacctgtctccaaggaggtcgctttaccgcacgctgtctgacgagagcatctgcagcaacaggagggggtcctcctttggcagttcccggagttccgtgcttgaccaggccctgcccaacgacattctgttcagcaccaccccgccctaccacagcacgctgcctccgcgggcccaccccgcacccagcatggggagcctgagaaatgagttctggttctccgatgggtccttatcagataagtccaagtgcgcagatcctggcctgatgcccctcccggacacagccacagggttagattggacccacctcgtggatgctgcacgggcatttgaagaccagagggtggcatccttctgcaccctgacagatatgcagcatgggcaggacctggaaggggcccaagagctgcccttatgtgtagatccaggcagtggcaaagagttcatggacacaactggggagcgttctccatcaccactgaccgggaaagtcaatcagctggaattaattcttcgacaactccagaccgaccttcggaaggaaaaacaagacaaggccgttctccaagcagaagtgcagcacctgagacaggacaacatgagactgcaggaggagtcccagaccgcgacagctcagctgcggaaattcacagaatggtttttcaccaccatcgacaaaaaatcttagccaatccgcacctcatcaagggaccactgggaaatgccccttgtccctttgaagtcacaaacatgtggtttttctgtgtgctttcaaccaatcgtaaatgtttttgc

SEQ ID NO: 242288 - DNA, 1242 bp, Homo Sapiens
ttggctgatttgcacccgggacgcaggcactcgctgtcacctgtctgtcgctgtctcgggtggttcttactgatttgcatctgggatgcaggcactccgtgtcacctgtctgtcgctgtctcgggtggttcttactgatttgcacccgggacgcaggcacttgctgtcacctgtctgtcactgtctcgggtgtttcttactgatttgcacctgggacgcaggcactccgtgtcacctgtctgtcactgtctcgggtggttcttactgatttgcacctgggacgcaggcactcgctgtcacctgtctgtcactgtctcgggtggttcttactgatttgcatctgggacgcaggcactcgctgtcacctgtctgtcactgtctcaggtggttcttactgatttgcatctgggatgcaggcactccgtgtcacctgtctgtcactgtctcgggtggttcttactgatttgcatctaggatgcaggcactccgtgtcacctgtctgtcgctgtctggggtggttcttactgatttgcagctgggatgcaggcactccgtgtcacctgtctgtcgctgtctcgggtggttcttactgatttgcatccacataggctttgggctctatcccacctgtcgtcttcggattctctaatacgcaggagtgctcttctgttagtttactcatagtttattaaagtacagagaaaagacatccaggatgataaattttacagtccttgccggggactgccagcttccagtggtgttgcctggcaccagtgtgacccccggtgcctgccccgctgaaccttctgtaaactgtttaactgtgctggtggtttcccattctctaggcgctgagatgcgtctggagagccagagggcctgcctgaaggaatcacctgagcctgtccgtccaccaggagtggggagatgcccccatccagtcctggaggacccgctgctcctgctgctcccggggatggagcaaggccaaggctgcgggaggctgggagccctgccctgcccatccctcccgcaccagcgctgtccctgcacactttggttcagtcccgggtgaagacaggcttgagggctgccccagcaggctctgggtatgacctgcctctggccctgccctgggtgacagactgggaggaaaacacgctggacctgggcaggcgggatgtgttggccacagggagtagcggaccggcaccgggtggggactcctaagactgggcc

SEQ ID NO: 242289 - DNA, 910 bp, Homo Sapiens
  misc_feature (813)..(854): n is a, c, g, or t
ccaaatacaccaggcctcctcttgccacagcacccttgcaaggaacactcaacttcctgcccatcaagcaatgcccactcttgaagacagtccaagcatcactacctgtaagcagctttctctgatccagacagggttaggtgcctaccctgctcccacagcttcctggaataggcctgtcctcaaatgcatcactgtatatatttactctcctatctgcctaggcagactgagctcccagcatgggatcccagcatggggtgagcatgaaagagtggcaaacagagtggcataagacagataaaatacaaaaggcaatttacaaaggaccaggaccgcagaggcagagataaaccagtgggctcagacttctgagcgtctcagatctggcgtcctcgactccctgaacctgcatcagggtcatgggtcacaggggtgggggtggggtggagcggggtacctgggacagcccagggctttggcataccgcacggcctgctccagtccctctcggaaggccgcctgtctcccggggacggcccccagccccatttcccccttctcttggtctcccgggggcgtgttgatcagtacaagccgcagccccgcttctcgcgcggcgcgcgccagcgcctcaggcgtctccgcgtacggccaggccacctcgacggcctcgaagcccgagctgcccgcggcccgcacccgcgcggggaggccggggagctcggggaatagccaggacagattggcggagaagcgcagcggcgccatgcctggggaggccgggccgggcggagtccgcgggatccaaannnnnnnnnnnnnnnnnnnnnnnnnnnnnnnnnnnnnnnnnntctccttgctggccctgcgaacgaacgagcactgttcgtggttagaaaagcgccaa

SEQ ID NO: 242290 - DNA, 696 bp, Homo Sapiens
catacgaatttggtggggggacattcagacgttagcatatgtgatctagtagttctgctcctggatatgtatccctaaaggacctaagaagggacttcaagagagatgtgtacacccatgttcatagcattactcataatacccaagagggggaaacaatcagcagatgagtggataaaccaaatgcggtctatggatatagtggtgtattatttggccataaaaatttctggtacttgctaccacatggctttttcccagggaaagtattagtttttgtttgacaaaacaccttgataggtcatggttctgcaaggcagagatgtgaaacaaagaaagctaactgttgcaaataataaaaagttggagttcctttgagctaaagctaaagtggcaaaggaggaagaggttcatccctacccttctgcaccccattattttgaagaaaaagagtggcctgaccctccagatctttcttttctggaggacactgggcgaaaagtagttgccccagtgactgttcgagcagttgatggcttgctaagtaagaatgctaaacacaaaaggacaactcttgtttgatcccactcatatgaagggaaattcagaaagaaagtgaaatagtggttaccagggtctggggtgagggtggaatttggagctctttttcagtgggtacagagtttcagtttgtgg

SEQ ID NO: 242291 - DNA, 1556 bp, Homo Sapiens
  misc_feature (88)..(102): n is a, c, g, or t
  misc_feature (890)..(948): n is a, c, g, or t
ttgggggagtacactgaggatgaagacccagctgcacgaaggaggaaaaagaaaagttattatgccaagctacgccaacaagaaattnnnnnnnnnnnnnnnctagcagagaagtaccgggatcgtgccaaggaacggagagatggagtgaacaaagattatgaagaaaccgagcttatcagcaccacagctaactatagggctgttggccccactgctgaggcggacaaatcagctgcagagaagagaagacagttgatccaggagtccaaattcttgggtggtgacatggaacacacccatttggtgaaaggcttggattttgctctgcttcaaaaggtacgagctgagattgccagcaaagagaaagaggaagaggaactgatggaaaagccccagaaagaaaccaagaaagatgaggatcctgaaaataaaattgaatttaaaacacgtctgggccgcaatgtttaccgaatgctttttaagagcaaagcatatgagcggaatgagttgttcctgccgggccgcatggcctatgtggtagacctggatgatgagtatgctgacacagatatccccaccactcttatccgcagcaaggctgattgccccaccatggaggcccagaccacactgaccacaaatgacattgtcattagcaagctgacccagatcctttcatacctgaggcagggaacccgtaacaagaagcttaagaagaaggataaagggaagctggaagagaagaaacctcctgaggctgacatgaatatttttgaagacattggggattacgtaccctccacaaccaagacacctcgggacaaggagcgggagagatatcgggaacgggagcgtgatcgggaaagagacagagaccgtgaccgagnnnnnnnnnnnnnnnnnnnnnnnnnnnnnnnnnnnnnnnnnnnnnnnnnnnnnnnnnnngaaaagaagagacacagctactttgagaagccaaaagtagatgatgagcccatggacgttgacaaaggacctgggtctaccaaggagttgatcaagtccatcaatgaaaagtttgctgggtctgctggctgggaaggcacagaatcgctgaagaagccagaagacaaaaagcagctgggagatttctttggcatgtccaacagttatgcagagtgctacccagccacgatggatgacatggctgtggatagtgatgaggaggtggattatagcaaaatggaccagggtaacaagaaggggcccttaggccgttgggactttgatacccaggaagaatacagcgagtatatgaacaacaaagaagctttgcccaaggctgcattccagtatggtatcaaaatgtctgaagggcggaaaaccaggcgcttcaaggaaaccaatgacaaagcagagcttgatcgccagtggaagaggattagtgcaatcattgagaagaggaagaagatggaagctgatgggggttgaagtcaaaagaccaaaatactaatcactagttacaccagagatgctccacaaggatatgctccccactgttttctttctacatt

SEQ ID NO: 242292 - DNA, 1171 bp, Homo Sapiens
  misc_feature (125)..(171): n is a, c, g, or t
ttggcagtaatggcggaggctgcaactcccggaacaacagccacaacatcaggagcaggagcggcagcggcgacggcggcagcagcctcccccaccccgatccccacagtcaccgccccgtcccnnnnnnnnnnnnnnnnnnnnnnnnnnnnnnnnnnnnnnnnnnnnnnntggactaaacaggtcacctgcaggtattttatgcatggggtttgtaaggaaggagacaactgtcgctactcgcatgacctctctgacagtccgtatagtgtagtgtgcaagtattttcagcgagggtactgtatttatggagaccgctgcagatatgaacatagcaaaccattgaaacaggaagaagcaactgctacagagctaactacaaagtcatcccttgctgcttcctcaagtctctcatcgatagttggaccacttgttgaaatgaatacaggcgaagctgagtcaagaaattcaaactttgcaactgtaggagcaggttcagaggactgggtgaatgctattgagtttgttcctgggcaaccctactgtggccgtactgcgccttcctgcactgaagcacccctgcagggctcagtgaccaaggaagaatcagagaaagagcaaaccgccgtggagacaaagaagcagctgtgcccctatgctgcagtgggagagtgccgatacggggagaactgtgtgtatctccacggagattcttgtgacatgtgtgggctgcaggtcctgcatccaatggatgctgcccagagatcgcagcatatcaaatcgtgcattgaggcccatgagaaggacatggagctctcatttgccgtgcagcgcagcaaggacatggtgtgtgggatctgcatggaggtggtctatgagaaagccaaccccagtgagcgccgcttcgggatcctctccactgcaaccacacctactgtctcaagtgcattcgcaagtggaggagtgctaagcaatttgagagcaagatcataaagtcctgcccagaatgccggatcacatctaactttgtcattccaagtgagtactgggtggaggagaaagaagagaagcagaaactcattctgaaatacaagaggcaatgagcaacaaagcgtgcaggtattttgatgaaggacgtgggagctgcccatttggagggaactgtttttac

SEQ ID NO: 242293 - DNA, 1292 bp, Homo Sapiens
gtacaaaaaagttggcacatggcagtcattcacatacaggccccaaagccactgttagtgctgcagtagctcctgtggacattggaaagcccggagagggcgtggaagaaatcagctggcccccggcaggttctctggggttttgtgcccaaggctcctggagccctaaaaactttcaaaagttaactccccacgtccccatcctgcttgggtttctggacttttctgaggcaccggcagaggggtctcattgctcccttgagtgtaggggcagccctttaacctggctccttgagtccctgctttttctgcttctgttgccttcttcctcgtcttcctctctctcaatatctccctctctttgtccctccccagttcctgacctggccatcccggggtgcccttgaccagccccgtgtctcctcagggtgtcccagcaccagcctggcacagagtggggctcagttagagtatgtgggatgttggtttcgccaggtgagtgaatgaaaggactcgaccaccacagctgagccactagctgggccatgcgaagagttctaggtgcaaaggctggagggtggaattcatttttgagaggtgtgtgagcagcttccgacccctgccccatttgaacgggggccttgctggtcgcgtccctgcattcacccgcgcggccatcccgtcatccaacagttgatcctaactgagcacgcccacggccctggtctggcctgggcaccggccaccgtagcccatcccttgatggcctctgtgtccccaggagggcgggccggggggttgcccaggggctggagcagtggactgtggctccatagaggtaggccggagggtgtgagggcagattcaagctatccccagggctctgctctggtcggagccagccccttctccctctctgccttccccgccccattcctgatgctgaactgttctggacccctggccctgagtctctcaggaccaaagtgggcacgggaacagctgtagtgtgtgcccccccgggctttggccacaggtctccctctcgaggtgtggttgtgactgcgacccttcccttgccgtgatgccttcctcccccggggcttggtccagctccttcactctctagcagctgctggggcccacctcccatgccgaggaccagcaggggaaacctccagggagcatctgcaggctctgcttctgcccggctgctggcttgctctccctggtggctctccagcggccagcttcctcacccacccggcactctgctttgctctgtctcctga

SEQ ID NO: 242294 - DNA, 1366 bp, Homo Sapiens
taatagccaactttgtacaaaaaagttggcctgaagatcctaaacctttctggaaatgaattgaagtctgagcgggaattggacaagataaaggggctgaagctagaagagctctggctcgatggaaactccctgtgtgacaccttccgagaccagtccacctacatcagcgccattcgcgaacgatttcccaagttactacgcctggatggccatgagctacccccaccaattgcctttgatgttgaagcccccacgacgttaccgccctgcaagggaagctattttggaacagaaaacttgaagagtctggtcttgcacttcctgcaacagtactatgcaatttacgactctggagaccggcaagggcccctggatgcctaccatgatggggcctgctgttccctgagcattcctttcattcctcagaaccctgcccgaagcagcttagccgagtatttcaaggatagcagaaatgtgaagaagcttaaagaccctaccttgcggttccggctgctgaagcacacgcgtctcaacgttgttgccttcctcaatgagttgcccaaaacccagcacgacgtcaattccttcgtggtagacataagcgcccagacaagcacattgctgtgtttttctgtcaatggagtcttcaaggaagtggacggaaagtcccgggattctttgcgagccttcacccggacattcattgctgttcctgctagcaattcagggctatgtattgtaaatgatgagctatttgtgcggaatgccagttctgaagagatccaaagagccttcgctatgcctgcacccacgccttcctccagcccggtgcccaccctctctccagagcagcaggaaatgttgcaagcattctctacccagtctggcatgaacctcgagtggtcccagaagtgccttcaggacaacaactgggactacaccagatctgcccaggccttcactcatctcaaggccaagggcgagatcccagaagtggcattcatgaagtgatcgtagtcatgcctcagaagcagtcccccctgtaaatagtccttggatattaccgtctggttgtcgtctgtcatctcctcctgtctggcccgaggccgccccgtgactgtgaccgagggagggagggctgcctgatccctctcctcgcctgccttctggaagacttcagaagattgagcctcactggtgccaggaagccaaagcttactttgtagaactgacactaaactacccgaaggacttaggtgctttgtgtacttaaccccaggacctccttactttttaatataaagagtgatgttgtatttcgtgttctgcactttttaatataaagagtgatgttgtatttcga

SEQ ID NO: 242295 - DNA, 955 bp, Homo Sapiens
ttggcccgctctcgtgacctttcccctccattccgcacctccgagtgctggccgggcgagaggctggcggctgggctctcgcgcccctccctgcagggctcaggctctccccctcctgtcttctccgcgctgttcctcgtcatggcggccctcagcaagtccatccctcataactgctatgagatcggccacacttggcacccttcctgccgggtctccttcctgcagatcaccgggggcgccctggaggagtccctgaagatctatgctcctctgtacttgattgcagcaattctccggaaacggaaattagactattatttacacaaactactccctgagatcctacaatccgcttcatttctaactgctaatggggccttgtatatggctttcttttgcattttaaggaagatacttggaaaattctactcatggactcctggctttggtgccgctctgccagcatcttatgtggccattctcattgaaagaaaaagcaggagagggctgctcacaatttatatggccaacttggccacagaaacactattcagaatgggtgtagcaagaggaaccatcacaacattaagaaatggagaagtccttttgttttgcatcacagctgccatgtacatgttctttttcaggtgcaaggatggcttgaaaggatttacattttctgcacttaggttcattgtagggaaggaagaaattcccacacattctttttcaccagaggcagcatatgcaaaagtggaacaaaagagagagcaacatgaggaaaaacccggaagaatgaatatgattggtctagtcaggaaatttgtggattcaatatgcaaacatggaccaaggcatagatgttgcaaacattatgaagataattgcatctcttattgcattaaagtttcatcagaatgtttagcgtggggtacttgatccagtgctgcct

SEQ ID NO: 242296 - DNA, 1249 bp, Homo Sapiens
ttgggtcagcaatcccgggtgtttagtctgcagccgagcagctaaagggagaaagaatcgctcaggaaagacacactgcagactccaccggcaccctgcaatagatggattccgactacacaagggagaaaacgcggaggtgacactctcctgcctggaaagaggacgaacgaccaaacaaacgcaaggactggactccatgccgaaggtatctggaagtcgtgacacgccacagatcctgatcttggagaaaatgggcaagtgacatacaccatcttggagagttttattctaggaagttccataactacatatgtaaccattgacccatctaatggagccatctatgccctcagaatctttgatcatgaagaagtgagtcagatcacttttgtggtagaagcaagagatggaggaagcccgaagcaactggtaagcaataccacagttgtgctcaccatcattgacgaaaatgacaacgttcctgtggttatagggcctgcattgcgtaataatacggcagaaatcaccattcccaaaggggctgaaagtggctttcatgtcacaagaataagggcaattgacagagactctggtgtgaatgctgaactcagctgcgccatagtagcaggtaatgaggagaatatcttcataattgatccacgatcatgtgacatccataccaacgttagcatggattctgttccctacacagaatgggagctgtcagttatcattcaggacaaaggcaatcctcagctacataccaaagtccttctgaagtgcatgatctttgaatatgcagagtcggtgacaagtacagcaatgacttcagtaagccaggcatccttggatgtctccatgataataattatttccttaggagcaatttgtgcagtgttgctggttattatggtgctatttgcaactaggtgtaaccgcgagaagaaagacactagatcctataactgcagggtggccgaatcaacttaccagcaccacccaaaaaggccatcccggcagattcacaaaggggacatcacattggtgcctaccataaatggcactctgcccatcagatctcatcacagatcgtctccatcttcatctcctaccttagaaagagggcagatgggcagccggcagagtcacaacagtcaccagtcactcaacagtttggtgacaatctcatcaaaccacgtgccagagaatttctcattagaactcaacccacgccactcctgctgtt

SEQ ID NO: 242297 - DNA, 1221 bp, Homo Sapiens
  misc_feature (289)..(356): n is a, c, g, or t
  misc_feature (507)..(565): n is a, c, g, or t
ttggcgcctacacgcgccagcaggtcttggagctggagaaggaatttcactacaaccgctacctgacacggcgccggagggtggagatcgcccacgcgctctgcctctccgagcgccagatcaagatctggttccagaaccggcgcatgaagtggaaaaaagaccacaagttgcccaacaccaagatccgctcgggtggtgcggcaggctcagccggagggccccctggccggcccaatggaggcccccgcgcgctctagtgcccccgcacgcgggagccacgaacctnnnnnnnnnnnnnnnnnnnnnnnnnnnnnnnnnnnnnnnnnnnnnnnnnnnnnnnnnnnnnnnnnnnnccccggaaaaatctatctgccctcccccacactttatatacgaataaacgcagaagagggggaggggaagctttatttatagaaatgacaatagagggccacggggaggccccccccagaagcaagattcaaatctcttgctttctttctnnnnnnnnnnnnnnnnnnnnnnnnnnnnnnnnnnnnnnnnnnnnnnnnnnnnnnnnnnntaggaggaggctgcagctcctcgttttcagctttggcgaagatggatccacgtttcatctttaatcacgccaggtccaggcccatctgtcttgtttcctctgccgaggagaagacgggcctcggtggcgaccattacctcgacacccgctaacaaatgaggcccggctcggccgcctccgcctctgctactgccgctgctggaagacagcctggatttcctttctttgtcccccactcccgatacccagcgaaagcaccctctgactgccagatagtgcagtgttttggtcacggtaacacacacacactctccctcatctttcgtgcccattcactgagggccagaatgactgctcacccacttccaccgtggggttgggggtgggcaacagaggaggggagcaagtagggaagggggtggccttgacaactcaggagtgagcagggaaattgagtccaaggaaaaagagagactcagagacccgggagggccttcctctgaaaggccaagcccaagccatgcttggcagggtgaggggccagttgagttctgggagctgggcactactctgccagtccagagttgtacagcagaagcctctctcctagactgaaaatgaatgtgaaactaggaaataaaaatgtgcccctccca

SEQ ID NO: 242298 - DNA, 1192 bp, Homo Sapiens
  misc_feature (336)..(387): n is a, c, g, or t
cagtgcctggtatctggccagcaagtgatcaatgatgatcccattaccatcctgggaccccatcagagctttctgaggtggagggaagggcgtgctggggagcacaggtgcaggtcacaagaaggaagtcagtccccataagccaggtatctaaccccatccctgctcccccaaggtaagggccagcatctaaccccacccctgctcccccaaggtaagggggccagcatctaaccccatccctgctcccccaaggtaagagccagcaacggaggcctgggaggctcctgggttctgggccgcagcgcctctgcggggtctgcaggcttcgctctnnnnnnnnnnnnnnnnnnnnnnnnnnnnnnnnnnnnnnnnnnnnnnnnnnnncctgcggagcgccgcggtgggagtgctggagtcctggcccgtcatccccgtctgccccacagcgaggacgatgctgccactgtataccgcgcagccgcgatgctgaacatgacgggctccgggtacgtgtggctggtcggcgagcgcgagatctcggggaacgccctgcgctacgccccggacggtgagtgctgggccttggcggggtccccgaacggggaggaccccacgggctctgagtcgcatgctcgcctaggcatcctcgggctgcagctcatcaacggcaagaacgagtcggcccacatcagcgacgccgtgggcgtggtggcccaggccgtgcacgagctcctcgagaaggagaacatcaccgacccgccgcggggctgcgtgggcaacaccaacatctggaagaccgggccgctcttcaagaggtgggcggggcctccccggagctgggcggggctgctcttggggaggtgggcggggtcactccagagatgggcggggccgctcttggggaggtgggcggggccactctccagagctgggcggagcagctctcaggactaggcggggccgctcttagggagctgggggagcgctcctcaagagatgggtgggggcactctcggggaggtgggcggggtcgcttccaggaggtgggcggcgtcgctctcaggggtactgcagtggagcctgctgccaacatcctctggacactgttacttctctcctctccccccacacccccagcaccaccacatctaatggcacaatcatctgccctcttctcaacactgaccaa

SEQ ID NO: 242299 - DNA, 1694 bp, Homo Sapiens
  misc_feature (685)..(760): n is a, c, g, or t
actttgtacaaaaaagttggctgttctctctcaatataaaagaaaaataaaagggaagtaatttataataaaatttatttcagtatttaatgatgtggcacaactatgccataaagcataagatcaagtgtttgcatctatctgtaaatagaatcatcgtgtaatttagaaagtatgtctgctgcctatacagttgtgtgcattgttgactcatgttgtgttgccattagtggtgtaatttcttcctgaaattgcagacaactcttaggaaagctctaaacaaagaataatcaatactttctgagttggaaaagattttttaaagtcacttattagtccaagcactcatcttattgaatcaagatatattccctgtttatcataatttcaaagatccttacttctgttgtgtgaatattattgcacatgtgatcagtagagtgggaagtgttactgggactcctaattttttcttccaggtattgcttatggctttcagctgtgtgatatctgaagcgatactctttctcaattattcaaatgattggccttcatctttttttaaatgcagcctgcagtaaccaatagaataccagtagtaaccagtagacacattcttcccatcgtgaacgtgagagctatatttaagtctattcaatgcctaacttaatggcacaattttatnnnnnnnnnnnnnnnnnnnnnnnnnnnnnnnnnnnnnnnnnnnnnnnnnnnnnnnnnnnnnnnnnnnnnnnnnnnnagttgccatttcccgggtaagatgtctgcagtccgtatgctgagaacctggagcaggaatgcggggaagctgatttgtgttcgctattttcaaacatgtggtaatgttcatgttttgaagccaaattatgtgtgtttctttggttatccttcattcaagtatagtcatccacatcacttcctgaaaacaactgctgctctccgtggacaggttgttcagttcaagctctcagacattggagaagggattagagaagtaactgttaaagaatggtatgtaaaagaaggagatacagtgtctcagtttgatagcatctgtgaagttcaaagtgataaagcttctgttaccatcactagtcgttatgatggagtcattaaaaaactctattataatctagacgatattgcctatgtggggaagccattagtagacatagaaacggaagctttaaaagattcagaagaagatgttgttgaaactcctgcagtgtctcatgatgaacatacacaccaagagataaagggccgaaaaacactggcaactcctgcagttcgccgtctggcaatggaaaacaatattaagctgagtgaagttgttggctcaggaaaagatggcagaatacttaaagaagatatcctcaactatttggaaaagcagacaggagctatattgcctccttcacccaaagttgaaattatgccacctccaccaaagccaaaagacatgactgtccctatactagtatcaaaacctccggtattcacaggcaaagacaaaacagaacccataaaaactttcaaaaagcaatggtcaagactatgtctgcagccctgaagatacctcattttggttattgtgatgagattgaccttactgaactggttaagctccgagaagaattaaaactcattgcatttgctcgtgaattaaactc

SEQ ID NO: 242300 - DNA, 790 bp, Homo Sapiens
agcagctgctgagtgtttgttgagtgacgtacaaggcacacctccaagtgttctgtacagcatttttattgatgtacaaaatagcctgttcaccattcaaaaacgtaatctgcatagtaagagtttctcttatccctatttacagagaaggtttttagtgcaaaaacatgaaattgtgtcccagcccaccccttctagcacacgcattgatcagttttgttccatgctggccgggggttatttggctatattttgggcctccagccattaatgaattgcattatcttcttcacctgcaatttgctcaatttgaaatcctctgagaggatttcttccgttagctgaacaagcaggttcccatcaatcttttcagtaacaaagaatgatatgacatcttcggacaaaccaatgaaccgtagtgacttggacacttcctctatagagagtcctgataggtcagcaggtggctgccatggggaaccgtcgccacaggatctgggggccagctggagatggagcggagatgagaaagggtaggaggcagagaagatgtcctgcatgccctttttaacaaaatactggtcctccgagagatctggtgacccagacttggggtcttcctcagcaccatcaattttcagaggcaaaggagatgtttcggaggcgaccttctcttccactagttttggagccctggggggtaaggcagggcatgacgtactctgctttgtcacaccagctgcaagagatttcacatctgtgctctccagagagtagctggctgacccaa

SEQ ID NO: 242301 - DNA, 955 bp, Homo Sapiens
  misc_feature (351)..(362): n is a, c, g, or t
aataaaggacatgggtactttattttcaaaacactccatatgttgcaaaaacacatagaaaaataaagtttggtgggggtgctgacctaaacttcaagtcacagacttttatgtgacagattggagcagggtttgttatgcatgtagagaacccaaactaatttattaaacaggatagaaacaggctgtctgggtgaaatggttctgagaaccatccaattcacctgtcagatgctgatagactagctcttcagatgtttttctaccagttcagagatgggttaatgactagttccaatggggaaaaagcaagatggattcacaaaccaagtaattttaaacaaagacacnnnnnnnnnnnngcaacacaatatacatcacagtgaaatgtgtaatccttgcaaattgcaagttgaaagaattaaattcagaggaggggagagaaagagtactcagtagggactgagcactaaatgcttattttaaaagaaatgtaaagagcagaaagcaattcaggctaccctgccttttgtgctggctagtactccggtcggtgtcagcagcacgtggcattgaacattgcaatgtggagcccaaaccacagaaaatggggtgaaattggccaactttctattaacttatgttggcaattttgccaccaacagtaagctggcccttctaataaaagaaaattgaaaggtttctcactaaacggaattaagtagtggagtcaagagactcccaggcctcagcgtacctcattagtaattgttttgttgtttcatttttttctaatgtctcccctctaccagctcacctgagataacagaatgaaaatggaaggacagccagatttctcctttgctctctgctcattctctctgaagtctaggttacccattttggggactctcttattttaatagggcaataaacccaacttttttgtacaaag

SEQ ID NO: 242302 - DNA, 1698 bp, Homo Sapiens
gcaaaggggaatcaaggaaagagcatttcatttccagagggatgtcagtggaatgggagcttcgggacaaactttggagatcagattcattttttaggaagtacagatatcaagactgagctttattgggagttagatagaaggcttaattcatgaaaatgtatgtgacacattaggacaactttgctcttggaaacctttagcatccccaaggcattgttttgactcatcaaggcaagcatgatctggtgggtgcattttttttctaggagaagagggagagtgacagctttcctatttgccaggcacaagttagatattttcacacacctgatttcttttcatcttaacactccataaagtggggattggtggctctagtgtttcacttgtcaaaaatatctccaaactagccttccagagaacctgtgtccccatctttatagtttgtaaagttgtatatcctaacatcctatttctagcttgtatttataatttgtatccctgtttcctagaaaagttgctgaagcagcttacaactggatatgtattccatgccattttcacctgaataaaaacaccaaagtgacgataaatctaaaaggcaggcaggaaccaacatttattaaaactttgctgtgtatatattatgctggacagctaataacatcatattgtaattcctactgaatacttttgctcataagagttttttcactacagacaaattgggtaaaatcaaaatctgacattacaggaattactcaagtttcaatgcgtcactgtagctaagccagtgaactcctttgttctgctgagaaagagcaagaagaatgaatcttcacaggactactagaaacttcttcccagcaaggtatgaggaagcccttaagtcaatggtgtaatcctaaatcagggtttgaaaacccacctaacaggcagagtgaaattaacaggcaaagtgaaatcaggcttccctgggaaagtctcaataggaaacaacctgtagatgagtcatctttgaggtaccaggtgtttcttaactctctccaagtccttcccacctccagaataccagcagaaaacacaaaagagaacttggtcacttcttcttgcctctcctcttatccttgcctttacctttgccttttgaatccttgctatcaactttgtctttaggcatcttgaaaccaccaatttctctccgtatcatagtgcctcgccaccaggcctggagctttataacgctctttaattccaagagatcctgttttaccttcttcttgctcctctccttttctatacgatcttcaatgatgacctgttcatactctcttatcatctttgccaggtcttgaaggtgtgctaagtcactggcctttgtggctttgagagcatttagttcattctgtttcatttctgtgtccttatcgtatttctccatccagaactccagcctctcctcaagtttctgctgctcctttctaaggaacatttcaatctctgtatgagtccgggcctcttcttcggttttcatcctgagtttctcaatctcttccaccaagagttcctctgttctgttacactttttctgggtctgggcaatctgcagctcggtattggttttcatgtagcgattctccaagttggattttgccttcatcttttgcagttggtccttgccaacttttttgtaca

SEQ ID NO: 242303 - DNA, 991 bp, Homo Sapiens
ctttgtacaaaaaagttggctccttgacaaccctggcgggggttcgctggctgcggccccggctccggcccccgcaggagcagcaccccccggggaaagacattttctgctcccaccgagttggcagggcctgcttcctgaatctcctgggtgtgtcttaactgccagtcccagcacctcctgaaagccccactctcctccagtggtcacagtggaaggatcatgggagaaacagaagggaagaaagatgaggctgattataagcgactgcagaccttccctctggtcaggcactcggacatgccagaggagatgcgcgtggagaccatggagctatgtgtcacagcctgtgagaaattctccaacaacaacgagagcgccgccaagatgatcaaagagacaatggacaagaagttcggctcctcctggcacgtggtgatcggcgagggctttgggtttgagatcacccacgaggtgaagaacctcctctacctgtacttcgggggcaccctggctgtgtgcgtctggaagtgctcctgacactctgtcccctgccccgtcccctgcagggccttttcctgccactcatctggggtggggagcagccctaggcaggtcctggtttttccaaggagagttggggtcttttctttttgtctttgtgtaccagtttcctgagccacgcccagtgtgtgaacttgacatctccatccccaggctctcaactgtctccctcggagtctcagggtgtggacggggcagcgggcatgggtctgtgtgggagacgtggggtggggcggtgtgacagggtagaggaggtgggagatgagatcttccgcacaggaacacgccagtccccctttctccagggctgccttccccttgcattctggggagccccactgccctgccatctccggtactgccgggaagtgtcggccgcccttgccattagtgggtcatatgaaaatggccccaaaagggagatgat

SEQ ID NO: 242304 - DNA, 2107 bp, Homo Sapiens
tttatttcatatgacagcacgtttcacaggatatgtacagaatgtctgtgtaccactgactttaatactgtacttctataaagtttatagttataaatattgtatgccacataagcaataaaattcttacatataaacagcaatctaatatagagaacacagagttcacaaagagatccttagtgtctaacttctgctctgcttttaacagaactagtaaatatttaataatacatagaataatggctagttatttgcagcatacctttaactttcataactttgtgcattttcagcaacttgccaagtataattttcctgataaaggctgggctgctgatatgtatattttagacagtagtttatattcaataggaaacattgctcacagatctgcaatttgcactagtgaagtttacctaacaatgaattattttgctaatggagagcaaataccatatacactagtcacatggatgttaaagccacagtttcaacaagttaattcacattttgaagcaactgcttatagtaatactgctgtttaagacgctactgctgaaatgattagaacctccaaaaagcacaatataaaactcacaagagttatttctaacagcaaatcttggctgttaacagagaagattacttctataaatatagtattttgataacatttgagcatttagaaaaatgctttttttctaatagatttgctttataagtgcagtgcagtttgctgtgcttttaacattctacatattcgtagccatgaacgctattttttgatattccctcaatgtacatctttaaaggttaagtgtggacataggaatttaggtggacatatacaactctttatataaaaggaatgttaatgtaagtcttaatgggtaaagatgattgtaactgaaactgacaaagaaacaactattgctcaaggagttttctgattggtttacttaatgatatcaaaatactacattctgtaaaaattctgtgtacttcttcaaaaaattaataaaagcgggatcagttgcatattggcagtgcaggagacaaaatccgcagctactttgaggtatagcctctaaaaacttaaagcagcatcatagatgtgttatgtagcctcgtaagaggggggagaacacacactgggtatattcccaattcaaagcactcaggggacagctgctttccctgctaaaagcaaagttccagagcaaaagcagcaaaaagaaaatatgggagggatatgggcaacgtatactcgaacgtacgcagagaagagagtacggttagctctaatatttctcattgaacttggtggtatgtgccttccctgcatataaggccatagtgcttttttgggagcgctagaatatccatccacttgacagtgaccacaaaataggctgtttccagctgcaagaacctcctcctggagaaaagcgtatgaaggtgctggagtgaaaagtaacaaggttgtgtgtatttgaaggggttgggtgtggaacggtagaaaattctgattctgtggtgagattattctagttttgaaaacaaaattaatgaaaggtccaaattacatttgcagccatctttttggtaatgtgatattgaaaaagggactttgttggaacttttaggtataatttggtctgagttatagcctagaaattaaagtatgaattgtaaaaatatgtaaatgtatacagaagtacatgtgtttgtatgtattatatatgtacacatacctatacttttttcctttaaagcaatgcctttcaaaactctgttcactgtaaccttggcagctctttggtaaatactcaaagataccaattgttaacaagtatgagagggctggtggaaatgtcagctgaaagttgggtgggctttttgagattcttcagaagactgaccgaaaagtttctgaataaggactgttttctaaagtataagtactttttatggctactactgtctcctattcatccaaagagaaatacatcaaaactccagttaacaatgagaagggtttttccttatttccaatatacacatagtccaactctgtacacatcaaatagtggtgttttgccaa

SEQ ID NO: 242305 - DNA, 1078 bp, Homo Sapiens
ttggtatttgtcttggttcatctcttgagttaaattagatctgggaactttagcttaatccatgcatgagcgccaagggtctttgagcattctataatcttatgcagaactgtgtgggtatgtattgtttgtgtatttttctggagagtcagttactctcactagatcataaaggggacttgggaaccaaaagtatctcaagacatttaatcctagaagcacaaagaaagtataagttgtctcttatattgcttttgccaaatccagtttaacacttcagtaacgttaactattgtgtcatggttctaagggtctttactttattaactcagtgaatccttgtagcagtctataaatggattatattatcacccctgttttacagatgataaaactgagacacaggttcataaagttggtaagaaggaaagccaggcttcatactcaggcagttgggttttagagaccatgctctttattactgccctgtactgactgtgtatgtaatatgcatgtattagaaggcccataaatagaaactcattattattattatagatttctgaatagcaggcttgcttttttagtctcaagaatgcaatcagtggaaatacactagcaaactaattcatgtattttataagcacttattacacatctttcatgtgcgtaccattacgcaataattcacttaaattatctcatgtaatgcttgtagttgcattcaaggtaagtttgataatccccattttacagatgaggaaatttaagttctgagaggctagataacaagcctcatctcattcataaagcatcagaagaagagttcagctcatgtctgtctccctcagataaggtattccgtagcttctctgcagggttagaatttcagtttagtactacaaacattgctaaaaggtcttctaaacttggggacaagatttatagaaatccacctagttattgtcagtccaaggcagcatctttttttatatagagatgagagtaaaaaatcattgatttgagtaaatcaccatttactgtgctctttctttccattttaattttcactgttaaa

SEQ ID NO: 242306 - DNA, 1022 bp, Homo Sapiens
actttgtacaaaaaagttggctttgttcttattttcctaatgtgtcgcccgttgtcttcaccccatttatggtcagtgcgttagtctcccactgctgtgaagtccgtgcgctgctgttgggaagatggtgttgctgggtaactggctgtgtttcttccagattacagagtcacgggagacaccgttctgtgttactgctgtggcctgcgcagcttccgtgagctgacctatcagtatcggcagaacattcctgcttccgagttgccagtggccgtaacatcccgtcctgactgctactggggccgtaactgccgcactcaggtgaaagctcaccacgccatgaaattcaatcatatctgtgaacagacaaggttcaaaaactaagcatccagaggccctgagcagctttcagcactggaggtgaagagagcgtgtttttaaaatacagagacaagcacgtcaaggtgttttcacagccccctgagggaagggacgcagggtctccgacaggtgctctggggtgactcttctgtggagctttaccctctgagtgagaccctccccagagccccgggggccgcagcccgccctcctggtgagcgctgggcagggctcgtggtggcatcagcagcagagacgaagcctttctgtaacatgcggccgtcccgccgagaggggcagttttgctcttttgtacattttccgaaactacagttaaagcagaagtctgttttcaggaaaagtttcaagggagaagggcaagtttatcaaaaacattgtttcaggagaagggagcataagtttacagcctacaggacgtacacaatatcctgctgctgggaaaaccacagcattttatctattttttattttaataggtttggtgcttatcttctaataagatttaaatgtcacaaactgtagcacaataatataatttataatttacaaattgactaaaattgggtatagtatggtatttgaaagaataagcatatgcttctgtgtattaaaaaaagaaa

SEQ ID NO: 242307 - DNA, 1222 bp, Homo Sapiens
  misc_feature (278)..(563): n is a, c, g, or t
ttggcccagaactctccacaccgttttttgctgcagtttctcagttagccatgtaaaaacttgctagatagcatgcattttatgacatgcatttccttatgtatctgttttaattgcctcctagtcaccccattggtaaagggagattctcaccccaggattatggggatacctagacacatgacacccagcactagataaggagatggatggcaatgtattagtcccacatgttcacagcagggcagaagaggacatcgcgtgccacacagggtcannnnnnnnnnnnnnnnnnnnnnnnnnnnnnnnnnnnnnnnnnnnnnnnnnnnnnnnnnnnnnnnnnnnnnnnnnnnnnnnnnnnnnnnnnnnnnnnnnnnnnnnnnnnnnnnnnnnnnnnnnnnnnnnnnnnnnnnnnnnnnnnnnnnnnnnnnnnnnnnnnnnnnnnnnnnnnnnnnnnnnnnnnnnnnnnnnnnnnnnnnnnnnnnnnnnnnnnnnnnnnnnnnnnnnnnnnnnnnnnnnnnnnnnnnnnnnnnnnnnnnnnnnnnnnnnnnnnnnnnnnnnnngttcacaactctgaggtaggtgtaattatccccatttcatgatgagtctcataaagtttaggtgatgtgcccagaatcacacagggttggaatcaggattagggccctgatcgggctgcattcaaagaccagtttgcttcaatacatcatactacggtccaagacttctgctatcctgaacccactgttccttcctctagtctagttttcaaattcgcagggacaaatatggccctgaaggctccatgagcagacgagaaggctggacttcgcaactgggtcaccttagatccggaactagagaatgacaccgttgtttccgggaggaaaaagaaaaagcgcttgacccggaagctgcgtgtcccatccccgcgcctgcttctctgactggggtgaggccgcagcggactgccctttcccaagatggcgtcgaacataggttcgagacggtggatgttgcagctgatcatgcagttgggttcggtgctgctcacacgctgccccttttggagctgcttcagccagctcatgctgtacgctgagagggctgaggcacgccggaagcccgacatcccagtgccttacctgtatttcgacatgggggcagccgagctgtgcgctactttcatgtcctttggcgtgaagcggcgctggttcgc

SEQ ID NO: 242308 - DNA, 1388 bp, Homo Sapiens
gtgttgtgccagtaagcaacattgccatcaatgagcagcatgacagggggcagcagtacagccaggatctgggcagcgagggtcacgtagtagctgacagaaaggccagggccaggatgccatacagcacgaagaacagctggatcatcagctcccctcctgggagatggttcagatacgccagccggtcctcccttgctgtgctgcagtgagtaggccacacagatgaggtagatacccaggaacacctggccggtggactgcagggagcggctgcgaggtttccggcggtacagctccccagcaccgctggccaacacaagaaagccgccgatgatggcaactgtgcgcgagtacatacggaccttcagccagtccccgtagtggacgtagcccccgatgtaggcggcgtaggtgctaatggccaattggagtgcggcccccagcgcgaaccagcgccgcttcacgccaaaggacatgaaactagcgcacagcacggctgcccccatgtcgaaatacaggtaaggcactgggatgtcgggcttcctatcttcgacgccatcttgggaaagggcagtccgctgcggcctcaccccagtcagagaagcaggcgcggggatgggacacgcagcttccgggtcaagcgctttttctttttcctcccggaaacaacggtgtcattctctagttccggatctaaggtgacccagttgcgaagtccagccttctcgtctgctcatggagccttcagggccatatttgtcccagactatggaggattcaccaccagtctgggaagcaacagcctgggctccagagtcagccactcaaacgtgcacagatgaggagaggtctcatgaagcttcggtgcagtctgggactctagctctttctgtaatgagttgtttgacataaggcccagtcacgagggcccttcacgacaaggctcaaggaacacaaaaaggtcaacttgtttttacgattgtctattgtttttcaataactaacatataggaatagattaaaatagacatttctccaaaacagcactggatgaaggcctcaaggagctcacacagcctgttccaggacttggtgaccattgtttgtggccatgttcaattgagttcacatttaatatttaacttttcctccacatttggcctcaaattgatactcaattgtaggaaaatacccttacagatacatgggaaagacacagttgatatagattacagatacaggagaattaaaagcacaactaataaaaaccacacccaccatggctttgcaaggagagtcatattgtgagaattgtcatggacatacacataacattcaatatgcagtaaagcccagaccgctcattgggggtatctaatgcccaa

SEQ ID NO: 242309 - DNA, 973 bp, Homo Sapiens
ttggcaaggatctggaaccctgaggtgtgcacagcgctgggatgccaggttcggcctcgaagcggaggatccctgtgtcccagccgggcatggccgacccccaccagcttttcgatgacacaagttcagcccagagccggggctatggggcccagcgggcacctggtggcctgagttatcctgcagcctctcccacgccccatgcagccttcctggctgacccggtgtccaacatggccatggcctatgggagcagcctggccgcgcagggcaaggagctggtggataagaacatcgaccgcttcatccccatcaccaagctcaagtattactttgctgtggacaccatgtatgtgggcagaaagctgggcctgctgttcttcccctacctacaccaggactgggaagtgcagtaccaacaggacaccccggtggccccccgctttgacgtcaatgccccggacctctacattccagcaatggctttcatcacctacgttttggtggctggtcttgcgctggggacccaggataggttctccccagacctcctggggctgcaagcgagctcagccctggcctggctgaccctggaggtgctggccatcctgctcagcctctatctggtcactgtcaacaccgacctcaccaccatcgacctggtggccttcttgggctacaaatatgtcgggatgattggcggggtcctcatgggcctgctcttcgggaagattggctactacctggtgctgggctggtgctgcgtagccatctttgtgttcatgatccggacgctgcggctgaagatcttggcagacgcagcagctgagggggtcccggtgcgtggggcccggaccagctgcgcatgtacctgaccatggcggtggcggcggcgcaacctatgctcatgtactggctcaccttccacctgttgcggtgagcgcgcccgctgaacctccccctgctgctgctg

SEQ ID NO: 242310 - DNA, 1089 bp, Homo Sapiens
ttggctgagttcccgcacgccgcagagccatggagatcggcaccgagatcagccgcaagatccggagtgccattaaggggaaattacaagaattaggagcttatgttgatgaagaacttcctgattacattatggtgatggtggccaacaagaaaagtcaggaccaaatgacagaggatctgtccctgtttctagggaacaacacaattcgattcaccgtatggcttcatggtgtattagataaacttcgctctgttacaactgaaccctctagtctgaagtcttctgataccaacatctttgatagtaacgtgccttcaaacaagagcaatttcagtcggggagatgagaggaggcatgaagctgcagtgccaccacttgccattcctagcgcgagacctgaaaaaagagattccagagtttctacaagttcgcaggagtcaaaaaccacaaatgtcagacagacttacgatgatggagctgcaacccgactaatgtcaacagtgaaacctttgagggagccagcaccctctgaagatgtgattgatattaagccagaaccagatgatctcattgacgaagacctcaactttgtgcaggagaatcccttatctcagaaaaaacctacagtgacacttacatatggttcttctcgcccttctattgaaatttatcgaccacctgcaagtagaaatgcagatagtggtgttcatttaaacaggttgcaatttcaacagcagcagaatagtattcatgctgccaagcagcttgatatgcagagtagttgggtatatgaaacaggacgtttgtgtgaaccagaggtgcttaacagcttagaagaaacgtatagtccgttctttagaaacaactcggagaaaatgagtatggaggatgaaaactttcggaagagaaagttgcctgtggtaagttcagttgttaaagtaaaaaaattcaatcatgatggagaagaggaggaagaagatgatgattacgggtctcgaacaggaagcatctccagcagtgtgtctgtgtctgcaaagcctgaaaggagaccttctcttccaccttctaaacaagctaacaagaatc

SEQ ID NO: 242311 - DNA, 1595 bp, Homo Sapiens
ttggtgaagccaccaagactttatgcggactgctgcaaatcttctccaaacaggctggtgtacagggagcaacaccggagctggtgcacgctggggtttgtgcagagcatcgctctcacgctgcaggtgtgcggcgccctcagctccctgcagtggatcacgctgctcatgaaggtcgtggaagggcacgcacccttcactgccacctcgctgcagaggcagatcttagctgtgcatttgttgcaagcagtccttccgtcatgggacaagaccgaaagggcgagggacatgaaatgcctcgtggagaagctgtttgacttcttggggagcttgctcactatgtgctcctctgacgtgccgttactcagaggcccagttagaggactacttccccgactccgagaaccctgaagtggggggcctcatggcggtcctggctgtggttggaggcatcgatggtcgcctgcgcctgggtggccaagttgtgcacgatgactttggagaagtcaccatgactcgcatcaccctgaagggcaaaatcaccgtgcagttctctgacatgcggacgtgtcgcgtttgcccattgaatcagctgaaaccactccctgccgtggcctttaatgtgaacaacctgcccttcacagagcccatgctgtctgtctgggctcagttggtgaacctcgctggaagcaagttagaaaagcacaaaataaagaaatcgactaaacaggcctttgcaggacaagtggacctggacctgctgcggcgccagcagttgaagctatacatcctgaaagcaggtcgggcgctgttctcccaccaggataaactgcggcagatcctgtctcagccagctgttcaggagactggaactgttcacacagaacccatggatacggagggctagctgtatatgtttattgctgtggaaacatgaaaacaatgatggagcagtggtatcacctgaccttggggacatgtctcctgaagggccgcagccccccatgatcctcttgcagcagctgctggcctcggccacccagccgtctcctgtgaaggccatatttgataaacaggaacttgagactgctgcactggccgttgtggagtccactcacccttcgagcccaggatttgaagactgcagctccagtgaggccaccacgcctgtcaacgtgcagcacatccgccctgccagagtgaagaggcgcaagcagtcacccgttcccgctctgccgatcgtggtgcagctcatggagatgggatttcccagaaggaacatcgagtttgccctgaagtctctcactggtgcttccgggaatgcgtccggcttgcctggtgtggaagccttggtcgggtggctgctggaccactccgacatacaggtcacggagctctcagatgcagacacggtgtccgacgagtattctgacgaggaggtggtggaggacatggatgatgccgcctactccatgtctactggtgctgttgtgacggagagccagacgtacaaaaccgagctggttttcttgggtaatgatgattatgctgtatatgtgagagagaatattcagtgggaatgatgggttagatgc

SEQ ID NO: 242312 - DNA, 874 bp, Homo Sapiens
tttaatcagttttaagtggagtttataacactaagagataaaagggtgttaaccaaacacaataacaaatggacatctgattgggatgaggcattatcctgtacacatcatattggtattttgtgtatcctcagtgcatagcatttacacacagagccactgctgcacagcacaagagtatctgaagaggctgaatcagagtaaggctgtttaacagactgaaattttttagtatatatattctatatgaaaacaggttgaacttttgaactggcaggtagaaggcaactctgccaaatactacagttaaagcccccactttagtgcacagttccaccccttccatctgcatgcatgacacattaacagtatttaaaggtaaacgaggcactttgtggcaaccacagccatcgttatgaacatattgcacaaaatttctagaactaaacattaaacttgtaccctacttttattttttaaagctgaaacatttgatgctgccggtaaactccacttaagtttataacctgtgccacagcaaagaatggtgatgctatttattcaactacccttttaaaagtatggcaaacatgttcaagaggagctacaaaggacttgggatggtacagggcccaactgtaagctttcttaaaagtgatgccttcaagtaacttcagacatgtaagctgctgcacatccaaaaagtctaagaaaatattccagaaactcagagattacctacagaatgcatttcaggctaattatgaatactgccataaataaagttttaattaggactcgaaaacctttcagtcatagcaattcttgtcaaattctatggggatggtaactgaaataaagtaaggagagtatg

SEQ ID NO: 242313 - DNA, 1412 bp, Homo Sapiens
  misc_feature (190)..(202): n is a, c, g, or t
  misc_feature (362)..(370): n is a, c, g, or t
  misc_feature (1110)..(1118): n is a, c, g, or t
ttgggagaacattcttcaccgatcgccgcagcaagtgcagacgcttctttcctgattatcttatttcattgtgttagcaaaatatgacctccctaaaacactgaaggttattttttattctttgaatttttactctataatttgatagttacagttttctttgtatcataagattgtaagtcccgataannnnnnnnnnnnnggtctcagtaacagggaagtaagtaacatgttgacctgagctagtattgctgtgtatctactctaaatgagatgatctatttttttgctagccatctctccagctctgcagttttcactgtattcaggaagcataaagtagtatgaaaggtttgaagaannnnnnnnnacaagactagttctaaattaacagcttataaaaaatttgtctaaatttaataattagtataaggatatgacctaataaatgtctccttacctaaagattcatttgctttcttttaatatgagtaggcatacttagtagcttttctgaacctagcctatgtctctgtccccaaaatagctgcccttaaagagttgttagcagagagaaaaataacagtgaatgtgctcctggtgtatatggcagtgaatctcctttctgttctactttagcatactatatatatttgactgtgtacattcttatgcaattttaagtatacactcagcaataattagaaaaaaaggagagagaaaagtgatttaaacagggtggattccactctgtgggagccttcgatggaactcaaggtggagctcagcctttccaatgagctctaagcatgtagatagcctgagctgtgtctaagcctggtgtttaaagatgggtatttgtcatacaatatgggtcctaaatccaaccaactacacattttatctggtgttcaaaccaaagaaacaatgatctactcaaacattggagaaaaaaactgccagaggaggagttgccaattggcagtgtgtcttatctccatgttgtaactggactctgactttagaccattacctattaggaagattaaaaatgactgtatttttaaaggaataaatcccagtgtgcctgatttgacattcttgtcagcnnnnnnnnncttaatttctagtaaatctataaaaatgggtaagtccctaaattacaaatgagaaaattgaagcacaaggaaaaaaataactagtttgaaatattttgaaaagtaataacataaaactagtatttgtagaagattatgtgttgtatataacaaattagtatttatagaatatgacctatttatctgaagtttataattgtttatacctaatacagttctttttggagtaagaatgattatataatcgttatccatttgggtataaatctgtatttttagttttttccctttgat

SEQ ID NO: 242314 - DNA, 904 bp, Homo Sapiens
ttgggtgagagctcagcgagctcgagacaagagactacagattcaaaatcaagtcttcacttgatgcagacatcttttcagcttctctctgcatctgcttgtcctgaatataatcgtttagatgatttccaaaaactcactgagagttgctgttcatctgatgcttttgaaagaatagactcatttagtgtacagtcattagatagccggagtgtaagtgaaatcaattcagatgatgaattgtcaggcaagggatatgctttagtgcctattatagttaattcttcaactccaaagtctaaaacagttgaatctgctgaaggaaaatctgaagaagtaaatgaaacattagttatacccactgaggaagcagaaatggaagaaagtggacgaagtgcaactcctgttaactgtgaacagcctgatatcttggtttcttccacaccaataaatgaaggacagactgtgttagacaaggtggctgagcagtgtgaacctgctgaaagtcagccagaagcactttctgagaaggaagatgtttgcaagacagttgaatttctgaatgaaaagctggaaaaaagggaggctcagttattatctcttagtaaggaaaaagcacttctagaagaagcttttgataacctgaaagatgaaatgttcagagtgaaagaagaaagcagtagcatttcttccttgaaagatgagtttactcaaagaattgcagaagcagaaaagaaagttcaactagcctgcaaagagagagatgctgctaaaaaggaaatcaaaaacataaaagaagaacttgccactagattaaatagtagtgaaactgcagaccttttgaaagagaaagatgagcagatccgagggttaatggaagaagagaaaactttcaaaacagcag

SEQ ID NO: 242315 - DNA, 1183 bp, Homo Sapiens
tcactgactttttcacaccctttgagccatcagtctttctttcgtccacacacttgaagtcctcctgcaccccagctggactagtggcttcagagttcacaggcaggttcaccctgggatccctgcccagcaggtccaggtcacgctgattagtgtaagcaagagcctcccacaatccactgccagggagttcctgggtggattcgagtaacagattcctcctggcccaaaggccaggggtttttttcttcttcacagctttcaggcaagtattggatttacagacagtaactaggccccagaacctgtggagatacatttccctggtgctgcgcccacttgcctcctggggaggtaataggaatggcttgttctgcttctaaacattccgccaatccacaggaagcccggacggccctgctcacagcaggaatggggcacagaggggcaatgctggctgtagaacacccccctgcagggggctgggccagggctagggaggtgagtcccgggtcaggccgtactgcatgctcacagtgtggtccaactcctccagctctgcaggcagcgggatgcccagctcccccaggtacagggagagggcctcaaaggagtcctccaatttcgagaatgctggtctagaaggaaaagaggtaaattagaggcaggtggaacatgagcagggccatggggtgggtggaagggatctaggctcagctacttcctggttgtataacgtcaggcaaactccttcacctagtagtgcctctgtgagaaatgggcataatgttaccggtacctcatatatttgctataaagattaggtaacactataacaaggctggactagctggagttaatacttaaaaacaataggagaaaaacttccctcccatatcttagagaaaatgcagttatcaaaggtggaatcggaaacaccaggctcctagtgccacggaaatggcttggctgccccggaagcctaagacagctcaggcttactcctcctcctccatgtttatgcttaaatgtcatgtcacctcagtgaggcctgctctgacgaccatatttaaaattgcaactggtaccctgaacaatcgtctttacttgtcttgactctttttccatagcatctgccacattctaatattcaatatagtttacttattgccaacttttttgt

SEQ ID NO: 242316 - DNA, 1482 bp, Homo Sapiens
  misc_feature (89)..(109): n is a, c, g, or t
  misc_feature (167)..(211): n is a, c, g, or t
  misc_feature (264)..(303): n is a, c, g, or t
  misc_feature (1416)..(1426): n is a, c, g, or t
gaaaagataccactgtgtcctaaattcaagaatttgcagttcttccaaagaagacttgtagcttgttggctgtcaagtgtaggaggagnnnnnnnnnnnnnnnnnnnnntctttactacacaacccatactctctagcccagaaagttattctctttgccataagannnnnnnnnnnnnnnnnnnnnnnnnnnnnnnnnnnnnnnnnnnnnaaactggctttctaacacaaccttttaaaatgtgaagataaggcttgctaccnnnnnnnnnnnnnnnnnnnnnnnnnnnnnnnnnnnnnnnnctgtaactgtggatttaaaaaatttcaaagaagataactattcatttaatcattcttttatgtagaaagcgacttatttttgaaagagctaattaccttatactagtttagcatttttacaactgcaaaatataaagctgtattcatttcagatattttttgtgagtcattaaacaaaaatgttttctagaagaaagaagatggaagcagaacacctaaagtagaagatatattatcatccttaagggtgtaactatcttcccactcagtgctgtacagcagtgaactaaagcaaaagttcactgtgacctgttcaaggtagggaagtgattcattaaagacaagaatcatatgcaacgaagaaatcaaataactcaaaacataatttttataatcaaaacatagccacggaagcagataagaacaaactgctcctaacaaaatctatgtcatgacatgtcaaaacatatttattacctctattattctactgtaagattttattaaatcttttaaaagctttctaatattctctcatgttttatcttttgttatttaaatggtctctatgtcagaaatgagaattcttaaccataacagcatgatattggtataaaaacagacacaaagaccaatggaacagaatagagaacccagaaataaagccatgcattaacagtcaactcatttttgacaaaggtgccatggatatacattggggaaagggcaatctcttcaataaatgctgctgggaaaactggctacctatatgcagaaaacagaactagatcactatcactcaccacatacgaaaataaaatcaaaatcgattaaagacttaagtgtaagatctgaaactacaaaactactacaagaaaactttggggaactgctttaagacttttgggtaaatatttttgtagtaagacctcaaggcataggcaatcaaggcaaaaattgacaaatggaatttcatcaagctaaaaagcttccgcacagcaaaggaaatagttaacaatgtgaagagacaaagaatgagagaaaatatttgaaaactattcatctgacaaggagttaattatcagaatatataaggaactcagctcaatagcnnnnnnnnnnngtaatcccatttaaaaataggcaaaatgaacagaaatttcttgaaagaagacccaa

SEQ ID NO: 242317 - DNA, 1358 bp, Homo Sapiens
gggggaagcattttattccttccccaggtctactgtcttcatagccacacagctagcagcatgaactttaaatgcaaagctggcctgccttgcttttctgttgcttaaatttcccccagctttcctctcaatggtaaaatcccaaaaccaagaaggtttccccctcccccacctctcatctcaccttctgctactcctgaaccttccatgacactccattgctgtggtctccatggttacagaccttttttatccagttatagatacctttctttggggaaaggaccttgtcctgttgctctgtctctcgagtgcttagctaagtgtctggcactgagacaatatctccagagaggctgctgagctgtgtaaaagaactaggccagggaaggcactgtgggtgctatccagctttcattccacagctaaagagatccctgataactcaaatctgcttgtaagcacagcaaatgggcccagggccctggctctgccactgaccagccatgtgaccttagtaagctacctcattgagcctgttttctcatcttctttataggactatgaggcttaaatgagacagtacacaactgcctggcacaatgtctggcaaatattaagtgctagataaatggcagctcttgccccttcacactctgccaacccaagattaagggtcccagggtccagctcctggtttcctgcataggaagtccagcagtttggaatttccctggtcgccagcatcattaatataacgaatacttcctttgctctttcagacaaagatgataagtcagttgtagcatccatcaccgagagtctgcagaagaaatcaaagcacctcatgtgagctccagccaagcccaggcatcaggaggctgttatgatgtggagtttcttggcctgtcctctgcatggcccagtgtaggaagcccagtttgctctctggtgtttgttaatgtaaacattcagtgaagggatggggcaataaacgtaactcatcctttcccgttcctgagggtgatatacagcagggaccaaggggatggatgattgcatgatagggaatcccagacctggacccctgaaagcctagtccaaacccacccacaaggcagtgaccagccttcttgtgactgggcctggtcttcccttcccctcctccacatctacatggcactttccccctcccctcagagcttgggggcaagtcctgctgacttcatcctgctctccatcctgctccctcccatttcttcacactaggtaggtctgtgttcagagttctgaagtttgaaaggatcaagatcttccctctttagtgtccagggttcagagctagaagggattgccaa

SEQ ID NO: 242318 - DNA, 899 bp, Homo Sapiens
acgaatcgtcgcagcccccagccttgcgcgtcgtcgctacctcctcggacagaaattttatgaataagcatcagaagccagtgctaacaggccagcggttcaaaactcggaaaagggatgaaaaagagaaattcgaacccacagtcttcagggatacacttgtccaggggcttaatgaggctggtgatgaccttgaagctgtagccaaatttctggactctacaggctcaagattagattatcgtcgctatgcagacacactcttcgatatcctggtggctggcagtatgcttgcccctggaggaacgcgcatagatgatggtgacaagaccaagatgaccaaccactgtgtgttttcagcaaatgaagatcatgaaaccatccgaaactatgctcaggtcttcaataaactcatcaggagatataagtatttggagaaggcatttgaagatgaaatgaaaaagcttctcctcttccttaaagccttttccgaaacagagcagacaaagttggcgatgctgtcggggattctgctgggcaatggcaccctgcccgccaccatcctcaccagtctcttcaccgacagcttagtcaaagaaggcattgcggcctcatttgctgtcaagcttttcaaagcatggatggcagaaaaagatgccaactctgttacctcgtctttgagaaaagccaacttagacaagaggctgcttgaactctttccagttaacagacagagtgtggatcattttgctaaatacttcactgacgcaggtcttaaggagctttccgacttcctccgagtccagcagtccctgggcaccaggaaagaactgaaaaaggagctccaggagcgtctttctcaagaatgcccgatcaaggaagtggtgctttatgtcaaa

SEQ ID NO: 242319 - DNA, 895 bp, Homo Sapiens
tcaatgccctccagatcaagtagacagttctgcatgagctgtaaggtggcacacaggagggcgtggatgtgcacaggatattgctgcaacttctaagtaggagcagcagacagtagcagggctgagaagatacttctaacagaatcgtagattatactgatacaaaatgaacaaacaacaaaaaaaacagccaacagctgaaaatttttagaatggcagtatagaaaggacaaagcaagagagatgccaattacacatagatttaggggtgtattttttattgccctgtgctagacagtggacacatggaaatcaatcagatatgatcactgtcctcaggaacccaacagcatagtgacagagatagtctatcacatcattctgacatatgcaagtaaatatagtaatagcagtaatcactgagtcacagaagtgtggagagtgctgccaactaagcttgagggaaacacccattgacatgatgcctgaggcttgtcttgaaccatgattcagagttaattagctgagaagagacccttcaacaagaacaaaggcgagagaggtaggaagccacgtggagcacagggaagatgaagcagtcggtgttgctgcagcattaaccgtgtggcaggaagtcaggcagtgggaggcagggctccaggacgcaggaggccttagggcacacgatgggaggcctggagttcctcctcaggacaacagggaaatggctcggggttcatacacgagttacctttcttcaacttaacacatcaaaatgtcctaggtaacattctcctaaatcgtaagattagatacacagttgtgctgtaataagggatttaagtcaaggatggactctgcttaactggggatgaaacttcccaacttttttgta

SEQ ID NO: 242320 - DNA, 1257 bp, Homo Sapiens
  misc_feature (986)..(995): n is a, c, g, or t
  misc_feature (1079)..(1097): n is a, c, g, or t
ttggctttggaatgaatacagaatcaaagacttggggcagttttatgctggattgtctgctgaatcctacccaattatcaaaggggttgcctgtaaggtggcatccttgtttgatagtaaccaaatctgtgaaaaggctttttcatatttgactcgaaaccaacacactttgagtcagccattaacagatgagcatctccaagccctgtttcgggttgccacaactgaaatggagcccggttgggatgaccttgtgagagaaagaaatgaatctaatccataaggctttgtagtacaagattgaaaaactcaacaagaatttaattctaaaagcaaaaattggttgggagttttcaagtttactaatttggattgtgagaaagtaccaagtaccagccgtccaaactgatcacaattaaaattctgacagttgccttttttttcatctcaaatggcagcatgggactgaaacatgagaatgccaccttttttaaaacttagtttagtgacaaagtcattgtcttttatgatatagttaattttaaagagatttagtattaatgtgagttgaatttgcagtctgttttttaggtgttctgaagataaatgccaaaaatttcagctcttattttaatggagtgttaaaattctgattcatatagtcttaaattatcaactccttaaatgtgcttttgaaccaatttgcagaagctcacatagcaagttcataagtttccaaaaaggaagcccatacataacagtggaggtgttttgtctaaccatcaaaatgtttgagacttttttttaaacatttctgagttcgaaggtaatactgacagatttcttccctcttccctccccatcacccacctcagtgataacacattactgatagaggaagtcattagaatcatttttaagtttcagatataggagacttcatgcaatttggagataagactaattattgggggttttccttggannnnnnnnnnaataactgggggctattttatcagcttgcctattaaaggactatggtaagtatagaatcttaatggttgccagttagtaattcnnnnnnnnnnnnnnnnnnnactgtagacacaagtttggccctatcaaaaacgatgaggaaaaaagattgcactccaggattaggaggtgtgagatattttagcttttttgtcttatctgcgtgggtattgctgctttattttaaaaaatcctgcctaaagtaaacactttgttttaaaa

SEQ ID NO: 242321 - DNA, 1010 bp, Homo Sapiens
ttcccagccacttaagccccacgaggaagggcaaggcagctagccctggaggtgagaagacaccgttgatccaccagcgcaggtgcagggccctctgcagatttgttccaccagtgtatctcccatagaaaatgggatttgaaatcacaacttaaaccaagtgggtaatatcctgaccgggggccctaagaaactggcattcttgcattggaaatgaattgcactattcagatgcacagcactccttttgcacaaagttgtgttctgaggtgccaggacatccaagcacttgcagtgtcaatgtcgtgtttaagatgtaccaggggagttcaaacatttaaaaaggaattctactaggaagatttcagtaatttgaagtagataccactccccaccccaatctgtaaattataatactgaatttttattgaaataaagcacactaaatcaaaccaattacaaagatacatgtgtcacaccaagaaaacattttcagttatgctgacagccccaaatgttttccatttttcaaagacagtttgtaatgtcatgggaaaattgctcacgacgttaaaatgaaaaaagcaagatacagtatcatatatgcagtatgatctcaactatgaaataactttaatatttatacattgaaaaaaagactagaagaaaatgcaccaaacattgaactgaagttaatctctatatactgggataacaagatattaattttttacttcttgaaaactttcaaattttccaagaaattaatcataaaatcagtgagaaaattgaacttgaatgaatatcaaaactgcttaaacaaggactaggctgagtaacctggctttgaggcatgctacatggcccttttcactgcaatgaaaaaaaagtccaacaaaattttatcgcaggttcaagacaattttgcattactgatgttggaagctttatgtccgacctccacaaacttctttcttgcggaacatctaatccaacttttttgtacaaag

SEQ ID NO: 242322 - DNA, 1016 bp, Homo Sapiens
  misc_feature (864)..(877): n is a, c, g, or t
tttcatgaaacttcctttgagtaaaggaagggtccactgcgtagtatttgatttgagaagggctgcatggtgcatgaggttaagaaagaaatgactatatttgcctttaaacacttcagctgattccaagcacccaacttcagaggctcagtgagaagaaagcacactaattaaagaaagcacattaattaaagataccaccactgccaaataatagcatgtgctgcaaggaatggggctagggagagtgtttcacaaatgcagagcaccaggccacaaggttaaagtcatgcactaaaacagtcaatcccaagaggcaggtgtctgagtggcgcgactcagaagcaagtacataaaaacggaacactcccaacaggacaccactctagccccacttctgccaaaggaaagttttcacatcaaggtgtaacacacatctttgcaattcaaggtttatccctcccctctcccccaaagagacaggaaatacaagttaaggtcctcatagcaatggtttgtctcccacttgggaaggctggttattgtcaacatttttatttaagaaaacaggatttaacatggcatttttcttccctctaagggcagcagcacataaatcatacatcagtcatccagtgatacaaagaggtggccaattgtgtctgaagtagtcacttgtaaaggatcacaacccaggcagtgttgcttttctgcaaacagaaggaaacagaaggctccatggtccttgaagattatccaagttttccactagttgtcaagatttctgtcccaacctcttagtcaccatttacagcaagaagagccagcaagtgaaaaactgttaatttattgattcaaagttgnnnnnnnnnnnnnnaaaaaacaatccccaatacatgcagttcagggttaagtatcacatttgtagcacattgttgagtctcaaaacaaaaatatgcatcacctgtataatcccatcacatctttttccagcctctacaatacctagttgccaa

SEQ ID NO: 242323 - DNA, 903 bp, Homo Sapiens
ttggagagcgggaactactcgacccacagagccgatcgcggagcggattctgcttttaggagtacccgccaacaagcgggaccgagcaggaatccgtatctgggaacagaatgaacggagaccagaattcagatgtttatgcccaagaaaagcaggatttcgttcagcacttctcccagatcgttagggtgctgactgaggatgagatggggcacccagagataggagatgctattgcccggctcaaggaggtcctggagtacaatgccattggaggcaagtataaccggggtttgacggtggtagtagcattccgggagctggtggagccaaggaaacaggatgctgatagtctccagcgggcctggactgtgggctggtgtgtggaactgctgcaagctttcttcctggtggcagatgacatcatggattcatcccttacccgccggggacagatctgctggtatcagaagccgggcgtgggtttggatgccatcaatgatgctaacctcctggaagcatgtatctaccgcctgctgaagctctattgccgggagcagccctattacctgaacctgatcgagctcttcctgcagagttcctatcagactgagattgggcagaccctggacctcctcacagccccccagggcaatgtggatcttgtcagattcactgaaaagaggtacaaatctattgtcaagtacaagacagctttctactccttctaccttcctatagctgcagccatgtacatggcaggattgatggcgagaaggagcacgccaatgccaagaagatcctgctggagatgggggagttctttcagattcaggatgattaccttgacctctttggggaccccagtgtgaccggcaaattggcactgacatccaggacaac

SEQ ID NO: 242324 - DNA, 1278 bp, Homo Sapiens
  misc_feature (632)..(921): n is a, c, g, or t
tccaaaatgatagaagtgcttttgactactataaccaaatatatttaagttgttgaatctatttgggctaacatttctatttcttatctttgatcaaaatgattaatggttttccatcatagctcacattgggttcaaatctctaaaatggacattcaaagttctttacaatgtgcatctacaggagacagcttttgtttttgctcacctaacatctgttccccttctagtaacaacctggtattttggggggaatcattcctcctcccatctcattctatgaggtttaggtgggacagggcttcccaccagttctagaagtaggtatatgactcatgctgggttatcagagtcacagaaatcagttcagtttgggacacacagctatagttggacccatgagtcagccttggaacttttattggtactgtttggaaagaggcaacttccttccactggaaacagtaaacttttacttacaaaagtctatcttaaaatggaggagacacagaaaacagtagacctaagagatggagaaagattgtttccacaccacatcacccagtggccaacaccaggtgtactcctggattctttagatatctgagacaatatattccttatgtatgttnnnnnnnnnnnnnnnnnnnnnnnnnnnnnnnnnnnnnnnnnnnnnnnnnnnnnnnnnnnnnnnnnnnnnnnnnnnnnnnnnnnnnnnnnnnnnnnnnnnnnnnnnnnnnnnnnnnnnnnnnnnnnnnnnnnnnnnnnnnnnnnnnnnnnnnnnnnnnnnnnnnnnnnnnnnnnnnnnnnnnnnnnnnnnnnnnnnnnnnnnnnnnnnnnnnnnnnnnnnnnnnnnnnnnnnnnnnnnnnnnnnnnnnnnnnnnnnnnnnnnnnnnnnnnnnnnnnnnnnnnnnnnnnnnntgtgttcctttttaaactaacaataaaacagtataggtatcaatctaacataaacagtcccttttattttcaagttgcagctagctaggctactttcttttctttgaggaacatacccaatcattttgtcttcatgtaattgccttcactcaatctttaacttttgaaatcctgtctgtcctttaaaacagatctttgccacacacttcttcaaggagtatttcccaaggttccttgtaagtggatatataatttttctccattggtttgtatagtattttattttcatctgtcttatagctctagtttcctatcttgtacacagtagtaacatttatgtatttatcttatccccaa

SEQ ID NO: 242325 - DNA, 1307 bp, Homo Sapiens
  misc_feature (218)..(318): n is a, c, g, or t
actttcccccccaacactaggattatttcatgttcaatagtaagtacatgatgatgggaaattttcttaacttgttacattcaaagggtctttcttcagtcaaacacccctgcctaatggtgactaagttctgcagaagttaaaaagcctttctacaaataataatactgatgatgatgaatataataacgatgactaacattcagtgagtatgtatnnnnnnnnnnnnnnnnnnnnnnnnnnnnnnnnnnnnnnnnnnnnnnnnnnnnnnnnnnnnnnnnnnnnnnnnnnnnnnnnnnnnnnnnnnnnnnnnnnnnnatttttactgagacacgcatgtatatatgaacagaaaaatgatcagcaataaataatgaactgataaagactatcctttgggatatggtcaaagggtacatttgcctttttgtaatgtttgcatcttttataaggaaaatatattcacacattacttctgcaattaaaagatatgatacaaagatgtgcttagggagaatgtccagcagggacttgtattttggcatgtattatggcaaaatatctagaggagactacgatatccaccaataggatttcataagtgatattacagtaacacaacaaaacaccatgaagataatgaagaatctctattgagtaaaatgtcgttcatgaacatttttacaataagaaagccttaatgttataaagaacaaaaagaataagccatcttcaaaaataaagaggtcacttctcccaggtactaaaggtatttttaaaatagtatacaaatcaggatgtaaacagatgaaatttatagccatataaatttaatatggattaaaatactaagaatgtaacaattagagaaattaggggaaaaaatgacaatcacaggactacatttctacaaaaattctttgacgttaagaaggttagaaaggtgttaaaagtgctgtcattttcagtatgacagactgaattatctatcatattgctagactgaattatctgatgtcaagagaagtaagcgtttagttaagggcttccaaagtatattctattcatagagtatttctccaacattatttttcccaggctgaataagctgtagtccacaaataaaatgtttctacattattctatctagaggaattattaacaagataaattctgttttgagccataattaaaagcctccctacacatttcatatattctgtttcatcaccagtacaaattttgatgctgaataagttgtgggtcataattaaagttctttccacattccctatattcatagccaa

SEQ ID NO: 242326 - DNA, 1369 bp, Homo Sapiens
ttggggccaggccaccaccatacccattgtgctgacacagcaggagctggctgccctggtgcagcagcagcagctgcaggaggcccaggcccagcagcagcatcaccacctccccactgaggccctggcccctgccgacagtctcaacgacccagccattgagagcaattgcctcaatgagctggccggcacggtccccagcactgtggcgctgctgccctcaacggccactgagagcctggctccatccaacacatttgtggccccccagccggttgtggtggccagcccagccaagctgcaggctgcagctaccctgaccgaagtggccaatggcatcgagtccctgggtgtgaagccagacctgccgcccccacccagcaaagcccccatgaagaaggaaaaccagtggtttgatgtgggagtcattaagggcaccaatgtaatggtgacacactatttcctgccaccagatgatgctgtcccatcagacgatgatttgggcaccgtccctgactataaccagctgaagaagcaggagctgcagccaggcacagcctataagtttcgtgttgccggaatcaatgcctgtggccgggggcccttcagcgaaatctcagcctttaagacgtgcctgcctggtttcccaggggccccttgtgccattaaaatcagcaaaagtccggatggtgctcacctcacctgggagccaccctctgtgacctccggcaagattatcgagtactccgtgtacctggccatccagagctcacaggctgggggcgagctcaagagctccaccccggcccagctggccttcatgcgggtgtactgcgggcccagcccctcctgcctggtgcagtcctccagcctttccaacgcccacatcgactacaccaccaagcccgccatcatcttccgcatcgccgcccgcaatgagaagggctatggcccggccacacaagtgaggtggctgcaggaaaccagtaaagacagctctggcaccaagccagccaacaagcggcccatgtcctctccagaaatgaaatctgctccaaagaaatctaaggccgatggtcagtgagaggaagctgactagcccctggattcttctccagacccccctgcttcaggaacacccgccagggcccacccctcccaccccgtcccagcattcgcacttcaccctcgcgagccgctgttcactcctctcccctttctctttctctctgtttttaaaataatctaaagaaagcacattttaccattgctgttgggaggaagcagaggcagatgggaaagcagagagaggagcgcgcttcctttcctccccgctgccgcccaccctggggagagacttttgcgggga

SEQ ID NO: 242327 - DNA, 1097 bp, Homo Sapiens
  misc_feature (987)..(1013): n is a, c, g, or t
ttggctcttatatatttattgtaacaatattataatacttacgtatatgtatatgcatatacccgtatatacggaaggctttattttttagagtagttttaggttcaaagcaaaattgggtagaaattacagaggtttcccatatatcccctaatccacatatgcatagcctcccacattatcagcattcctctcagagtagtatatttgttacaattggtgaacctccactgacactcattaccaccccaagtctataggttatattagggttcatccttggtgtaacaccatagaatgtgtcttgtactttctgcttgttggagcaagtggatcatggcatgtttccactgttatacacagagtagtttcactgccctaaaaatcctctgtgttctgcctgtcatcccttcatctcctctaatcctggcaacattttttctgtctccatagttttacctttgatcttttatatcatatagttgaaattatacagtgtgtagccttttcaaattgacttctttcacttagtaatgtggatttcagtttcctccatgtcttttcatggcttgataatgcatttctttttagagccaaattatgttccatcgtctggatgtttatttattcacctactgaaggactgttggatgcttccttttggcaattatgaggaaagctgttataaatatctgtgcaggctttttgtgtggacataactgaaatatttttaaagttatatttattgaggtataatttacattcagtaatagtcacactttttagtgtagagttctgagttttgacagttgtatctaatcatgcaatcaacaccacaatcaagatgaagaacaggcccctcacttccctaacttctttcctatccctttttagtcccttttcccactcccagcccttggcaatcaccagtctgtttccgtctctatagttctgccttttccataatattgtataagtggagtcctnnnnnnnnnnnnnnnnnnnnnnnnnnntttgtacgtgtatgtatatctccttttgagtcggagtgctttcatttaatgtgatgtatctgagattcatccatatggttctat

SEQ ID NO: 242328 - DNA, 1753 bp, Homo Sapiens
ttggggaaaaggatttaaggagacagacaacaaagagctggcagaaattaattccaccatgaagcttgagtgctgtagggatcctctggcttcgctcccaaagagaggatcctgggagaagtctgtatccagcacagaggggaaaaatgctgtcaccatccaaaaatgaaaggaggatgacatggctcactaagcaagtactagggcacctggcatgtgaggtccttgctttccctagaagccactggtggggggcagcaaattcctgggattagctggttatctggtggagaaagctaaagctggggtcagggatctttaaaaggcaagcacattttgcttaaaggattagctccagaggagccctgggatgggtgccagcttagctcagacagaagtcatgttcttagcgttcaggcaagtcagcctttgcataagacaccctgtcgtcgggcaggaatttgccgttacaaatcccaaacccatgacagtaggaatgtcaccccatgcttcacatatgcattatgctctgaacccagggcaactatgaccatgcttccttcaatctttattgagcaaatatatggccaaggttattcccttatctgtgactgggtggagaagaatggtcaggaagggagactgcctcactgttgaccaattccaaaacctaaggataagcccatggggtatgtcaagctagcaggttcttctcggcccaggatgacagtgtctgggggcatcacaaaacagttgtacaatccaatgcagccgtcctgctcatacagtaagatccattaggccagagcaggcctaacttgggtggagagcccagcctgagcaccagaattagttgcttccacttgtgcagcctgctgaagagccggactcaggttgaagcagctttcctcccagtcttcactgatctccacagggagaaaacagaagtccccacaagtaccaagctcttcctgagactgcagccaccacacctcggggaaggggaggctggcaggagaggagtacactgtcccggtgacccacaccaaggtggctccaagtgtaaacaaagcctggtgccagggacagaagaggatgcagcctgatgtgaggttttcagaaaagtgaaatgacctagcaccaggttgggattgcttgggtctgcacagcagtccctcacactgcccttacagagaggaacaggttatttgatgacttgggcccatgagatgttctccaagccattgacagctgagagaattcaggtgatccacctgaatatcagaagtttcagccctcttagagttcgtaacagaaacccagagatttactgtcagctagaacaaagatgtaaggtctcaagtaaaataaaggattgtccttcaaaacagcaatattaacagacttctgactcaggaatttgttcatctgtccttgctggacctgagccaagtgcttgtaacgtgatctatgatctatctgtatgctaaagtgtaacaggtacgtgagtaaaaaaatctttaaggttcattgttgcaggtaagactcaatagaaattgtgctaaacagcataaaacctgtggtcagagtctgacccaataccacagacatttctgagcccaaagggactcagttttgggtactttgatttttaaatacaatcagcctattgcatcctgtagatgaagagacacgcatgcttcgttagaactggtgttctggactaaatatcaataaataagggaatatccaa

SEQ ID NO: 242329 - DNA, 1773 bp, Homo Sapiens
  misc_feature (1263)..(1285): n is a, c, g, or t
ttggcaaatgcttgttgaatgaataaattatgactgcagactggctctcctgccttaaactaatttcatcccagcctagtctcctgatgtctgtgctcgttatgctatgccatgttgcttcagtcaaacaagaaacacttactgagggcatattgtttgcccatcattgtgcaatatgctgtgggacatgggatgtcgtctcagtcttcaaggaaatggaagggttaagaaatgcacatgagattattaccaatgacacctttaatttatatgatgctttaaaattatcagagcactttcatgtatttttcgtgtgactagtgaaaaagacaatgttgtacaaaattaaaatatatacagatgcaataatgtgaatagttaggatttattaaatgcattatcttcagatctttacatgtataatctcatttctttcatgcagttactctgggatactgttcccatttgatgggtaagaatattgaaaaccagaaaaattaattatcccaaggttgcatggcctttagtggcatagctaggatttgaaccaggcctgcctgactccagagctctggctagtatctatgctatacttagttgcctctctataagtataatattgggcaattataaccatttgagaacaggacaatatgtattaacctgaaaagtgttcatgatgtcagtgatagtacatggcctccttatgtatttactcaaagccccaaaagaccagaggccagaatccctagtagtcagagcagtgacaggtcagaaaaaggcagctgagtccaatagttatgtctgtgtattgctcattctacttactgatggagccagcatgtatctcaacaactcacctagcattcatcacccatccccagcattgggaaagggtcacaattaagaccgaaaggaaacacaaagttaaatatgggttaattatgtaagcagatgccccaccacggcaggatccaatcacagccgaggggcccagaagagagcagcgtaagttatattcacatagttccccaaaggctttcaacgggggctacaggaaggtgctagaaatattgaggggcctgccattactcacctagagctcactctctggagaagaggaaaaggaagaagctatttcagctgccacattctccccaatccctactatattatgctgtctttcctcttcctcctagctggctttacatgaccctaacccaaaactaccctatggccccacacgggaatgtgttcaaacgnnnnnnnnnnnnnnnnnnnnnnnattcccaagcctccaacttagaacgtttgtgatttggcagatggtttgttaggatctgaaggatgaagagaagggtagaggtcacctggagaatgagttcaaactgccagggtcttcccttggtctttgtgcgtcaggaaggactccgagtaattattccctatgcagagacaggagagaggtcttgtttacatgagtgtgctggggcagggctggacaatccaggatatgattgtagccatcccatgtagaaagatcaaaaaccagaacgaaatgaagacagcctctcagaacctcatagaacaagcgtccaggtcatctgcttgtttggtgacttagatatacaggcttactggaactccattcactgtgacctgaagttaaataatcccaaagagaaaaagctacctggggtattggttgatgtttggggtgatagggctgaattttctgtgcatttgtccaacaaggctttagagcacaaaacc

SEQ ID NO: 242330 - DNA, 941 bp, Homo Sapiens
ttggcggggaagtggccgaggagggagggctgcgagccatggtggccaagacggcgggcgtggggcggtgggaggtagtgaagaagggtcggcggcctggggtcggcgccggcgccggcggccgaggaggcggcaggaaccgcagggcgctcggggaagcaaacggagtgtggaaatacgacctgacccctgcaatccagaccacaagcaccctttatgagcggggctttgagaatatcatgaagcggcagaataaggagcaggtcccaccccctgctgtggaacctaagaaaccagggaacaagaagcagccaaagaaggtggcaactcctcccaaccaaaaccagaagcagggccgcttccgcagcctggaggaagcactgaaagctctggatgtggcagacctgcagaaggaactggacaagagccagagtgtgttctctggaaacccatccatatggttgaaggacctggccagctatctcaactacaagctacaagctcctctaagtgaacccacgctgagccagcatactcatgattatccctacagcctggtgagccgggagctacgtgggatcatccgagggctgctggcgaaggcagcagggtctctggagctcttttttgaccactgtctgttcaccatgttgcaagagctggataagacaccaggggagtcactacatggttaccgcatctgtatccaggccatcctgcaagacaagcccaagattgccacggcaaacctaggcaagttcctggaactgctgaggtcccaccagagccgaccagcaaagtgtctcaccatcatgtgggccctgggtcaagcagttttgccaacctcaccgagggactgaaagtgtggctggggatcatgctgcctgtgctgggcatcaagtctctgtctccctttgccatcacatacctggatcggctgc

SEQ ID NO: 242331 - DNA, 1445 bp, Homo Sapiens
ttggctttatggcttaatgaaagagagtgctcaattcagagaagaaatcagaaggtggtggaggaagcaccaagcatttttttggatgcggagactcgaagagcgatgggagaacaagctgtagctcttgccagagcagtaaaatattcctctgctgggaccgtggagttccttgtggactctaagaagaatttttatttcttggaaatgaatacaagactccaggttgagcatcctgtcacagaatgcattactggcctggacctagtccaggaaatgatccgtgttgctaagggctaccctctcaggcacaaacaagctgatattcgcatcaacggctgggcagttgaatgtcgggtttatgctgaggacccctacaagtcttttggtttaccatctattgggagattgtctcagtaccaagaaccgttacatctacctggttttttgtcaacactgtgaatttcatagaacatcagtttatgtcctgaaatatgttttcagaaaatagaaagccaagtatatttcgtccgagtggacagtggcatccaaccaggaagtgatattagcatttattatgatcctatgatttcaaaactaatcacatatggctctgatagaactgaggcactgaagagaatggcagatgcactggataactatgttattcgaggtgttacacataatattgcattacttcgagaggtgataatcaactcacgctttgtaaaaggagacatcagcactaaatttctctccgatgtgtatcctgatggcttcaaaggacacatgctaaccaagagtgagaagaaccagttattggcaatagcatcatcattgtttgtggcattccagttaagagcacaacattttcaagaaaattcaagaatgcctgttattaaaccagacatagccaactgggagctctcagtaaaattgcatgataaagttcataccgtagtagcatcaaacaatgggtcagtgttctcggaccgctttgccacggggtgcctcctttaatcagcctatagctctcaactccttgtgggagggagcacacgagcgaaggaggcgggaactgtagtgcaggagcactggaactgaccagccgttttggcgccagtgggatcaaactccactcatttgcacctgttgccttccacacctcgtaggagggagtgcacaggtggaagttgatgggtcgaaactaaatgtgaccagcacgtggaacctggcttcgcccttattgtctgtcagcgttgatggcactcagaggactgtccagtgtctttctcgagaagcagtggaaacatgagcattcagtttcttgggtacagtgtacaaggtgaatatcttaaccaggacttgccgcagaattgaacaaatttatgctggaaaaagtgactgaggacacaagcagtgttctgcgttccccgatgcccgga

SEQ ID NO: 242332 - DNA, 987 bp, Homo Sapiens
ttggctcagatgtcatgggactattcactggaggcctcggctggactatctcaggtacaggtcagtgtggccactcaccctgctggccctgaagtccacggcgtgtgccctggcctttacccggatgcctggctttcagaccccctcagaattcctggagaaccccagccagagctcccgactaacagctccattccggaaacatgtcaggcccaagaagcagcatgagatccggaggctgggagagttggtgaagaagctgagtgatttcacaggctgcacccaggttgtagacgtgggctcaggccagggccatctctcccgcttcatggctcttggcctggggttgatggtgaagagcatcgaaggggatcagagactggtggagagagcccagcgcctggaccaggagcttctgcaggctctggagaaagaggagaagaggaacccgcaggtggtccaaaccagccctcgtcactccccacaccacgtggttaggtgggtagaccccacagccctgtgtgaggagcttctgcttccactggagaacccgtgtcagggcagggcccgcttgctgctcacaggcctccacgcctgtggggatctgagtgttgccttgctgagacacttctcctgctgtcctgaggtggtggccctggcctcagtgggctgctgctacatgaagctgagtgaccctggcggctacccactgagtcagtgggtggctgggctgcctggctatgaactgccctaccggcttcgggagggggcctgccatgccctggaggaatatgctgagcggctacagaaagctggccctggccttcgaactcactgctaccgtgcagcactggagacagtcatccgacgggccccggcccgagctccgtcggccaggcgtgcagggtatccccagggtccacgagctcaagattgaaaaatatgtgcaacgggggctacagcgagtggggctagatcccagctgcc

SEQ ID NO: 242333 - DNA, 1868 bp, Homo Sapiens
ttggctcctgacccacccaagggcacgaagctctgggaaggggatgcccccgagggtgccagtccagctagctgccccacccctcaggcccagcctggcccccaagctccccactctggtgccccgagcagccctgtgggcaagcagccgccgccatggccgagcacctggagctgctggcagagatgcccatggtgggcaggatgagcacacaggagcggctgaagcatgcccagaagcggcgcgcccagcaggtgaagatgtgggcccaggctgagaaggaggcccagggcaagaagggtcctggggagcgtccccggaaggaggcagccagccaagggctcctgaagcaggtcctcttccctcccagtgttgtccttctggaggccgctgcccgaaatgacctggaagaagtccgccagttccttgggagtggggtcagccctgacttggccaacgaggacggcctgacggccctgcaccagtgctgcattgatgatttccgagagatggtgcagcagctcctggaggctggggccaacatcaatgcctgtgacagtgagtgctggacgcctctgcatgctgcggccacctgcggccacctgcacctggtggagctgctcatcgccagtggcgccaatctcctggcggtcaacaccgacgggaacatgccctatgacctgtgtgatgatgagcagacgctggactgcctggagactgccatgggaccgtggcatcacccaggacagcatcgaggccgcccgggccgtgccagaactgcgcatgctggacgacatccggagccggctgcaggccggggcagacctccatgcccccctggaccacggggccacgctgctgcacgtcgcagccgccaacgggttcagcgaggcggctgccctgctgctggaacaccgagccagcctgagcgctaaggaccaagacggctgggagccgctgcacgccgcggcctactggggccaggtgcccctggtggagctgctcgtggcgcacggggccgacctgaacgcaaagtccctgatggacgagacgccccttgatgtgtgcggggacgaggaggtgcgggccaagctgctggagctgaagcacaagcacgacgccctcctgcgcgcccagagccgccagcgctccttgctgcgccgccgcacctccagcgccggcagccgcgggaaggtggtgaggcgggtgagcctaacccagcgcaccgacctgtaccgcaagcagcacgcccaggaggccatcgtgtggcaacagccgccgcccaccagcccggagccgcccgaggacaacgatgaccgccagacaggcgcagagctcacgccgccgcccccggaggaggacaaccccgaagtggtcaggccgcacaatggccgagtagggggctccccagtgcggcatctatactccaagcgactagaccggagtgtctcctaccagctgagccccctggacagcaccaccccccacaccctggtccacgacaaggcccaccacaccctggctgacctgaagcgccagcgagctgctgccaagctgcagcgacccccacctgaggggcccgagagccctgagacagctgagcctggcctgcctggtgacacggtgaccccccagcctgactgtggcttcagggcaggcggggacccacccctgctcaagctcacagccccggcggtggaggctcccgcgcagaggaggccgtgctgcctgctcatgtgaggctgttgctcagcatgcaggggccctgtcgcgggcacagcccaaggctgcctccccacggtgcgtgccctggtgctgcgggtgcagcacggaaacccccggcttctactgtacaggacattggcccc

SEQ ID NO: 242334 - DNA, 1435 bp, Homo Sapiens
ttggggcgtttgctgtgcccacagcggccccgtgtgtcagtgtgcttggcggtgtgggaaggtgcggtgaccggtggcctggcgtggaacagtgtgtttgagacgtgggtgtgtggaggctgcacgacacctgcccatcctcattcctcaggaggacgccgagcagctgtacaggaagtgcaagcgccacgacctcctgaacaagttctaccaggctgcgggccggtggcaggaggccctccaggtagccgagcaccacgatcgcgtgcacctgcgcagcacctaccaccgctatgccgggcacctggaggccagcgccgactgcagccgggccctcagttactacgagaagtcggacacgcaccgcttcgaggtgcccaggatgctgtcggaggacctgccgtccctggagctctacgtgaataaaatgaaggataagaccctgtggcggtggtgggcgcagtacctggagagccagggcgagatggacgctgcgctgcactactacgagctggcccgggaccacttctccctggtccgcatccactgcttccagggcaatgtccagaaggctgcgcaaatagccaacgagacaggaaacctggcggcctcctaccacctcgcccgccagtacgagagccaggaggaggtcgggcaggcggtgcacttctacacccgggcacaggccttcaagaatgccatccgcctgtgcaaggagaacggcctggacgaccagctcatgaacttggccctgctgagctcccccgaggacatgatcgaggtggcccgatactacgaggagaagggcgtgcagatggacagggcggtcatgctgtaccacaaggctggccacttctccaaggccctggagctggcctttgccacccagcagtttgtggccctacagctcatagcagaggacctggatgagacgtcagaccctgcgctcctggcccgctgctccgacttcttcatcgagcacagtcagtacgagagggcggtagagctgctgctggctgccaggaagtatcaggaagccctgcagctgtgcctggggcagaacatgagcatcaccgaggagatggcggaaaagatgaccgtggccaaggactcctcggacctgcctgaggagtcgcggcgggagctgctggagcagatagcagactgctgcatgcgccagggcagctaccacctggccaccaagaagtacacgcaggccggcaacaagctgaaggccatgagggcgctgctcaaatccggagacacggagaaaatcacgttcttcgcgagcgtgtccaggcagaaggaaatctacatcatggctgctaactacctgcagtccctggactggcggaaaggagccggagatcatgaagaacatcatcggcttctacaccaaggggcgggccctggacctcctggctggcttttatga

SEQ ID NO: 242335 - DNA, 869 bp, Homo Sapiens
aaagacgaggaaagaggaggaaaacaaaagctgctacttatggaagatacaaaggagtctaacgtgaagacattttgctccaagaatatcctagccatccttggcttctcctctatcatagctgtgatagctttgcttgctgtggggttgacccagaacaaagcattgccagaaaacgttaagtatgggattgtgctggatgcgggttcttctcacacaagtttatacatctataagtggccagcagaaaaggagaatgacacaggcgtggtgcatcaagtagaagaatgcagggttaaaggtcctggaatctcaaaatttgttcagaaagtaaatgaaataggcatttacctgactgattgcatggaaagagctagggaagtgattccaaggtcccagcaccaagagacacccgtttacctgggagccacggcaggcatgcggttgctcaggatggaaagtgaagagttggcagacagggttctggatgtggtggagaggagcctcagcaactacccctttgacttccagggtgccaggatcattactggccaagaggaaggtgcctatggctggattactatcaactatctgctgggcaaattcagtcagaaaacaaggtggttcagcatagtcccatatgaaaccaataatcaggaaacctttggagctttggaccttgggggagcctctacacaagtcacttttgtaccccaaaaccagactatcgagtccccagataatgctctgcaatttcgcctctatggcaaggactacaatgtctacacacatagcttcttgtgctatgggaaggatcagcactctggcagaaactggccaagacattcagttgcaagtaatgaaattct

SEQ ID NO: 242336 - DNA, 1063 bp, Homo Sapiens
ttggctcactctgcatcatcccttagtctacaacaggccttttctgaacttagacgtgcccaaatgacagaaggacccaatacagcacctccaaactttagtcatacaggaccaacatttccagtagtacctcctttcttaagtagcattgctggagtcccaaccacagcagcagccacagcaccagtccctgcaacaagcagccctcctaatgacatttccacatcagtaattcagtctgaggttacagtgcccactgaagaggggattgctggagttgccaccagcacaggtgtggtaacttcaggtggtctccccataccacctgtgtctgaatcaccagtactttccagcgtagtttcaagtatcacaatacctgcagttgtctcaatatctactacatccccgtcacttcaagtccccacatccacatctgagatcgttgtttctagtacagcactgtatccttcagtaacagtttcagcaacttcagcctctgcagggggcagtactgctaccccaggtcctaagcctccagctgtagtatctcagcaggcagcaggcagcactactgtgggagccacattaacatcagtttctaccaccacttcattcccaagcacagcttcacagctgtccattcagcttagcagcagtacttctactcctactttagctgaaaccgtggtagttagcgcacactcactagataagacatctcatagcagtacaactggattggctttctccctctctgcaccatcttcctcttcctctcctggagcaggagtgtctagttatatttctcagcctggtgggctgcatcctttggtcattccatcagtgatagcttctactcctattcttccccaagcagcaggacctacttctacacctttattaccccaagtacctagtatcccacccttggtacagcctgttgcccatgtgcctgctgtacagcaagacactaattcatagtcagcctcaaccagctttgcttcccaaccagccccaaactcattgtcctgaaagtaaattctgatacacaacccaaagctcc

SEQ ID NO: 242337 - DNA, 917 bp, Homo Sapiens
actttactgtttgcattaaaaagacagcacttttggggtacagttggatagtccaattcaacagtaagaaccattttaactcctaaaactgaacaactgtattagttatgaacactagatacaagtcatgaaactccagcttgaatttacttaggcaaaaagagattttatgagaaggatatcagaatatttcatgtacataaacaagagcaaggcctggagtcttatacagcttgaccccaggaacaaggaagcgaagcaccctccctccctccctccccttttgtgcttttagtggttccgtttcagtcacctccattagggtgtgggctttctcacatggtgaccaccagcagcttccaagcccctgatccacagcttctactggcagaaatagtcatctactcttttagtgcccattcaaaaatcctaaggacaaacccatctgcctgccttgagctgcatgactatatccaggaagatggaatacccttagtcacagaccacctaaagggcatggttagaatccaagtagaaacaattctccacaagaagcagggcaggctgctggacagacaaactgagaataatcaagtaaaacaaaacaagcacaaactctgaaagctcaggcaatgccagaaaggtcaggtgacacaaggttgaataccgaaagttggcattaaagcattctttgagtgagagagacagagagagatttatctatagttatattttacttctatgtcccagtaaaaataacaaataaataactttaaaacttggtaatacatcatttttctctcccctctcttagatgtttttctgtcaccttcccctgtcatttgttttgggtctataaattgcccctcaaaacttatgcaaagcataatgtgttcatcagaattgtttcaggccaa

SEQ ID NO: 242338 - DNA, 1123 bp, Homo Sapiens
  misc_feature (873)..(933): n is a, c, g, or t
ttggatctgtgccacacacagacgtaggtacatggagacagatgcacacacaggtctgtgcacacacatacatacgcatgcacaggcacctgtgtacacacacgcagatacacccacagcataccatctgtgccacacacagacgtaggtacatggagacagatgcacacacaggtctgtgcacacacatacatacgcatgcacaggcacctgtgtacacacatgcagatacacccacagcatcccatctgtgccacacacagacgtaggtacatggagacagatgcacacacaggtctgtgcacacacatacatacgcatgcacaggcacctatgtacacacatgcagatacacccacagcatcccatctgtgccacacacagacataggtacatgaagacagatgcacacacaggtctatgcacacacgtatgcatgcacaggcacctgtgtacacacatgcagatgcacccacagtatcccatctgtgccacacacagacatacgtacatggagacagatgcacatacaggtctatgcacacatgtacacatgcacaggcacctgtgtacacacatgcagatgcacccgcagtatcccatctgtgccatacacagacatacgtacatggagacagatgcacatacaggtctatgcacacatgtacacatgcacaggcacctgtgcacacatatgcagatgcacccgcagtatcccatctgtgccacacacagacatacgtacatggagacagatgtacacacaggtctatgcacacatgtacacatgcacaggcacctgtgtacacacatgcagatgcacccgcagtatcccatctgtgccacacacagacatacgtacatggagacagnnnnnnnnnnnnnnnnnnnnnnnnnnnnnnnnnnnnnnnnnnnnnnnnnnnnnnnnnnnnngatgcacccgcagtatcgcatctgtgccacacagacatacgtacatggagacagatgtacatacaggtctatgcacacatgtacacatgcacaggcacctgtgcacacatacatacagatgcacccgcaacatcccgtctgtgctgccctattaggtttgtgggccatttggggaatcttcctaaaaccc

SEQ ID NO: 242339 - DNA, 393 bp, Homo Sapiens
atatagtagatatgttagtatatttactaaatacttagtataacttaaaatatatatttttttaagttattatttactaaatacttagtatgttccagtattgtgctaaattagcacttcacaagtatctcatatataaatgaagctttgaaaacatacgcaactttcccctaaggccctgcagttagtaaatggtagagatgggattcaaatctaggtctgtctgcttccaaagttctgcctttgtacactgggttttattaattctcaaagagaatgttatcattaaatgttattatctaatagccactaatttgtaagaggcataccaaaaaatcaaggaaaaagttcatttaggatcatttaggagatttccaacttttttgtacaaag

SEQ ID NO: 242340 - DNA, 770 bp, Homo Sapiens
ttttttttgggttaaatgatttcttatttattttaaaatatgataattatggcatgagtcccaacagtgagaggatgtatctgtaagttactccacacgtctcaattaacatgaacattttttagtaggcatatatctcaatacttggataatcacttttgttttgcttgtgtttcttaggaacaaaggagaaacaggctagccagagaattaccttcagctgtatcacgagacaaggtaaaaaaatgtttttaatgcatattcccaatacctaaagatagattgatgagctcagaatattactcagtcctaggagtaattttttcttcttttcctccctttaacactccattggaactaactgagtaaaggcatacaagtttaaaatgggttttgagtgatttaaagataatagtattttgaattcactgacataaatgcttaaaagtagatttaagcatttatttaagcatttaagcatcaagctttttaaaaaaattcagtcagtgactttatcaactttgcacatagctgaaatgactcaagattttattataataagagggtttcttggaaaaaacagtatgcacagaacagaggttttaattactagtaataattaaaatagttgtaatactaaagtgtgtataaaaatcttttaccttgaattctttgccagaaaagaatcttatcaaataccaaaaataaaaatgaagcttttggatttggatttttcttatgtattcatctgaaggaaacttttaacccaa

SEQ ID NO: 242341 - DNA, 1633 bp, Homo Sapiens
actttgtacaaaaaagttggctttcttggggagaaggctgccaaatggaagacatcagatggacagatggatggcttgaccactaatggtgttcttgtgatgcatccacgcaatgggttcacagaagactccaagcctggaatatggagagaaatatcggtgtgtggaaatgtatttagcctacgtgaaaccagatcggctcagcagagaggaaaaatggtggaaattgaaaccaatcagttacaagatggctcgttaattgacctctgtggtgcaacattgttatggcgtactgcagaagggctttcccacactcctaccgtgaagcatttagaagctttaagacaggaaatcaatgcagcacgacctcagtgccctgtagggttcaacacactagcatttcctagtatgaagaggaaagacgttgtagatgaaaaacaaccatgggtatatctaaactgcggccatgtacatggctatcataactggggaaacaaagaagaacgtgatggaaaagatcgtgaatgtcctatgtgtaggtctgttggtccctatgttcctctgtggcttggatgtgaagctggattttatgtggacgccggccctccaacccatgcgtttagcccgtgtgggcatgtgtgttcagaaaagacaactgcctattggtcccagatcccacttcctcatggtactcatacttttcatgcagcctgtcccttttgtgcacatcagttggctggtgaacaaggctacatcagacttatttttcaaggacctctagactaacagaccattgtcttgcaggactacattataaatttataagctaagtgagttgggttttcgaacctgttgtccacgtcacagtttttctgctctggtcatttgcattaagatgaagaattttttaaaacatttataataaatagtagcaatttctgagcaaaaatctgggaaactcaagcaaaggaatttctgaaagtatcagtcttctgaattctgagttttgaaaatatattttgaggagaaaaagacatagtctaatttgatgccttccttttagtgtttttgaatcacctatcctcagtgctgaaattgttttgtataactgagggtactgttggttcaaactatgttagtttacagtttgttgcaaacattgtaaaatacagcgacatgtatattaacttttttctatttatctttattatagaaaataccttagaatgttcttgatagagtagcatggtaacgatggtgtcacacccttggtgtgaatggtagcttagtgagcaacctagctcaaggatttgcaaagttaggaagaaggacgagagagcctctctctccaccccaatctaaatatggaatttggtaaattagaatactttgtaatttgtaagaccaaattcatactaattacccgcgtgaaaggtgtttgtttttaacaacattgaagataatcagaaagattttttcttaatgtttctctcgagcgtagtactataacaaaaacttaatgctaagaaacattttatatgctcctttggatatgcaatttaatctagattatctatttttctcccatgataactaatctgtttttagtatcagcagcatttgggcaagttta

SEQ ID NO: 242342 - DNA, 2352 bp, Homo Sapiens
  misc_feature (139)..(147): n is a, c, g, or t
caacataatttactacaggtctctgaagtgtatataaaaatgttttagtgcaacatcttacaaatagttttcctttaaaaaaacagaaacaaatcaacagctctctacatcatgcatgggtagttttcttaccccatcnnnnnnnnncctcaataattaacgcagagaaaccattgtttgaaaagaatatgaaaacttgctacagaaacacccggtgaaagagggtgtggtcatattcatgtcctagaatgcgcctagcacagtgtagtttttcataaatgcaacattgtagacatagatgaatccagagtattcagcagttttcctccgtctcagaagactaaagctccagtagacaatgcgcaatgaggtctcacagccactggagggcaccatttaccatccatctgacatcgcatttccatagaaatggccaaagaaagaaggtcctggggtttttcatagaaagctcaaaaagttcaacctttgatgctatcccccagcccaatacaaaatacacagaaaaagcaattattaaaatactggcttcggtttctttttttcctttcaaatttcctacaattgctttacatatttgtgtgcagcacctacttctttatcgccgtgaactgaaatctaagatttcaaactgaaatcttagttacacatcctagtcccagccagcgctctggcaacctcccatttagacagaggaaacgccagtcatcttccctcattgactcagcctataaagtaggagtcagcaaattcccactgaaagcccacatctctgaaataaagaaatggggcaaaagaccttcttttttcatgactgagccgctcctgtacctctaatgtgttgatgcagcataataaatgagaatcagcatgtcaggcaacagcaggattaaggtggtggtgcctgcacacactgtctcacaggagggtacggtatacttgggggagaaaaggcaggtctgtgtgtctgtcagaaaatggctgagcaatcgccaccatgctcccctcagctgggaatcagcaaagtatctgccgagcagcccaggccacctgcatacctgcagacccttgaaggatcagcacagacactggcctggggaatcccatggcctcccctgcagtctgctcgttctcagaacagggcttcactggaatcttttatcagacttagttccagaatccctgatgactttttccaaactgtgaccccctcttgggattcaggatgtaagttcccagagtaaaggagatggcatgcttggccagaaaaatatgggaaagcaagggtataagaacatcttcataaagggagcaaaaggaaatatttgcaattgatgatgccctaagaaggacaagcagcacctggcccaacagtgtaaaagaacagggtgacaccagccatcatggggctcaaggggcgttaaaataaaaagccaccataacaatgaacaaccaaacaacctagaaccacaagagagatcaagaaagggaaaggaaaaatcccacagacaatgccttgtgatcacagtctgctgagactaggcaaacagaaaggatgacaaagggctgcgtctggactgcccccaggctgatattcttatggcagtgagaggcagggagagaaaaatgaataaggaagacatcactataattaaggaaaatctaattggaaggaagaagaaaaacctagtcttcacacctccagggaggtagatatttctctgcactctccaacaccaggccctggaaacccccctcccacccctcactgtcccaccaaacttagtgtcagccagccccgtgccctccgtcaggtgtctgccatggctgctttggccctgtgctcagctcaggggcccacttccaagttcactggacactttcttttaagagtttggcaaagcacctgaagacacaggcccacctgctcacagttaatcagttagagaccatccttgcagctcagagcaagccaacagccagcctttctcccttccttctctagtcactggctttgacaaatctgcaggtcagcagctgctaaaagcagcccctgcccactttaatttggaaagtgtgtgccgtttggggcttctgacccattctccaagacagttttcttattttttggcaaggatgggatgaagccttttttgcctccctgacagatagcccgggcaccatctactcctaatggggttatgcaggatttctcttgtacatacacagttctttgaagcaaaattcagtgctttcgtcttgactacaaagtggttccaataactccagctgagggaaaagacaacatacaaattttgcccacactacacccaa

SEQ ID NO: 242343 - DNA, 1241 bp, Homo Sapiens
  misc_feature (421)..(446): n is a, c, g, or t
  misc_feature (479)..(654): n is a, c, g, or t
caatgtgattatgtttatgctttgaaattttttcttgcctattatacaattcatttaaagttaagaactgcacgtttctatttttatttcacccaatggatgaaataaatcagcctacatgtttttggtttctaaagcaatccaaggttcaacttaggatattggtctattatgtgagaaattgacttctctacatttggtatttacaaaaaaaacactgcaagcttcctcaatctgttgtttcatcacacttgcattaggaaatatgagatacaacagagaaaaaaagtcacactttcagaattctgatgcttatatgtctgatgcaaatttaatatttatgtgtcctttccaaaggtgtaatctaaaaatcactttgatgagaggaattttcacacacttttctcagaaataaggttannnnnnnnnnnnnnnnnnnnnnnnnngtgacagagtctcactgtgttgcccaggctaannnnnnnnnnnnnnnnnnnnnnnnnnnnnnnnnnnnnnnnnnnnnnnnnnnnnnnnnnnnnnnnnnnnnnnnnnnnnnnnnnnnnnnnnnnnnnnnnnnnnnnnnnnnnnnnnnnnnnnnnnnnnnnnnnnnnnnnnnnnnnnnnnnnnnnnnnnnnnnnnnnnnnnnnnnnnnnnatctcttaatgctgtgggacggcttttcttgccactaaacacaaagtttcagattacaattacgccacagatagacatctacaaaccttttagaacatacaacagaataaggtgggactcctctacaaaattcatctattttatacttagttaagattcacgtttggttgtgattatttttaattttctaatttcctataactccacagtttctaccgtcaaatatattagtaatatccaatttttacaaaaggccaagaagtattgcctagcaataaaaaccatacgttttgatgtcagagttgtgttgggttccacaattaacagcactgtgaccttgagcagattacttaatagacataaacctcatctgcaggccgttcatagctacttctttcagccatgaggatatagataatcacacagaagactcagtacagtacgtgggatatggtaagcaatgtttaattgtgatttcatgtaaaagtgggagggaaataaaaggcaggaaagaatgtgaaattaagtttgtcatcccggtcctcttgcagctgaaattcaactgagggacacacataaagatccaa

SEQ ID NO: 242344 - DNA, 903 bp, Homo Sapiens
ttgggttgctcagcggaagtgtcggtcgcaagaggacagacgcctcgaagaatccgctatcggctgtctgcacaaccggaatcatgtcgagtttggcggtgagagacccggcaatggatcgatcactgcgttccgtgttcgtggggaacattccatatgaggcaactgaggagcagttaaaggacattttctcggaggttggttctgttgtcagtttccggctggtatacgatagagagacgggaaaacccaagggctatggcttctgcgaataccaagaccaggagaccgcgcttagtgccatgcggaacctcaatgggcgggagttcagtgggagagcgcttcgggtggacaatgctgccagtgaaaagaataaggaggagttaaagagccttgggcctgcagcgcccattattgactcaccctatggggatcccatcgatccagaagatgcccctgaatcgattaccagagcagtagccagtctccccccggagcagatgtttgagctgatgaagcagatgaagctctgtgtccaaaacagccaccaggaagctcgaaacatgttacttcaaaatccacaactggcttatgcactgttgcaggcacaagtagtgatgagaatcatggatccagagattgctctgaaaattctgcatcggaagatacatgtcacaccactgatcccaggcaaatctcagtctgtgtctgtctctggccctggccctggccctggccctgggctctgcccaggacctaatgttctgctgaaccagcagaatcctccagctcctcagcctcagcatttggctagaagacctgtgaaggacattcctcctctgatgcagactcctatccagggtggaattccagctccagggccaataccagctgcagttcccg

SEQ ID NO: 242345 - DNA, 1655 bp, Homo Sapiens
  misc_feature (1078)..(1260): n is a, c, g, or t
  misc_feature (1548)..(1560): n is a, c, g, or t
ttgttctcaaatccattctctttttcaattacttaccaagcttgtttacttagggaaaaggatgtctcaagtcttgctaagcagagatattaaattagatttttcagttcttacaggcctcggcacccaaacaatcctgttaatgaacccacagctcctctggctttccttgctgggccaagcttgagctccatgaagctgtgccagtctcgactctgccttgtagccagcactgccattctcatagtgaaaggctgtttgcctctgccagccccattccacccttgaataaacaacctttccagctagccaaaatgcttagcttctttcaactgggactctgtaatttgaatctgtaatccaattagacatttcttaaccaaatttggcaactcttcaccatttaaattaggttttgatctttcattcctctctcttcctaagcatggactttctggcagaagaactggtaatgaagaaaactgtttcattctatctcaggcctaggctaacaaaaactacaataataataataaatgtgtaactctgtgaattataaaatccgatgttaaatgattattaatatcaccaggctcctttcattatactaggctataaatacctctccccaacatcttccccgcactgcctcttaccctatctttcctagaaatgcatttgctgagactttgtctttttctgctttcagaattttgctgaagaatatccctcttggtcagaagcaaaacatctgctacacttcccaggacaggccattctataaccttgacttcattaagaggaaaagctatcttagcattttatttccccttttgcccatattaacataaaactttgagcttcaatttctaaacagctgttctagttccacatcttcacattcttcctaaaacagaaatcttaggtaggattcccattattagcttatcacaatgtacagaaactcatgacgtgtgtaaggaatgaacataccaatgaatatctacacatctccaagcatatacataatttcttgcccaataaatcaacagtcccttacatagtgcataaagtcatnnnnnnnnnnnnnnnnnnnnnnnnnnnnnnnnnnnnnnnnnnnnnnnnnnnnnnnnnnnnnnnnnnnnnnnnnnnnnnnnnnnnnnnnnnnnnnnnnnnnnnnnnnnnnnnnnnnnnnnnnnnnnnnnnnnnnnnnnnnnnnnnnnnnnnnnnnnnnnnnnnnnnnnnnnnnnnnnnnnnnnnatagaggctgtttatgaataatactgttgtgagaaatggtgactagaagcactgaacacaggtcacgggtaaccaatgctttttacaaatccactaaaacaacttgtctgggaagtgaattctgctgttgcagcatgagtagcagatttaaaagtacattttggctttaacaggtaatctggatccttaccaaaaatttctttttctcactggcccctgcacatgagcttgttgttactgtggggctgttcagaagggctgagctgctgctgttgtgttttttctttnnnnnnnnnnnnnctgaggttaataatttgtatccttcgtgcaacataagtttgacaacattgaagtaaatcatggatccaaagatctagtacctcttgttaagccaa

SEQ ID NO: 242346 - DNA, 968 bp, Homo Sapiens
gaaaatagaaaacaacacaactgaatttgtatctaggagtcagtaccatatccatgttgtgatgtgcaattttctggtaaatgtctgtctcttctgctagactctaagctacaggagtatggctggtgccatattttgttcaccactgttacccccagcacttacatagctcatacaatttatttaataaatatttgtggaattaataaataaagcaaaaacatctgtcactttaatgttattttaactttactggtttacagttgtataagaacttttctatttgcatagagttaaataacattaagacaaaactggagatacacaaaactttgctccttaaaaaaactgctcaagtttgcaaaacactgttctattctacgatataaggctgaaagggagaaacaaatttacaaaacctatttcaaaagcaacataagaatggtacaaaatatctggtcaaatcagcagaagtaacttatattaaccaacctttctaacaatatgaaaagctacagacatcactgaaactacttgtactcactattttcaactcagccacttctgactggagtcgaggagcagcccagatcaatgtagacacagattcagccagaccagaatctagttccttcatagactggataaggccaaaccgagccagcagcaggtcacagtacagctccaggatctccatggcctccacgaggtagtcttcccggataatatgctccacacggatccgagctcgttcatctttcccagcagccagatagtcagcaatctccttccttgctttctgggccagttccgttttctttttctccaatagtttaaggcgatttatgactaatctcaaattcactcttaagcgctcagctttaaatccagagcccagcatgctgtgctgttcctcctaaccgaatcctgccgtgaacgcagcagacaccgacttcagggttcaccaa

SEQ ID NO: 242347 - DNA, 1594 bp, Homo Sapiens
  misc_feature (1448)..(1458): n is a, c, g, or t
ttggctaacctttggtttgcggagcggtcgggtgtattctccgccgcccccacgccctcgaggtccccgccaccgaaccagcggcggagcccgcccgcgcctcccgcggcattcccgcaccggatcgctcctcgctggggcgggacctggcctggcggctctggtcactatgagtgaaacatctttcaacctaatatcagaaaaatgtgacattctatccattcttcgggaccatcctgaaaacaggatttaccggaggaaaatcgaggaactcagcaaaaggttcaccgccatccgcaagaccaaaggggatgggaactgcttctacagggccttgggctattcctacctggagtccctgctggggaagagcagggagatcttcaagttcaaagaacgcgtactgcagaccccaaatgaccttctggctgctggctttgaggagcacaagttcagaaacttcttcaatgctttttacagtgtggtggaactggtagagaaggatggctcagtgtccagcctgctgaaggtgttcaacgaccagagtgcctcggaccacatcgtgcagttcctgcgcctgctcacgtcggccttcatcaggaaccgagcagacttcttccggcacttcattgatgaggagatggacatcaaagacttctgcactcacgaagtagagcccatggccacggagtgtgaccacatccagatcacggcgttgtcgcaggccctgagcattgccctgcaagtggagtacgtggacgagatggataccgccctgaaccaccacgtgttccctgaggccgccaccccttccgtttacctgctctataaaacatcccactacaacatcctttatgcagccgataaacattgattaattttaggccatgcagtggaacctgtcacctaatgggactgcattctgaatggaacattccggctcttcaattttttaagcaatttagactgtagcaagaaaatgtgcagccttttgggcaaagcccctgggaacgaggcctatccactatggactatggtaacttggtaggatttttagtatttattttaatggagggacaaatgctttctaactgggcccccgactccgcaccccagttcgcagtgaggccctgggtgggtcacctgccctctctggacttgtttcttcaactggaggaggtccctgcctatgctgacattccattgtagaaaaatggggcctctggtgtctctttaccaggggcagtgcctctctgcgggggaggaaaagctcaaggttagctgtcttaacccaagtgacttaccaggcctacaaaagagtccagtccagtcacttgttggactgggctctgacagatggcctattgaggtcaacttgaatgtgagggctacggtgtggtttcaaacattcatgatggatgtattttcctacccctaacttaaggagnnnnnnnnnnngacttcctttttttgccaaagtccagaaaggggcctttagcctttagtaggagctcaaattgttggggcccctctacctctctcagggctagaactgcctgactcttggtggacgagcccttcagggttctgcttt

SEQ ID NO: 242348 - DNA, 943 bp, Homo Sapiens
  misc_feature (48)..(76): n is a, c, g, or t
ttggggtaaattttacctgcgttcattggttttaacatgctgccactnnnnnnnnnnnnnnnnnnnnnnnnnnnnngcaccattttcaggtaggtggcatatattgtctcctttcaccctttaacacatcccaagaacaggacattatcttctgtaaccacaatatgcttaccaagttgagaacattttctgcccagcagtccatgttccgggtccatcagttctttgttagtcagtttccgtctgaggcagcgatggcaaggggtcaagatggacagcagccagtggtagacttgtggatttaaatgtacaggtgacagcttctaactcagatttccatttgacaaggctcataattctatacattgggctgccagagtctacagactgcttccgtatatgggatctcattcattttccatgccaaccctgtaaggttgggctgaacagccccattttatgcctgaggaatctgaggtttgggggattaagtagtgacgtgtccacaggcctttaggtttcgtggggcagatccggaacttgaaaggaatttgctatctcagtttggtaactcctcagatgctgccactcagaagggtgttggtatcactgatgcatgtgacttcatgagggagagtggagacatggcacagagggagggagggagatgcggggtggaagagtagaggccctggcgttgcacatcaccaggacgctattcgcagtgtgctgacccttcctggctgcaggcccctccaccagctgagccctcgtgtgtcatttcaggagctactttgcccgagatgctgcatattcccaccactacagcaaatccgacacgcagacccacacgatgttcctggcccgggtgctggtgggcgagttcgtcaggggcaatgcctcctttgtccgtccgccggccaaggagggctggagcaacgcc

SEQ ID NO: 242349 - DNA, 1484 bp, Homo Sapiens
  misc_feature (996)..(1050): n is a, c, g, or t
ttggggttcatggtctacggcgcctgcaagttcctgagagccgggaagaactgtaggaatagtcacagcttgacaaccgaacacaacctgagtgtgctgagaactcatggcgttgaccacctgagctataatgagctatgccaactcttgtttcagaacgacccctggcttttgccagaaatttgccaacattacaacaaaggagatggaccccacggctcttgtgcctttcaaaagcagtgcatcaagctccatatctgccagtattttttacagggggaatgcaagtttggcactagctgtaagagatcccatgatttctctaattctgagaatctggaaaaattggagaagttgggtatgagctcagacctggtgagcaggctgcctaccatttatagaaatgcacatgacatcaagaataagagctctgcccccagcagagtgcctcctctttttgtcccacaggggacttctgaaagaaaagacagttcaggttctgtgtccccaaacactcttagccaggaggagggtgatcagatctgtttgtaccatatccggaaaagttgtagctttcaagataagtgccatagagttcatttccatttgccgtatcgatggcaattcttggatagaggcaaatgggaggatttggacaacatggcttattgaagaggcatattgcaatcccaaaatagaaaggatcctgtgctctgagtcagccagtacctttcactctcattgtctgaactttaacgccatgacttacggtgctacccaggctcgccgcctctccacggcctcctctgtcaccaaacctccacacttcatcctcaccactgactggatttggtactggagtgatgagtttggttcttggcaggaatatggaagacagccttcgttcagaaaaacctggtctatggcacaactaaaaaggtttgccgcagacccaaatacgtgtctccccaggatgtgacgaccatgcaaacctgnnnnnnnnnnnnnnnnnnnnnnnnnnnnnnnnnnnnnnnnnnnnnnnnnnnnnnntgcgcctgtagtcccagctactcaggagactgagcaataccaagtttccaggcccgaagagcatcccagactattgggactcctctgccctgccagacccaggctttcagaagatcacccttagttcttcctcggaagagtatcagaaggtctggaacctctttaaccgcacgctgcctttctactttgttcagaagattgagcgagtacagaacctggccctctgggaagtctaccagtggcaaaaaggacagatgcagaagcagaacggagggaaggccgtggacgagcggcagctgttccacggcaccagcgccatttttgtggacgccatctgccagcagaactttgactggcgggtctgtggtgttcatggcacttcctacggcaaggggagctactttgcccgagatgctgcatattcccaccactac

SEQ ID NO: 242350 - DNA, 953 bp, Homo Sapiens
tagccgtataggtgcacagagaacacccctagcatgaacagtgtgaggattccaccagctttttcaccatgaaggagacagaccgggaggccgttgcgacagcagtgcaaagggttgctgggatgctccagcgcccggaccagctggacaaggtggagcagtatcgcaggagagaagcgcggaagaaggcctccgtggaggccagattgaaggccgccatccagtcacagttggacggggtgcgcacaggcctcagccagctccacaacgccctgaatgacgtcaaagacatccagcagtcgctggcagacgtcagcaaggactggaggcagagcatcaacaccattgagagcctcaaggacgtcaaagacgccgtggtgcagcacagccagctcgccgcagccgtggagaacctcaagaacatcttctcagtgcctgagattgtgagggagacccaggacctaattgaacaaggggcactcctgcaagcccaccggaagctgatggacctggaatgctcccgggacgggctgatgtacgagcagtaccgcatggacagtgggaacacgcgtgacatgaccctcatccatggctactttggcagcacgcaggggctctctgatgagctggctaagcagctgtggatggtgctgcagaggtcactggtcactgtccgccgtgaccccaccttgctggtctcagttgtcaggatcattgaaagggaagagaaaattgacaggcgcatacttgaccggaaaaagcaaactggctttgttcctcctgggaggcccaagaattggaaggagaaaatgttcaccatcttggagaggactgtgaccaccagaattgagggcacacaggcagataccagagagtctgacagatgtggcttgtccgccacctggaaattataagaagtacgtcctggatgacctcattgtcgccaaaactga

SEQ ID NO: 242351 - DNA, 1285 bp, Homo Sapiens
ttggattactctctggagtcgattgccccgagacacatgggccaaggaggggtcagcggcgaattctttcggcctgttggggacccctcgtgtccccacgccagactggacctcccgtatgaacttctcttcgcatcggcggcggcttccgtcacctccgctcccccgatcctattcccagtcgtatgccagcttggagagtcacgtgagagcaagagagtagctttctggttgtcctggtgccctgctcaggcaaactgactgccattctctgaggatggcagctctgtcccccacatttgccacgtccacccaggattccacctgtctccatgactcagaatttcctgtttcttcaaaagaccattcctgtccccagaatttggacctgttcgtgtgcagtggtctggagcctcacacacccagtgttggttcccaggaatcggtgactttccaagatgtcgctgtggactttaccgagaaggagtggcccttgctggattcttctcagagaaaactgtacaaagatgtaatgctggagaactacagcaacctcacttcactggggtatcaggtcggcaaacccagcctcatctcacacttggagcaggaggaggagccgaggacagaggagaggggcgctcaccagggcgcttgtgcagattgggagactccatctaaaaccaagtggtcacttcttatggaagatatttttgggaaggaaacgcccagtggtgtgacgatggaaagagccggtcttggagagaagtccactgaatacgctcacttgttcgaagtctttggcatggaccctcatctcactcagccaatgggaaggcacgctggcaagaggccctatcaccgccgcgactatggggtagcgttcaagggcaggccgcacctcactcagcacatgagcatgtacgacgggagaaaaatgcatgaatgtcatcagtgccaaaaagccttcaccacgagcgcgtccctcacacggcacaggagaatccacaccggggagaagccttacgagtgcagcgactgcgggaaagccttcaacgacccttcagcccttagagccacgcaagaactcacctcaaagagaagccctttgactgcagtcagtgtggaaatgcattccggaccctctcggccctgaaaatccacatgcgagttcacactggcgagaggccttacaagtgtgatcagtgcgggaaggcttacggccggagctgccacctcatcgcacacaagagaacgcacaccggagagaggccctacgagtgtc

SEQ ID NO: 242352 - DNA, 841 bp, Homo Sapiens
tttgtacaaaaaagttggcgcgtgaggcggaggcgcgggcggcggagggaggccggagcgggcagcgcggcggcgccatgtccgtgaacatggacgagctcaagcaccaggtcatgatcaaccagttcgtgctgacggcgggctgcgcggccgaccaggcgaagcaactgctgcaggcggcccactggcagttcgagacagccctcagcgcctttttccaggagaccaacatcccctacagccaccatcaccaccagatgatgtgcacccccgccaatacccctgctacaccccccaacttccctgacgctctcaccatgttctcccgtctcaaggcctccgagagcttccacagcggtggcagcggcagcccgatggccgcgacagccacgtcacccccgccacacttcccccatgccgccaccagcagctctgcggcctccagctggcccacggcggcctcgcccccggggggcccacagcaccaccagccacagccgcccctgtggactccaacacccccttctccggcttcagactggccacccctggccccccaacaggccacctcagaacccagggcccaccctgccatggaggcagagagataagggaggcccctcccccctcccggaggccaggaccccgtggggcgggggagaggacgtctctgcgggcccccttcaccccttttctgtctgcaccccttgttccccggagccctggaggggagagcgcggactctagccaggcagggacacgtctggtgccagaacacgcagctgcccacaccgcaaggtcatggctccagcggccccggcacatggagtggttcagagcg

SEQ ID NO: 242353 - DNA, 1927 bp, Homo Sapiens
ttgggccctttctgccgacctcacgggctatttaaaggtacgcgccgcggccaaggccgcaccgtactgggcgggggtctggggagcgcagcagccatggcaagccgtctcctgctcaacaacggcgccaagatgcccatcctggggttgggtacctggaagtcccctccagggcaggtgactgaggccgtgaaggtggccattgacgtcgggtaccgccacatcgactgtgcccatgtgtaccagaatgagaatgaggtgggggtggccattcaggagaagctcagggagcaggtggtgaagcgtgaggagctcttcatcgtcagcaagctgtggtgcacgtaccatgagaagggcctggtgaaaggagcctgccagaagacactcagcgacctgaagctggactacctggacctctaccttattcactggccgactggctttaagcctgggaaggaatttttcccattggatgagtcgggcaatgtggttcccagtgacaccaacattctggacacgtgggcggccatggaagagctggtggatgaagggctggtgaaagctattggcatctccaacttcaaccatctccaggtggagatgatcttaaacaaacctggcttgaagtataagcctgcagttaaccagattgagtgccacccatatctcactcaggagaagttaatccagtactgccagtccaaaggcatcgtggtgaccgcctacagccccctcggctctcctgacaggccctgggccaagcccgaggacccttctctcctggaggatcccaggatcaaggcgatcgcagccaagcacaataaaactacagcccaggtacagccacttcaggtgttgctgaccgtccacaactgcctgcattcctgacagtcctgttagccaagaggaggaagtgactgagcctgttacaccctcacaggaagtatggttaggggtcctcaagtacagagtggaaagggcacagatcggggttttagaagactctggcatgggctcttagattaatagtgcctgcccccactactgcaagggtgactgccacgagggccagcgcttgttcattcatgtggaagctcatctgtacaaatgtaagaggtcttagccgtgcagggaatgttctttctcctgagtggtagtgtgcatttctagccagtggagggcctcatgtggtctcatgatatgcctgagacactgaagcgtgtggcacagtggctagcgcaggactctggagtcagatctggacctgaatgcgtcgcctacctgttgctagctgtgacctgacatcttggagcccctctctgatcacctgtggagttctagcacgtccttctgcaggttgtgtgtgtgagagactgagatgatgggtgcgagtgcctggcatgtatacacactcactgtctccttgggctcacaggtcctgatccggttccccatgcagaggaacttggtggtgatccccaagtctgtgacaccagaacgcattgctgagaactttaaggtctttgactttgaactgagcagccaggatatgaccaccttactcagctacaacaggaactggagggtctgtgccttgttgagctgtacctcccacaaggattaccccttccatgaagagttttgaagctgtggttgcctgctcgtccccaagtgacctatacctgtgtttcttgcctcatttttttccttgcaaatgtagtatggcctgtgtcactcagcagtgggacagcaacctgtagagtggccagcgagggcgtgtctagcttgatgttggatctcaagagccctgtcagtagagtagaagtctctttccagtttgctttgcccttctttctaccctgctgggggaaagtacaacctgaatacccttttctgaccaaagagaagcaaaatctaccaggtcaaa

SEQ ID NO: 242354 - DNA, 1643 bp, Homo Sapiens
  misc_feature (1275)..(1289): n is a, c, g, or t
  misc_feature (1540)..(1559): n is a, c, g, or t
gcccggagctggtttccgtctctcggctcggggctggaactccggcccaacctaggcgcgcagccgccacgagatggcgcacttccgatcaatgtcaaagccgccggggagccgggaaccccagcatgattcttggcctttgttcgcttctgatactaagagcagcacggtacattatttcacttgtcccgctccccttcataacagaaaaaggggactcaccctcaagaagtgattggtatggtaatttaaagcaacgcgcattcgctaggcctcgcgagcgtcgccgcgcggagaagccagctgtcccttggcagtgatttcggaaatgtgtcaaggcaattccaaaggtgaaaacgcagccaactggctcacggcaaagagtggtcggaagaagcgctgcccctacacgaagcaccagacactggagctggagaaggagtttctgttcaatatgtaccttactcgagagcggcgcctagagattagccgcagcgtccacctcacggacagacaagtgaaaatctggtttcagaaccgcaggatgaaactgaagaaaatgaatcgagaaaaccggatccgggagctcacagccaactttaatttttcctgatgaatctccaggcgacgcggttttttcacttcccgagcgctggtcccctccctctgtcttcaggctctgcccaggaactcgcacctgtgctggagccctgttcctccctcccacactcgccatctcctgggccgttacatctgtgcagggctggtttgttctgactttttgtttctttgtgtttgcttggtgctggtttatttgttgttttctgggggaaaaagccatatcatgctaaaattctatagagatagatattgtcctaagtgtcaagtcctgactgggctgggtttgctgtcttggggtcccactgctcgaaatggcccctgtcttcggccgagctggtttcctgcccagcctggggcaaacctagccggaaggccgaggtcccattgttggcgctgaggtgtctggcctgaggtcaatggtgcaaaggagccgccaccgggcatgtctgcctggagtgctgtgctgtgtttaatcaggggatacaggcccctgggtttcttttttctttcttcctttcttccttggccaagagaagggcttacaggcatggacatgcaggttggcaaacgggcttgactttggctgatttaaaaagtgagaaagaaagtaaaaaaggttaatttttccttcctctgtaagatatcccagctttnnnnnnnnnnnnnnngaattaccaagagaaggggacttctcttccagtttctgtaaggtcttacattgcctgactaaaatgtttcatttacctctaaatttccatatccttctggctgtagataaataatgtagttttgtttatgcatttggaattagtggatttttttgtcattaaaattgttaccactggtaacatgtgacaagcacaccacaattctccctatcttgtgaagttgtttttttaaatcgccttgaacaaaaagnnnnnnnnnnnnnnnnnnnngctttctgaaattcacagaagcctaggaggactggggtaagcggaataactagagaagggagacattgtttgggatttccttta

SEQ ID NO: 242355 - DNA, 1327 bp, Homo Sapiens
  misc_feature (173)..(185): n is a, c, g, or t
  misc_feature (445)..(522): n is a, c, g, or t
  misc_feature (714)..(795): n is a, c, g, or t
gtttaaaggatatgagtagtgcttttaaaaaatattccctccacagtctccatgccacctttaataacagagtcattctcttcttcattaaatatcttatcagacttctaaaaggaagctgttattaatgaaagccaaaagcagcttgtaagaggagaaattatgcagtgacnnnnnnnnnnnnnacaaccctgaacaaatattttctcttcataattggaagtggaagagaaaaagtgaacaggggatagaaataaaccaataaaatatgtaaaccaataaatatgtaaacagttttgcagaggctgatttatattttagcaagtctctctatcggctatgatccccaagttttctttttagagaaactatgatgctgataatagcagtttttacgcaaaagatattaatattcaatgatatttggtaatgcttgttcaaatannnnnnnnnnnnnnnnnnnnnnnnnnnnnnnnnnnnnnnnnnnnnnnnnnnnnnnnnnnnnnnnnnnnnnnnnnnnnncacttgggtcgctaagatagtgacacctttgctttctgacagttcaatgtatacaaactttgtttcatgcacaaattattaaaaatattatataaaattaccttcagggtatgtgaacaaggtatatataaaatataaatgaattttgtgtttagacttggatctcatccccaagatacctcattatgtacnnnnnnnnnnnnnnnnnnnnnnnnnnnnnnnnnnnnnnnnnnnnnnnnnnnnnnnnnnnnnnnnnnnnnnnnnnnnnnnnnnagtactgctatatccatctacatatataaagccaccgggagaactagtccacttggtgcagtcttctatactgtccttcacagcttagattcaatctttccttaaagtgtagccgggatacacaggagtgtgattctgggctgactcaaagttcttctcttgaaggctttttcctgtggcactggcagatggctgtgctatcttctggctgaggaacaagttccattccatcacgtacttcgggtttgctggactggcgctcggcatatttctgaaacgtgggtttaaagggaactgaaaggttagttcacactgcattctgttgactcccccacccactcccatccgcagtcacgccatcttttctagttgctgtgtgtctgcagactaaaaccaaaggtctggtttattccagtcctaaagttacattttaactttagctatcacaggcactagttataattcataatctagcaagaaaccccaatccacaattttatgtgttggttggaagcctctacaaaagggccaa

SEQ ID NO: 242356 - DNA, 580 bp, Homo Sapiens
cctgatggggaaggatgaaaacacttcgttaatttgaaggatcccttttatacgtttaagttttttaaaggagtagataaccaaaatattccaaccaagaaacagaaagaataccccttttcaaaaatgcccttattttaagtcttaggctccagtgaaaaatatctaacattttaatcatgtatcagtacttcaaaagttactgtttaagaggaggggcccactaactactggtctatatgtttagtgtatgaaattacatccaaagaatgctttaggcaagaactccttcaaaagacatttttcagtaagaggcatccttcagtagagatgatggcaatcatttcccataagaaaagttaccaattccccagatttcttaaactgaagggatacttttgaaaatcacagctctttaaacaaaaaactagaatttttacaatttgcctgtgagaaagatttgagcttcttgttagggaatttgtaagaatatttggctgcattacaactctacttataagtttctgcccgtgtatatgtcactatagttttgataagttaattaccaaaattagtaata

SEQ ID NO: 242357 - DNA, 1590 bp, Homo Sapiens
  misc_feature (1270)..(1313): n is a, c, g, or t
ttggccttcatccagactctgccctcagacctgcgccgtagtgtcctagaggatatggaggacagtgtgttagctgtgatgccacctgacattgcagctgaggctcaagccctgagacgagagcaagaagcccggcagcgacagctcatgcatgagcgtctgtttgggcacagtagcacctccgcactctctgctattctccgaagcccggctttcaccagtcgcttaagtggcaaccgtggggtccagtatactcgccttgctgtgcagagaggtggcaccttccagatggggggtagcagcagccataacaggccttctggcagtaatgtagatactctcctccgcctccgaggacggctccttctggaccacgaagccctttcttgtctcttggtcctactttttgtggatgagccaaagctcaatactagccgtctacaccgagtactgagaaatctctgctaccatgcccagacccgccactgggtcatccgcagtctgctctccatcttgcagcgcagcagtgagagtgagctatgcattgaaacacccaaactcactacaagtgaggaaaagggcaaaaagtcgagcaagagctgtgggtcaagtagccatgagaaccgtcccctggacctgctacacaagatggagtcaaagagctccaaccagctttcctggctctcagtatccatggatgcagccctaggctgcaggactaatatatttcagatccagcgttcaggggggcgtaaacataccgagaagcatgcaagcggtggctccaccgtccacatccatccccaagctgctcctgttgtctgcagacacgttttggatacactcattcaattggccaaggtatttcccagccacttcacacagcagcggaccaaagaaacaaactgtgagagtgatcgggaaaggggcaataaggcctgtagcccatgctcctcacagtcctccagcagtggcatttgcacagacttctgggacttattggtaaaactggacaacatgaatgtcagccggaaaggcaagaactccgtgaagtcagtgccagtgagcgctggcggtgagggggaaacctctccatacagcctcgaggcctctccactggggcagctcatgaacatgttgtcacacccagtcatccgccggagctctctcttaactgagaaactcctcagactcctttctctcatctcaattgctctcccagaaaacaaggtgtcagaagcacaggctaattctggcagcggtgcttccnnnnnnnnnnnnnnnnnnnnnnnnnnnnnnnnnnnnnnnnnnnntgccgcctccaccacgcccacaccccctactgcacccacccctgtcacttctgctccagccctggttgctgccacggctatttccaccattgtcgtagctgcttcgaccacagtgactacccccacgactgctaccactactgtttcaatttctcccactactaaagcagcaaatctccagcgaaggtgagtgatgggggcagcagcagtacagactttaagatggtgtcctctggcctcactgaaaaccagctacagctctctgtagaggtgttga

SEQ ID NO: 242358 - DNA, 1292 bp, Homo Sapiens
gagtaactataatcctaaaatcgatacattttactgtgtacaaattacatctgaatacaaaccattttccttaaattagtatttaaaaatttgatttatcacagagctctctggctgttcatagagaggtgtggtgacttacttatctccatttacaatagcctttcctttgagtcagctcttcaatataaaacttgaattgtttttgaattcactaattaattttctagtgagatgcttctaataaaatttttttgtcctaaataatttattcattattcatcatgttctacttgtatattagaagttaaagacagtagtcgccctaaagatagtccaaacactcctttttaaatataaaaacagatgcctaaactgatttgtctaggatcgtattcttattacatctcaaaaatacattacataaatcatgcattgtcatcctttgcaaatactaaaaactgggcaaagacaacagcttaactttttaagcagatgtagattagacaattatgtctgttctaacttgcaaccgaggaagcagtgcaaataactggttgtcaggaagctggaatattttatatggacgtatacattctattatcaatcaatcaatcagtcctatatttttaaaaaagcacatattttctatgaaccaggccatttccaaattcacaagtgctcttggctggcttttcatgaatgatgcaatttctagttgaggtatgctggtatctacagctggcacattcctatcagagccttttccaggagttgtactgatgatgatctataaaagctgggtaagaactacattttaaaaaactgcagtcagtgaaaggcataaatgatatccctgtgctataatgaagggtaaatacagtaaaacttaacttgaaacaagcttggcagtgcaggttgtgataaacagagacaggcttaaaatgcttaaataaaggaacacttttaattatataggaaagtttttatttgataaatataacttcataaactttaaaaaattatgagtagctgtacaataatatactacatttactgacaatgcagagaatttttaaaggattacattagacagccacagtgtctcaggtccaaaattttaaaccaagtattgctacaatatttccagatactcattcctcataaaaatctaaattaccatgattacaaacatatcatgagttatgatctattttttataggaacaacattcaagttatttcacataaaacagcactttaatagtgttttacttttatgaaaatagccaa

SEQ ID NO: 242359 - DNA, 1603 bp, Homo Sapiens
cttttttataatagccaactttgtacaaaaaagttggatttttaaaaaagcacatattttctatgaaccaggccatttccaaattcacaagtgctcttggctggcttttcatgaatgatgcaatttctagttgaggtatgctggtatctacagctggcacattcctatcagagccttttccaggagttgtactgatgatgatctataaaagctgggtaagaactacattttaaaaaactgcagtcagtgaaaggcataaatgatatccctgtgctataatgaagggtaaatacagtaaaacttaacttgaaacaagtttggcagtgcaggttgtgataaacagagacaggcttaaaatgcttaaataaaggaacacttttaattatataggaaagtttttatttgataaatataacttcataaactttaaaaaattatgagtagctgtacaataatatactacatttactgacaatgcagagaatttttaaaggattacattagacagccacagtgtctcaggtccaaaattttaaaccaagtattgctacaatatttccagatactcattcctcataaaaatctaaattaccatgattacaaacatatcatgagttatgatctattttttataggaacaacattcaagttatttcacataaaacagcactttaatagtgttttacttttatgaaaatagataactcatttcaaaatagaaataaaatgtctgtacgtggggaccaaaattaataaaacatgttttacgtaactctttggtgtgttatttttattaatacctgcttatatcataccccaaactgatctttacaggaaaaacaccaacatggaagattctcccttttcctacagccttcacgagatttttcagagtagcatattttaaaaacttttggctcttaactgtcaattttctagtggccttgactcctgcctattaggagtctcaagcgatcagataagttcaatctcacaatcttttccagtagaaatgacctcagtcctggtactaaccgtagggcagaatgcaagtatttcctagggttgatttgcctctgtttagtctcctgttcaggatagggcctgggtgtggctcaggtctggaagcctttgtgtattatgagctttagacccaagaaagaggacagttagaaaattcagaccataaattctccccttttctcaactcgacagcaggtcttcgtagctgtagttctccctggcccatactttgctccgcccagggtgagcctacgcctgctgaagctgaggcagggtgctgagtcacttaaagcagctgaggggcaattttggaaactgacttggtgcttgccactatcttcaggcttacagccctcagacgaggcaaagggaggcaaatcgatttgagaccactgattagcaataacgtatttagcattttgctctggttttggcagataagggtaagttaattatcaacatcatactttccaaagaaagaattttaaagaaatatgcaaaggggacactttccttgtgattactggttacgtagtaagagttttacaggatgaatatagccaacttttttgtacaaagt

SEQ ID NO: 242360 - DNA, 518 bp, Homo Sapiens
tcctagctggttttcaataaccctctttcaaagattcaaaattctaataacaaggacgttaaatgattgtttcttaaaatagcttgctcaagacatatttcatgttttatttaaaaaatagaagtgattttctgtagacgtacgtattacatggcttttggaatcataatgaataatcttacactaaagcaaacataattgaatgctttattcatgcttgacactatttcaggctttgtgacagcactatgctaaatacaaatctataaatgtaataattaactgacagaacatagtcatcacataaaaacccacttaaaagtaaccacatttgtattatctttaatatagaatttttcttatgatatagttaaattgcatatacttgtcacaaataaatttataaggaaaactgatattatcttttaaaatgacaatttctatctatcaagaaggataaaccatgctacacacacacacattactggtcagtttcctaattttaaagtcagcaatcc

SEQ ID NO: 242361 - DNA, 2100 bp, Homo Sapiens
  misc_feature (747)..(810): n is a, c, g, or t
  misc_feature (878)..(988): n is a, c, g, or t
  misc_feature (1585)..(1593): n is a, c, g, or t
ttgggtataattcaacaacacaaaatgggaccatgtcagaatctgtatgatcctattctgtgttagctccaatcagccagctgagagccatcctaaatattaataggatgagagagtaactcctaactgtgcataaattacagccttaagaaagaaggccacccggtctctggggacatgttttgggagggtgtggctgcctcatatagcctacctttgctttaatcagcattttatcagtcaactctgggattaatgaacatatccgactttatgggtatgtgtatattcagtgccagtaccacctcccaggctaatgtgttaacagtgttttctatgattctaaacttgttttctttgtatttctaagaaatacaactaggccctaacttttggtctgtggtcagaggtcagtgtctgtgctattccaggatctattatttcagtttgcccttttattctctccgtttgtaacagtaccttcctgtcctggtccctgatcactttagctaatatcctttgaattatttatctagttcagagtttccaataccgttcctgacaaaaccccacttggatttggttggctctctcagcccacatcagtacagtggaccaacatttccagggagaaccatatttaatgtccctcatgctctctttttgaatccaagtgctcagagctcttgactgtgaattatttaccccaaattcattatcttgcacttttttttgagatggagtctnnnnnnnnnnnnnnnnnnnnnnnnnnnnnnnnnnnnnnnnnnnnnnnnnnnnnnnnnnnnnnnngttcaagcgattcttgttctcagcctcctgaagagctgggattacaggtgcccaccaccattcctggnnnnnnnnnnnnnnnnnnnnnnnnnnnnnnnnnnnnnnnnnnnnnnnnnnnnnnnnnnnnnnnnnnnnnnnnnnnnnnnnnnnnnnnnnnnnnnnnnnnnnnnnnnnnnnnatgagacaccgcgcctggccttatcttgcactttcaacataatcatccctgcttctcatctgccctgcagtgctcttggacctggaagatctccctgtggtctggcccctttgccttggttgttaacctccagcttctttgcagagtgtatttccccaaaacttgtggctttcacagtagactccgtttccatcctctctctcacaaaggatgttaagtatgcctggccctcacacagtccatgggaaaccttatttttaacattactccattgagtcaataaatatttaccatctgctgtgtgcaagttactaggcaaatttctgtatccttgtccctaaaattcttgtctttaaattcattgtggaatttctttagacttcacactgacttttattactaaggtcacctttataccaactgccttcctcaaaatgcttataatgaaataacagaatcttgagttggaaacagcccaaagaaataatccaatgttgtactcagtgcagaattccctagaatttctaacaggttgtcattcagcttctgctaagccatgttcaaacagcttattccatttggaactgcactgatatnnnnnnnnnttccttatattgagctgaaatctacctatcttctaagtggtcttagttctgctctaatctctccttccaaaatctttggatcttttgaaaaaagttcctcccaagttcttttataagtgacatgacttttagaccccttcccatctttgtcaacaaaagtagggtgccagaccagtcacagaacactaaatgtcatccatgtttccttcagtagaaaccagcagttttaaaagaggtaagctgtgttcactaaagactgttccagcttgacaaatgcagagatataagtctctggtctttaatcactgtgggggccattttgtaaaacacacatactgtccagcagactcctttggtcatcccaaatacctccgaactccagggaagatgcattctaactccacgaacttacctattttgttaaccttgattagaccttctggagaagtaaccaatttgtccatcttagagcaatttgggaatgagagttttatttttttctgtaac

SEQ ID NO: 242362 - DNA, 1355 bp, Homo Sapiens
  misc_feature (800)..(814): n is a, c, g, or t
ttggcaagactcctttataggagatgcctggcatttacgaaaaatggattggtgctatgaagctggagagcctttatgtgaagaagatgcaacactgaaagaacttctgatatgttctggagatactttgcttttaattgaaggacaacttcctcctctgggtttcctgaaggtgcccatctggtggtaccagcttcagggtccctcaggacactgggagagtcatcaggaccagaccaactgtacttcgtcttggggcagagtttggagagccacttccagccaaggtgcttctgggaacgagcctgcgcaagtttctctcctctacttgggagacatagagatctcagaagatgccacgctggcggagctgaagtctcaggccatgaccttgcctcctttcctggagttcggtgtcccgtccccagcccacctcagagcctggacggtggagaggaagcgcccaggcaggcttttacgaactgaccggcagccactcagggaatataaactaggacggagaattgagatctgcttagagccccttcagaaaggcgaaaacttgggcccccaggacgtgctgctgaggacacaggtgcgcatccctggtgagaggacctacgcccctgccctggacctggtgtggaacgcggcccagggtgggactgccggctccctgaggcagagagttgccgatttctattgtcttcccgtggagaagattgaaattgccaaatactttcccgaaaagttcgagtggcttccgatatctagctggaaccaacaaataaccaagaggnnnnnnnnnnnnnnncaagattatttgcaaggggcaccgtattacttgaaagacggagatactattggtgttaagaatctcctgattgacgacgatgatgatttcagtacaatcagagatgacactggaaaagaaaagcagaaacaacgggccctggggagaaggaaaagccaagaagccctccacgagcagagcagctacatcctctccagtgcagagacgcctgcccggccccgagccccggaaacttctctctccatccacgtggggagcttcagataaccgcgccgctgcacggctccactcccgatgaactctccggctgatgccacaaacgtgggtttcctgggcatggggactggctgcctggcgcctccaatcccaaatcctctgcttcctttgagcacagggacggctcctctgagcctggccagtgcatgtagtaacttagctctgcaacacgtggcagccacgggggctggtgcagctctggatgtcgcccacccagctgccagtagtgctgggctctctcacacagcacccggccccagctgcc

SEQ ID NO: 242363 - DNA, 1236 bp, Homo Sapiens
ttggccgaaaccggcgcggagcaactgaggcccgagccttctcgggacccgggggacgcctaaccccgcgagaaccctgcaaattttcttcctcataattgggagaagactcactggccgaatggcagcagtagatgacttgcaatttgaagttacttgctggacagaagaaaagctcccccttctggacatttgaatactaccaaacattctttgatgtggacacctaccaggtctttgacagaattaaaggatctcttttgccaatacccgggaaaaactttgtgaggttatatatccgcagcaatccagatctctatggccccttttggatatgtgccacgttggtctttgccatagcaattagtgggaatctttccaacttcttgatccatctgggagagaagacgtaccattatgtgcccgaattccgaaaagtgtccatagcagctaccatcatctatgcctatgcctggctggttcctcttgcactctggggtttcctcatgtggagaaacagcaaagttatgaacatcgtctcctattcatttctggagattgtgtgtgtctatggatattccctcttcatttatatccccaccgcaatactgtggattatcccccagaaagctgttcgttggattctagtcatgattgccctgggcatctcaggatctctcttggcaatgacattttggccagctgttcgtgaggataaccgacgcgttgcattggccacaattgtgacaattgtgttgctccatatgctgctttctgtgggctgcttggcatacttttttgatgcaccagagatggaccatctcccaacaactacagctactccaaaccaaacagttgctgcagccaagtccagctaatgaggaaagactcacttgagataccctctccttgctgaagtttttcttgacttctccagttctcttttgttttttggagcatggttctttgggaagtggcatccactgcaggaaagcagaatgagcagagccagcagaactgatggagtggcacaaattcccagtgtctggatggtgccacactggcgcctaatcacccgtttaacaagcagaaattaaatgttgctcagcacatgtgtctttcagctctttccttttcacccatggatgatcattgcgagcatgcgctgattggactgaaatgccggggaataattaggcatgctcattgccgtccctttgcaccacagtcaaatga

SEQ ID NO: 242364 - DNA, 2426 bp, Homo Sapiens
gattgagagtgaggctttcctctgtatacttctttgtgtattttgaatatcaaaccacattcatatattgcttatttaaataaataaataatatattttaaaaagaggatagtaggaagataagtggagtcagggaggataggcaactcttttgaggagttttatgcaaagaaggaaaaagtccacctcttccttagctatgtgacccaggcaaattagtaaatgtttctaaaactccattttctcactcttagaattgagatagtaatacctgccacatagaattatcttgaaaaataaggtaagaagacaggtttcagatacttggcacagcaatagcacatagtaagcaccagtgaatgcttagtagtagtagtagtctaattcctaagagtccatggaactctaggttcaaaacccagtttcttctgggaccattagatggcatcagactcaagcaggtgctcctctagctgacagctctaaaacacaaggaagatctttgttttcttattccctagtcctttccccacaaaattctgacaattacgcatttcctgcttgtttcacaattgccatgtggattccaagtggctatccctgggtggaggcataaaggacttgaaactcaatgctgtttccacatagggccgggcagacaggctatggaggtgttttggcatccaaggaaatctatcagtttcccaagctttcccctctccattcatactttcctttagaaagaataaggcatgcctgggtgggaaagatactgcaggtaagcgacaagaaggggaaattacagggtaaggagatcaatcaaatggtgatggggggtaggagtgaacaaaaagaactctggagcaaaccaggattagtgacatctgtggttcccagacaaaccacacttacaggaatttgtctgtctagcccgaatattttgactttcagggagcatttttctgtgtccctgacataaagcctacctgggagtttcccctgagataagaaactttcaggacatcttaaggtctactgcatcttcctgtactgcccatcaagataagttttccacccagctttatcatgattagctgcgtgatttcatgtcagtttctctgtaaaattaggtttgactgttgcattatttttaagatgccttccaggcttaaagtattatgatgcatgggtataactgtactgaggaaatcaaagaatttctcagatcatcttcttctgtgagggctgcagcttccatgtagttgggagatacaggaattattattcctgttttatgaataaaggacatttgtgggagagaaaggaatcaggccagagttctttctctccaaatgcctattttaccctctgtgaaatttgagagatggatgggtgtggagctgcaagtcagccccaggatgaaagaaaggcaaatctgcacaagaaactgcccactctcaccccatcctcactgcaccctgctcccaacagctgccaggcaagaaaaaatccaaaacagcagttctggggaattcattgccagcactggaaactacctgctgtttccaggaatatgaaggtttctctttcctagaatagcaactttccaaggtaagtccctcccaacaaccagtgatgtgtacaatgttgcattttcagtggtgggagtgggcagggaggattaagattagtacgatggtggagatatttattcatttattcaattgactatttattctccactatgaattaggccctcggccaggtagcagatataaagcttaataagatatatggctttccgcccaggtgctcatggtctagtggaaggtcaaaaaaggtgggaaagggaagatagaactttaaaagggctgtgaaagaggtaaccgcacagtgatagaagcacatggagagttccccagactgacgacataagtaaggcctcctggaagacctgaaccctgagttaagtcttgaacttgaaaatcaggggcgagtcgagcagaaaatgggcaagaaaacaccatatgcaaaggcacaaaggtgttggggaaggcagaagtttgtcgtggagctggatacaacaggagagggtgagacagatgggctggaacagtgtgtgctctgaaaaggatctctgcagcagggcttgagagcacctgaaggaatttccagaaatgccatcatcgtatgtgacacagaatttagaaaaatgactttgtgaagaatggccggaagagggaagctaatggtagagaaacctctctggtgatgggatcatcttaagtctatgagtgaagactataacaacaggactggagagaagagaatagattctgaattatttagagctaagagcagcagagcttttcttgatgggattatggattagggtttatggacccaagatgcaatataattgccaa

SEQ ID NO: 242365 - DNA, 1359 bp, Homo Sapiens
  misc_feature (1109)..(1146): n is a, c, g, or t
ttggcttatcacagagagtgggccagagggctgggaaccaaggccagagctcaggttcaggaccattccagcaatcccagcagaaaatggggagaattgtatggtataggcggatatgaaggtagaatctgcaggccttcagtggccaactcagagtctaagtggattccacagttacagcttgagcagctggttgtaggtcatgctttctacactgggcatataggatgtgttttttaaaaagtcctctcttaaccgttgcttgtttagatcctaagtatatcactgcagcctgtgagatggtggcagaaatggtggagtctctgcagtcggtgttggccttgggtcataaaaggaatagcggcgtgccggcgtttctcacgccattgctcaggaacatcatcatcagcctggcccgcctgccccttgtcaacagctacacacgtgtgcccccactggtgtggaagcttggatggtcacccaaaccgggaggggattttggcacagcattccctgagatccccgtggagttcctccaggaaaaggaagtctttaaggagttcatctaccgcatcaacacactaggctggaccagtcgtactcagtttgaagaaacttgggccaccctccttggtgtcctggtgacgcagcccctcgtgatggagcaggaggagagcccaccagaagaagacacagagaggacccagatcaacgtcctggccgtgcaggccatcacctcactggtgctcagtgcaatgactgtgcctgtggccggcaacccagctgtaagctgcttggagcagcagccccggaacaagcctctgaaagctctcgacaccaggtttgggaggaagctgagcattatcagagggattgtggagcaagagattcaagcaatggtttcaaagagagagaatattgccacccatcatttatatcaggcatgggatcctgtcccttctctgtctccggctactacaggtgccctcatcagccacgagaagctgctgctgcagatcaaccccgagcgggagctggggagcatgagctacaaactcggccaggtgtccatacactccgtgtggctggggaacagcatcacacccctnnnnnnnnnnnnnnnnnnnnnnnnnnnnnnnnnnnnnnccgacgcccctgcaccttcgtcaccacccacgtctccagtcaactccaggaaacaccgggctggagttgacatccactcctgttcgcagtttttgcttgagttgtacagccgctggatcctgccgtccagctcagccaggaggaccccgggccatcctgatcagtgaggtggtcagatcccttctagtggtctcagacttgttcaccgagcgc

SEQ ID NO: 242366 - DNA, 985 bp, Homo Sapiens
aaaaagattactttctagtgtcaaatatcaacagcgagtacctccctaacccgtgctggaaaaaaactcaacttgatttagtttagtccccttgcccgttaagggccctagcatccccatccatgtcacagactacaagaaagatgctatttgcaggactaaacatctgaaaaggggtggcagccactgcctcaggaaattcaattttctattataacataatcttgccctaagggaatttctttgggctccagtttttacctccttgccttgacattataagcaaagctttctcaaactcccttaataataatacaaagttaatgtgttacagaaaaattcatgcaatcactccactgccacacagaaatccatttgaggacaccgcagggaagcaggtgccaagagaaaggacatgactatgagtaagcaaacttatctcctaccagccccattccagccttggggtcagaggtatttgggcggaagggtgtgtcatgacagacaaggacactagaggccagaataagggtctgtacacctgaacaagggctgcagggcagtaacagtgggaggaggagaggaagaccaaatcagcccacaattttaaacagagaactgcccaggtgaggaaatggaagtgaagcattttctagtggcacagattttctcactaggaactgctgcagtatgtggtgtctgctgagtaagctcttggctgacagtgctgagcaggaggatgaatgaaaactgaagctagacattgaaagagcattccatatcccacccatattcttgaacccagcaacctacagctgtctatcaagaactgggagggtattggtaaagtcacaaatgaaactatcccaactgaaggctcctggctagaggcctctctggggacacacagggaaagcgccccaaaaggaattttgtttctagaagtcgggaaggggtgctccctttcacacgcacatttacccaa

SEQ ID NO: 242367 - DNA, 1643 bp, Homo Sapiens
  misc_feature (139)..(153): n is a, c, g, or t
ctagaaatgtataatcattaagtagctgcaaattgaactgttctatttgatacttctaagagtgtccagtgtaatcagatcattttataatgggttattgaccccaggtgtcctttagaaccacctggaaagctttacnnnnnnnnnnnnnnngggtgattttgatttagttgttatggaataggacccaggtatcaattttttaaagctctgccaggctaatatgtagctaagattgagaatcactaagtcaacacattttgatatatcaagaaaataaatggaaatgggggtgataatttatatttgtaatttacaaatcaaacatctatcatacacttactatgtacctagttttattcacgaatcatccatttctaagataaaaattcccatcatttcctcactgcactaaaccaccactgtacatctttgccaatgaatgactgtatttttctatggtcaagatttaaaattctgggatacattatgaaaactgcattaatgaaaacaacctactgctattcatgctcaacagtagcaagctaaactactgtacttggctcctttgagctacccttattttaagaattataaataggtgtcaacccacacaaagaacagattgtggattaccgtagggaaaaaaatagcttactcaacttactaaaagtttcaacaccaaaaaagatttaacttggctgaaagttctgaaacagctgagacacagaaccaggaagctataatttataatgaaatgttgatacatacttaaaagctactgcagctgtagctatactaaaataagatttcttcagggtttacttaccctgaaatgcaagaatacaagcataacaataatattactgtttttatatgcaccaatacctctctttaatatataaagctctacaacaaatacctctaataattttacaattaaattaagtccatacttctatactactttggtctcaacatttttaaaacatcaattaattttgaaaatttacaatttaacaacatgatcctatcaataacaagcacattttgtagtggattaaagacacattcaaccatgcaatccagtgttcaataccttaatgataaataacaatgctgattgacttttattttgaaaaatcattgaaaactggaataatcatctgagactcacagtgatcacaaacatgcagaaaaaagcatacaattctattcttcctgaaggaatgttacaaaatgcccacttttttatatagggtcaatatgccaaattacttatatttttcaatccatcatcttctaacatttgtcacttaaatttttcttaaagtacaaatgttcctgtaagttgtaacagaaaatgaaccccaactctttcagtctttaagacctcagtcacagtcccacactaatagctgccttttagtaaaatagtgacatccagtggacaaatgaaatatttctcaaattcccatatttgaatcataaacaaaagttgcctctttaaatccaacaattttagtatgagttcctacttattttgatggaatctacagattctcatgaatacttcacatcataatttctatgtatcttaaatatatcctcttttcttcctatttaaaatcaattatttccaa

SEQ ID NO: 242368 - DNA, 1026 bp, Homo Sapiens
aacttttgagtaaacattttctgtaaagtaatgcaaaagaacactgataatatttgctattcagaactgtcgtagaaaactgatttaagcagaacataaaaatcttccataaagcccaaaggaacaacaaacatcttctatgttctgaaatctataattagacaaaaaaaagctaatattgaagctccaatccaaaaattatcaccttcaatatatcactaagtcagaaccaattcaattaaatctaacatagtgcctcaagattcatatagaggcatatagatattagtgttctaaatatgactggctgagtggattcctatagaataccctgggattcagacattgtcccagtatttttcaccatgtaatgctcatatcacttgcatcagaataacctggggtgtatgtttaaaaatactgattcctgatgcctactcaagaattactgaatcaatctctgagacaggggtcaagaaatctgcattttagcaagcaccccaagtgattcttaggcacagcagagttacgtaagaaccatttgtccaatcaaatagagtaaaatagtattattggcacttccccagcatgtatatataaatattccctttaaatttatggaacttcccataaaaacctatgatgatagaaattaatcagattagctaaaaaataaaaacatctgttgaatgagtactttgtatttcctcaaatttaacaattcttctgaaaatcatatataaagctaaaaatctgaaacctataaaattgctatttttgtaggccggcaatagtcaaatagtggcaatttctacacaataatatacaaatacattcaaattcttttggaaactagttaaagataaatgctgaaacaagcaaaataagcattcacaacaaatacttacaaaatactcattaccacaataagagtgacgttatagttttccatttcctttttctttcctgtagatcacaagaaaaaggctgcattagaatgagaattgtgattacaactgatccaaa

SEQ ID NO: 242369 - DNA, 751 bp, Homo Sapiens
ttggctgggctgtccagcggtgcagagcacacacattctgttctcacagcttactgacatttacagagttttcattatattcatccttagagcagactagaagatttgtcttagaaactgtttgttagagacctaggtaccttgaaatagtcttgtaccgttggatgcactaaaagctctctctttatcttgcaggtggtcaccatgggccttttccgcactattgctttgttttaccttggaagttttgacagcatagttcgtcgctgcatgatgcagagagaaaaatctgaaaatgcagacaaaactgcctaatcttcttaccccttggaaggagactgtttccaaataatttgaacagcttgctgctaaatgggacccaatttttggcctatagacacttatgtattgttttcgaatacgtcagattggaccagtgctcttcaggaatgtggctgcaagcaaggggctagaagttcacctcctgacagtattattaatactatgcaaatatggaataggagaccatttgattttctaggctttgtggtagagaggtgaaggtatgagaattaatagcgtgtgaacaaagtaaagaacaggattccagaatgatcattaaatttgtttctatttattcttttttgcccccctagagattaagtccagaaatgtactttctggcacataaagaaatcttgaggactttgtttaaaccttccataaaaaaacaattttcggtttctcgggt

SEQ ID NO: 242370 - DNA, 1970 bp, Homo Sapiens
ttgggtgaaggatgcgcacagcatccatggcaccaaccctcaatatctggtggagaagatcattcgaacgcgaatctatgagtccaagtactggaaagaggagtgctttggacttacagctgaacttgtagtcgataaagccatggagttaaggtttgtgggtggcgtctatggtggcaacataaaaccaacaccctttctgtgtttaaccttgaagatgcttcaaattcaacccgagaaggatatcattgtagagtttatcaaaaatgaagatttcaagtatgtccgcatgctgggggcactttacatgaggctgacaggcactgcaattgattgctacaagtacttggaacctttgtacaatgactatcgaaaaatcaagagccagaaccgaaatggggagtttgaattgatgcatgttgatgagtttattgatgaactattgcacagtgagagagtctgtgatatcattctgccccgactacagaaacgctatgtattagaggaagctgagcaactggagcctcgagttagtgctctggaagaggacatggatgatgtggagtccagtgaagaggaagaagaggaggatgagaagttggaaagagtgccatcacctgatcaccgccggagaagctaccgagacttggacaagccccgtcgctctcccacactgcgctacaggagggagtaggagccggtctcccagaacgcggagtcgatctcccaaaaggagaagcccctcccctcgccgagaaaggcatcggagcaagagtccaagacgtcaccgcagcaggtcccgagatcggcggcacagatcccgttccaagtccccaggtcatcaccgtagtcacagacacaggagccactcaaagtctcccgaaaggtctaagaagagccacaagaagagccggagagggaatgagtaatggactcagtttggttttagtccacatggcctcctgtggatataaggatatctgtatgtggaaggattaagatctcccccaggcagctataagaatattttagtttttttcttatcaagtttctcaacctttatttttaatgaaggaggtgctgagttttgtatctttttaatcataatcaacatcagtttttgacccaactaaccttgactgtattcaaacttatgagagtataaaggatctggaggttggggatatgactgacaaggaaaggctgtggccacctgatgaccctttccctttttattaaaccggacacacctgtttcccatttcgctgtagtttagtttttggtttgttgtggttggaactgctttgagaatcctgggatttgtgctgctgctgttattcaaagatcaaaggagtaaaacatagttgctcctaacttttttccagcagcagcaagtggtaataaacatgaaaactggtttgtagcagttttgaaagaatagaatgcattcaaatgtaaggctgcttctggatcattaaagccagtttcatcaaacagttcaacagagagcagcacttaataccctttatacagcccattttttcatagtttcatttgttcttgcccacaagcttgaaatccaggttaaggtatccagcctttatcatataagcattgacattatccaggcctagtcagtagcagtagggtaacgggattgaaaaagatttgatggagaggaaagtatctaatattagtcatggttttgacctaaattgctagacagtcgtgccattcacaaagtcagaaaatacagcaggaagagacagcttttagaggggcagagaattagaggatggtggtagtaatgaaaatgatgcattcagtttaacaagtttaatttgagacagctatggtatagctaaaaacaaaagcccataaagttggagatagggaccagagtttaacatagcgatctaggccagaattgacaatgtttaagtaatggtggaatctgtcaataagacttc

SEQ ID NO: 242371 - DNA, 296 bp, Homo Sapiens
tacaaaaaagttgggttaccctagggcccacaaaaaacaatcctattctagagtccatatcaacaatagggtttacgacctcgatgttggatcaggacatcccgatggtgcagccgctattaaaggttcgtttgttcaacgattaaagtcctacgtgatttgagttcagaccggggtaatcccggtcggtttttatttacttcaaattcctccctgttcgaaaggacaagggaaataaggcctacttcccaaagggccttcccccgtaaatgatttctttttaaatttgtttttta

SEQ ID NO: 242372 - DNA, 312 bp, Homo Sapiens
gaaatgaatgagcgctgcggttcccggccaggggccctccctgccgccctggctgtcccgggccagctccgggccacactcggcagtcccactctggagcggggccaggttggggtcactgcaagagaagatagaaggtcagggctgggccgccaaaacttgacagtgttaataagttctgttctggaaacagctctctggggaacccccaccccaagtctgcctagagaagagggtgttgctggttgtgagcctccctggggccgaggggtcattgtgtgtgaagaggggtggtgcgtctttgccaacttt

SEQ ID NO: 242373 - DNA, 799 bp, Homo Sapiens
ttggctctcccgggcttagaaggcccggctactgacgcgcagtgccagaccttacccctcacggtccttaagtctcggtcgccctcgcctcgcagcctgccacccgcgctcagctgcccgcctcctcagccagccatgctggagcatctgagctcgctgcccacgcagatggattacaagggccagaagctagctgaacagatgtttcagggaattattcttttttctgcaatagttggatttatctacgggtacgtggctgaacagttcgggtggactgtctatatagttatggccggatttgctttttcatgtttgctgacacttcctccatggcccatctatcgccggcatcctctcaagtggttacctgttcaagaatcaagcacagacgacaagaaaccaggggaaagaaaaattaagaggcatgctaaaaataattgaggttttcatgattcagcacctgcttttgtttctgtgagatgagctaaattgctttcataccccagataagagctaaaaccacctaatgctcttatggcacagctgtgtatagatttagttctctttatacttcatttctagcccagttgggttttgatttatataagtagtttagaccttctcttcataatcttgctctgagatggggaacagaacacacaagtatgaagtttctttcaggtgtaaataatgaaaaataaatgcctcataaatgatagtacaatgtaactatcaaagttttataattcattatgagttaaccatttttaatgtttcccattaaacctcatagtgc

SEQ ID NO: 242374 - DNA, 1545 bp, Homo Sapiens
  misc_feature (838)..(850): n is a, c, g, or t
ggcttcccggctctccggaagggtctgcgcgctcccaagtccagggcggggccacgggctgggcagcctccctccccgtggcagtggtcagtgccgtgtaagcgttcctagaatcagagttctcctcctcagatcacccgcccttctcaggggcacccagcaagcccttatgccctaggcgctcaccccaggctggcggcctttccgccttgctctttagccctgcacctgctcaaaggggtcactccaggacccaccgctgcccaccctcggacagcagggcttccagtccagctggggagtcagagcccctgtgagcccctactgtggtgtgactccagaactggcttttgtctgctgccaaattaaagaccctgcctccccagagtcctccagctccagggtggccaccctccccatccctgctgggtgaccgggagctgctgggagtgagcccatccctaacagcagcagcctgatgaggccagacggggcagggcagtcggcagatgctttgcagtagcccatagctcctcagagttcctgggggactggccagggacctcccacccaggctgggtgcagggctcgtgtgctgggccagcagccccgggggaaggctgagatacaggaggacatggaagggaagggcacaagtgcccggagggagctgaggaagggggaccagaagggagctgaggaaagggggtcaggcagagtctgtgacaggagagatagagaacggacggaggcagagactccaccttcaggccaaagagcctctggtgggggtcatcttgcccttttccatattccaacttttatctgctttctggannnnnnnnnnnnnaaagggaggttggttcctgcatttccactctttgaccataggaacgcctggctacaaaaggggctgtaattggctgctgcctataggggccccaggtccttcctccaattgcaaggcagcaactccgaagttctaagtcccatggaaagtggcagtggttgggctggactgtggctggaggatcaccgggcctcggttctcaagcaccatctgtctggctgcagctgggcccttcagctgggggccagtgttgctttccagctgcccccaccgggtcagatcatctctggcaaggaagagctgctggcatctcttactgtccttctcgcaggccttcctccaccttgggtgcctcctgacgcctgccccggaagtcttcatcacacgcgtggccctccacatcatccaggaggttggctgttgacgcggcagcccccagcgactgatgcttcaacaagtgtttcctctttgacttcctcattttggtcttctctgagaaggctcgggcaagttcaaacagtttcctccgggtggactttcccatgtgtttcagcttgtccctgaataaggcatcttcagacacagcggggttggcgtcgccagttcctgggacaggagaggaaaagccaaagtcgtttccgacagccacgctgctggatttagatttctgggattcgtatttcaatcgatcccaa

SEQ ID NO: 242375 - DNA, 1057 bp, Homo Sapiens
tttttctataaggcatattccatgcacatcatttacagaaaggtaaattaaaaaatagaaaagattatggagcatgaaatccgcgtgcatgtaatgtaagcatatgttttatatgtatttttctctctgtacagaataataaatatcactatatctgatgcaagtaattcacttccaggattgtgcatattaagcgatcagactaatcccatcattaaattattatcttgcacttatcattaagactccattaccatgtatgtgatatatacaggacatgttccatgtaacatgattttccgctttacaaaatgggtctgatttctgtgtttttacagagctgaacaagtcagcaaagcatctacaaaatgcctctgatttgtataaatacactggtgtgtaaacacaatgaagattttgaagtgggcagtcatttcaacttcagtgagtactattccttgcctcatctccatgcttcaatgttgtttacaggacttaaactgaaaaaggtattttacattttaagttcttacagcaacaaagaaaagcatttcagtttaaatcatgtggaatccttaccgctctgctgaagtttctgatcaaaaggcaaagagaggcattgctcacattttctatgtatactttgcaacatatcttttaaactgacccaaactggaagaacaaacatatatacccgttactgaataccagaaatattgaattaaatgtcaaactcagtctgatttgctttaaacaagtgataccatatactatcttagaaatttcaagaaaacatgaacttatcttgaccattttccagaaagtagtctataccaacaagatttgtacagatgtttctgtttggagacaggcagaaccaatttagggcttaccaaattgtgttcataacaaactgaaaaaaatctctagtacacagtacacaactaaaaaatataatagaaatataaagatatctaggggaagaaataaagcttttcactttctccatcagaaccaaggttcttcatgggagtaagccaacttttttgtacaaagt

SEQ ID NO: 242376 - DNA, 937 bp, Homo Sapiens
ttgggtgaggccggctgagggcacttgctcttgctgtttctgcccctgggttaacattcaagatggtacatgctgaagccttttctcgtcctttgagtcggaatgaagttgttggtttaattttccgtttgacaatatttggtgcagtgacatactttactatcaaatggatggtagatgcaattgatccaaccagaaagcaaaaagtagaagctcagaaacaggcagaaaaactaatgaagcaaattggagtgaaaaatgtgaagctctcagaatatgaaatgagtattgctgctcatcttgtagaccctcttaatatgcatgttacttggagtgatatagcaggtttagatgatgtcattacggatctgaaagacacagtcatcttacctatcaaaaagaaacatttgtttgagaattccaggcttctgcagcctccaaaaggtgttcttctctatgggcctccaggctgtggtaaaacgttgattgccaaggccacagccaaagaagcaggctgtcgatttattaaccttcagccttcgacactgaccgataagtggtatggagaatctcagaaattggctgctgctgtcttctcccttgccataaagctacaaccatccatcatctttatagatgaaatagactcctttctacgaaaccgttcaagttctgaccatgaagctacagccatgatgaaagctcagtttatgagtctctgggatggattggatactgatcacagctgccaggtcatagtaatgggagctaccaatcgtcctcaggaccttgactcggctataatgagaagaatgcctacaagatttcatatcaaccagcctgctttaaaacagagagaagcaatcctgaaactcatcttgaaaaatgaaaatgtggataggcatgtagacctgctagaagttgcccaggaaactga

SEQ ID NO: 242377 - DNA, 1762 bp, Homo Sapiens
ttaagtggagaacaacccaataaagagggacccctttattacacatttataaaataatagaatatagttattaaaaatgggacactttttttcatttttggtatcttgtattcagtttttccatcctcttcacaatcttccataacttgctttttgttatccattgttcacctgaaacttccaccccaccattcaaagtacaactgaagaataaacgatctaacagattcttgtgagacacattatcagataaattaatccagtgacacatgaataaagatttagagtttttaaagaaatacagtaaaagcaaaaacatatgaagcataatttaatctgatgattcagaaggcacctcaagattgtgttgtgccgttttcctcatgctgcgtggttaggtgcctataacagaattctggttagtaaaattttgaaaaaaattcacatataattcacattaaacgactacagatagatacaatatgggcattttgatgtgtacatttgtacctgacttagggcacaatttataataatatactaagaaaactaaaattaattataaaatgagtatttttagcacacttagtaacagctacttgttttaaactattatttcatttttggtgaccaaattatatttgaccataattaaagaacacataaccttaaaataatatttaagaaacatagttacaacagacatgttacattaaatgaaaaaaggaaagaaatgtacatgtattaaagggtactgaggtttttcaaacccattcttttgaaaggccttttaatccactttcatgtaaaccaatttaaatttaaaaagtttatactcaagaggtgaaatcagtgttgagcacatggctgcctaacaaccattcaatgctgatcactgaactagtattttcatttgattatcctgacaaacataataattgagcccatgtatatatgcaagatgtggaggatccaactaataactgcagaaataaaaacactcaacttaaaaaaggttgaaacaaatgacaaatggaaatggctgaatcactgtacctttttgacacaaccttaaatcttagttttactatatattatttggtactcctggattcagtagttggggtaaaaaaagtttctatattcaaacatatctacagaatgtcaatataaaatgtgtggatatatacatttaatatacacatacatacacgcacacacacaaacgcatactcacatgtctaggaaccagcacctaaccacatccccgtttctcactaatgacccaatgaatcatttatgactttaagaccagcttagattctataaggctgtacaatatatggctgaaaaggtcaaacacaagcacccacgttcaggctggattcaactgttcctcctcatgatttttgaccaacagtaataccacctatgtaacaactatatctcaataacttagaattcagagtataaaaccataaacactgagctccctcattgtttaaagagcactctttccgttctatttccactaactgataagaggacacaccaaactagatcactgaactgtacaaatgatctttactcttaatctaaacaaacatgtgttaaaacattctgaaatgctgcatcctttgatttcttcatcttttcaattgcccgatgcaggtcctgctgttgaacaggccgaatttcatcttcgtcatggctaaaatgcaaacaaaaccatcaaatactcaaataactttagaatatccaa

SEQ ID NO: 242378 - DNA, 1116 bp, Homo Sapiens
ctttgtacaaaaaagttggctcctcactggccaaaacctccaaactggggtctccagccacctcctacaggtgtgtttgggccagcaacaagttcattcatacctccctagggcaaagcttccaaagggagcggtaggctgccatctttgctgtttcacaggcttcactgatgataactccaggtactggaaaatctgaggctactagagactggagcgggccctgggcatactgcagcagccctatggaaaagtggccagactgttacctgggttcccattcctatatcttctcactaggcaagtcttgcaggcctggacctctacctaaccccccctaccagaactgttgagccagtagcaactcagccactccctggagagagcctccaggggcaactgaaagcctctctgccactgcttctgcagtggaactgtccttgctaccctcagactgatgaaggagctaacacccttatctacaccttcaacaagctttaattgaccaaagcccatctctcatgggttctacacactccccactgctcatgacagggaacccctggattggcccccacagcacgaattctccatcctgattgctgattgcagtaaacagttgctgtattctccaggggtggtggaactctgaggagacaaacaaaagacccttggctacaaccactactaatgtcccttcctcttcttccccaaagttagggaagaaatataaacactgagattgccccagagctgcagtgggcagcctaggagtgccaagccatgatctacagccagcactcaaggaggagagaagcacattttcagatcattgagagtgaacatggctgcaactgtgaggaaacataggggagccacatgaccaagcaagactctaccaactgaccagtaagcccaagtgccacctactggatcacatcccaaagcttcagcaccaaaaataccttactaatatactcccctctgaaaccagaaatgagaagtcagcttcaaataaagaacctgcacaaagcctcagcctggtgaaaacatctgaaaataagtctacggactgtactcaatctacactgcaattaaaggaaaacccataggtgg

SEQ ID NO: 242379 - DNA, 1299 bp, Homo Sapiens
aaatggaactgaacaaaagtcactacttaatactttctaaattgcctctttggaggtacggtgaaagaaaaacattctagatgtgtctgaaagaaacaaggtacacacacttactaaaattcccctttgctttaggtgtagttgagggaagttcaactaatctttaaactttttttgggagagggcaatactcatcttcatgaatttttgtttactttggtaaacttaaaattgtgaaataattaaatattattaaaatgtattagtaatgtggactcaaactaaaaagaacagggaaagtgtatgttaacaaactagatgttttggagacttgatataatatggttcatatcaatgttaccatagccagaagttgcttaataggttagactgcaccataatcaaggcaattatgaaaggatgaagtgaaatgaaaatactgagatgcaagcattatagccctcctccaagttacctttattttgtgtgagggctctagtattctggtaaataaactcttccctgccccatgaccacaaaactttacttggtaagaataaactgttgggggttttatctcttactaattctcaccacaaatttcctcaaatagttactcccaccaacgtaaaagttaaaaatacaatcatacactgaaacggcatcaattatctttgccttacatctgaacaaaaagtattaacttttttatagcgtattacacttcttaataagcacttagtaacaacatttgtcagtaaatgaactggcatacatcagaaaaagttgacaatagaagaattttacatggtaccatttcaaattttcatgtacaagtaacccactttatggtcactaacctgaacctcctaataagctacacaaataatttactctttaaaaattcctactttagagcatttacattttataatttaataatgaaagcagattcttccaaaacaaaacaaaacccaaactgggaaacattaaaacacaaatagatctaaaagcttactttaaaaaaactacaaaaatggactaacaagccttaccagtgtaaacactaaggtaaaaaatatataaacaacataaagaaaacacaaaaccattttcagtcataaatatagtaaaatgaaaaaccaaatctcaagatgcctgtcaagatatatttgactatatattttgactatatttctgaaatcactaacatgaacttgacattgaaaaaataatccttaaatgtatataaaaatgggcactttgtggtaaaatgaacatgtgttttgaaaaacccaa

SEQ ID NO: 242380 - DNA, 1201 bp, Homo Sapiens
actttgtacaaaaaagttggaaagaaacaagccagactggtattgcaaccccagtcgaatatgcatgaaacagttgatggctatagaagatatttcactcaaattgtagggttctttgtggtagaagatcacattttacatgtgacccaaggattagtaaccagggcatacactgatgaactttggaacatggccctctcaaagataattgctgtccttagagctcattcatcctattgcactgatcctgatcttgttctggagctgaagaatcttattgtaatatttgcagatactttacagggttatggttttccagtgaaccgactttttgaccttttatttgaaataagagaccaatacaatgaaacactgcttaagaaatgggctggagttttcagggacatttttgaagaagataattacagccccatccctgttgtcaatgaagaagaatataaaattgtcatcagcaaatttccctttcaagatccagaccttgaaaagcagtctttcccaaagaaattccccatgtctcagtcagtgcctcatatttacattcaagttaaagaatttatttatgccagccttaaattttcagagtcactacaccggagctcaacagaaatagacgatatgcttagaaaatcaacaaatctgctgctgaccagaactttgagtagctgtttactgaaccttattagaaaacctcatataggtttgacagagctggtacaaatcatcataaacacaacacacctggagcaagcttgtaaatatcttgaggactttataactaacattacaaatatttcccaagaaactgttcatactacaagactttatggactttctactttcaaggatgctcgacatgcagcagaaggagaaatatataccaaactgaatcaaaaattgatgaatttgttcagcttgctgattatgactggacaatgtctgagccagatggaagagctagtggttatttaatggaccttataaattttttgagaagcatctttcaagtgtttactcatttgcctgggaaagttgctcagacagcttgcatgtcagcctgccagcatctgtcaacatccttaatgcagatgctactggacagtgagttaaaacaaataagcatgggagctgttcagcagtttaacttagatgtcatacagtgtgaattgtttgccagctctga

SEQ ID NO: 242381 - DNA, 1458 bp, Homo Sapiens
  misc_feature (535)..(586): n is a, c, g, or t
  misc_feature (611)..(656): n is a, c, g, or t
  misc_feature (1031)..(1107): n is a, c, g, or t
cctgctaggaggtgccatgtcatttattcaaagaaaacaaaacgaaaccaaacaaaacagggcaaacacatttcttaataagtgcagtttgttaaaatcatgttaaaacatatgagtcagggggaagtaaaaataaagggtatcactgtaggaaaagcttttgggtctggcacctgggaaaccactggaaaggaggcagtgggaaaaacttcaagttctgaagggaaggagccccccaacctccccttcttccctctcacccactgaatcccaccaaaaactaccaaaacccccggaataaaaggtttcaagttcaatagtcactctctccaaatacaaaaagcatttacaattcaactgaacacaaaaccttgtgtgcaaagttatggggaactggggcatcgtataaaaagttgggttaaaaatgattctgtggtttggttttgttgtgttttgttttgtggctcttcctcagtcacctgaactcaggaaaaaaatgcttatcttgatgaaatatcaacagcccacccacagnnnnnnnnnnnnnnnnnnnnnnnnnnnnnnnnnnnnnnnnnnnnnnnnnnnngtcactgcttcctccccctccccannnnnnnnnnnnnnnnnnnnnnnnnnnnnnnnnnnnnnnnnnnnnnaatcctgaaaagtagacagtaaaacagctcctgggagaatttacaaccaactgcatgagggtctgggaagctgaggggctggagcagggttgggagagtgaacaggaggggattctcccctcagtcactgtagcctcactgtatgatcaagggaggtggggattatttagtcaaaaaggaagaaggtaggaagaacaggaggtggaaggctggggaggtggggacaaacagaaaataaaaggtcattgttgcctgtttgaatccagaaaaaaatgcctggccctatggaggggaaggaagcccctcagaggggaggcagtgggctggagggaggcagccctgggatgaccccatccccagcaccacgggatctgnnnnnnnnnnnnnnnnnnnnnnnnnnnnnnnnnnnnnnnnnnnnnnnnnnnnnnnnnnnnnnnnnnnnnnnnnnnnntggctactgtgtacttgtgccaccctgtgtgttcccggagtagctcccgtagtcgtagttcccgtagtatggcggccactggccctggttctgatagtactggttccactgctgggcatactgctgatactggttatagctgggctgagggtaggtctgtgcggtggggggtggcggtggggtatagggggccgggttgtaaccgccgtagctcccatagttgtaggcaggtggtggtggaggtggaggcggtggggctgtgtagccctggctgtaacctccctggttgtagggtagctgcctctgttgttggagttgttgttatcccggttgttgttaccccagcgccaa

SEQ ID NO: 242382 - DNA, 1552 bp, Homo Sapiens
  misc_feature (676)..(752): n is a, c, g, or t
  misc_feature (1127)..(1172): n is a, c, g, or t
  misc_feature (1197)..(1247): n is a, c, g, or t
ttgggttctgaaggagtttgcagttgaatggggtagatgggcattgttcagaggatatgccctctaggtcataataacaacccgagaagtactgaaggaaagaaacctggttctgccagggcagtgaacagtggggtgagggaagacttccctgaggaagtctcactcattcattgagaattaatgatgagtgagaattaagtagttgggggcaggaggcatttcagcagccaccgccaccacccagctacagccctgctcggaaccccccaggggccagcacctacaataagaacagcaacatccctggctcaagcgccaataccagcacccccaccgtcagcagctacagccctccatcagccgagttacagccagccaccctacaaccagggaggttacagccagggctacacagccccaccgcctccacctccaccaccacctgcctacaactatgggagctacggcggttacaacccggccccctataccccaccgccaccccccaccgcacagacctaccctcagcccagctataaccagtatcagcagtatgcccagcagtggaaccagtactatcagaaccagggccagtggccgccatactacgggaactacgactacgggagctactccgggaacacacagggtggcacaagtacacagtagccannnnnnnnnnnnnnnnnnnnnnnnnnnnnnnnnnnnnnnnnnnnnnnnnnnnnnnnnnnnnnnnnnnnnnnnnnnnncagatcccgtggtgctggggatggggtcatcccagggctgcctccctccagcccactgcctcccctctgaggggcttccttcccctccatagggccaggcatttttttctggattcaaacaggcaacaatgaccttttattttctgtttgtccccacctccccagccttccacctcctgttcttcctaccttcttcctttttgactaaataatccccacctcccttgatcatacagtgaggctacagtgactgaggggagaatcccctcctgttcactctcccaaccctgctccagcccctcagcttcccagaccctcatgcagttggttgtaaattctcccaggagctgttttactgtctacttttcaggattnnnnnnnnnnnnnnnnnnnnnnnnnnnnnnnnnnnnnnnnnnnnnntggggagggggaggaagcagtgacnnnnnnnnnnnnnnnnnnnnnnnnnnnnnnnnnnnnnnnnnnnnnnnnnnnactgtgggtgggctgttgatatttcatcaagataagcatttctttcctgagttcaggtgactgaggaagagccacaaaacaaaacacaacaaaaccaaaccacagaatcatctttaacccaactttttatacgatgccccagttccccataactttgcacacaagcttctgtgttcagttgaattgtaactgctttttgtatttggagagagtgactattgaacttgaaaccttttattccgggcgtcttggtagtttctggtgggattcagtgagtgagagggaagaaagggagggtggggggc

SEQ ID NO: 242383 - DNA, 907 bp, Homo Sapiens
ccccccacagcctgctccacctgtgttctagaactgccctctgctcaccagtaacgtaacgccctcccatccctactctgacacaccaagcaacaaatcctgtggctgtgacatcacaatacccaaactcctgccagcctagctccaactttttactaaatatctgccaacttaactattgccaacctccaaccctgtctgttcactccacagacacagcattagcctcaacactttggtgtgtctgatggataatgcaacacccagctcaactgccctctcaaatgcacttgccccaccttccaacttctacctggcagcagggcacgtgacccctcctctgtgctcctacgggcagcacttcaaacaggcctctttggccatgtcatgtctgtatgcgtgccctgaccccctaccagtccagaaagtgaaatcttcaagagcccatgaggggaggggctgtgtcttactcatctttgtctccccagagccaagtgcagatctagcaccttagatgtcatttctttgacccatccttgccaaatgaatgaaaacaagtgacatggacacactgaaatggttacagctgtaaacctttaaagcctgtgtggttgactgagggtgactctcactacagttatggggaaatagaaaactagttactataagagggcacagcatggctaactaaagcatacactgcaggagggggtcaacaggtccacagaaaagggtgtactgtctaaagattcaaaagtcaaaggcaagacagtaagtttctgaggtctgatgttactataggttctgttcttcaaacaataaattaggcattctggggatatatattctagctttctgaaattaacattctaagaaagcaactcaaccttatgtgagatgaagccaa

SEQ ID NO: 242384 - DNA, 1407 bp, Homo Sapiens
  misc_feature (335)..(448): n is a, c, g, or t
  misc_feature (605)..(904): n is a, c, g, or t
tcaaacaagattgattttattcattcattcgagacaggtattcagtgccgagtgtggccttggtgctaggattcaaagaggaaaggaagaaaactttccattctaaaagaaactccacgtgaggcgaagaagatgaaatatagtcagaaaaccataccagtaggtggtaggtaaatgcagaagtatttaagagctcatacaggagtacctgcctcaggacagggaatctgagatgctctgcagagctggatcttaaagaacggagtgagttcatcacataatgtctggggcgaacagggctcaggagcaaaggatgtggttttgtttgttatttnnnnnnnnnnnnnnnnnnnnnnnnnnnnnnnnnnnnnnnnnnnnnnnnnnnnnnnnnnnnnnnnnnnnnnnnnnnnnnnnnnnnnnnnnnnnnnnnnnnnnnnnnnnnnnnnnngtgagcaaacttgattcgacagacctaggctggctccttagaagtgattccagtccattttcaaccttggtcaaattgttttgaccatattttgcttatatgtcacaagaaagtctctttctttaaagtcaagataatacttgttttatttgtttannnnnnnnnnnnnnnnnnnnnnnnnnnnnnnnnnnnnnnnnnnnnnnnnnnnnnnnnnnnnnnnnnnnnnnnnnnnnnnnnnnnnnnnnnnnnnnnnnnnnnnnnnnnnnnnnnnnnnnnnnnnnnnnnnnnnnnnnnnnnnnnnnnnnnnnnnnnnnnnnnnnnnnnnnnnnnnnnnnnnnnnnnnnnnnnnnnnnnnnnnnnnnnnnnnnnnnnnnnnnnnnnnnnnnnnnnnnnnnnnnnnnnnnnnnnnnnnnnnnnnnnnnnnnnnnnnnnnnnnnnnnnnnnnnnnnnnnnnnntatactcattttaaacaaagagatatttacattatgtgtaagcatcagtgaatattaagtatgctaagacagcaagttttaatctttcagtcctgttatatttctgcttttatccaaatgtgtctgtcacgtatgaatcagaagagcagaatgtggtccttgcatataaaatagcttactgaccctcaccgaaagagagagccaagaatatgtgcttcagatcacagtcaaaggctagcctgtgcttacctaggctgggggcctgcctggcatgtcagtgtcagctatacacagcatcttggagggtgggtcacccctttgcatatctgatgtggtgagctactcactacctcataaaatagccacattgttcttagaggctctttgttagaaattcccttttaattttgacttgaaaccttttgccctgtaattattatccactggccctagaggcagctcctaaagggaaaggcaagaaacatccaacttttttgtacaaa

SEQ ID NO: 242385 - DNA, 1512 bp, Homo Sapiens
  misc_feature (1394)..(1443): n is a, c, g, or t
tcggtcagtggcatatttcccactgaaattatgtccccaagtagcatgctagaattcttccagcaggtacaccacacaatggtgacacagctaatgtgtggtcagtgtgtgccacgttttctgcactatacccaggtttgatggcttgatgttaacttctgaaaatgtagctacagtgttcttcattataaacagaaacagaaaagaattactcctaataattcctgtatcaaactgtaactttatgaatataaatttagaaatgaacagatggcaagcatgaatattttcccgaagcgtttagtgcaaaatgcattagcactactgacattttcttcctatgccctgctcccagattaaaaacttaacacttacatgctcaccactagcagaaagggatttccagggaccagaatctcagagaaaagggggttcattcaaacataactggtgctgaatccttgcagctgaaaattatcttgcaagtatatatgctggcccttcatttaaaatgaacttgcagtttattaaaagcgatcaaagagctctggaatcttattttcaagaaccagaatatggcacacattttaaatttggacagacttctagcggacagttacttctcaagaattttctatacaaaagctgtgccaggcatatattttctcaccaggacacatggggcagcggacccctggtgtcagtaagaacacacccagaatgatataaccggatatttttcagtttctaaattaaggcatattcaaaaaattccatgtacaagtttacaccacttttctaagttactcaccaggtaattaaagcagattcacagatgaattactctcagtttaactatatgcaacaaccatgccaataacttttcttctaaattttgcataataatggttaaaaaaagtggtagtttaactatcatgttcacaattgtcatttttcaaggcagtagaagaccaagacattttaaaatgatataaaatttaagctttataataaacaccagaggaagtcacctttcctcccactccccacccccatttcacctcttcaatttcaagaaagactgcccaagaaacacaagcttacacgctacattcaggaccatgataaatgtaggcaattatgaaataagttgaactttgcttcttggtgaagccatattaatttctttttaaagtaaatttgactttcattgcagttccaattcatgcttttagtgatatacaacaatttccaaaatgttaaagtaatttcagtcaattaagccttcaatggcaatgcttataaattatatttattagtatggtcaagataagaaaggagtttgggctttgattataaaatgcagcatctttctctgattctcttggctaaannnnnnnnnnnnnnnnnnnnnnnnnnnnnnnnnnnnnnnnnnnnnnnnnncgctcgaatttctctcattaaatcaaaaaataccttgtcaacattagctcgtgttttagcagatgccaa

SEQ ID NO: 242386 - DNA, 1170 bp, Homo Sapiens
  misc_feature (347)..(360): n is a, c, g, or t
  misc_feature (402)..(413): n is a, c, g, or t
tcatagcactccagtacccaggagaggaaaggtctcaaagcaaagtcacaatgttagtgggtaggacccctggttaaataagactgtaataagtacacatggagattgctgggcccgctggccagtgttacattggtaacttgaattccgcacatggcatagcctatgagaaatacgaaatgagagatgtacatctcaaaccctttaaggacaaatatttaacatgagaagctggatgtaaatatctaaagagtgagttcctaaaaagcctatttttaactttacatacacacctgttacctggaatgcctgaacacatctttgacctgttcaaattaggactgagnnnnnnnnnnnnnntactttgttgaatcaactgtcctagccccactgcaaagaggnnnnnnnnnnnntcggtcagtggcatatttcccactgaaattatgtccccaagtagcatgctagaattcttccagcaggtacaccacacaatggtgacacagcctaatgtgtggtcagtgtgtgccacgttttctgcactatacccaggtttgatggcttgatgttaacttctgaaaatgtagctacagtgttcttcattataaacagaaacagaaaagaattactcctaataattcctgtatcaaactgtaactttatgaatataaatttagaaatgaacagatggcaagcatgaatattttcccgaagcgttctagtgcaaaatgcattagcactactgacattttcttcctatgccctgctcccagattaaaaacttaacacttacatgctcaccactagcagaaagggatttccagggaccagaatctcagagaaaaggagggttcattcaaacataactggtgctgaatccttgcagctgaaaattatcttgcaagtatatatgctggcccttcatttaaaatgaacttgcagtttattaaaagcgatcaaagagctctggaatcttattttcaagaaccagaatatggcacacattttaaatttggacagacttctagcggacagttacttctcaagaattttctatacaaaagctgtgccaggcatatattttctcaccaggacacatggggcagcggacccctggtgtcagtaagaacacacccagaatgatataaccagccaacttttttgttacaaaag

SEQ ID NO: 242387 - DNA, 1545 bp, Homo Sapiens
ttggccaaaataatgtcaatactgtagtttttaaagattttaggattaatcttagtccatataaatttgtactattggtaattattgaataattgggaggaatctgggcagttgtgctggttgtaaactatgaatttctaatcgtaaagtgaattgttatttctaattgaactttttttcaagaacagatttcagcctcacatactaagtaaatactgataaataaggaaattagaaatttagtattcataattaaatatgctctaaaatttcctatacttttatttcctgtttattcttaggtagattggaagggggaaacagtctgttctccctaattaaattttttctaataacgattagtagaatatggacattctatatgacagtgacattaaaagaggctctttggaagtatatacattattaacataatgtgtacaagtccttttgaaatgacaactttaatgggtttcagctcttttatctagagcttgagataattcaagctgagtttttcagggcatatcacaacggcaaagtgttcagcagtgggatatcaatgcttatttacattttcctactgctatttatataaaatgttattccattcagaggatgccttttatccccacattaaagcacagatcattaagcaataaaaaccaaattgtctgtcattcaaattataactgcagttatttttgcatggtaagagtgaggtgctaattttgtgtgagatgaactttgtaaactactttgggaaatgttctttggaagtaaggttttttctcctttagtcttatgcttccacttttgtctcagattcacaatccattaaaacatggggaaaaaagaaaaggtaaaattgagagacttttgttagaggagctatttggaatgaaccaacatttcagattttccaaaatgtaagttaggaagtctccattgtctctgcattaacaaaatacactgttactatcttaatctcaagagtgtcattacagtgagaatctcatttaaaagcataccagtgaaattaatagcagtgcttatcaaagaacactgaaatctgtgagaatctttctaggagcattcttttcttcttttagttccaagttccagggtatttttcattcctagtaggtttatatgactcacagaatgtggacttttttcctgtttggagtatttttgtaatgtaagtatcggatagctgcaccacagcatgcataaattgcacattttgttttactttctttatagaatatttaatttcaaaaatataatttatgccaaaaaaagcatacctttcaattttgctacttggttgatttagcacaaaatgcaaagtcttggggcagagagggggagtgaaaaaaattttataggtaattgttacaaaaatacctgtcagaaaccctaaagctgcattgtaaaacaaatggtgtaaactagttttgaaaagtggtaagggatttgtgaaaaaaatctcagacttaatgctctctaaccacatgagtttcttctttttatttagtaata

SEQ ID NO: 242388 - DNA, 1540 bp, Homo Sapiens
ttgggctcctcccccttcctggaggagactcacccagctcaccagcagggagccagcagaccagggccccgggatgcccaggcacaccccggccgtcccagagcagtgcccacacagtgcgacgtcccccccaacagccgcttcaattgcgcccctgacaaggccatcacccaggaacagtgcgaggcccgcggctgctgctacatccctgcaaagcaggggctgcagggagcccagatggggcagccctggtgcttcttcccacccagctaccccagctacaagctggagaacctgagctcctctgaaatgggctacacggccaccctgacccgtaccacccccaccttcttccccaaggacatcctgaccctgcggctggacgtgatgatggagactgagaaccgcctccacttcacgatcaaagatccagctaacaggcgctacgaggtgcccttggagaccccgcgtgtccacagccgggcaccgtccccactctacagcgtggagttctccgaggagcccttcggggtgatcgtgcaccggcagctggacggccgcgtgctgctgaacacgacggtggcgcccctgttctttgcggaccagttccttcagctgtccacctcgctgccctcgcagtatatcacaggcctcgccgagcacctcagtcccctgatgctcagcaccagctggaccaggatcaccctgtggaaccgggaccttgcgcccacgcccggtgcgaacctctacgggtctcaccctttctacctggcgctggaggacggcgggtcggctcacggggtgttcctgctaaacagcaatgccatggatgtggtcctgcagccgagccctgcccttagctggaggtcgacaggtgggatcctggatgtctacatcttcctgggcccagagcccaagagcgtggtgcagcagtacctggacgttgtgggatacccgttcatgccgccatactggggcctgggcttccacctgtgccgctggggctactcctccaccgctatcacccgccaggtggtggagaacatgaccagggcccacttccccctggacgtccaatggaacgacctggactacatggactcccggagggacttcacgttcaacaaggatggcttccgggacttcccggccatggtgcaggagctgcaccagggcggccggcgctacatgatgatcgtggatcctgccatcagcagctcgggccctgccgggagctacaggccctatgacgagggtctgcggaggggggttttcatcaccaacgagaccggccagccgctgattgggaaggtatggcccgggtccactgccttccccgacttcaccaaccccacagccctggcctggtgggaggacatggtggctgagttccatgaccaggtgcccttcgacggcatgtggattgacatgaacgagccttccaacttcatcaggggctctgaggacggctgccccaacaatgagctggagaacccaccctacgtgcctggggtggttggggggaccctccaggcggcca

SEQ ID NO: 242389 - DNA, 940 bp, Homo Sapiens
cccccgcccctgtgccccctttccagtgtggcggccagtcgggagggaggagggtttctttctgtgagatgaccaggggcccgggatgggggaggtgagacgtgccagacttctggcagggagacccaagctgtagctcctgtcacacaacaggtcctggaagtcagtccatcctcccgtgccacccagggacttgtggccggagggggaggggaagcctttccctaggtgctgggggagggcccaagcactctcactagtcagcacatccatcagctgaagacacaaaacccagattataaataatttcatttttaattctctgtacaaaacttctcaatctatgaaaataaagtttgcaaaaggcaaagtagcacaggagcctcaggtcaggaggctaagcacgctgacctacactatgtacacgtctctctcccacgacggagagagaggcctctggggcagagccctgcttgcagtccgggaaagccaagttggcttccgtcagcacagggaaatgtacccctctcttccctgtacacaggaggaaaaaagccactaaggtgcctgcagagcaaggaggggggccccccaaaatggctcggcccctgcagtgccccgatcggccaccagaggtcagcaccatcatggccgccggtcttagggtcaagatcgcgcccctcgggccttccaccgcgaaggcacacagcagccgcaggtcgaactgtggaggccagagtctcttgcactgccttcggccttcaaagcttcgacgcaggacagaagctgcacgggaccaaagtggctagagacaggggtgctgaggccggggacacggggtctagctggaagtgacagtggtcccaccgcccaggcgcatgagcatctgctgacagtcgtgcagcagccggcgatcgccaactttcttgtacaaagccaa

SEQ ID NO: 242390 - DNA, 2095 bp, Homo Sapiens
  misc_feature (1028)..(1036): n is a, c, g, or t
ttggcgggtagtcgaccgtgtccgcgcgcctgggagacgctgcctcggcccggacgcgcccgcgcccccgcggctggagggtggtcaacaacggttccagcctcagggatgagtgcatcacaaacctactggtgtttggcttcctccaaagctgttctgacaacagcttccgcagagagctggacgcactgggccacgagctgccagtgctggctccccagtgggagggctacgatgagctgcagactgatggcaaccgcagcagccactcccgcttgggaagaatagaggcagattctgaaagtcaagaagacatcatccggaatattgccaggcacctcgcccaggtcggggacagcatggaccgtagcatccctccgggcctggtgaacggcctggccctgcagctcaggaacaccagccggtcggaggaggaccggaacagggacctggctactgccctggagcagctgctgcaggcctaccctagagacatggagaaggagaagaccatgctggtgctggccctgctgctggccaagaaggtggccagtcacacgccgtccttgctccgtgatgtctttcacacaacagtgaactttattaaccagaacctacgcacctacgtgaggagcttagccagaaatgggatggactgaacggacagttccagaagtgtgactggctaaagctcgatgtggtcacagctgtatagctgcttccagtgtagacggagccctggcatgtcaacagcgttcctagagaagacaggctggaagatagctgtgacttctattttaaagacaatgttaaacttataacccactttaaaatatctacattaatatacttgaatgaaaatgtccatttacacgtatttgaatggccttcatatcatccacacatgaatctgcacatctgtaaatctacacacggtgcctttatttccactgtgcaggttcccacttaaaaattaaattggaaagcaggtttcaaggaagtagaaacaaaatacaatttttttggtnnnnnnnnnttactgtttattaaagtacaaccatagaggatggtcttacagcaggcagtatcctgtttgaggaaagcaagaatcagagaaggaacataccccttacaaatgaaaaattccactcaaaatagggactatctatcttaatactaaggaaccaacaatcttcctgtttaaaaaaccacatggcacagagattctgaactaaagtgctgcactcaaatgatgggaagtccggccccagtacacaggggcttgactttttcaacttcgtttcctttgttggagtcaaaaagaaccacttgtggttctaaaaggtgtgaaggtgatttaagggcccaggtcagccactgtttgtttacaaaatcaggtaactaactgcatacactttttctctttccatgacatcaagactttgctaaagacatgaagccacgggtgccagaagctactgcgatgccccgggagttagccccctggtaatagctgtaaacttccaatttctagccatacgctcagctcatccatgcctcagaagtgcatctggagagaacaggtttctaagcataaaagatgaaagagcagttggactttttaaaaattcagcaaagtggttccctctcttagggacagtcaaaaccaagtcacttaggtagtaccaaaataaataaggaaaagcttagctttagaaacagtgcaacactggtctgctgttccagtggtaagctatgtcccaggaatcagtttaaaagcacgacagtggatgctgggtccatatcacacacattgctgtgaacaggaaactcctgtgaccacaacatgaggccactggagacgcatatgagtaagggcactgacggactcatgatttcttcttaccagatgctttcctgttctttaagagtttaaaatcatcagaaaggaaaacaaactctatattgttcagcatgcaatacataccacgctagggctggctcattgaaagtgggcaaaagcttacaaatactaaaaagaagtgctgccgcgcagtgtggagcactgtttggaaataaatcttcctaacgctac

SEQ ID NO: 242391 - DNA, 1210 bp, Homo Sapiens
  misc_feature (912)..(920): n is a, c, g, or t
ccaactttgtacaaaaaagttggcttcctccaaagctgttctgacaacagcttccgcagagagctggacgcactgggccacgagctgccagtgctggctccccagtgggagggctacgatgagctgcagactgatggcaaccgcagcagccactcccgcttgggaagaatagaggcagattctgaaagtcaagaagacatcatccggaatattgccaggcacctcgcccaggtcggggacagcatggaccgtagcatccctccgggcctggtgaacggcctggccctgcagctcaggaacaccagccggtcggaggaggaccggaacagggacctggccactgccctggagcagctgctgcaggcctaccctagagacatggagaaggagaagaccatgctggtgctggccctgctgctggccaagaaggtggccagtcacacgccgtccttgctccgtgatgtctttcacacaacagtgaattttattaaccagaacctacgcacctacgtgaggagcttagccagaaatgggatggactgaacggacagttccagaagtgtgactggctaaagctcgatgtggtcacagctgtatagctgcttccagtgtagacggagccctggcatgtcaacagcgttcctagagaagacaggctggaagatagctgtgacttctattttaaagacaatgttaaacttataacccactttaaaatatctacattaatatacttgaatgaaaatgtccatttacacgtatttgaatggccttcatatcatccacacatgaatctgcacatctgtaaatctacacacggtgcctttatttccactgtgcaggttcccacttaaaaattaaattggaaagcaggtttcaaggaagtagaaacaaaatacaatttttttggtnnnnnnnnnttactgtttattaaagtacaaccatagaggatggtcttacagcaggcagtatcctgtttgaggaaagcaagaatcagagaaggaacataccccttacaaatgaaaaattccactcaaaataggggactatctatctatcttaatactaaggaaccaacaatcttcctgtttaaaaaaccacatggcacagagattctgaactaaagtgctgcactcaaatgatgggaagtccggcccccagtacacaggggcttgacttttcaacttcgttcctttgttgaaatcaaaaa

SEQ ID NO: 242392 - DNA, 579 bp, Homo Sapiens
ttgtacaaaaaagttggcacctggggactatatgacaaaagagattcaggaagtcaaggagcagcgggtgacggggctgctggttgccctgcttgtgggcctctccatagttatcggggatctgctccggcagatccccctggccgtgctctttggaattttcctgtacatgggagtcacctcccttaacgggatccagttctatgagcggctgcatctgctgctcatgccgcccaaacaccacccagatgtcacttacgtcaagaaggtccggaccctccgtatgcacctgttcacggccctgcagctgctctgcctggccctgctctgggccgtcatgtccacagctgcctccctggccttccccttcatcctcatcctcacagtgccgctccgcatggtggtgctcacccgtatcttcaccgaccgagagatgaaatgtctggatgctaacgaggcagagccggtgtttgatgagcgggagggtgtggacgagtacaatgagatgcccatgcctgtgtagccgccaccgagggacagccgagggaccgatggacgaggggacaggctggtgggatg

SEQ ID NO: 242393 - DNA, 1195 bp, Homo Sapiens
ttggctttgcttttgttttataacattgtcagctaattttggctttgttctttggcatccattcttattataagtgatggaatgccatgaaatgtactgtattgtatattacttgggaggacactaggttttcaaagaagtctggcagcacttgggttatagagggctcagcatgaccaaagtcctaaagattttacctcccagctttggttgtatgtgttcccaagtggtgaggtgagattgtggctggaggaagaaaaaggatggcatgaaagaatgacccttattgtggtctgtccttctaatcaacataattagggcagcttaccccaacatgaaaatgatgacctggccatttttaatggccagagcttgaagtctggtctctcattttgtttcagaaatgagtgagaggccttcctgcagagcagtcaggagaaatggtggagcctggggccctggaatggctgaccctgtgcctagagagctgatggcaagggctgtctggcatggctcatttgggtggggtttccccaggcataccttagttccctgatcctctgcaaagagtagctcattgactgagcaagcgcttcaggaggactgtgctggttgttcccagaccaaagagagtcacttttgactccatcaacttcaaggggacagagcctaggcagcagattctcctaatttttaacactaaaattcaaggaagcagtggaggaaagaatgcattactaccacagatagaaataggggactcatagaactctcgactagtacctgtcagctctcaaatgcattcttgtgtctttgcttgagctgccaaagaagggtcacaaagtgttcttcctcatggaagaagtgcctcggggttgcagggctgcaaagtgacaactgcactgaatgacactttattttttggctttggcttattatttagcactgggaggcccaggggaattggtgattacagtagcactttgggaagttaaagccccctttgggcttgctttggagagatgatggcatgcttggtattccatttggataatcaggaagcctccctagtccatccatattgtgtcagagtgggattaacaaccctggaagagtccactgccaaaagagtagttgctttcctggaatttccaaagcttttggattttctggatcaagtaacccactttttaaa

SEQ ID NO: 242394 - DNA, 806 bp, Homo Sapiens
  misc_feature (66)..(108): n is a, c, g, or t
  misc_feature (233)..(334): n is a, c, g, or t
  misc_feature (507)..(662): n is a, c, g, or t
  misc_feature (670)..(690): n is a, c, g, or t
atctgcctggcccatatagtgaaaccctgtctctactaaaaatacaaaaatcagccgggcatggtnnnnnnnnnnnnnnnnnnnnnnnnnnnnnnnnnnnnnnnnnnnacaacagtccagagatgatgccatttccggggaaagaggttgacttgaggaaggcagccatgggaataaaagctcccacagatccttttcactaaaaagaaagcaggccgggtgcagtagctcannnnnnnnnnnnnnnnnnnnnnnnnnnnnnnnnnnnnnnnnnnnnnnnnnnnnnnnnnnnnnnnnnnnnnnnnnnnnnnnnnnnnnnnnnnnnnnnnnnnnnttttgtgtgtttttcaacaagtgattcaaattgctgctcagatttaaaacttactgtaactatcagtgtaaagacccatgcctggatcctgtttcatttttatatcaacttggtaaaaatgctgttcttgacaccctgtcctctctatcctccctcaaaccacatgtgatttnnnnnnnnnnnnnnnnnnnnnnnnnnnnnnnnnnnnnnnnnnnnnnnnnnnnnnnnnnnnnnnnnnnnnnnnnnnnnnnnnnnnnnnnnnnnnnnnnnnnnnnnnnnnnnnnnnnnnnnnnnnnnnnnnnnnnnnnnnnnnnnnnnnnnnnnnnnnctgtttcnnnnnnnnnnnnnnnnnnnnntgccgatccagagtattttgtgattttaccttttactcctcctcccttgcttggttggtagtatgaagaccagagaaggaaagaaaagatggaaaggaggctgggcatggtgattc

SEQ ID NO: 242395 - DNA, 1200 bp, Homo Sapiens
gtaaagattcaatgacaaagttttataaaatacccaatactggctaggccacaattagacacattattatctcattggctgtatctggtatcaaacaacaaaggcctgaaagattaccatagatttttgatggccctcattaacataaattaatccgtagtgacattccctggataataaatacagttttatgtcccgtgtgtcttctgtgtcttccaagttgctacagggctctatttgatctgagaaactgactgctgtttacatccaggtatgcaatgtgacattagaattgaagcagaaaggaagcaaaacaaaacagggttcatgaggaaaataatcttctaagaactaacatggcctggaggtaaaatgcaaatatatccggtaataagaagcccagattactgcagataaaagattaaaataggattcaattattcatctccatttgcaaatctacaaactaggaggaaggactaacccttttcctgggattagtaactaaatttaatgattacagcaaatataaagttcttttgtaaattattgttggttaatgatgacttgcattgacaacacactttagctctcgcccctttcattctccgcctgcaagaacaaaggcaaaatgaacagtgaggaaaacctggaaacaggaccgagtgtttgctatcacttgattcctttgaaggagcaatgctttctcataatataggttttatagtatcatcaagtacatcagttaagcaaatcaagtgctttgtgttctgtatataaattacataatacaagagtctgtggcagttaagaatctggttctgcactttgggaggcagttccttccctcaggtttgttagtagaaaccaaaaagtagcctgagagggttcaggtgccaccttggaggcactaccttatcttttgtccttttagagttttcttgctggggtgtttggctccagcactatagcccttaccacaatcattccacctggttcttcaataggactctgaggtatcaaaaaagtcactagggcagcccagagattggtacgatttacctttacacctcaaagttttttagatgtgagcagcgctggattatggcaatttaccttataataactcaccatagttggctgttataagaataaatattgttcttctaagatttttaattagttgcttcagttattaca

SEQ ID NO: 242396 - DNA, 1353 bp, Homo Sapiens
ttccacacctccacggtttggaaggagactttagaacttggggggtggggtgggaagcagggagacgtcgcccagctggtggccagagctagctctggctcttcaggccacaagttcacagtccttcgctctgagcaccaggtttagtctccaggaagggatttggtgaagtcaagtgggcagggcgaagttggggcccatccctgccgtccggcttccggcaggagaggttcccggggtcccaggcagaacgggcgccagcacctgcgttctgggcgggggaggaaagaagaccaaggagcagtcagtttccgccgagcgtgccgaggcgggggccgtccgcagactggccggcgccagggaggaaacttggtctgtacctccagctgataactccgcgccccacgctgcccccacccagttggcgccaaagaccacaggcggagcttgcgctacccctcctacttggaattgacactagctgggagggggctgccgaagacagctccctatacaacatggaacagaaagacttgtatttagtcggacccatgtctactttgccagaccctcggccactgcgggagggcagggcccaggcgcatttaaggcttaaatgcacatcacatggaaactgactctgccattcatttgatgcaaccatgggcaagtcacttgtccctctctggcctcagtttccctaaaccgagtgagtggcaatttttcaaaacgtctgccaactccaggacttgccgtttaaacctccctctccaagagaggagatactcacctggaggtgtcaggacacggccgagtcagtggcaaaagctccttttgtcgttggagatgacaagttccggagcgagctcggctgtctgattagaggaaaagagggaagagttacgcgaggcaatcgggagctccgagggtcccgcagcatccttgcctgggtgttcagccctgtcccgacttcgaggcttacctggatgggaaggtgggggccatcagggggtccaggggctggctcggccaggactacctgcaggtcgagaatgtagtcgatgacgcgctgtaggatttccacctggctaagctgagtgcctctcgggactccgggtaccagttcccgcaggcgggagtagcagtggttcatgtcgtccagcaagctcagcggctcctcagctgccgggcccttccctcggccccgggcgatggccagactgcgttccgacaggcagcacaccgcctcgtagcagccgcgcaccgggctcagcgccttcatgctggggagtgagtccagaggtgccccaaagagaaagaaaaccaaaagaagtcccgctacagtgaccccaa

SEQ ID NO: 242397 - DNA, 1827 bp, Homo Sapiens
  misc_feature (162)..(171): n is a, c, g, or t
ttgggatttgtctggcttctagaatgtgtggggtcatgtctttcatcagtttttaaaattctgcattctatctaagtatttgctctgtcctattcttgcctctcctctcacagctaatgaagcacttaggatttttcactgtattctctacaggtcttctgnnnnnnnnnnccagctgtttctcccatggtgcactgtgaatagtgtctcctgagttatcttccagtttataaactaccccaattggctacattctattacatctatttactgagttttaaagtgcagtttttatgtatattcttgtaatgtttatattcagttcttttccagattagctccacaactttttatcgtatagtttcccatttcctgcaagtacattcacacaccttatttccttaaacaaagaaaacaaatctaatacctatatctgtgagtttgttttcattgcttcaagtaattcttgcctctggaatctagtttccttatatgactactttttactatgtgttactagacatatttgaaaagtaatttgaggcctacaatgaaattacttttccatgaaaagtatttacattttattttctctgtcacctggaggcattactagtgtgggaacaccttaaaggaagctcagtgcttaagattctttagatcactggggcaattctaaacttgcctgttcttttacattggttcttccacctctgattcattatcatcctaaaggtgaaagtatttgggagtctcagcctattgtgtggagggtctcctgttaggttcatcaccttatatgggccctgaactttaatttctgtccccctcactcataaggttgtcagagtaagggtacatgcttgcttctcttattctctttacttttggacttggcattccttattgtctggaaaatctctttgatgttttaagattattcttgtattttaatcaggaattgttttcaacaggaacatgatgtaaatatcctagcatgcaattttcagaaacaagtagtttcccacaattgaatcttgctcctacagggccaaatcctactctttctcttggcatgctctgcacttaagcgcatactacttgtggcatggaatccataaatgttgataaagaactacgcctaattctgtcagaacaattaatcatttttagaaatttttgcttagaaacctggtaaagtgctctgcatgtagcaagtatacgaacacacaaagtttgttgaatagctgcataaaacaaatgggctagattttacttcatatttcaaaattcagagaaagagagtagtattaaaagacataagccaaaaatagatcattgcagactgagtacaaagaaccattctatttcttctcttaaaaaattaaaatttcaaattaagtaccaatgaccaaataagtaacaaacacattcagaaacatactatatgtctacaaagaatacttcaaaatgtgcctccaaacttcaggcacataattccaatttttattgaatgtagagattttatgaaaacaaatccaaagctgtcccatcatggaacagccctctaccatttggttattttaagactgttcaattacttacatggcagaatacatacactatatttagaaaacataaattgggtttgatatgcaattgttttcatcttacaccatttcaataaatttcacaaattataacaggttgccattttattgaatatctgcgacactttacattgttcacgaagtagctacttccagaagctgatattctcctccaaattgtctttggctaagtactacagatgtgattcagtccaaa

SEQ ID NO: 242398 - DNA, 1947 bp, Homo Sapiens
ctttgtacaaaaaagttgggaccaaataagtcacaaacacattcagaaacatactatatgtctacaaagaatacttcaaaatgtgcctccaaacttcaggcacataattccaatttttattgaatgtagagattttatgaaaacaaatccaaagctgtcccatcatggaacagccctctaccatttggttattttaagactgttcaattacttacatggcagaatacatacactatatttagaaaacataaattgggtttgatatgcaattgttttcatcttacaccatttcaataaatttcacaaattataacaggttgccattttattgaatatctgcgacactttacattgttcaggaagtagctacttccagaaggctgatattctcctccaaattgtctttggctaagtactacagatgtgattcagtccaaactatatgcccaaactgattaaaattctcagtctctcctagcttgagacctcagatcctgagttataactttgacttgatcttcaagttgagatgcttcataaatatttttcttaaaacagggctatttaacataatttctttttcttgaaatatatgagtgtttttgatacaaaaacatatattacacatgagaatgtttaaagcatcaaaataatgattaaattttttacataacttaaatgacaggactacaatatgccccccacttttttgctgtttgaagtaaagaggaaagctctgtaacaatttcaaatacataggatttaacttatgttaatatcctgttataaaaaataactaccatataaagaatttaaaatatgcaaaagtaattagttcatttaaatttatacttatacaccggtgtcaatgaaaatatgcgaagttgccaagaaatttctaaggattaaagtggaagtaaaaaaacctgtttcaggcttcatttattgctacataatgactacttcaagggtcatctggcccgtcgtcagtcactcttagaagtggtaaatacagtggtatagtttggaaggaaaggaggaaaaaaataatgcattgtgatacaaaaatattacctacatataaattattaaagatttataaaacattcagaatatgttcttgctataaaaacaatatacttaaatatagaagcaaaaagtcctgaagcacccgcaattattttaatatccatttaatcagggaaaactatatatgtggatatataatacatacatatgtaataatttgagaagaaaaaaggcaaaattctgattataatccaaaaagagtttatctaattatggaggtaggtctccactccaattatacaaataagttatcagttttattcaaagaattataagtctaagacctcaaaactggtttttgtgccactgaaatacaatttgacagactttagaaaccagtattctaactggcatatacacaaagcagatatttccttcataaggttacatctgaaaagagccttcattaaaatcattattggcataaagaggtatacctaagtgcagatactttggcttagcatttaaataacacagtaaatgctataaatttcttaaaagaaatccttgtctttttagtacttaaattaattgtaaagctacagaaagtatggatctcttaaatttttagatatttaaatattgtgctaatgatttgaaaagatcattcctgcctaaagagcaaagcttatgtgtttcaaaaatcagacatatttatacttttagtgtttgtggcatttcagctttagtgctggagttagttttaacaaattaggttgcaatatgtaatatggcacattctttcactaaaaaagatgttctataatgaaaaacactaattctatttctaatggtaaactagagttggaggtcccaccatggatcacaggtatcagagccaacttttttgtacaaagt

SEQ ID NO: 242399 - DNA, 565 bp, Homo Sapiens
cttaaatttccaaacatggtctgtatttaagttatctagaattggttgcagcttactctgtggtatatatatggtcattattttatgtattcttgaaaaggataggtattctctaattttagtgcaagactacatttgttcactaaatgtattatagctagtgactaaatctagttagttgattgtgtcattccaaacatatttttgctgatttttggtctgctccaactatcaattgagggagggatgttaacatctcccaaactgattggaggtaaattcttcttataattaggtaaatgtttacattatttaatgtgaggctacattgttacaattagtatatatttccagagaattgtgactttcagtattatgtaacaatagtccttatgtttcctaatacttttggcctaaagagtattttgtctggtattaatacagccacatcagctttcttttggttaacatttacctggtatacgtattttttactccttttgcttttcctgcgtcctatcttttcaatataactcttgaaattgttatactggcccataagcca

SEQ ID NO: 242400 - DNA, 1319 bp, Homo Sapiens
aaccgaggggcaaccaggggaagatggggtgctggaggagagcttgtgggagccaaggagcaccttggacatctggagtctggcaggagtgatgacgggtggaggggctagctcgaggcagggctggtggggcctgaggccagtgaggagtgtggagtaggcgcccaggcatcgtgcagacagggcgacatcagctggggacgatgggcctgagctagggctggagaagggggagccaggcattcatcccggtcacttttggttacaggacgtggcagctggttggacgaggggagctggtgggcagggtttgatcccagggcctgggcaacggaggtgtagctggcagcagcgggcaggtgaggaccccatctgccgggcaggtgagtcccttccctccccaggcctcgcttccccagccttctgaaagaaggaggtttaggggatcgagggctggcggggagaagcagacaccctcccagcagaggggcaggatgggggcaggagagttagcaaaggtgacatcttctcggggggagccgagactgcgcaaggctggggggttatgggcccgttccaggcagaaagagcaagagggcagggagggagcacaggggtggccagcgtagggtccagcacgtggggtggtaccccaggcctgggtcagacagggacatggcaggggacacaggacagaggggtccccagctgccacctcacccaccgcaattcatttagtagcaggcacaggggcagctccggcacggctttctcaggcctatgccggagcctcgagggctggagagcgggaagacaggcagtgctcggggagttgcagcaggacgtcaccaggagggcgaagcggccacgggaggggggccccgggacattgcgcagcaaggaggctgcaggggctcggcctgcgggcgccggtcccacgaggcactgcggcccagggtctggtgcggagagggcccacagtggacttggtgacgctgtatgccctcaccgctcagcccctggggctggcttggcagacagtacagcatccaggggagtcaagggcatggggcgagaccagactaggcgaggcgggcggggcggagtgaatgagctctcaggagggaggatggtgcaggcaggggtgaggagcgcagcgggcggcgagcgggaggcactggcctccagagcccgtggccaaggcgggcctcgcgggcggcgacggagccgggatcggtgcctcagcgttcgggctggagacgaggccaggttctccagctggggtggacgtgcccacagctgccgaaagcccagacgcc

SEQ ID NO: 242401 - DNA, 1317 bp, Homo Sapiens
ttggcttcccttcccgggagaggctgggacccggcaccagggcagtactgtggccgctgcggcctcagctccgactgggtcaggttgcggagactccaggccgcttccagggcggacctgggtttcagtgatgagacatggggtatgatgtaacccgtttccagggggatgttgacgaagatcttatctgccctatttgcagtggagtcttggaggagccagtacaggcacctcattgtgaacatgctttctgcaacgcctgcatcacccagtggttctctcagcaacagacatgtccagtggaccgtagtgttgtgacggtcgcccatctgcgcccagtacctcggatcatgcggaacatgttgtcaaagctgcagattgcctgtgacaacgctgtgttcggctgtagtgccgttgtccggcttgacaacctcatgtctcacctcagcgactgtgagcacaacccgaagcggcctgtgacctgtgaacagggctgtggcctggagatgcccaaagatgagctgcccaaccataactgcattaagcacctgcgctcagtggtacagcagcagcagacacgcatcgcagagctggagaagacgtcagctgaacacaaacaccagctggcggagcagaagcgagacatccagctgctaaaggcatacatgcgtgcaatccgcagtgtcaaccccaaccttcagaacctggaggagacaattgaatacaacgagatcctagagtgggtgaactcccttcagccagcaagagtgacccgctggggagggatgatctcaactcctgatgctgtgctccaggctgtaatcaagcgctccctggtggagagtggctgtcctgcttctattgtcaacgagctgattgaaaatgcccacgagcgtagctggccccagggtctggccacactagagactagacagatgaaccgacgctactatgagaactacgtggccaagcgcatccctggcaagcaggctgttgtcgtgatggcctgtgagaaccagcacatgggggatgacatggtgcaagagccaggccttgtcatgatatttgcgcatggcgtggaagagatataagagaactcgactggctatcacgaagagatggaaatcagaaaatcccatcactccagcagctgggacctgagtcctacccaccattcttaatactgtggcttatacctgagccacacatctccctgcccttctggcactgaagggccttggggtagtttgctcagcctttcagtgggaaacccagatttcctccctttgccatattcccctaaatgtctataaatta

SEQ ID NO: 242402 - DNA, 1037 bp, Homo Sapiens
tgacgaggaatagcagaaaactactaaaagggagggggaatcaaaatgtaagaagggaagacagtgaaatttacacaggaggaaggagctgagaaagtcacagcttacacaaacagctgaaagaatcttcactcagtcctcccagcacaggtccccgtgacaacagcatcacatctgctttcctaggagcacttttacactgactgcctatttccttcctcgtttatgattagtcttgggggctttactttctggaactgtgctggcactggctcctgctctggttccttacaggaggctgacactaccagttcctcattattcctcctctgatccttccctactctaagactcagctctgtctcgggaagctcaatgccaggctgctgccgccttcttagagaccttctgctcctgtgctgctgcctccgcttttcttcttcttgctgccgctgctttatcttcatcagcttttcaaagcttttggttgttgttgggtttacaacgaaccagtcctagagaggcaaaatagaaatgtcatccagtcgaaaatatagtgaagaacataaagaaaggtggaggaagaatggaaaaaaggcatgattagggcagaacacagtaagaaggaaacagatatggaaccatacctcaggattctatattttaagatggagaaatccaacacagagcagctattacaagcacatattttgtaaggcgtaattctagggactttaataaatgatctacaaagtctgtttacttagcatcatcccactcttatatctcctgagtataaatctcatcatgagatgtaacacactgagccataggagatttttattccatgacggcatcgtaactaagagcataaattttgcagccagaccccctgggtgcaaatcccagctctgtttctagatacgtgaccatgggcgaattacttaacattttcgaggctcactttaaaaaattaaggggtaggggacatgaaatccaattatgaagtatttttgccaaaaaagaaagaactccaa

SEQ ID NO: 242403 - DNA, 1523 bp, Homo Sapiens
ttggcaaaaacacaccgtcgcttgccgtcagagacccgagtgtttttacgccttatagtctggttccttcagtggagtcttcacttttctctgaccaagaacgttccagtttttctgagcataaacccagaggtgctttggattttgcatccagctttttctcaacacccccgctggaactcagcggctccatctcttcgccttcggaagcacctgcgtctctgtctctgatgccgagtgacttgtcccccttcacatctcagtctttttctcccttggttgagacatttacattgtttgactctagtgatctgcagtcatctcagctgtctcttcccagttccacaaatcttgagttttcgcagctccagccaagttccgagctgcctttaaacaccatcatgttgctacctagccgttctgaggtgtcaccatggtcaagcttcccttctgattctctcgagtttgttgaagcgtctacggtttcactgacggattcagaagctcattttacctcagctttcattgaaactacctcctatcttgagtcttcactcatttcccatgaatccgcagtcactgcactggtgccccccggctctgagtcttttgacattttgactgccgggattcaagcaacatcaccattgaccactgtccacacaacgcccattttaactgagtcttctttgttctcaactctgacacctcctgacgaccaaatcagtgctctagacggtcacgtgtctgtcctggcctctttctccaaagccattcccactggtacggtgttgatcactgacgcgtacctgccatcaggatcctcgtttgtttctgaagcaacccccttccctctgcccacagagctgaccgtcgtgggcccatcactcacacccacagaggtgccactgaacacctccacggaagtgagcacaaccagcaccggtgctgccactggtggtcccctcgactccaccctgatgggtgacgccgcaagtcagagccccccagagagtagtgctgctcctcccctgccatccctgcgtcccgtgactgccttcactctcgaagcaacagtcgacacaccaacactggctactgccaagccgccatatgtttgtgatatcacagtccccgatgcctatctgatcacaactgtgctggccagaagagctgtgcaggagtacatcattacagcaatcaaagaagtactgaggattcacttcaaccgtgcagtggaactgaaggtttacgaactatttactgacttcacttttctggtaacatccggtcctttcgtttacacggcaatatccgtcataaatgtgcttataaacagtaagcttgtccgtgaccagactcctttaatcctgtctgtgaaaccttctttccttgtgccagagtccaggttccaagttcaaacagtacttcagtttgtgcctccgagtgtggatactggcttctgcaacttcacccagcgcattgagaaaggcctaatgacagctctctttgaagtgagaaaa

SEQ ID NO: 242404 - DNA, 1307 bp, Homo Sapiens
gggctttgggctccacctcaccatcataaccccttggcactcaggtctgcctggtggctgggaagcttccatctagaaaaccgcactggaaaggattctttaaccatgttgctctaacagggctgtgcactgttcagtacatgccatgcagatttctgcttccttgcttttgctcatgtgtttttcatctcactgtctgtcctgccattgactacaacccaaagcctcagaggcacagaactttcccagaccatctggtctaccctgatcttatctactataaacgtctttagatagtccttgattttctgcttgatgtgcagcagtcacctaaaagctcccttaggccacatattacgtcttttaccttttttgttttctacaatatctagcgcaaagccaggcacacacacactaaaaaataatattaaaattatgggtggttgaaaaggaacaaaaaaaagaaagatcccaggctgtatatcagccacccaaggatctcaacagattccaacttcaggctctatattggggtggcacttcctgcaagatggcgagttatattacttgtactctcacgaggcaacactcacatgctaagccaatttctgggatcacaatcttgcttagttgataatactaccatggaagccaaggaaagaagaggtaccacatgacaaatcagaggtgggctgtgtttatggtgcacagctcatcttgtgggccacccttccacagtcaggtaatggtgcaagtttcctccctgttcagctacaaggaggaagactggtcactccacgtgggactaaggaagaaggcaatgctcccagatgaggcagtcctataaattaccaggacactggggccccacccaaaccatcaggaagccacaaacctgacattagtatctgtcttgtgacacgaggcaactataagcatggggaacccagaaagagagtcccatggaacacacgcaaaggagtcatgaagacccaacagctccactgttacatctcaatagcaaacctctccccagagcagctctataagaaagcaaactcacaatgtcatatgaattggccgtggccagctgcagaaaccattaaagaccattggagtttttctccccgctcctcctgaaagcagggacaggcagctctcaaatcggcatctggcagactttccagtgagtggagaccagcaggatctgatccggaaatgtctgggttgctagaatgaacacaagaaaatacagaagcccttgctacctcccatcccagaagtgggatggcagtgataaaccccaa

SEQ ID NO: 242405 - DNA, 1526 bp, Homo Sapiens
  misc_feature (287)..(296): n is a, c, g, or t
gggttttgtgtcaatttttaaaatcaaaatcacctactaattagtatttgggggggagatctgacacttgatattctcagtgaccagatcagggtcagggctgaagtcagcataattctggagcaagaaaaagggattccttcttccacaaagccattccttctcctgagatgccatcttctagagaggtgactaacaggctctgagtggggggttttattatatgggttttttgtttcctggaatgagtaacaaaatgtttcaagaatacatcatttctcttaagnnnnnnnnnntcaacctatgtgtaaaaagagacatttaaaaagatttctgaccatttataaatataaatctaattccaacaggggtgtaatattttgaggacaggtaaaaagcataaaaatacaggtaagaaaataaaatttaataacatactaatctggattgctatacatattatcaagcagcagcatctttgtacaatacaggaagacttgcaaactttggaaatatactacattcagcaacacggtagacctgtcagagtgctacatatttacattaacttagatgtagcagtgcaaaccttcactcaactgagatccttctaacacacgtgcaacacacccatctttaccatttagacacccctactttctcattctcttagaggatcttattgcctcttcccgtactggaaatatttcatgagccatccttcttggcaaaatttcctcctagcatttgtaactgacaaaacttccttgatagctgtcagttcctaatacactttctcttgcctgtttatgtctcaaatctaatgcttttgtttctctttcctttgcgatttgttacagttgtttatgaaagtgcttcctataatatccagctaagatgtcttagaaaaacagaggggtttatttgtgtgtgtattacacacacacacgcgtacaggaggttgagctaccaggaggccgtttttgctaacatagttagaaaactgatggaaaatgcattagtcctttttcaccctgtggacaaggaagctgagctactttgctacaatagcaggaaggcacttgggtaaaacattcagataactgaggaaagcccaaattccctcatgtacaaaaaacagctcctagccagtcctagccaggtcgagtgagaacaaatcactcaccacacactcttggcttttccccagtgaagtcaatattgctggagagaaaattctttaggtgaagctgctagtataaggaacttataataaggaacttattttgttcatgaggaagtatttagcatcccagaagttccatggtaggggtcaacctcttactggcattctgtttatttaaaagagaattttgctaaactctttgagcttagggtgggtgagggaaaggtcgttcattgtcagggaaaaataaatgctaggtatcgaccgacaggttgcatacaagtgcacaggcccgaatctgagcattttgccttctatctggagtgccaaacacacccaa

SEQ ID NO: 242406 - DNA, 938 bp, Homo Sapiens
atgctatatagggatgttattttatcatttagaacccagtttaagaagcaatcaggatacacaatgaggcacagaaaacaataagttatgttactaaatgcatagaaaaaaagtctggaagaatactctcaaaccactaactttataccaccaaaagaactgagtatttgtcttaacaagtgacatgttttccaaaggtttttaagaaatataatcccatttttcaagtaatccagagcatgaagaatagactctaagacaaccacaaattatcgtctcctggtacatacacccttgtgtaactccctatccccttgcacgtgggcaggacctgtgactagaatactacagaaaatgtgacaggttgtcacttcataagtatattacctaagactataaggtctgtcttactaggagacacactcccttgctggctttgaggaagcaagcagtcatgtcaggaaggcccaagagacaagtaactaagaacagcctctggccaatagccagcaaaaaattgaggacccaatgaatctagacagatcttatacttttcacaaaaataaactcaaaatggttcacagacttaaacataaaatgcaaaactatgaaactcccagaagataacatagggtaaaatccaggtgatcttggatttggcagtgacttttaaaatacaccaaaggtataatccgtgaaagagaaaattgataagcaggacttcattaaacttaaaaatctctgctctgtgaaagaccctgtaagagaataaaaagacaagccacagatcaggagagtatatttgcaaaagatagctctgataaaggatcaaagaatacttcaaactcaacagtaaggataaaaagaacacttaaaactcaacaataagaaaacaatttaaaaatagaccaagaactcggccgggcgcggtggctcat

SEQ ID NO: 242407 - DNA, 1618 bp, Homo Sapiens
ttggggcagagagtgcagggggccgctccctctggcccgcgcctctgtgtgtggtcagctggcctggctgtgacctcaccagtggcccagagcagaggggcaaggtgggctggggggagggctgagcgcacagagggggcctgccgtgggcccgggtccctcctccgcagcgtgaacctgacaggtctcaccagcgccggtactgacgaccccctcagcaccaagagcctccctgctcctcctgcaggcgcgactggtaactcccatgagcccggggccagggcccacagacagacagacctccccaggacagacgtccccggcacgctccttgtcctcaggagggctgcgtccccctggagtccaacgcggggcgaccccataacctgttgtctgattacagttgtgataagtccccgggaaggagcatgacaagaggctgagacatgtggcagcccagtccttacctcatggtgaatattgaagacactaacccaggctaggccaggctcgccccgcagctacggcggtggcatgcgtctgcggcgtcatctcagctccctgttgctggcggccgcttgtgacctaaccgcaggcgcctgtgtgcaacgtggtggggctcccggcagggctcggctctgcccaagaggcccgccctggggctgcgccgagccgctttgccaaggggtttccttctcactcagacgcatgatggccccaggtgtggccgcgggagccgagggatggacgggctggacctggctcgccgtaggagacgccccccacccctgggctggagtccagccaggccgctgatcctgcatccccagaccatggggcctccaaacaccttcccagctcctgtcccacgtgtccggccaggctcaggaaccgggctcagctgcactttcctcttccccgcaggctgtgaagctacgggaacaggagcagaaggaggagaagctgaggctccagcagcaggaggagcggcggcggctgcaggaggccgagctgcggcgcgtggaggaggagaaggagcgcgcgctgggcctgcagcggaaagagcgggagctgcgcgagcggctgctgagcatcctgctgagcaagaagccggacgacagccacacacacgacgagctgggcgtggcacacgccgacctgctgcagcccgtcctggacatcctgcagaccgtgtcgtccggctgtgtgagcgccaccacgctgcaccccctcgggggccagcccccggccggtgcccccaaggagagcccggcccacccagaggccgacggcgctcccaaaagcgtgaacgggagcgtggccgaggaggccccatgcaaggaggttcagagctcctgtcgtgtggtccccgaggatggctctccagagaagaggtgcccgggcggcgtcctctcctgcattcctgacaacaaccaacagcccaagggcatctctgcctgcgagcagaatgtctccagaaaggacacccggtcagaacaggacaagtgcaaccgggagcccagcaagggccggggccgggccaccggagacgggcttgctgaccggcacaagcgggagaggagccgggccaggcgggccagcagcagggaggacggga

SEQ ID NO: 242408 - DNA, 695 bp, Homo Sapiens
  misc_feature (325)..(363): n is a, c, g, or t
caggagcctgtcctttcagggctgccccacaccgtccacacccagtggtcaggcagagggagaaaggggttggcggcttctccagtgggagggaggggaaggcaggccttggaaagttagtacttcacagttttaaagagaaaactgaggaggaaaaggctgaggaggagaactggggggcacagggacatgaaaggagagtgggggccccttccgagccactccctcccccggacccaccccctccagctctggatccagctccccccaatacacagcacaaattccttcagtataaatgtgcttaaaatgaaaattcttattnnnnnnnnnnnnnnnnnnnnnnnnnnnnnnnnnnnnnnncagcgagaattaatacctggggttggtatggcagggtatgtacagggggaaccccccgcccctgtcccaccccctctgtcaccaaccgaggcaggggggaggttgaggttccccagctggggagcaatggcttgtgagttctgaggatgggggagccaagtcctggcgtttgctggtgatgaagatgtggtgagctgggcagaggggtgtcttgatgaacacgaggcccccaggacccatcctgagacccaggaccaggggcctcactcagttcctggcctcggcctctgacgtcagcccaggctgtgggagcaggcagtccactgagccaa

SEQ ID NO: 242409 - DNA, 1067 bp, Homo Sapiens
ttgggcaagtgctcacccccctcctcagctgtcttctcctctctaggaaagccatcaccaagtcgggcctccagcacctggccccccctccgcccacccctggggccccgtgcagcgagtcagagcggcagatccggagtacagtggactggagcgagtcagcgacatatggggagcacatctggttcgagaccaacgtgtccggggacttctgctacgttggggagcagtactgtgtagccaggatgctgcagaagtcagtgtctcgaagaaagtgcgcagcctgcaagattgtggtgcacacgccctgcatcgagcagctggagaagataaatttccgctgtaagccgtccttccgtgaatcaggctccaggaatgtccgcgagccaacctttgtacggcaccactgggtacacagacgacgccaggacggcaagtgtcggcactgtgggaagggattccagcagaagttcaccttccacagcaaggagattgtggccatcagctgctcgtggtgcaagcaggcataccacagcaaggtgtcctgcttcatgctgcagcagatcgaggagccgtgctcgctgggggtccacgcagccgtggtcatcccgcccacctggatcctccgcgcccggaggccccagaatactctgaaagcaagcaagaagaagaagagggcatccttcaagaggaagtccagcaagaaagggcctgaggagggccgctggagacccttcatcatcaggcccaccccctccccgctcatgaagcccctgctggtgtttgtgaaccccaagagtgggggcaaccagggtgcaaagatcatccagtctttcctctggtatctcaatccccgacaagtcttcgacctgagccagggagggccccaggaggcgctggagatgtaccgcaaagtgcacaacctgcggatcctggcgtgcgggggcgacggcacggtgggctggatcctctccaccctggaccagctacgcctgaagccgccaccccctgttgccatcctgcccctgggtactggcaacgacttggcccgaaccctcaactggggt

SEQ ID NO: 242410 - DNA, 1328 bp, Homo Sapiens
  misc_feature (441)..(451): n is a, c, g, or t
  misc_feature (1205)..(1224): n is a, c, g, or t
agtttatgtggcttttgtgtggacaggctgaagttcatgggggaaggcaagagatagatatgtgggccagagaggcttgcttgggtggctgattctgattaggacaccctgatagatgaaaatcagtggcggacagtagcttatagactggtactgaaggaaatgggggaacttcagagactactgtttggtacttgtatctgggccagcttgatagggagagaaatcctaaggaatgtagagatgatgaccctaccaaatttggaactagactccaatgagtttagttaaaacaaacactatggtgaagaactttcttcattagtatcttgtcacttgggggagtgaggggggacagaatttgctcttaaaaacccagggtttgcttccatgtgttattacgatgttctttgtaggcctccatttgggattgagtggttnnnnnnnnnnntctgtacagcttttgtgcccttatcatgatttgtcagtagaaagggagtaaaagcaaaacattgagttcagaattagaaattttcttcttttaaggaacaccatggtactctcagagaacaggagatatgtgtgcatgccttagaaaaagcccttgagtaggtaaggaaggaagaaacctatggcagacaggattgctgcagccaagggggcttcaagcagaaatgaaagagatggcttgtgaagctgcccgtgtcgtgtgggagtcgcatggcttctgcgagaaaagtgatttaggcagacggaggttttttctcaatcagaggctttcagtaactctgctgatgcacagagaagagacttcctcagcctgcaggctacaagagccaactgttagtgcaaaaaaggactttaatacaaatttcttattccagaaattttgttccaggtctggacaagctgagaaatttatcattgtttttcgagtttttaagatacccactttttctgagaggtatgggtgtgtgtgcaaggcacacacatacagtctttctgtacatgcatgcatatttatgcatgtacagggaagtatccagacaccaatttttaataaaatgaattccccaaagggagtcttgactgaattaaggctgttgtttataggaagccagatataatgatgtgaaaaaaactaatttttaataataatcaccggcagtaacgggggcagggggaaaaagtacagtgtggtgtannnnnnnnnnnnnnnnnnnncacaacatctacaggacacaagagaagcacttagacactgtaaggctgggaaccatgctgtaataaccaccagtgtgggtaatcaaaaagggtctttgacccaa

SEQ ID NO: 242411 - DNA, 1928 bp, Homo Sapiens
  misc_feature (747)..(798): n is a, c, g, or t
  misc_feature (848)..(903): n is a, c, g, or t
  misc_feature (1410)..(1523): n is a, c, g, or t
  misc_feature (1596)..(1648): n is a, c, g, or t
ttggggaactgcaggttgaagcctttaccttgcacacatagtttgttagacaaatgctgtgcttcatgaagttaaaagagaggggctccccgtggaacaaaggaatgaaatcttgactgccatccttgcctcgctcactgcacgccagaacctgaggagagaatggcatgccaggtgccagtcacgaattgcccgaacattacctgctgatcagaagccagaatgtcggccatactgggaaaaggatgatgcttcgatgcctctgccgtttgacctcacagacatcgtttcagaactcagaggtcagcttctggaagcaaaaccctagaaggagcacaagtctcaggcggaggagaaaaagagatcggcttttctcctccaacgttgtcatgggcttaagcaagagcagtggagacttctcttggcccctagattgtagcacccgggtcccaatccaaaacagctaggaaatggtgcccatgaagttttaaatgttttaaaatgaccctgtgttatagtctgatttggtgttaaacaggaccttcttcccccaaaattgttcagattataaaatgtgagccattcagcccccaaggtccagggcaggcgacaggaacgagcccagcgtgtgacaaagcctaacctactttcctctttcccaagctttttcagagactctggagtggacccagccctctggggaaagacagaacttagagacatcccagttactcaccacacccatannnnnnnnnnnnnnnnnnnnnnnnnnnnnnnnnnnnnnnnnnnnnnnnnnnntcagttttaattttaattaaaaatgcagctcttcagtcgccctggccacnnnnnnnnnnnnnnnnnnnnnnnnnnnnnnnnnnnnnnnnnnnnnnnnnnnnnnnnatatggaacattttcatcatcgaagaaagtcctattggacaacacttctataaaaagtttgagagcaggaattctcatttccattcgtctgtagcttctatccccaaaggcaaagaaactaaaagagaaatgactcattgaagattggcctctttcctttctctaagacaaacctaagtaaaagcctgagctttgagtcctatgctcagcacacgggaaggagatgttaataattaaaataaagttgatatcctgtctttagggagttcccttgatctcttgaaagagacacagccccatttacattatttcgtggatttcaccagcatagtatagtttttttctgtaagtccctcattcttatgtaataacaggtggaactgaggtttgaagaacctcagtggcccatcctgatgacattggagactcaaagagacaagagagagtagggtttaaaacctgagctttaagactcccactagcttcgtgtcctttggcatgttaacnnnnnnnnnnnnnnnnnnnnnnnnnnnnnnnnnnnnnnnnnnnnnnnnnnnnnnnnnnnnnnnnnnnnnnnnnnnnnnnnnnnnnnnnnnnnnnnnnnnnnnnnnnnnnnnnnntaaatatccaggaaattctggtactgttatgtgtgggtgagctgacctggatgtagatgttttcctctctctnnnnnnnnnnnnnnnnnnnnnnnnnnnnnnnnnnnnnnnnnnnnnnnnnnnnnttctgacctggctcctgcccattggtgtcccaagaaatcgtgagaatagttagcccccctctccccagcctgttgctttctcgtgtagttgttcacagtagttgagaagttgaagagcttttgcctattgaaggtgcactgagaataaactctttcctgccaccagaattgcagtggttcacggcctgcactcattcccatgaatgcagttaatagccacagaaatgtcacattaagcaaagcagccagggtctcatcgtgttgagactcgagtctctca

SEQ ID NO: 242412 - DNA, 2497 bp, Homo Sapiens
  misc_feature (1068)..(1077): n is a, c, g, or t
  misc_feature (2377)..(2390): n is a, c, g, or t
cactcaataaaattttcacaattaacaaaaaaatgtgacaaggctgtcttaaaacggctctgctataaattgtatagaatatacagaattacaaagtcaagtatttttttatcaaaatatacacccctccctgaaactaacacaagctatcaacattttaaatgaatacaattatagaaaatatttgcaaaattattttttcatgtataaatattctgccatatttactttggtctagaattatcagcatacaagtccacttaaaaaatatccacatataagggctgggagagagacatcactacaggtaattttatatttggggttaactcaaatcaaaatgactagaatatacagtaaatgtctttgattaatattattaactgataaaacaaattagtggatcataggattgcttattcaatattctaattatcaattcaaaaatgattttcgtaagccctttgtgactatctctttaataaaacccaaatgaatagtgtagggtgtacatatatacaatgtataaaataaagttgaatttgcttgcattttcccatttttctctacttatataatactgtatgtaagtgaaagtagatgaacaaaagataaatgcagatacaatagtggggttacttaacagcaaggtactacagtattaaaaggtcaactttaatcatgtcctttcctgggcgtttaaatgctttcttacccacccaaatccatactaagtcttcttcatggagacatcacacttgtagacagaaaccggagtcctttgagctacttcttcacaatgataaccttccaatcttcgataaccttgggtttccatctgtcaaatccaatgaacatgaatgactgcaggtcacgctgaaactgcattccggattctgttcacactggtgatcaaagggtagaaatgttttctctctcccttctattctggcagtttgaaaaagaatcatgagttccggctttccaggaacctagtccacatgatagaatatgctgtagggcaattagatttgagggtagtgttgatggtgtgggtcaaagaacatnnnnnnnnnncttcagtgggtttttagcaaggggtctagatgtctgcaaatatgaagacagagcatctggctttgtagatatatttctgagtctcataagtaaaggatagaaccatgtcactccacatcctaccttcccaccccctaaaaacaaagctactgttttaggcaaggaaggccatcacttcttcttgcccactcaagtcattaatgggtggggtggagggtgggggttcctttgtccttttgctttatactagtctgtacttgtgggctgcataatctccaacaaggctagtaattgtagggattaggcagtcactttcaagtgcctgggaattcactactgcagtgtaccttgcactaaatctcttggacagtccttcagtggaatgggagatggcaggttccacttgagcccttaagtctgtctggaatagacccccacatccatggccttgtggtggttggaagactgcagagagtttcagaacaatgtgaccctctttcattctctgagatgaggccattgcaaagtaatatgcagcacaggtaatcacaggtaaattctgggagggtgttcccccatagataaggcatgacctatgttttctgtgaattgagtagaccagttctaagaacagctcagccataacttcaagggaacagcattccatctaaaagcattcacatgctcttaaatcatattcaaaatgctttctattgatttttacatcagtcctcattatttgcagatctattgctcctcataattctctacaggggatatggacagttaaaagttatagtgatttatatatgtattttacaaggtttgtgttgcagaaaagtagttctacataatgtatgaatgtcctactttaggttactcattatgcacataatttcagttatattgtttaagtatttcatgtgtatccattaatttaaacaaattttaatagtgcagaagccagatgggaataaagaccgtcacacagcttattaccacgtaacatatttacgaagatgccatcttcaggatatctgacccttattttctccagtgactaaagacagttcagcagccagttcttattagcaattattagaaagttttaaactaggctaaaattaaactccttttttcactggtagaaataccacagctaagaattttattaactttcacaagaaacttgggatattggaggagtcagctattttgtttttgtgcactttgcataaagttaatgctaaaacccaaagtagatattaggatcctttttctggaattttcacaaatgagnnnnnnnnnnnnnnaatttcactccttcatgactgtcacatggacaaaatgaaactaaacttaaatcataactaaaaaaaccaccaactatatttttgaagatttttctaattcttgccaa

SEQ ID NO: 242413 - DNA, 1441 bp, Homo Sapiens
  misc_feature (1243)..(1253): n is a, c, g, or t
ggggagcagggctgctgcaaaaggcattgttgctgttgttattctgttcactgccccatcgcctccagttgctatggcaacaggccattctgggccagccacgtctctgcatggcagtgcccaatggtggagttgctaggggcgacggagctgtttggaaggcctttcaaagccctcacctggaacattgggaattgtttattttttgatgaggtcatcagaaataatctcaccaggtcagatcccacttgtgctcctgtctctggggcaccagggaaactctgacttggaggcatgagcccagtcaccagtggtccactgagcccgcatttacaggctcccccacaggggcactgctcactccagagtaccccctggggactggggcaggggagaggggctgggccctgtgggagaaggcgcaaggggaaatgccctctggagagcagtaggacagagacctctccccccctcctaccagccctcccctcctgaggcagcacacacaaatcctctgcaaaacagtcgatatggcttagaagtagctgctctgtgtgcaaagggagcctgggtccacccacccaccctcaatcagggaatggatacattattgcgaaaggcattcctccctaaaaagtacccaaaataacgcttcagacatcaagaaaagtcatgctcaaaatggtttcttccacaggaggagaatcgaagcagagtgggcgcccctgagtcatgggacagagatgcagatggacggacggatgttctgctaaaaaaggcaaaagaaccccagtgtaattccagaatttaaaccattaggaaaagtagggggaaaagaatcaaaacaagcaaagccgtcagttccatggaatcaacacttaagagctcgtacaaactgctgtaagcatcaccattttaaatcttttttttaataaaacaatttgaggctgtataaaaactttagtaaaaaattagctttgagagctaacagatttttattatgaactattgctggcactcctccccagccgccagaccttttccagtagttcaggcccaaggcctgggactggagtgccagagaaaagggatggggtgggtcggggcaggactgtggactgttaggacaaagcggccaaggtcaagtgaggaaagagcatcacatgacataaaaatattgcatcttcaccaaaatgtcccccactgagtgtttcaaaaaaccgtgatattccttttaggaggnnnnnnnnnnncaatgcacagaaaaagggtaaaacaaaataggttgatgtggtggagacctttgacctcccaggtgcccccacaagcagctggcccaccctggagcaccaaagttgggggccacagccaccactgcctcttggagtccctttttcatggaaatgaagaccccttggtcgtgggccactagtgtacccaa

SEQ ID NO: 242414 - DNA, 750 bp, Homo Sapiens
acacatcagtggttagtgaacacttgaatgtgagattggctctccatctcacagagtccaacggccatcaccagcccagcgctcaggggagcaggctgcctgcaaaggcattgttgctgttgttattctgttcactgccccatcgcctccagttgctatggcaacaggccattctgggccagccacgtctctgcatggcagtgcccaatggtggagttgctaggggcgacggagctgtttggaaggcctttcaaagccctcacctggaacattgggaattgtttattttttgatgaggtcatcagaaataatctcaccaggtcagatcccacttgtgctcctgtctctggggcaccagggaaactctgacttggaggcatgagcccagtcaccagtggtccactgagcccgcatttacaggctcccccacaggggcactgctcactccagagtaccccctggggactggggcaggggagaggggctgggccctgtgggagaaggcgcaaggggaaatgccctctggagagcagtaggacagagacctctccccccctcctaccagccctcccctcctgaggcagcacacacaaatcctctgcaaaacagtcgatatggcttagaagtagctgctctgtgtgcaaagggagcctgggtccacccacccaccctcaatcagggaatggatacattattgcgaaaggcattcctcctttaaagaagtacccaaaaccaacttttttgtacaaa

SEQ ID NO: 242415 - DNA, 856 bp, Homo Sapiens
  misc_feature (229)..(259): n is a, c, g, or t
ggagagttccactttggacatattgaatcaaagatgcctgtgaaatatccagctagtggggtctaatgggctgtggaaaagagttggacaaactgcacccctacaatgtgagggtcaagttcagaaaatgaacactccaaaacgaaagttaccatgaaagaaataagtcaatgagaataagcatttgtagtaactctcccagaaaataactctactctaaaaaaactannnnnnnnnnnnnnnnnnnnnnnnnnnnnnnaccggtggagctgtttaagccaaggagttgtggagatctctgtgatgatccaaaatctgactaatataaaatcaactctgatgctaattaaatctgacttataacttgtctgctaaaagaaattataacaggaaactttggtgactggtaaggaatgttgaaaagggaaaatcagaaggaaaaacctggttcataagaaggaaggaaatattggtccaagcacgtcaagggctctaagtaaaaaccgatggcactacaattccacataatccattacatttggaaaaagaagctcctggtagacacagggcctctttgggatattgttctttgttctgattctgtgctcaccaggaaacaaatttcatctccgtagggggcccgtccttcagtaggaatggccctgctcctaggttcttggctcacttgccaagactacaatagcactcgcgtttatcagttatgcttgtgtgaagctggttattgcaattcattgttctcaaaatactttcatgaaaagcctgacctgagaaaaagccttctctgtaatcatattaattagaacataaatgtctactttgccataattatacccaa

SEQ ID NO: 242416 - DNA, 1270 bp, Homo Sapiens
  misc_feature (409)..(461): n is a, c, g, or t
gctgcttgctacaggaactgcattgggcagcagtttgccatgagtgagatgaaggtggtcacagccatgtgcttgctccgctttgagttctctctggacccctcacggctgcccatcaagatgccccagcttgtcctgcgctccaagaatggctttcacctccacctgaagccactgggccctgggtctgggaagtagctctgatgagaatggggtcccagatggctcaggctgtgacctccctgggcaccaccctccccaggctgggtgtggaggagttggggccccctgccttcaggaggcttgtagtttagaagggaagtaggcattaccatagacgactcctagaggacagtgctatgtaaaaatgtgtgtctataaatgtttatcatgcatgtattctagagcnnnnnnnnnnnnnnnnnnnnnnnnnnnnnnnnnnnnnnnnnnnnnnnnnnnnntcatttatctcctataattggcaaacttaaaaatgcagcagaaacttacattccaaccttagagactcatagtgagcacaaggaaagttttgccctgagattcatggttatggctgggtaccaccaaatagaagaatggcttaggggagtgccccttcactgagatgtgtttctttgttgaactttgtgtgtgtgtgtttagaatataacagacataagaaaaaattacctaaatgaagactgtacaaaataataaataattctgaagcagactctcttgtaaccatcactgaagtcaagaaatatggaatatggtatcactgatgtgtcttctgctcctcctgagatgggtctctgtggcacccctgccattgtcagtgtctgtgtctcacagtcacgtggtgctccaggcattcagggttcagctggggaaggtggccaagtggcattagaagggggtttcctggaggaaaggaacccctctcccccacttgaatcagcttaaatcaggccttgaggaggcctgggaggctggatgggagggggccattattccacttctgtaggaagggaaggaacctgtaagacactcatctgggaggagcttgagctgaggcctctgattctggcctctttgaccaagactccatcattgtactgacactctccgagagtgtgtgtcagtgtgaaaaggagctaagagctttggtgtgagaagggatagacaggctccctgtgggagggagataggaggctggggaatggtgggcaccaaagatggattccatttaattcttccagttctccaa

SEQ ID NO: 242417 - DNA, 1616 bp, Homo Sapiens
ttggcgccgcgggagcagccgctatctctgtgtgtccgcgtgtgcgcccggtccccgcctgccgcaccatggagagctaccacaagcctgaccagcagaagctgcaggccttgaaggacacggccaaccgcctacgtatcagctccatccaggccaccactgcggcgggctctggccaccccacgtcatgctgcagcgccgcagagatcatggctgtcctctttttccacaccatgcgctacaagtcccaggacccccggaatccgcacaatgaccgctttgtgctctccaagggccatgcagctcccatcctctacgcggtctgggctgaagctggtttcctggccgaggcggagctgctgaacctgaggaagatcagctccgacttggacgggcacccggtcccgaaacaagctttcaccgacgtggccactggctccctgggccagggcctcggggccgcttgtgggatggcctacaccggcaaatacttcgacaaggccagctaccgagtctattgcttgctgggagacggggagctgtcagagggctctgtatgggaggccatggccttcgccagcatctataagctggacaaccttgtggccattctagacatcaatcgcctgggccagagtgacccggccccgctgcagcaccagatggacatctaccagaagcggtgcgaggccttcggttggcatgccatcatcgtggatggacacagcgtggaggagctgtgcaaggcctttggccaggccaagcaccagccaacagccatcattgccaagaccttcaagggccgagggatcacgggggtagaagataaggagtcttggcatgggaagcccctccccaaaaacatggctgagcagatcatccaggagatctacagccagatccagagcaaaaagaagatcctggcaacccctccacaggaggacgcaccctcagtggacattgccaacatccgcatgcccagcctgcccagctacaaagttggggacaagatagccacccgcaaggcctacgggcaggcactggccaagctgggccatgccagtgaccgcatcatcgccctggatggggacaccaaaaattccaccttctcggagatcttcaaaaaggagcacccggaccgcttcatcgagtgctacattgccgagcagaacatggtgagcatcgcggtgggctgtgccacccgcaacaggacggtgcccttctgcagcacttttgcagccttcttcacgcgggcctttgaccagattcgcatggccgccatctccgagagcaacatcaacctctgcggctcccactgcggcgtttccatcggggaagacgggccctcccagatggccctagaagatctggctatgtttcggtcagtccccacatcaactgtcttttacccaagtgatggcgttgctacagagaaggcagtggaactagccgccaatacaaagggtatctgcttcatccggaccagccgcccagaaaatgccatcatctataacaacaatgaggacttccaggtcggacaagccaaggtggtcctgaagagcaaggatgaccaggtgaccgttatcggggctggggtgaccctgcacaaggccttg

SEQ ID NO: 242418 - DNA, 1078 bp, Homo Sapiens
ctttgtacaaaaaagttggcgcctggaaagatggaggcagcggagacagaggcggaagctgcagccctagaggtcctggctgaggtggcaggcatcttggaacctgtaggcctgcaggaggaggcagaactgccagccaagatcctggttgagtttgtggtggtatgtacaagatgagagcgagcctttcagaagccagggtctggtcctggctcctcttactgagatacagggcagcattggcagagagcagacttaaggaaacctgtaaggaggtaaggatgttccctgtctctgccctccctctgagcaggactctcagaagaaagacaagctgctctgcagccagcttcaggtagcggatttcctgcagaacatcctggctcaggaggacactgctaagggtctcgaccccttggcttctgaagacacgagccgtgagtaggcaggggattgtagtagcagctgacctgagtggggaaggaaggaggatttcagttaggtctcccatttggctgatgggaaggaggcccagtgttgcagggaggcaggctagcaggccaccctcactcatgtactcattcctggtggctcatctcaggacagaaggcaattgcagctaaggaacaatggaaagagctgaaggccacctacagggagcacgtagaggccatcaaaattggcctcaccaaggccctgactcagatggaggaagcccagaggaaacggacacaactccgggaagcctttgagcagctccaggccaagaaacaaatggccatggagaaacgcagagcagtccagaaccagtggcagctacaacaggagaagcatctgcagcatctggcggagtttctgcagaggtgagggagcgtaagacagggactcagcagagcttgacggggtgtttcagaaacttggaaacctgaagcagcacgcagaacagagcgggacaagctgcagaggtatcagaccttcctccagcttctgtataccctgcaggtaagctgttgttccctgagctgagctgacgcagagaatcttccagatgataaaccccagcagccgactcgacccc

SEQ ID NO: 242419 - DNA, 950 bp, Homo Sapiens
ttgagcatgacaagataaatttgttagacaccagcacagggtgggtgagaggacatcctgctgactttataaagtgatgtggggcagggttgtcgaggtaagtgatgattgtcaagtttgccagagatgatagataactcctttggcagaacacctaggtcattccttttaaagtcaggtagctaagaggctgtttggtttctgcagcgctggctacctacttggggaacatggttgctcacaaaacattcagtacttgggcaaactctgggtgccatggtggccactgctgtctccgggagtgccatgtccacaaaactcagtcatccagacttgcttttgggagcagaagccagaggatgacaggtgccaacagacaggcagggatcaggttatctttggcttcttctttctgtctttctccccctcaactgtgaatgcttttggagcctctgcagtcaagacagagcttttactgagacagcagttgccattttcagctgatagaaactcaggggatagaaggccttccctttgagccgcaggtatggcacacacaactctgcagctctgggcaagtgccttgggatgcccttgtcactagtatggctctgtcctgctaatgccagtctgtcaatacttgattgttcattctttctctttgcctctcaccgaaaagcactcggtgagaggaaatgaactgatattcaaaaagacagtttggtctgacataagaaaacacatattggccgtataaatacttcagacattaagctaaagactggctccaattctaggacaccaaggcaggccacaatgcacagggtccatccctatatatgtttattttgaaaaacaggagaaaagatcttctgtcttgagcaagtcagggttttacttgcctgggggcagggatttgaaaccagctgtcttctcctggcatggcattc

SEQ ID NO: 242420 - DNA, 1608 bp, Homo Sapiens
ttggtctgtcgcatctgggacaccgcctcaggccagtgcctgaagacgctcatcgatgacgacaacccccccgtgtcttttgtgaagttctccccgaacggcaaatacatcctggccgccacgctggacaacactctgaagctctgggactacagcaaggggaaggtgagcccccgcaggcttgggcccccatggtgcaccatccctgggtcatggcctctggtggggacagagctggccccggtgatgacaaaggagaggagctcagagagccatctccgctgggtttggtgcgaattcctgaaagacctgggtatttgtagggtggcagtctgcaagttaaatcttcgattgtgtgggtttggtacttgtacttttcagaaataagtgaagtgagtagtgaaacgccttgcttagaacgtagaattacacaaaatcaaggggaaccatgactctgtgaccagcctgtcccctcctgtttcagtgcctgaagacgtacactggccacaagaatgagaaatactgcatatttgccaatttctctgttactggtgggaagtggattgtgtctggctcagaggataaccttgtttacatctggaaccttcagacgaaagagattgtacagaaactacaaggccacacagatgtcgtgatctcaacagcttgtcacccaacagaaaacatcatcgcctctgctgcgctagaaaatgacaaaacaattaaactgtggaagagtgactgctaagtccctttgctcctgcccgcgagagactgtcgggaagttgacccggattggcaagaaacagggtgtcttggaggtggtcccccagatctgcgcctgggggtcaggacagggcctgatttgagcctcctctctgaagatgatttggccgagcggaaggtgtggaccaccggaaagttcttaaaagttgctggtgacatttcttgccaattctaacactgtctagggaagagttcctagtctattgtgttcaaacagagtcaacaaaagtttttaattttttattacagaagggtgaagttcaatttaacatgcgttgtgttttttcagtaaacgttctgtatctttttgatattccatgacccagtgcacgctgtggcctgtcaccgccaccgtggccccgccagctggcctcccctttggcccacgccggccgcccccattctctgctgcgtagatgccctggcccagggccctgactcctccattcccgccagtagctgttcctagtgtattttcgtctttctggaaaacagcattgagtggttgttttctgtgtaaagagccgtttgtgtcttgggagtttgtggcccacatgccgatagcacggtcatcgcacatgactctcccgtttgtctcagtgtccctgcaacaagcagcaccgcagactgtaataaaaggtggggttttgtgaatggttgtggcaagtgcgtccttgtgaagctcgtctccatgtggctttcttggagaaaggctcccctggggcaagagggtggaaggtttctttggacaggaggtgctgaggctggctgcacctgctctctgaagacgccttcctctctaggttcattgttcagtgttgc

SEQ ID NO: 242421 - DNA, 1509 bp, Homo Sapiens
  misc_feature (485)..(499): n is a, c, g, or t
  misc_feature (785)..(811): n is a, c, g, or t
  misc_feature (961)..(976): n is a, c, g, or t
  misc_feature (1083)..(1120): n is a, c, g, or t
ttggcttttgttttctttttctttaaaaataaatgtacagtaaaactacaagcaaaagtttgtcagtattgaattgaattttttaccccttaaaaggactagtataatttccaatctctaacaaaaacttagtgtcaaatctcacagataaggccaaatggccaatattttcagttatgtgggtagtacaacttgagtaaccttttttacatgacaaaaagtgagttatataaattgtcctcaactttcacataggaaaaaaatggtttaatagcttcaaaaggaattttctttcatgtatactcttcagtatccaatattgaagctttgttctttgaaaaattttaatttccaatctaggatgcaagcaagaatatatgtttatttgaatagagtaagctatggcaaagaatgaccaaattagctagaaatagaaatcagccagaattaactaatttcttgctaatctagaaatacaatcatcnnnnnnnnnnnnnnncaaattttatactgatagggctttactgtttgtggctcattttaaaactggtgtcttctcttcatgagacacattaattggtaaaactcaaattgagttttcaaagatgtgatagtattaaagtgcaccaatatttgactcaaatttgcttgctttattttgttaggagtaaacagaaagtagcctgtgtttagtcccaaagatagcagtgattttgaataaaggagttttgtgttgcctggacatatgaatttctgtaaataacttctgttggttaaacatgttnnnnnnnnnnnnnnnnnnnnnnnnnnnttctgtctctatattcaggacgttcagatgtcttttattagtggaaacctgtgttttatctattctgcagcttacatttcatagggtagttcatacatgcatttccaaggggagtgggtcattgccagtgttttaaaaactacatagggnnnnnnnnnnnnnnnnatgtttattttatacacacatatttgtatattctaatatattactaaggcaattttaatgaattaccatgtatataaaaaaatagctgtcacttggcacacaggttnnnnnnnnnnnnnnnnnnnnnnnnnnnnnnnnnnnnnngtgtgggtacatagtcttaaaaattacccagtaatgtgatttgacatcaagttgcagcaattaatatcttggtgtttgtaagtaagttgcatgataaacacaaatgactaccacttgtctgtagatgaaaatctggttacccttatggttccagaaggaaaaacagacttatcttgcctgtttcataaacagcataaaagattaatacatgcagaacatgctcttattctggaggggatgggggatccagaacagggctttatttcctcccatctttcctacatttacatagttttcttaacctgttccctgtcacctattttttttaacattagtaagtcctagaccaaagggttttgtattcttccattccatctgactgctttttt

SEQ ID NO: 242422 - DNA, 987 bp, Homo Sapiens
  misc_feature (270)..(286): n is a, c, g, or t
ggggatttaatactgtatattattgcatagttaagtatatttgtttgctctatgaacaagatgtgaaaatggcacattttaccgactatcttgctagcaaatttggaaaatgttcatgaattgcattactagcaccatttggtgcttctcagtatttttggacattttttgctttatatatgaaagccaatggaaagacaatccaactacccaaatgactatgagtaatttctgagagtggagagtgagggtcaaattctcaatttcagnnnnnnnnnnnnnnnnntgagcttccaaatgtatcttctgagatgcattcatttttctgtgaccaatatttagaataaaaaattactgagaacatactctgtgctagataccatatgttttctaatattctaatttagtattttctattgtaatattaaaaaatactgagagacaagaagacaactcctatttcactgacaattaatctgagattcagaaaatgtaaataacttgttaatgactactgagccagtaagaggttatagatctatagtttgaactcagttcttctaaatctaaagtcgtactttttaaaacaacctctccaacataatatcaaaaaagtaaagtattctcttaccttgcatatctacatcaaagaaaaccataaggaaaagaaactacagatgtgcacgcagtaagtccaagatgcttaaaaatgtcacatcatgttaaacctgagtcaacctaacagtaaggctgtaaaaacaactctacttcctgatttgttactgcattcagctaatgtattgagggcctataatggctcagatcctagaaatataaggaataagaagcaaagaacccttccctaggctagtgcaggagacctatcagtaaagacatgactgtaacacagcatgataggttcactggtataggtagcaacaagggtttcaaagaaaggttagcggttccgggataaatttcatccaa

SEQ ID NO: 242423 - DNA, 2969 bp, Homo Sapiens
  misc_feature (1973)..(2054): n is a, c, g, or t
  misc_feature (2895)..(2904): n is a, c, g, or t
tgatgggcaaaaagcatctttaaaaaacattattcttaagaaacctgggagagaaaaaaatgccagtgagaggaagacaaagaaaaattagaggcagtacattccatatttcagaactttagctttccagacagtccaattttgttttgtttacaaattcatcttgcagtacaaggtgaagccaaatggtacaaagtccacagaattgaaaagccattcatatttatcattcaattttttgatcttcaaatgttatgaattctccaaaaaggtaacagggaacagatatccctttggtctcactttatagacagggaaattaccaaaagaaaaatcttggctctaccatctctacttacagaaggtaaaacacttaacagagacagatttctgttggagttagactagatttcttttcacagcccttaatctcacgaggtgagaaggagtggaagttgccaagttgttggctaccagacccatcagtctgtttaactctggctaaaagcagagaataatgggcaagttaccaagtttcccccttcagctctggcgtgcattctgaaattgtggaagatcctcatgtaacacacacgctgcaacctgcatttgccacacagtccagggcatatagagcattgtgattcttcacagtccgcagagacaagaccaaaaatgaggactaaaaactaaaggtagctgagtttttcagatggattttcactctggcaaactcagtagttcactccctcccacccctcaaatcatttaagtaaaatgttcttccaataaacataaattgagctcttcctctgttatccatcacattctgccagttctttaaaactggaatatggtactaggtacagaaggctaaaggggtaggaaagccccaaatactataaagatgcacttataagcagtgtggggttatcaccactgtctacttactctcccattctaggacacagggtgaagagaccacctgggttccctctaaagccctgaacattaggaccactgaggaggaaatatttgtccttaaaaataaatgtaggttccctggattgttctctttggctgccacatttggagcctgagtggaggcccttcaaattaacactggttctgtagggactgcccagtcagggtgcaatgggatcagacacaggatcaaatcagccaggggcagaagggcatggtggccctacgggtagaatgcactgtattgttagttaactttctaaattgttctctatttagcttcagcctgagtcaggtctacaatggccactatttagaaaataatttaaatcagtgaggtaagcatgccgatttgaaatatatccaaacatcattaagcctctgggtcataaaacttggtccctgaactaacaggagtatcttactcattaatgactaggtttgttccaaacggcccctgctgacacacatgatccttttgtgtggcacaataaatctggtaatagcagaacaatagcatggcttttaaatagggtaattttataattccttaagatgctggtttgcttcttataatgtgttgtgtggattacagtacttagacaaggttcacatttactttaaaagacttctatattttaatgcaaatctaaggatcatcccctttcttagtttatagaagattcaaactttgtaaaacataaataacctagtactctaaacatctgaagccctttgtaatactcactgttttttcctaatttgaaaataacttatttatatatcaaacattagagcggagtgtaaacatggatgtcaatcacccttttagtttcataaatttgcttttagctttcatcaacaggcatattttcttaaccccatgatctcaaatgagataaaatatccttcttcaaaaattgttaagaatatttattaaaaagtgcaattcaaaagttagctgggcaagcacatcattgcaaatcacnnnnnnnnnnnnnnnnnnnnnnnnnnnnnnnnnnnnnnnnnnnnnnnnnnnnnnnnnnnnnnnnnnnnnnnnnnnnnnnnnngtgtgctgaggaatgcacccaaaaagacaaggaaatgagaagtcaaagctagaactctatccagatgttgctgttctttccaagtgcaaaagaaggtggtgaggagagaccagcagcctccaccaccgagttctggctctgggtccaaatactactttaatatcagattattcatcagggaagttataaaaatatcctatatacatgtgcacatttgaggcattttaaaaagtcatcagaaggttaaagtttagtgtctcagcagtttcagctacttaaaaactcaattaaagcatctatcatttaaatttggattggctcagttatttgactgcagatgataaaatcaagctgtcatcttagggaaaaaaaagaaccaagtttacctacacatccttgccattacccacagagtaagagaagtctggcccagagctaaccttttatgtcattacgtttcttaataaatgtaataaatgtactaaccactcccaaccccaacccccagtgtagagtgccctaagagtaaaagaactgtaatgaggacaatctggtatccaaattcattcaagtgtgttactgagctgtttagcaacaacatatgtagcaatcaccctcaaaacgcaagctgcacctctggggaggaagccctggtacagcaacatcaagtcggcaaggatcaggagctgacctgtggcgacatcattaacccttccctaagctatgccaatgcagaaccctcttgctctttttaattgctcctgtcagttaaagccacaagttgttagcacccccaaaacccagggtgtttcattattttccattagttattcttaccacnnnnnnnnnntgacctggaaaagcaattttatcttagcatttatccctgaaaaatgaaacactgcattttcccaa

SEQ ID NO: 242424 - DNA, 1677 bp, Homo Sapiens
ttggcaatggaggacacaaaacgttgttatttcaagtctttgtggccaacagattggtggtttatgggccagcatccctttttatgcgtaaaatatttaaaacgcagcctgcaatggttggtaaagtggtgaaacgtttagtgtgtgaggtcggatcctagtctggccgctggccctggcgatcctctgaggcggcctgagtttggggcgcctcgtgtcaccgcgcgcccctcctccgggcctgagtcacggtgccgccggagtccccacgcgaggatgctgcggtgagcgcggccgggacgccgcgtcgggctctcggccgcccagcggcgccgcaggggaagccaggccggcagccgcgcgctccccagccggccaccaatcccgccctccccggctcctccggacctcctcggcaggcggcggcggggcctgcctgtgcgctctgcgcccgcccgcgcctaccctccatggcgtttatccggaagaagcagcaggagcagcagctgcagctctactccaaggagagattttccttgctgctgcttaacttggaggagtactactttgaacagcatagagccaatcacattttgcacaagggcagtcaccatgaaaggaaaatcagaggctccttaaaaatatgttcaaaatcggtgatttttgaaccagattcaatatcccagcccatcatcaagattcctttgagagactgtataaaaataggaaagcatggagaaaatggagccaatagacacttcacaaaggcaaaatctggggggtatttcactcattttcagtcaggtatatttcattaaagaacataatgttgttgcaccatataaaatagaaaggggcaaaatggaatatgtttttgaattggatgttcccgggaaagtggaagatgttgtggagacgttgcttcagcttcacagagcatcctgccttgacaaattgggtgaccaaaccgccatgataacagctattttgcagtctcgtttagctagaacatcatttgacaaaaacaggttccaaaacatttctgaaaagctgcacatggaatgcaaagcagaaatggtgacgcctctggtgactaatcctggacacgtgtgcatcacggacacaaacctgtattttcagcccctcaacggctacccgaaacctgtggtccagataacactccaagatgtccgccgcatctacaaaaggaggcacggcctcatgcctctgggcttggaagtattttgcacagaagatgatctgtgttccgacatctacctaaagttctatgaacctcaagatagagatgatctctatttttacattgccacatacctagagcaccatgtggcggagcacactgctgagagctacatgctgcagtggcagcgtggacacctttccaactatcagtacctccttcacctcaacaacctggccgaccgcagctgcaacgacctctcccagtaccctgtgtttccatggataatacatgattattccagctcagaactagatttgtcaaatccaggaaccttccgggatctcagtaagccagtaggggccctaaataagaacggctggagagactactgacacgctaccaggaaatgcctgaaccaaagttcatgtatgggagtcactactcttccccgggttatgtacttttttatcttg

SEQ ID NO: 242425 - DNA, 1078 bp, Homo Sapiens
  misc_feature (903)..(936): n is a, c, g, or t
ttggattcctcagtaaatctcagacggacgtgagagaaaaacgcaagagtctcttcattaaccatcatcctccaggacaaatagcaaggaaatacagttcctgctccaccattttcctagatgatagcacagtcagtcaaccaaacctcaagtatacaattaaatgtgtcgctcttgcaatatattatcacatcaaaaacagggacccagatggaaggatgctcttagatatttttgatgaaaatcttcaccctctttcgaaatccgaagtgccaccagattatgacaaacacaacccagagcagaagcagatttaccggttcgttcggacactgttcagtgctgctcagctgacggctgaatgtgccatcgtcaccctggtgtaccttgaaagacttttaacatacgcagagatagatatctgtccggccaactggaagcggattgttttaggggcgatcctgctggcctccaaggtgtgggatgaccaggctgtatggaatgtggattactgccagatcctgaaagacatcacggtggaggacatgaacgagctagagcgacagtttcttgaattgctgcagttcaacatcaatgttccttccagtgtctatgccaagtattattttgatcttcgttctctggcagaagcgaacaacctgagctttcccttggagcccctgagcagggagagggctcacaagcttgaggccatctctcgcctctgcgaggacaagtacaaggacctaagaagatccgcgaggaagcgctcagccagtgcagacaacctgactctgccccggtggtccccagccatcatctcttaactacggaggcccgccggaggccacaccatcccttagtttctcctttagtttgagaaaagacagacttggggtgggnnnnnnnnnnnnnnnnnnnnnnnnnnnnnnnnnnacgcatagctccgtcaagctgcctggatgagcgcccatgcagcaaggcttggaggaagcgtcagtgccctggagatcccagctcgctctccccactgtcagcaacagcacttccttcgtggaaggaagtggactcgaatcct

SEQ ID NO: 242426 - DNA, 1060 bp, Homo Sapiens
  misc_feature (462)..(474): n is a, c, g, or t
gaagttttaacaggaagtcagtaaatgctcatagaccccctgtctctagcacttggagtcgttagagatgggaatcttgacagcagaatttcagatgtttcaatcacttgccaaggaagtgccacacttgctcttcttcattactttctttatttggtgaagatgataccgattcaactaatgatcttgcttcctcttgagtgcaacggaaagagctatcagatatctgcacgtttgtgcaatttatagctcctccattacagttcttcataagcaatgctttccaacattgatgagtggatttaataacttcaagagcaaaagccttgtttttgaattctccattaaaagcaaactggttttctggttttccatctggtaccttatataatctaaaccaattaagagtagcttccaggtaacccggtttgaacttcttaacatcatcaatatctgtaaagnnnnnnnnnnnnngatgttttgttaagaaccaaaattaattccctttagtggcagagcattggactgagcgagccaggaaacatggggcccagtctaaccagaagcacaattgattatgatacctagagcagcatcatcattgatatgtatatcaccttcagacttttgtgttttcatatgtataatactattcctgcactccacaaacatttacaaagcatcttcagacaatgtgctatgtatggggaataaatggatggatacaacaaagttcttttcatcaagatactcagtttttaactcagggaaagagacaaagagataaactgcaattaaaatgcaatgaggttttaacagagataaacagaagcaatggtaatgtcatagaagagggagtaaaagaaagcattataaaagtgagaagtacatcactaactggacaagaggggaaaaggtagaaggaacagcacacataaaagcaagggactatattttagaatatacaaagatggttctgcatggatagaacatcactgttaggaggcaggggagagggaggagacacctaggaaaagccagtcactgaggatcatataca

SEQ ID NO: 242427 - DNA, 1235 bp, Homo Sapiens
ctttgtacaaaaaagttggatttggccaatgaaatggagacatattctttaaggtcaaatatagaacttaaaaaggctttaacagacttctgtgattcatatggcttagtctgcaataaaccaacagtttgggttctccactatcttaacacatctggtgcaagctgtgagagtagaattattggtgtatatgccacaaaaactgatggaacagacgctattgaaaagcagctgggaggaagaattcacagcaaaggcatttttaaaagagaggcgggaaataatgttcagtacatttggagctattattcagtagcagagttgaagaaaatgatggatgcctttgatgcttgggaaggaaaaggtgttagctactggcgggtgcctcatgagctgatagagtgttggactctagaagaacggcctttacttggaagcctgcgtcacatggctccaattcgaaagaggcgactgataacgttcaatgaagcggacgaaagtgtgaactataagactggtcctaagccagttagatttttgggcccttccacaagtacccaaattaaagtcaagaactcggcctcagtcacggtgtctccagccagtgccatccagacgtcggctggggcgacagcaaaccggtttcaaagtggtagccgcagaaaggcagctcagcgctctgcaccttccagagccacggccctggtgggcacgggggcacctgggcatcctcaggcttcccctggggctgcgagcgctgaaaatggaggcacgcacttacctccagctaaggtgctactctccgacaagaagcctacaccccagcgggtgataaagctgaagaggactccgctgtgcgccaccgcgccttccctgccctcccccacggccacgaggcaggccaactccctcaagccgcttcccggcgaagctgcccgtgccttgggagtgcggactgagaacgggaagaacaagggaaattgatgaaagtggtggacttgaaatttcccgttcatctcccaaagctttcaacccattcgacgcaaagaagtgacactttcttaatgcagcagaggggaagcttacgtttatgttgaggattctgttcctggaattgtgtgagctaggaatggaggaggggagactttcaatggttaagctccatttctcattttcccaacttttatatgattgtctatgggcagtttgaatttctggttttcaatttatttttt

SEQ ID NO: 242428 - DNA, 1628 bp, Homo Sapiens
  misc_feature (603)..(611): n is a, c, g, or t
ttttcataaatatgggaaataaagttggaaacaactctggtgggaatacttcagatagagcaagaaagctatcacagcaaggcgtataatcagtaagatgtgtgaaaagttgggtagcccacaggaggtgttcattaaggatatgattccattttatatagctatttctattgcataaccaggacagtttttattgttttgaggtcaatgttcttttaaaatttgattttctgtaagaagaggctttttggcccagaaagccttacttattttacatcttccagtttgtccatcccatgagttagagttcgtcttgactctgcaagctagaatcaaagaattatgaaagtaagatcatttagatttgaccaagggcaccattaaatggtgtcaggttttaggaagcagacgggtgtataaaaagaaaatgaacaaagatttcacttattggggatcaggcataactggatgcctggattgtcctgccacccagctgccaccaataaaatcattcatcactctgcaagagggaccagatgcttccatcatcagtactccttgtttttctgttatctcctttgaggtagctaaaaatggcagccnnnnnnnnntgttgaggcttttctcaagtatatactcatgttattttgcagaagatagggtcaacttcttcagttgagttatctgaaagtgttgggcagtgacaccatgccaaacactgttaaattcatgccattaaaaacagtggagtgttctgcaaagcccgattctctgcagctttaagactggacagtattgaaatattcacaggaatcttccaagccgtgaaagcttaatattaaacagcccttttaattgcaaaggagaaaaaaatggagacacttgtgaaactttgcattctgagtgctgccacaaataaattaaggaattccagaatttcttcatctacttctgcagtcttaactctgaattaatgactgtatatatcaaacttcagatcttaaaaaacatcagctcgcaagaggcaggtagacttctggtgggaaaagcgtgactcagcctcctccagcggctgcaggacgtccccccgctagaaagggccgggctccctttgctgacccagagtcaacccagcgattcctcccggggaggcggggggccccggccccggcccagagcgcatgcctatgccgggagctgggcgaggacagggcacagccacagctgggtgcccaacgggaaaggcggccgttccccctcaagctgcacctgaaggggtccccagggtcgaggccacttctccttcggctcagggttgaccttcagtgaccactgtggcctgcgggcatcccctgggagggacggagggggatggaggaaaactccaaagggaaaggccgaatcctgcagggtctggtcgtcggaaagccaaccatacagtcagccctccctctcctcgggctgccgtcgccatccgggtccacacgggctctaagacaaaaccccaattgcccccaaggccccataggaggggcgctgccagaatcgcctatttttagtgaaagagaaccgggccgggagacggcggcagggggccggagcattcccgaggtctcggtctgggccaa

SEQ ID NO: 242429 - DNA, 1877 bp, Homo Sapiens
gcaatgaggatatcttgagaaatttttcaccattgggtagtttatttgaatgtatggataatcaaagggcgacagacctctaaagattcccaagtgtctactaaaagctgttaagtgaagagtgatgaattggaggacacccacaataattcttggactcctggagatcttaagacatgctacaaaaataggtctttattcttaggaaaatatagtcagagctagcttccttatgctatacataaaatcttaacatcagaggcagtacagatagtacagatagtttttgaactgatctccaaacaagcacaaacccactacgttgaaaagaacaggtaatttgaggtttttggcaaaagacagtacttcacacatctaatccaaatcaaagggcctgcagacagttttcagtgagatgaaaggaatgaaataaatataaattctacggataaataaaacacaatttaaataagctaacagaactaatttttttaaataaaaatactagtcaggtacaagcttttgtttctcaatgccagacttctaaatatttaccagactactgttaatattaaaaacctaatctttgacccagagcgttagtaataatactggtttgcatctgcaaattttcaaactgaatgcttctggtcctgaaaaatattttaggtgtattactgaaggcagactgtggtgctaatagaatttaagtcttaaatacttttaaaaagtgacagaccccaaaagtccatctactaatttgctagttaaaaaatgcctgtgagcactgcttcataattagcatcttaagaaaagtagtggcatgccctattgagtggtatcatcactgagtaattaatacaccttaaaacaatatccccacaagtctgtttcttttatgtatttgtcacttaatttctttagtcattaattttacacccaccagtgaattcctatggccagatgaaaattttgtggtatacataattagagagaaaatgatcatggtgggtattcctgtaagtttgacgaacttgagaagttttagcaccctcccctaaatgcatgaagcccttctatttaatttctctccttaaaatagagactacgtaaaatactctgtaataataagggatcttttgctgtttctgacaacttttggcttcgcagtcaaaaaagctgttctgaatgtgtcaatttttgcctatctagcttgatgttcattctattctttaaaaacttttatatacaataactcagatcaccccatcaatccatttctatgttgttcctattttatcatgaggaaactttacattttaagtcagattcacagtaactggtagaaaagtttcttaagctaaaaactgcaatcatgagtgtacaacagttgtgtgtgtgcacactcaattttcccttcatttttaacatctgattcagtggcaatggctgaaaaccttccacaaaaagcatgcttgggagaatatatctaacaaaattttctcacaaagcaactttctgaaaactgataacctaaatttatgatcacttttgattgccaagtagtctgcagaaacaaaatcttgcgtctgttttggttagataacttaagttttctttttaacatcagaatgctttaagaatacattttttaccccaaggaagggacttgactcggatttaagaccctttccttgacaatatacaaaatttcttttaacttatcactgtccattctttgaagctgtcaaagccaagaacccataaacaaatcacaaatagcaataacctacattagttaacattccccctttaacatgttgacatttttactaaaggattagttatttttgcatttccatttctcatatccccaa

SEQ ID NO: 242430 - DNA, 1398 bp, Homo Sapiens
  misc_feature (438)..(631): n is a, c, g, or t
  misc_feature (704)..(822): n is a, c, g, or t
ttggggcagcaggtacgaattttggcttcttcccaggaaaggcagagacagggtctacagaagctggggacacagcctgtggtgatgggatctacgagttagttcagacagaagagacagatgggctctttctggaaggcttgtgtgatctctgagaccattttcctgaaggaaggaaattaggaaaggtatcattcaaacttcttcatcttatgccctggagaaacacagaccaaagcaaaatttgactcaggttgtaactcaatgataaacttctgtctagagtagaataagctttattttgtataagacaaaaatagaacctgaggtacaaagagagctctcagatctgtaggtaaaattgttgggttcatgcataactcacagggcactacatactacccttttcttttgcatagaagaatgaacctcagagannnnnnnnnnnnnnnnnnnnnnnnnnnnnnnnnnnnnnnnnnnnnnnnnnnnnnnnnnnnnnnnnnnnnnnnnnnnnnnnnnnnnnnnnnnnnnnnnnnnnnnnnnnnnnnnnnnnnnnnnnnnnnnnnnnnnnnnnnnnnnnnnnnnnnnnnnnnnnnnnnnnnnnnnnnnnnnnnnnnnnnnnnnnnnnnnntgatgttgccgttagctgagattgagccaattctcttcagcctgagcaataaagcaagacctataaaagaaannnnnnnnnnnnnnnnnnnnnnnnnnnnnnnnnnnnnnnnnnnnnnnnnnnnnnnnnnnnnnnnnnnnnnnnnnnnnnnnnnnnnnnnnnnnnnnnnnnnnnnnnnnnnnnnnnnnnnntcctcagttttgttgaattttgactttactccaaaaagcttgaggtttaaggggatgaaattaggaccaatttataccattagatgatgggtcctgaatactctgaaaaccattcttaatgctcgttgtgattggtttagaaaagattgattttgtacaaaagaataaaaaagtgattagtttaggaaatggtatttaactgagatttttctcccattgtttcatttagatatcataattttctcctttaaagtattttgaagaatctcaatcacagtccaccactgcaaaataatttctatataaccattatttatttactgaacattctgaaatttgatcagatttcacccagaaatgctaaagagacatttagtatactctaaaacaatattatcctcaaattagtcaatgcattacctaagttgtatattatagaatattctgtcttgcgcatatatttgtgtgccacctttataacagagggtattacatttatgcacaacatatagaataaaatattctcaataaaatttagtatatacagcaagtataaaattgtaaaatatctgaaaa

SEQ ID NO: 242431 - DNA, 1754 bp, Homo Sapiens
ttgggtgtccaggctggccaccggcttgagcaagtccctgcagctgacggagctcacgctgacccagtgctgcctgggccagaagcagctggccatcctcctgagcttggtggggcgacccgcagggctgttcagcctcagggtgcaggagccgtgggcggacagagccagggttctctccctgttagaagtctgcgcccaggcctcaggcagtgtcactgaaatcagcatctccgagacccagcagcagctctgtgtccagctggaatttcctcgccaggaagagaatccagaagctgtggcactcaggttggctactgtgaccttggagcccaccacagccttcttgtcgggcagctgatggagacatgtgccaggctgcagcagctcagcttgtctcaggttaacctctgtgaggacgatgatgccagttccctgctgctgcagagcctcctgctgtccctctctgagctgaagacatttcggctgacctccagctgtgtgagcaccgagggcctcgcccacctggcatctggtctgggccactgccaccacttggaggagctggacttgtctaacaatcaatttgatgaggagggcaccaaggcgctgatgagggcccttgaggggaaatggatgctaaagaggctggacctcagtcaccttctgctgaacagctccaccttggccttgcttactcacagactaagccagatgacctgcctgcagagcctcagactgaacaggaacagtatcggtgatgtcggttgctgccacctttctgaggctctcagggctgccaccagcctagaggagctggacttgagccacaaccagattggagacgctggtgtccagcacttagctaccatcctgcctgggctgccagagctcaggaagatagacctctcagggaatagcatcagctcagccgggggagtgcagttggcagagtctctcgttctttgcaggcgcctggaggagttgatgcttggctgcaatgccctgggggatcccacagccctggggctggctcaggagctgccccagcacctgagggtcctacacctaccattcagccatctgggcccaggtggggccctgagcctggcccaggccctggatggatccccccatttggaagagatcagcttggcggaaaacaacctggctggaggggtcctgcgtttctgtatggagctcccgctgctcagacagatagacctggtttcctgtaagattgacaaccagactgccaagctcctcacctccagcttcacgagctgccctgccctggaagtaatcttgctgtcctggaatctcctcggggatgaggcagctgccgagctggcccaggtgctgccgcagatgggccggctgaagagagtggacctggagaagaatcagatcacagctttgggggcctggctcctggctgaaggactggcccaggggtctagcatccaagtcatccgcctctggaataaccccattccctgcgacatggcccagcacctgaagagccaggagcccaggctggactttgccttctttgacaaccagccccaggccccttggggtacttgatggccccctcaagacctttggaatccagccaagtgatgcacccaaatgatccacctttcgcccactgggataaatgactcaggaaagaagagcctcggcagggcgctctgcactccaccaagaggaaagatacgtgtgtcctgctgcagtcctcagggagacttttt

SEQ ID NO: 242432 - DNA, 966 bp, Homo Sapiens
taaaatgttcgaagaatatttagtgacatgagaatatactgatgatctaatgtcaggtaaaaggaaaatcaggatatagaagaatgacatcaaaattgtgtcaaaaaacttacatttacttacacagaaaaataaataaaaaacattaaaatttcaagtgatttttactgcatgatgtaattacagttgatctttattttcttcttatgcctatttctcaattattgacaactgaacattactttcataactggttatgaaaattttcatgtgaccacaaacattttatataattataatttctgtattatctgcttttattcaccaaaatttctccttagccattcccatctagtttttgttgcttccaatatcgctatgtaaggagactacaagtgtcagtttacagtaaatatactcaaaatgctttcagacacccacagaaaaagaaaacgaggataagaagaaaggcagaataaactacttagtttaccgctatagacttaatttgacatgtgtctccctcaagaacattttctcttagatcttttttttaaactgtattcttagaattaaactgtaaacaaatgtggtaccttggctatagctttgtactcttaatagtcagacttcattatagtatagttaggattattatgatttttcaactgaattttcaactcaaaatagtttattttgattttgataaaattttgtgtgcctgtggttgtttctcataaattcttccatcaattacaacttaaattttctctagctttctacttagggcagagtagagaatttatttgttttgaaacttctttcttatccctattatcaagggtagagaagacctcaaaagtgtatgtgtgtcaaaagattccagagaagatctagggctagttgaatagttctaagtgtctcttgctctttgtgaaagctggaaatgaagtaggtaagggccaa

SEQ ID NO: 242433 - DNA, 856 bp, Homo Sapiens
  misc_feature (138)..(147): n is a, c, g, or t
ttggattgtttttctcagaaccaggattctctgagaggtcagagcatctcgctgtttttttgttgttgttttaaaatattatgatttggctacagaccaggcagggaaagagacccggtaattggagggtgagcctcnnnnnnnnnncaggacgccccggtttcggcacagcccggtcactcacggcctcgctctcgcctcaccccggctcctgggctttgatggtctggtgccagtgcctgtgcccactctgtgcctgctgggaggaggcccaggctctctggtggccgcccctgtgcacctggccaggggaagcccgggggtctggggcctccctccgtctgcgcccacctttgcagaataaactctctcctggggtttgtctatctttgtttctctcacccgagagaaacgcaggtgttccagaggcttccttgcagacaaagcacccctgcacctcccatggctcaggatgagggaggcccccaggcccttctggttggtagtgagtgtggacagcttcccagctcttcgggtacaaccctgagcaggtcgggggacacagggccgaggcaggccttcggggcccctttcgcctgcttccgggcagggacgaggcctggtgtcctcgctccacccacccacgctgctgtcacctgaggggaatctgcttcttaggagtgggttgagctgatagagaaaaaacggccttcagcccaggctgggaagcgccttctccaggtgcctctccctcaccagctctgcacccctctggggagccttccccaccttagctgtctcctgccccagggagggatggaggagataatttgcttatattaaaaacaaaaaatgg

SEQ ID NO: 242434 - DNA, 1248 bp, Homo Sapiens
  misc_feature (756)..(805): n is a, c, g, or t
ggtttttagatttcaaggcaaggcacgtaatgtggacattatatcttcgtgcaaattaggattactggaaagagtatttttaattaaaattttaagagacatagaggcaaaatgtgtctgcccatgcacactatggatctgtcaatacaagaaatttgttgaacaaggctaatgtctgaaagcaccatgcaagttttcagcaccctgattacatttgttttctcaagagtgcgtttttatatcctacaccctggcgttcccagtttgtaaactgtaagctttacccttgtgacatggatttgcctgcctctttgtctctataatgcagattttatagaaccttttgtacaccctatgggttcttgatgcaaccagtaattttaaataaataaattctacctccaaggaggctgcagctaaaccaacataagtgctgtgttttcattaattttatttttctcaagcacatgatttgtcttgatttaatgcctttttaatgccctcaaaaactgaggggaaaataaattcgttcaaaattattttaaattctttttaatcccctcaatttagagtccaagggctgaaggacttataatcatgattcccctttagatataaatttataaattgcacttgcctctgttaagtgtttcttttgtggggaaaatattatattaatttttactgttgcatgcagagagaacacttcacctacatagaggcatttcttccatagagcctttgtgttcaaactgnnnnnnnnnnnnnnnnnnnnnnnnnnnnnnnnnnnnnnnnnnnnnnnnnnaagatttcaaactgggttacacactggaaaaggctgggttaagggccgaaatttaataaatctgtactgataactaaaggctacagagatttcatatattttttttaacttttagaaatcagagtgcttataaaatggctggctcatggctctgtcacccagcacctctgacgccgcctattttatttaaacaaaaaatgctaaacattaattttagttgtacttaattgaataatttctcaggggaatcgttcagggagagtttaaaactgcctgtttccaaaagccattacaaattggcatatactattatgtcactgtgccaaccaaaacagcacactttaatgtccctgaggccgccttcgctccagatgtgttcagaactcctagtaatgtaatgcaggcaaaaaccatatttacatgaagtcgtgttttgaatccaa

SEQ ID NO: 242435 - DNA, 1106 bp, Homo Sapiens
ttggcaacatcctaagaaccaggaggaatataaggaagtgaactttacatctgaactacgaaagcatccttcatctcctgcccgagtgactaagggatgtaccattgttaagcctttcaacctgtcccaaggaaagaaaagaacatttgatgaaacagtttctacatatgtgccccttgcacagcaagttgaagacttccataaacgaacccctaacagatatcatttgaggagcaagaaggatgatattaacctgttaccctccaaatcttctgtgaccaagatttgcagagacccacagactcctgtactgcaaaccaaacaccgtgcacgggctgtgacctgcaaaagtacagcagagctggaggctgaggagctcgagaaattgcaacaatacaaattcaaagcacgtgaacttgatcccagaatacttgaaggtgggcccatcttgcccaagaaaccacctgtgaaaccacccaccgagcctattggctttgatttggaaattgagaaaagaatccaggagcgagaatcaaagaagaaaacagaggatgaacactttgaatttcattccagaccttgccctactaagattttggaagatgttgtgggtgttcctgaaaagaaggtacttccaatcaccgtccccaagtcaccagcctttgcattgaagaacagaattcgaatgcccaccaaagaagatgaggaagaggacgaaccggtagtgataaaagctcaacctgtgccacattatggggtgccttttaagccccaaatcccagaggcaagaactgtggaaatatgccctttctcgtttgattctcgagacaaagaacgtcagttacagaaggagaagaaaataaaagaactgcagaaaggggaggtgcccaagttcaaggcacttcccttgcctcattttgacaccattaacctgccagagaagaaataaagaatgtgacccagattgaacctttctgcttggagactgacagaagagtgctctgaaggcacagacttggaagcaccagctggaagagaactgagacagcagaaagaagcagcttgtttcaaggctcgtccaaacaccgtcatcttctcaggagccc

SEQ ID NO: 242436 - DNA, 934 bp, Homo Sapiens
ccaactttgtacaaaaaagttggccttcccttgcctcattttgacaccattaacctgccagagaagaaggtaaagaatgtgacccagattgaacctttctgcttggagactgacaggagaggtgctctgaaggcacagacttggaagcaccagctggaagaagaactgagacagcagaaagaagcagcttgtttcaaggctcgtccaaacaccgtcatctctcaggagccctttgttcccaagaaagagaagaaatcagttgctgagggcctttctggttctctagttcaggaaccttttcagctggctactgagaagagagccaaagagcggcaggagctggagaagagaatggctgaggtagaagcccagaaagcccagcagttggaggaggccagactacaggaggaagagcagaaaaaagaggagctggccaggctacggagagaactggtgcataaggcaaatccaatacgcaagtaccagggtctggagataaagtcaagtgaccagcctctgactgtgcctgtatctcccaaattctccactcgattccactgctaaactcagctgtgagctgcggataccgcccggcaatgggacctgctcttaacctcaaacctaggaccgtcttgctttgtcattgggcatggagagaacccatttctccagacttttacctacccgtgcctgagaaagcatacttgacaactgtggactccagttttgttgagaattgttttcttacattactaaggctaataatgagatgtaactcatgaatgtctcgattagactccatgtagttacttcctttaaaccatcagccggccttttatatgggtcttcactctgactagaatttagtctctgtgtcagcacagtgtaatctctattgctattgcccctttacgactctcaccctcttccccac

SEQ ID NO: 242437 - DNA, 1328 bp, Homo Sapiens
ttggcgtttgtagaagaggagcatctgctccagatggaaaatgggtaaggaacaatcaaattcaattcgggaagaatatagaggtggtaataattggtaaaagtctgcagggttttttttaaccaaaggaaactggtttgagaaaattgtgaaatcagcattgaaatttgttacctactccaatcaagatttgcaaactacaaaaaaatcattctgaagctttcacctataaatatataccaagataatttcagataagaatgtccagcaaggaagtgaagactgctctaaaaagtgctagagatgcaatcagaaacaaagaatacaaagaagctttgaaacactgtaagacagtgttaaagcaagagaaaaataactataatgcctgggtttttattggcgttgctgcagctgaactagaacaacctgatcaggcccagagtgcctataaaaaagctgctgaattagagccagaccaattactagcttggcaggggttagcaaacttgtatgagaaatataatcacataaatgctaaggatgacttgcctggtgtttaccaaaagctcctggatctttatgagagtgttgacaagcagaagtggtgtgatgtctgcaagaaacttgtggatctatattaccaagaaaagaaacacctagaggtggctcgaacatggcacaagttgataaaaacacggcaggaacaaggtgcagaaaatgaagagcttcatcaactatggagaaaattgactcagttcctggctgaaagtacagaggaccagaataatgaaactcagcaattgctttttactgcttttgagaatgcactgggattatcagataagattcctagtgaagatcaccaagtactttataggcatttcattcagagtttatccaaatttcctcatgagtctgctagattgaagaaggcctgtgaaggaatgataaacatctatcctactgtacagtatccattagaagtgctttgtttgcatttaattgaatcaggaaatcttactgatgaggggcagcagtattgttgtagattagtggaaatggattcaaaaagtggtccaggcctcattggcttaggcattaaagcattacaagacaaaaagtatgaagatgctgttaggaacctaacagaagggttaaaggaaagccctgtctgcacaagtggatggtatcatctggcagaagcccaagtcaaaatgcatagacctaaagaagctgttctttcatgcagtcaagctctgaagatcgtagataatcttggtgcgtctggtaacagtctttatcagaggaatctttgtcttcatttgaaa

SEQ ID NO: 242438 - DNA, 1335 bp, Homo Sapiens
ctttgtacaaaaaagttggagcgtttttaccctatggcaccatcatttaatgtgacagtgttcagtaaacaaatcagttggcaggcaccagaagaagaatggattgtatgtcaagattttacttggcattgagtagtttttttcaatagtaggtaattccttagagatacagtatacctggcaattcacaaatagccattgaacaaatgtgtgggtttttaaaaattatatacatatatgagttgcctatatttgctattcaaaattttgtaaatatgcaaatcagctttataggtttattacaagttttttaggattcttttggggaagagtcataattcttttgaaaataaccatgaatacacttacagttaggatttgtggtaaggtacctctcaacattaccaaaatcatttctttagagggaaggaataatcattcaaatgaactttaaaaaagcaaatttcatgcactgattaaaataggattattttaaatacaaaaggcattttatatgaattataaactgaagagcttaaagatagttacaaaatacaaaagttcaacctcttacaataagctaaacgcaatgtcatttttaaaaagaaggacttagggtgtcgttttcacatatgacaatgttgcatttatgatgcagtttcaagtaccaaaacgttgaattgatgatgcagttttcatatatcgagatgttcgctcgtgcagtactgttggttaaatgacaatttatgtggattttgcatgtaatacacagtgagacacagtaattttatctaaattacagtgcagtttagttaatctattaatactgactcagtgtctgcctttaaatataaatgatatgttgaaaacttaaggaagcaaatgctacatatatgcaatataaaatagtaatgtgatgctgatgctgttaaccaaagggcagaataaataagcaaaatgccaaaaggggtcttaattgaaatgaaaatttaattttgtttttaaaatattgtttatctttatttattttgtggtaatatagtaagtttttttagaagacaattttcataacttgataaattatagttttgtttgttagaaaagttgctcttaaaagatgtaaatagatgacaaacgatgtaaataattttgtaagaggcttcaaatgtttatacgtggaaacacacctacatgaaaagcagaaatcgggttgctgttttgcttcttttccctcttatttttggtattgtggtcatttcctatgccaattatggagcaacagctgtatagttgtaaaatttttggaaagaatgaaaagttatatattaacgacaa

SEQ ID NO: 242439 - DNA, 868 bp, Homo Sapiens
ttggctaaaactggaaatgtatattttgtatatttgagaaaacagggaatacattgtattaataccaaagtgtttggtcattttaagaatctggaatgcttgctgtaatgtatatggctttactcaagcagatctcatctcatgacaggcagccacgtctcaacatgggtaaggggtgggggtggaggggagtgtgtgcagcgtttttacctaggcaccatcatttaatgtgacagtgttcagtaaacaaatcagttggcaggcaccagaagaagaatggattgtatgtcaagattttacttggcattgagtagtttttttcaatagtaggtaattccttagagatacagtatacctggcaattcacaaatagccattgaacaaatgtgtgggtttttaaaaattatatacatatatgagttgcctatatttgctattcaaaattttgtaaatatgcaaatcagctttataggtttattacaagttttttaggattcttttggggaagagtcataattcttttgaaaataaccatgaatacacttacagttaggatttgtggtaaggtacctctcaacattaccaaaatcatttctttagagggaaggaataatcattcaaatgaactttaaaaaagcaaatttcatgcactgattaaaataggattattttaaatacaaaaggcattttatatgaattataaactgaagagcttaaagatagttacaaaatacaaaagttcaacctcttacaataagctaaacgcaatgtcattttttaaaaagaaggacttagggtgtcgttttcacatatgacatgttgcatttaatgatgcagtttcaagtaccaaaccttgatttgatgatgc

SEQ ID NO: 242440 - DNA, 1036 bp, Homo Sapiens
  misc_feature (343)..(361): n is a, c, g, or t
tttttgatccattattccaattaagaatgcgtgtcaaaaacttaatttgttatttttcttatgagtttaaagatcggcattcagtgttacacatgtggttcaatgatttatcatgaaccctaaatgcacactgttcaaaacagcaaaacagatgtgcattaaagaaataatgtttttgatacatatcttaaatttcaatcagtttagggtcctttgaaggaaaagatatccagttatcgggtggcaaagagcagaggaggtaaactagtaaagattattaatattcagtgaagtattattgtctgtcttatcctttgagtaacaagatgctaacacactttcnnnnnnnnnnnnnnnnnnnggatgcttaaaactatgctaaaggcccatgaactgacatcatccattcaacaccattactttgttacataaacctgttttcttaaggtagaacatattatgcaataatttggaaattagccaagcactaagcaattacaatagcaggtaatacaccatcaatttttgaaacacatttggtcacatttcatgacccatctgcagtatggattctatagactctcactcagtttaaaatttgtttctggacctgaatgacaagagaatggctttatgaaattttctcataagacatttaaatagtcttaggttcacaccccttttgttgtaaatgatttaatctgacatgctatatagctacaataaaaataattatgttcaattcttaaatgaaaactaaatgccaataaatggtaacagatttgacatggaatgttgtaagatcttcctctacgtaatctgacactgcggattatgaatttcagagcttgaaaacttcagattaagaaccacaataaaatttactcctgatggcatgcaagatcttcctaaaaattaacctaagacctagaagtctcagtattattagaacataaaaaaacacaacaaatttgtacattttattcacatttatttttcgcttttagtgtgctcacagaaaattagaacaccccaa

SEQ ID NO: 242441 - DNA, 1042 bp, Homo Sapiens
  misc_feature (485)..(494): n is a, c, g, or t
gagcaatgcttttttcccaataaaaaactttgtacaaaaaagttgcagccctgtctacactggataatcattccctggccatatcagtcatcatgatggtggtggctggcttcttcaccctctgtgccgtgctctcagtcttcctcctgcagcgggtgcactccctctaccgacggacaggggccagcttccagcaggcccaggaggagttttcccagggcatcttcagcaacagaaccttccacagagctgcttcatctgctgcccaaggagccttccaggggaattagtcctcctctcttctctccccctcagcctttctctcgcctgccttctgagctgcactttccgtgggtgccttatgtggtggtggttgtgcccagcacagacctggcagggttcttgccgtggctcttcctcctccctcagcgaccagctctccctggaacgggagggacagggaattttttccccctctatgtacnnnnnnnnnncaaagctctctttccttctctggtgatggtttggtaggattcttttgtctctggaagcagtgggactgaagttctcttcgtcctgtgcacacacagacacccccacacagttgggatcacaggctgacctgggcccatcccagctggagctttctgccagggtcctgggccttgactcccccaccctgcaggcctggcctgaatctggcttcttagacacagcccagtccttcctgcctgggctgggaataagcctctcacaggttctggtggacagatctgttccccaggtcactccagtggtctccaggcttccagagaaggctggttgcctcaagctcttctctgcctcataaacggatccagagaaggctggttgccttaagctcttccctgcctcgtgttcctgagaaacggattaatagccctttatccccctgcaccctcctgcaggggatggcactttgagccctctggagccctccccttgctgagcctactctcttcagactttctgaatgtacagtgccgttggttgggacttgggg

SEQ ID NO: 242442 - DNA, 1011 bp, Homo Sapiens
ttggctcagtcatctctgcaagggaccctgacgcctgggagatcagagccactgaccctttatggcactgctaacagaccccttccctcaggtaattctggatccagaactcattatgggatgtaatccaggtcaacactaataccacttggaaggttccgctctgtctcactctgcttgagtatcccactgatcagtctctcagtgcctgcctactgggcagctcatctgtccacttattcgtattaaatttgctttttatttaggtctctggagatggttgcgtggggaagagcccatgactttcctatatgatcccttgaacatactctccaagtcagtagattacctctcaggcagccttcataaaagtgtttcactgtactggggtttgtgttcatctcactcacatagacagtctctgggtaggcaggtggggggtgatacaagttcacactctgtgtttctcctcctgttagccattcccaccctgctgatgtttaaggaaagccagggatgatgacccacttaagctttccttggccttgttaagtccaatcatctggggcaggaagaagagaaatgctcattgcaatctttgacccccactaactgctgtggtgactttgacccaagcccttgacctccttttccttatctgaaatgttgctgtgattcctgtggtgagatcagatgaggcagcacttgggataagcttgcagagatgcattgagcggtatgaaagtacaggatgctatgtactttcctgcttcacagcacattttgtttcttgcaaggtgagtggcccagccgcctctccacaaacacgtgtttctgcctttctcagcataatcagcaagatgttcccacttctcagcattgcacttttctgctggtgcaaaataaaaacactttgagccccaccctgtcctgagacaaagtcctctgtggtcacttggcatatggcaaagctgctgctgtgggctggaacatttgagcaacagtgacttc

SEQ ID NO: 242443 - DNA, 885 bp, Homo Sapiens
ttggggcgtccatgcgggagagcgacacgggcctgtggctgcacaacaagctgggggccacggacgagctgtgggcgccgcccagcatcgcgtccctgctcacggccgcggtcatcgacaacatccgtctctgcttccatggcctctcgtcggcagtgaagctcaagttgctactcgggacgctgcacctcccgcgccgcacggtggacgagatgaagggcgccctaatggagatcatccagctcgccagcctcgactcggacccctgggtgctcatggtcgccgacatcttgaagtcctttccggacacaggctcgcttaacctggagctggaggagcagaatcccaacgttcaggatattttgggagaacttagagaaaaggtgggtgagtgtgaagcgtctgccatgctgccactggagtgccagtacttgaacaaaaacgccctgacgaccctcgcgggacccctcactcccccggtgaagcattttcagttaaagcggaaacccaagagcgccacgctgcgggcggagctgctgcagaagtccacggagaccgcccagcagttgaagcggagcgccggggtgcccttccacgccaagggccgggggctgctgcggaagatggacaccaccaccccactcaaaggcatcccgaagcaggcgcccttcagaagccccacggcgcccagcgtcttcagccccacagggaaccggacccccatcccgccttccaggacgctgctgcggaaggaacgaggtgtgaagctgctggacatctctgagctggatatggttggcgctggccgagaggcgaagcggagaagaagactctcgatgcggaggtggtggagaagcccgccaaggaggaaacggtggtggagaa

SEQ ID NO: 242444 - DNA, 1581 bp, Homo Sapiens
  misc_feature (1144)..(1186): n is a, c, g, or t
ttggcctacctctacttttgactgtgtggtagcagatcccagaaaaggctccaaaatgtatggtctaaagagctacatcgaatatcagctaacacctactaacactaatcgatctgtaaaccacaggtataagcactttgactggttatatgagcgtctcctggttaagtttgggtcagccattccaatcccttctcttccagacaaacaagtcacaggccgctttgaagaggaatttatcaaaatgcgcatggagagacttcaggcctggatgaccaggatgtgtcgccatccagtaatctcagaaagtgaagttttccagcagttcctaaatttccgagatgagaaggaatggaaaactggaaagaggaaggccgagagagatgagctggcgggagtcatgatattttccaccatggaaccagaggcacctgacttggacttagtagaaatagagcagaagtgcgaggctgtggggaagttcaccaaggccatggatgacggcgtgaaggagctgctgacggtggggcaggagcactggaagcgctgcacgggcccattacccaaggaatatcagaagataggaaaggccttgcagagtttggccacagtgttcagttccagtggctatcaaggtgaaacagatctcaatgatgcaataacagaagcaggaaagacttatgaagaaattgccagtctcgtggcagaacagccaaagaaagatctccatttcctgatggaatgtaatcacgagtataaaggttttcttggctgcttccctgacatcattggcactcacaagggagcaatagaaaaagtgaaagaaagtgacaaactagttgcaacaagtaaaatcaccctacaagacaaacagaacatggtgaagagagtcagcatcatgtcttacgcgttgcaagctgagatgaatcactttcacagtaaccggatctatgattacaacagtgtcatccgcctgtacctggagcagcaagtgcaattttacgaaacgattgcagaaaagctgaggcaggccctcagccgctttccagtgatataggacagaacgggccttgaagagaatgccgcgtgctttctcctgacttggggcaatgcaattcaaaactttttttcccctattattcannnnnnnnnnnnnnnnnnnnnnnnnnnnnnnnnnnnnnnnnnnctgcatttattttattagccaccctaaatgcgtcagttatttagggatggtcttttgttcatttccgcatccattatttaaaccagtggaaattgtctctatttttggaaagtacttaaaagttaccagaattttcaatggaaaatgaggggtttctccccactgatattttacatagagtcataatttatatgtcttataaattataagtcttatataatttataagtctcccacaatcttccagttcttacccagtgtcagataattaattactaattactttcttaaaaacatgaactatgccagaataaaaaatatctatgtttgtatatttttataactcctttcagtcctctggggctcctgtcattgagggaagtcgttacgcctttc

SEQ ID NO: 242445 - DNA, 1524 bp, Homo Sapiens
  misc_feature (1037)..(1079): n is a, c, g, or t
aaggggcgttgtttgttctttctctccaaccttcagagcgccggggactttgtaccatggtgaggctgcagcccctatcagtccctacacttttcccatctaaaggggagctaaccatgtgctttttctctttgctgatgacaccaactggccatgaacccgccacccaagccaagcagtgtgccgttgccacagcagcgcttctcatcacggtggatgaggagccaaagaataagaaagggccagagacgccggggtgctgggtgccctccttctcccaggccctcccgaacacaggcctccgcacagccactcacccgttggaccaaagccacaaaattctctacaaagtccctcaattcttctaatgtattcttcatggcataaaacatgccttaaccaagattaggaaggaagtgcaaagagagaaagcactggtcctcacataagagcagcacatcagaaatgtcgctgaggacatgggtggccaggggtatctgctcatctgccaggctgtggggtccccctggagggacatgggatggcccacctgccacacaccacgatggcactagcagccccaggggcccccagcgtcctccctcttgaagtgtaagcacttgagctgtaactgtggcagtgaaaggcgtaacgacttccctcaatgacaggagccccagaggactgaaaggagttataaaaatatacaaacatagatattttttattctggcatagttcatgtttttaagaaagtaattagtaattaattatctgacactgggtaagaactggaagattgtgggagacttataaattatataagacttataatttataagacatataaattatgactctatgtaaaatatcagtggggagaaacccctcattttccattgaaaattctggtaacttttaagtactttccaaaaatagagacaatttccactggtttaaataatggatgcggaaatgaacaaaagaccatccctaaataactgacgcatttagggtggctaataaaataaatgcagnnnnnnnnnnnnnnnnnnnnnnnnnnnnnnnnnnnnnnnnnnntgaataataggggaaaaaaagttttgaattgcattgccccaagtcaggagaaagcacgcggcattctcttcaaggcccgttctgtcctatatcactggaaagcggctgagggcctgcctcagcttttctgcaatcgtttcgtaaaattgcacttgctgctccaggtacaggcggatgacactgttgtaatcatagatccggttactgtgaaagtgattcatctcagcttgcaacgcgtaagacatgatgctgactctcttcaccatgttctgtttgtcttgtagggtgattttacttgttgcaactagtttgtcactttctttcactttttctattgctcccttgtgagtgccaatgatgtcagggaagcagccaagaaaacctttatactcgtgattacattccatcaggaaatggagatctttctttggctgttctgccccaa

SEQ ID NO: 242446 - DNA, 1204 bp, Homo Sapiens
ttggcggtaaccttgggggcctcactgcagccgccgctgctgttggagtgggctttgcgagtctgaacgttggcggggctaggctcgttaactgccgagagcctccgggtttgcggtggaggacgctgaggcccgtggggggcaggcacccgggcgccgggcctcccagccgacatgtctctagtggcggaagccttcgtctcccagattgcagctgcagaaccttggcctgaaaatgctacattatatcagcaattgaaaggggagcaaattttactttctgacaatgcagcttctcttgcagtgcaggcctttttgcaaatgtgtaacttgcctatcaaagtagtttgtagggcaaatgcagaatatatgtctccatctggtaaagtaccttttattcatgtgggaaatcaagtagtatcagaacttggtccaatagtccaatttgttaaagccaagggccattctcttagtgatgggctggaggaagtccaaaaagcagaaatgaaagcttacatggaattagtcaacaatatgctgttgactgcagagctgtatcttcagtggtgtgatgaagctacagtaggggagatcactcatgctaggtatggatctccttacccttggcctctgaatcatattttggcctatcaaaaacagtgggaagtcaaacgtaagatgaaagctattggatggggaaagaagactctggaccaggtcttagaggatgtagaccagtgctgtcaagctctctctcaaagactgggaacacaatcgtatttcttcaataagcagcctactgaacttgacgcactggtatttggccatctatacaccattcttaccacacaattgacaaatgatgaactttctgagaaggtgaaaaactatagcaacctccttgctttctgtaggagaattgaacagcactattttgaagatcgtggtaaaggcaggctgtcatagagttatgtgttagtctcaggagtcttaacttttgaaatatgttttacttgaatgttacattagatattggtgtcagaattttaaaaccaaattactgctttttgaaacctcaaattatataatgtatcttatgtatgtgctttatattgttatttgtgtatacattaaaataattctgaattatttaatctgatatgttgtattctgtatcttgaaatttttgtttccttgaacatgc

SEQ ID NO: 242447 - DNA, 925 bp, Homo Sapiens
ttggcgtggggtcccgggcccagcagtctgcgcaccgggctcgctgctgcaccacgcgtcacccacgcagaccatggcagccgccgacggttcgctcttcgacaaccccaggacgttctccagacgtcccccagcccaggcgagtcggcaagcaaaggctacgaaaagaaaataccaagcgtccagtgaggctcccccagcgaaacggaggaacgaaacttcatttctcccagccaagaaaactagtgttaaagaaactcagaggacttttaaggggaacgcacaaaaaatgttttctccaaagaagcattcggttagcacaagtgatagaaaccaggaggagagacagtgcattaagacttcatcactgtttaaaaacaaccctgacattccagaactccacagacctgtggtaaagcaggtgcaagaaaaagtgtttacttcagctgcttttcatgagctgggcctccacccacatttaatttccacaataaatacggtcttaaaaatgtctagtatgaccagtgttcagaagcaaagtattcctgtgttgctggaaggcagagatgctctcgtgagatcccagacgggctcaggtaaaactcttgcctattgcatccctgtggtccagtcccttcaagcaatggagtcaaaaatacagcgcagtgatggcccctatgccctggtgctcgtgccaacgagagagctagctctacaaagctttgacactgtccagaaactgcttaagcctttcacctggattgtgcctggagtgttaatgggaggagagaagagaaaatcagaaaaggccagactccgcaaaggaataaatatccttatctcaactcctggacgcctggtggatcatataaaatccacaaagaacattcattttagtcggctgcggtggttggtgtttgatgaa

SEQ ID NO: 242448 - DNA, 1597 bp, Homo Sapiens
gattcccattgacctgacttcctttgaaagaaccacaccactaaatcccttggcactcacttcttagtgtgatgcatccacccagggaggtggcctgcgcggcgctggcacgctgtccaccctgccctgttgaccatcctgtccttggaccccaaagtaaaatggggccagtgtaggagacctgagggtggggcccttatgccagacctccaggggtagcgacctcacctgaccccagcttcggcttcctgtgctgcagaaggcgcttgctcccaagcccgtggtgacccacgtctccaccccatggtgtggcaactgtggtggctgagtggaagctggggcaggagagaggacccccaccaaccccagccaggtggcctgcagagcccactgccctacctctgagtcagcctgcggcctgagcacaccaatctactctctgggggatccagggtgcctgtgtgggccctcctagagacaccagcttggcctcctagggcataaggaatggggacagggcacagggcacgtgcttacaacggatatgcaacatggcttttggtagggccattgcagccagtggggaaacctgcgcggctgctgggaacagagcatggccagccttttgccagggggtggggagcatggggaaatgcaaggagagccagggtggggagggctgagtgtctgttgtcagggaggccacctacagctgttttgccaaggctagttgagaatctgaaagctcgagtcccagttcctggccatacagagccactgtggtccgagggtacggctcctgggcaggggctatggtcccatgctccagccgatggaagcctgatgaacttaatccgtacgctggtgggagcagtggtatttgagctcttgagtatgtgtttcggtgatggggctggggcagcctgctagcaaatcccagtgggtcagaaaggagaacagaggcaggggagccctcggtccccagcccttccagtctgagccaggcctgcctggatggtcacctccaagggccagccgcggactcacgcacaagtggcagcatccctggccaaagcctccccactcctgggctgccagttggcccgaggaaggccggcaatgcagctcgggcctactacccaaacccctccttggtctgaggactgtagggagtgggtggggcctgaacatcagctttggcctcctgacccaaagcatgaagcaggaccatgggccagagaggggagcaggcttcctgggggctggactcgagtcttctctgcctcagatggggtgggccctgactttgagggagctacagatgggtgagctgggggctccccaggcctcggggcattgggggcagccagaagaggaggggctatgggatggcctggagctggggcagttgccagaagctggtctcactcctagtagcccggacagaggagctaagagcgagtgctgtgtgcatagttggtgagggacacactcccggcctggcaggtccactttccgctgtcctcgtctcttgcgcaaaccttcagtttttgcgataaatccaaggaggccaggagccaacttttttgtacaaagt

SEQ ID NO: 242449 - DNA, 1041 bp, Homo Sapiens
actttgtacaaaaaagttggaggtgcatgtcctgctgctggacgacctgctgctgctgctccagcgccaggacgagcggctgctgctcaagtcccatagccggacactgacgcccacgcccgatggcaagaccatgctgcggcccgtgctgcggctcacctccgccatgacccgcgaggtggccaccgatcacaaagccttctacgtcctttttacctgggaccaggaggcccagatatacgagctggtggcacagactgtgtcggagcggaaaaactggtgtgctctcatcactgagactgccggatccctgaaagtccctgcccctgcctctcgccctaagccccggcccagcccgagcagcacccgagaacccctcctcagcagctctgagaacggcaatggtggccgagagacgtctccagctgatgcccggaccgagagaatcctcagtgacctcctgcccttctgcagaccaggccccgagggccagctcgctgccacggcccttcggaaagtgctgtccctgaagcagcttctgtttccggcggaggaagacaatggggcggggcctcctcgagatggggatgggggcccagggggcggccccctgagcccagcacggacccaggaaatccaggagaacctgctcagcttggaggagaccatgaagcagctggaggagttggaggaggaattttgccgcctgagacccctcctgtctcagcttggggggaactctgtcccccagcctggctgcacttgaggttcccgcccaggaaggccttttgcaagaaggagaggaatgggggagaggacgtgagggaccacccccacccacacagctgccgcagcatctcacaccccgagggcctgaggagagggagctgtgggccacgcctgggaggggcccagctggggttactggccccgcatgagcctcggccctctctccctcctgccctctgcttgggggactcagggctccattctggagggcaccacggtgacccgggccatctcagtattgcctgtgggggc

SEQ ID NO: 242450 - DNA, 1056 bp, Homo Sapiens
  misc_feature (473)..(487): n is a, c, g, or t
  misc_feature (490)..(842): n is a, c, g, or t
gctactgtgccagaagcagcctatcaatagagaaattgaaaatctgaccacacaaatgctgcagcacccagctgaaatgcatttggatgacaatctcagatgggaatcgagagcatctctttctgccttgctaatagcaagctgatttttagaatatagtctaagtgcttctcttccatcctccccagattctcacctgctacacacccctcagagggactggaggaatccagacaacgatgcgcaggggccctggtgctatactactgatccagaacagagatatgactactgcgacattcctgagtgtgaagggcaggagtggctctagaaaatgttttcatttctgcccttcacctgtaaaataatttgttgtaaagccccttcccacagggatattattaataattgcgtaacgtgttcacctctcggaaaggagcaaaactttgctcagatcccagaattaacctgannnnnnnnnnnnnnnctnnnnnnnnnnnnnnnnnnnnnnnnnnnnnnnnnnnnnnnnnnnnnnnnnnnnnnnnnnnnnnnnnnnnnnnnnnnnnnnnnnnnnnnnnnnnnnnnnnnnnnnnnnnnnnnnnnnnnnnnnnnnnnnnnnnnnnnnnnnnnnnnnnnnnnnnnnnnnnnnnnnnnnnnnnnnnnnnnnnnnnnnnnnnnnnnnnnnnnnnnnnnnnnnnnnnnnnnnnnnnnnnnnnnnnnnnnnnnnnnnnnnnnnnnnnnnnnnnnnnnnnnnnnnnnnnnnnnnnnnnnnnnnnnnnnnnnnnnnnnnnnnnnnnnnnnnnnnnnnnnnnnnnnnnnnnnnnnnnnnnnnnnnnnnnnnncactctttgggaattgcatcttactgtaatcttaaactacactaaaataaataatgtaaaccttttgtcaaattgctcagagtaggtttctactttggttataaggaataaaattcatgcttttgtgtacacactagacatctaaagcaaccaaccatagttaacaagcagtgctcttaccaaaaggtaactctttctagaatctggcacccaa

SEQ ID NO: 242451 - DNA, 1285 bp, Homo Sapiens
caggtgaaatcattagcattgaaacacagaagtagtggatcagctgaggggcatgtgtaccatggcatgagaacatctaggtttggaacagatttctccatgaacatcaactttagaagataagtaaaagaagaccacattgaaaaggagactgtagaaaagtctgagtatgaaaaatcaaagaagtaagagaaaaatcaagggtatttggtattaacaaagcctggaacaaagtcacctgccaaggttttaagatgtctaatactgctgacagatacagctaggtaatgactggaaagtgttactaaacctaagtttagtaaaattaaggttaactgtgactttgaaaaatgctcttcagacacctgggaaatgggcatcaggaggcaataaaccaggggctaaggtcttggagaacagagtcaatgaagatggcttgaattccagttctgccatttagtactgttgtattagtctagatatttactctttctaactctattttcttactataaaacatggtgcagccacctgtgactgttattatgaagattaactcagatagtttacaacaagcatttaaaactatgctttggttcacaggtgttcagcaaaggaacctatattaattgacattattttacaatgggttgaggaatgaatgagaggtaaggaagtagcatcatcaagtgtacacctgctgtcttcttacaccaaaatcagtcctgaagtacctgtaggcagaaacatgtttagagagaggcagcagagttcagaggtcaagattcagaaataaaggctgggacattcacaatcttaccagtttgcctaatttagacccttgcctagaaatttctaccgtcaggattctgtcttgcattccgagaccactgaaacatctttgtcaagttacctgtaaaatattctttttgatatatggggacttcaaagttaaatcttttctctttacccccatgaactttattgttaaagcctagataagctgatagtttttcattggtaactgtattcaaatggcaaccccacccatatcttttgcaggcagaaaagtcttagggagctctatcccagctcttcctttgggtataaaggtattatagtcagtgctacttgcagattctttgtaaggtagagatattgtttcctaaataaaattgaaaccctaaataaaactgaactattcaataacaaattgagaattcaggtgaaaaaaatcaggaagcttaccaatatatttaacaaaagcaacccaactttttgtaca

SEQ ID NO: 242452 - DNA, 1566 bp, Homo Sapiens
  misc_feature (310)..(318): n is a, c, g, or t
ggttttttcccctcaacatgagttatttggccattcttatcgggctggagttccttaaagaggaggagcttggttttttgaatttcaccgaagctgcaaacttgacggttctgcttggacttgaaggatgaggagggaagtgggacttgggtggggcttgagctgcgggctctggtcttgcccaacggagtctgcatgctttgcattttaatctccgcatccgctgtcccgtctgcggtggttgctgttactgtttttgtcactacttgcaggtgatgagtgtccacctttcttagatgaatgagaaacnnnnnnnnngggaggagaaaggggttttttgggacagctgaaggcggcgtgtttattcaggcttccaatgtaagtgaactctcgattacagtaagggcagatgtgagaggatgactcacaagcatttttcaagtcggccttctgctttgcagatttgtttttctgaagaattgctttctgtactagctgattttttttcttcaatgcatttaatttgagcttattcgacgacattttgctgagctcaacactaaagttaagccttttgggctgtcccattcgtcggaaggcatttttcccagagttatctaaaaccaccacgccatttttgggttgcacagtttgttttaatggtactgggtttttcttaggcgtgtacctcttcttgtcacttgcagaagcacaagccaggatatgtttgtgcaactccggcatattgtcgacaccttttccacactttgtgcagcgaatggcggtagtgaaagtctgtggaatattgtgtgtagtgaaatttgtggctgtcacaccaatccccatggggttacggtgatggtactgaaatggaggtggtttaaagcttgggtaatgctgattgaggcccaatcgaacatctggatcttttgtctttattccagaagccattatttttatagtcgtgtaaagctcttcagaggaatcatttaactcctcttcttctttagaagtttctaaaggatcttctggcaagctctgcatatgctctacatgggccttgctgggatctgtaaagttctggggcctcagagtcccgctttcaaactcgtgatgtgtgcacaccttatctgggtggagatctcgctggtgctgctgcaaattgcacaaaaaagcaaattcttttttacaaacagaacacacaaagatattcccaactccatgaagcaaaaagcgatgttctgacaagtccgttttatccttaaaaagctgcacacaaaattcacatttgaagggccattcttcagcatgaatagataaatgtttggttagatctttaatggaaagaaaaggtgattcacagacgttgcaaacaaagtttttgttgaatgtttcctgaacaacaacatcctgttcagcagcagactggggctcttccctgggtttcagaccttcattctctaattcctcctgtttgaaagatatcatggggagagaagcctccagattatcaccagaggaaacaacagatgatattgcggagagaggaggtggagaaggagccaa

SEQ ID NO: 242453 - DNA, 1305 bp, Homo Sapiens
tccttgggtcctgagccagtgactcctgttaggacctttgtcccactccgcctggtggaccggcagggacctggtctagccagtcctgcagcctccattcccccacctgcccctccccgctctgtggtgtggctgcccaggagagaaggggcccagggaagggaggtctccggcaggggtggggagtgacaggccagggcagcagggctgagccggagctgctcacagctgccaggcactggtcatcatggccacgaactcctcatccgtgttcatggaggcactcacgccgctgtagtagtcctggaattccgccagtgtgacctgcccgtccttctcagaggagtcgaagttgtccaggaagcggcgcagcacctcgtcctcggtccactccccactgcgcaccttggggtgggcacggccactgtacaccccgcggaggtcgtccaccgtcacgacgccgtccccactgcggtccagcttggcaaatgcagctgcgatgacagcctcccgggcctgggacatggggggccgcagcgcccgaaggaactcctccagatccagcgtcccgctgccattgcggtcccacttcctgcacacaccctctgcctccgcctggtccagcaccagcccgagtttggccagaccctgccggaactcatcagcgtccagggatctgctcccgtcccggtctagttggcggaaaaacctggccaggccctggatgcccgaggccccgcgggacaggcactgtgcccggagtttctccatggtggcatccacggcgtccatgcttggtctgggctctgggcagctggcctgcgtctgtcccagagtcctgcctgcggggccttgtgttagctgtgttgtgcctggggagactgttgctagtggaaggtgcctctggagatggggtggggcccagctgcatgaatgcactgtgctgggcagtggggagtgggggagggatgggtgcgcccagcctgactgcttactcaactgccagccccacagggcctgggacagagccagatccctgtggcactgcatcccttcctggctccaaggaggaggggcaggccactgccctgcaggggctgaaatgccctggatggagacaagtccgtggctggggaggcttgacgcatgattcctgtgtgaccctggacaggtccctttccctctctggcttcacaggggcttctcagcccgagccagggctgacaaaattgctgaggaatcaaagttcaaaagggccccaggttctgaccggccactgcggctcacgccggaaatcccagccaa

SEQ ID NO: 242454 - DNA, 1295 bp, Homo Sapiens
ttgggaccgcgctctgcagccgcagacccggtccacacggccaggggctacgacccttgggatctgccctccgctcagctcgagcttccctcgtggccgacggaacaatgaaggattgcagtaacggatgctccgcagagtgtaccggagaaggaggatcaaaagaggtggtggggacttttaaggctaaagacctaatagtcacaccagctaccattttaaaggaaaaaccagaccccaataatctggtttttggaactgtgttcacggatcatatgctgacggtggagtggtcctcagagtttggatgggagaaacctcatatcaagcctcttcagaacctgtcattgcaccctggctcatcagctttgcactatgcagtggaattatttgaaggattgaaggcatttcgaggagtagataataaaattcgactgtttcagccaaacctcaacatggatagaatgtatcgctctgctgtgagggcaactctgccggtatttgacaaagaagagctcttagagtgtattcaacagcttgtgaaattggatcaagaatgggtcccatattcaacatctgctagtctgtatattcgtcctacattcattggaactgagccttctcttggagtcaagaagcctaccaaagccctgctctttgtactcttgagcccagtgggaccttatttttcaagtggaacctttaatccagtgtccctgtgggccaatcccaagtatgtaagagcctggaaaggtggaactggggactgcaagatgggagggaattacggctcatctctttttgcccaatgtgaagcagtagataatgggtgtcagcaggtcctgtggctctatggagaggaccatcagatcactgaagtgggaactatgaatctttttctttactggataaatgaagatggagaagaagaactggcaactcctccactagatggcatcattcttccaggagtgacaaggcggtgcattctggacctggcacatcagtggggtgaatttaaggtgtcagagagatacctcaccatggatgacttgacaacagccctggaggggaacagagtgagagagatgtttggctctggtacagcctgtgttgtttgcccagtttctgatatactgtacaaaggcgagacaatacacattccaactatggagaatggtcctaagctggcaagccgcatcttgagcaaattaactgatatccagtatggaagagaagagagcgactggacaattgtgctatcctgaatggaaaatagaggatacaatggaaaa

SEQ ID NO: 242455 - DNA, 883 bp, Homo Sapiens
tgagccactgggcccagcctaatttattactttttataagcgatagccgtactgagccgccccctgaaggcggctgccaggtcttgccccaggcacctgggactctgtttgcaggccctgccctctgggctgagaaggatgcactttggacaagtcatctgtgtttgtgttttccagtttttctgtactttttaagtgttttgtgttacctggtctcattcccctccccacacctacccatttgaggggatggagttgaagtcacctggtcacctgtaccggcccagttcggctacaacctggagtgtccgtaaacaattcctctcacccacaaaacaatgtaatcccagcgatggactggattctgaaggccacttcccaccatcatagctgccatgcccaggcagtgcctgctctatatatagagtctgcctccaatcctgctggcttcagcctggagaagggatatgggagctggagctttgatggatgaataggtgttcaccggatctgggcagaggggtcatccgctccccaggtgggcactgataaaggaaggtacaggcctcacctggaactgccaaggcagcctccagaaatgctcggctgtctcggggcacgctccagtatgccagtcctgcgggattacgtccagctacttccagaaacactcagtgtcccctcccctcaagctctgccttggcctggccttgtccagtctaccctggacaagatgccgtgtgtttgaggcccagcagagtaagcccttggccgtgatgtgtctgaaacacctgttaggggttccctccatatgtcagagcctctctgggatgaagttcaagccagaaaacccagtcgaggctcaagtttgaatttcagcttc

SEQ ID NO: 242456 - DNA, 1929 bp, Homo Sapiens
  misc_feature (1324)..(1340): n is a, c, g, or t
ttgggttcacagtctactcagtaatcctccagaccctgatgagccaagtgaaagcactttagatattccagaaggcggcagcagcagccgcaggcctggcacatccgtggtaagttctgcatctatgagtgtgctgcacagctcttccctgcgtgactacacccctgccagtcgctctgaaaaccaggactctcttcaggctctgagttccttggatgaagacgatcccaatatacttcttgcaatacagttggatcactgcaagagtctgggctggccctcgatgaagaaactagagacttcctcagtaatgaagcatccttaggtgcgataggcacttctttaccttccaggctggactctgtccccagaaatacagatagccctcgggctgcattgagcagctctgagcttttggaacttggtgacagcctcatgagactaggagcagagaatgacccattttcaactgacaccctgagctcacaccctctcagtgaggcaagaagtgatttctgtccctcatctagtgatcctgactcagctggccaggaccccaacatcaatgacaatcttctcggcaacatcatggcttggtttcatgacatgaaccctcagagtattgccctgattcctccagcaactacagaaatcagtgcagattcccagctcccctgtatcaaagatgggtcagaaggtgtgaaggatgtggaactggtgctgccagaagattcaatgtttgaagatgccagtgtcagtgaaggtagaggaacccagatagaagaaaatcctttggaagaaaatattctggcgggggaagcagcatctcaagctggtgacagtggtaacgaggcagccaacagaggagatggttcagatgtttcaagtcaaacacctcaaacctcaagtgactggcttgaacaagtacatttagtgtgaactgcacacatctgggctctaaatgaattacaggtacagatggtatgctaggtggagtatgcttgatagagactttgattcacttaattccaactcagtgataaaccactgacattagggttgaatacagagaagttcccttgaatggtagcttcattttttattttaaccttacagggaatttcctttgtacttaattgaatagcttttcccctttttgctgacaaaaagaagagcaagagaaagagaaacaaaaatgaaataaataagttgtattccacactctaagaaaatgcagtcctctatttagcctaggcttgacaatacttaaattgaacatttaaactaaaggcttactccctaatctttgggtggctttcctttnnnnnnnnnnnnnnnnngttttcttcattctagaaatttattttggataaatccgataacatatatgtcctcaatctctttgtgctcttccataacttacttcctttttgtctgagcaatgtgaattgaagtctctttagtaccacatctaccatagtgtaattagttttaattttcacatgaatcaaaggtttcctttcatgtctatttacagtccaattgtgccaaactcttacttgtgtgctgactaacaaggcatttaggtgtgcagcatcctagagtgctccagggcagtgtcagcgttctcgggagtaaaaggtgccacttggtagcaatgatattccagaattaaatgggtttttgttgccatggagactgcatttatataaatgtagcctgtagcttaagttaactaaacctaatgctgctgttaaaaacagtttattttaatattaaaatacagttgattagcaacagcggtgctgtattttaagagacactttattggaagtgcaatcatagttatttgttttcacaattttacagtgcattctaattactgatgggtgcaattacttttaatcgtgttttataaaatagaaaaaa

SEQ ID NO: 242457 - DNA, 885 bp, Homo Sapiens
ttgggtgatgcccaagatatgccgcttgccccgacatgagtatggctccccagggatcctggagttcttccaccaccagctgaaggacatcattgagtacgcagagctcaaaacagacgtgttccagagcctgagggaagtgggcaatgccatcctcttctgcctcctcatagagcaagctctgtctcaggaggaggtctgcgatttgctccatgccgcacccttccaaaacatcttgcctagagtctacatcaaagagggggagcgcctggaggtccggatgaaacgtctggaagccaagtatgccccgctccacctggtccctctgatcgagcggctggggacccctcagcaaatcgccattgctcgcgagggtgacctcctgaccaaggagcggctgtgctgtggcctgtccatgttcgaggtcatcctgacccgcattcggagctacctgcaggaccccatctggcggggcccaccgcccaccaatggcgtcatgcacgtcgatgagtgtgtggagttccaccggctgtggagcgccatgcagttcgtgtactgcatccctgtgggaaccaacgagttcacagctgagcagtgtttcggcgatggcttgaactgggctggttgctccatcattgtcctgctgggccagcagcgtcgctttgacctgttcgacttctgttaccacctgctaaaagtgcagaggcaggacgggaaggatgaaatcattaaaaatgtgcccctgaaaaagatggccgaccgggatcaggaagtatcagatcttggacaatgaggtttttgccatcctgaacaaatacatgaagtccgtggagacagacagttccactgtggagcatgtgcgctgcttccagccaccatccacca

SEQ ID NO: 242458 - DNA, 241 bp, Homo Sapiens
ggccaggcaacttatgggtaccaccgggttctcgcgggtcttgcgaacgaacttttccttgaaactctctggattcctgtaaacagtggggctcagcccctcaatgactggaggcttcgatggttcaaaggggacctccggaatcacagggccgggagtcgccatgtccgggccacagcagcaggagaaaatcgggactccgacctcagcctcccggtgaaggtcatgaaaggggcgccaa

SEQ ID NO: 242459 - DNA, 1440 bp, Homo Sapiens
  misc_feature (523)..(564): n is a, c, g, or t
actttgtacaaaaaagttgggatttggtgcttccagatgtgagttatcaggtggaatccagtgaggaggatcagtctcagactatggatcctcaaggacaaactctgctgctttttctctttgtggatttccacagtgcatttccagtccagcaaatggaaatctggggagtctatactttgctcacaactcatctcaatgccatccttgtggagagccacagtgtagtgcaaggttccatccaattcactgtggacaaggtcttggagcaacatcaccaggctgccaaggctcagcagaaactacaggcctcactctcagtggctgtgaactccatcatgagtattctgactggaagcactaggagcagcttccgaaagatgtgtctccagacccttcaagcagctgacacacaagagttcaggaccaaactgcacaaagtatttcgtgagatcacccaacaccaatttcttcaccactgctcatgtgaggtgaagcagcagctaaccctagaaaaaaaggnnnnnnnnnnnnnnnnnnnnnnnnnnnnnnnnnnnnnnnnnncaaaaggtcagctcaggtatctcctcatggaaacccttcttcacatccagaggtggtcggcttccttctctattctaaccctgggctttgtacacaggtctgcatcccctcctagcatctgtgagcttctctcagggaaaagctcattgatctgcatccccaagacctgctggggaagaatctatccatctaaactcgctttaatttgacaaatgaatcagttaagagtaggaaagctgcctatgggcactgctcaatgcaacgtgagcaacaaagggagacagaactgaggccagaaaggtgaggggggacagaggctggcagggaggggagcttgtcagtgcagactccaggaagaatctatacagaaagttactgagcggcctgagtcccccaagtgagggctcgggacaatctcccgcctgggtgagagaatagggagaccctgaaacgtctctgcagcctcgggctgctccagaagcgcccacagctgcagggttttggtgtggatgggacctgctgacagggatgcggtgggaagagcccctcggcgcccgttctcccaggcttccccttggccaagggtgctcctagcacagggccatgaaagtaagatgaagaggcttgtttttctcctagataccagcgggcaagcagaaaacaagaggctcaagaggggcagcccccgcatagaggagatgcgagctctgcgctctgccagggccccgagcccgtcagaggccgccccgcgccgcccggaagccaccgcggcccccctcactcctagaggatggagcaccgcgaggctcacggcagggccctggcgccgggcagggcgagcctcggaagccgccttggatgacgtgctgtggctgc

SEQ ID NO: 242460 - DNA, 949 bp, Homo Sapiens
gggatgcagcgatacacaggtcaaataggcatttggagtgtggaagtgggtgcccaccctagtcggggagcatctcaggatgtcctcctcaaggagatgacatgtcaactgagcccagaggacaacaggagttgacagggaagagtatttcctagagcgagaaactggaggcagctgtagtgaggtgctgatgggttctggccaccacctggaccacctagatttgatgtttctccacccccacttagttgtgtgaccctggacaagttcctcacccactacgtgctttagaaccctcactgtgaaatgggagatgtgataggaatgttgtgaggattgtttgagtgaatacatgcaaaggacttaggacaagcctggcacatagttaatgctcaatcaatgttttctctcgcaactggagggaaacaaggtagtgggcaggaagggggagtgcgcagacagttcctgctaagccttgtaagttacccatggcccagcactgtaaccagagaagtgaggatgagacttccactttgagaaaggcctctctggccgcagcatgtaaaggaatgggaggggattagaatgtgtgtgcacggactaggtgggagctaactgcagggccagcatctgtggcacagattatctctcttcatcctgaacccctccctcttcccgtctcgaatccttttcccactcctgaccacatcctccacctgtcagaaagtcacagttaaggaagagatttccgagcacaccttggacagaagtcatgatgatggggcccatgactggcaacctgctgggagaggtggcctgcagtgtgtctggagtacatgggggaccccgggagcatcttctgtgtctgtggcccctggcaggcctgcatcacttggtgctatgccactatcagatccaccacaggagccatgtgctattcattccccaa

SEQ ID NO: 242461 - DNA, 1420 bp, Homo Sapiens
  misc_feature (213)..(273): n is a, c, g, or t
tcccttttcctctcaccagtgaacagcagtgaggaaacagactctgggaggaacgctgttcaggatggctgctgcttgcatggcatgaggctgctgtcttgtgggtgctggcagccacaatctccatttttctgaagaccaccatttatggctagatccagtagaggtccagaactttcccaacactgctggagaggaagtgtttcacagtcnnnnnnnnnnnnnnnnnnnnnnnnnnnnnnnnnnnnnnnnnnnnnnnnnnnnnnnnnnnnngagtggctctatgctaatcttagggttccttctctgcccttttgggtaccagagacagaccctaggaaaggaattctgcagacagtcttggaagcaccttctctggcacttaaggctttttcccgaatttcagagacagaaacatacccatccttgagcaactgcagtgaggcagtgtggaattctagggtgttgatagctgtgagctaccaggcctgttggacatttgcattctggcattttaattccttgtcctaagattttgactctttgccatgttcttggaactcctggatctttctggagtctgatagcggatcaaaatctcagctccattcagcaaacacagacgcttctgggggagagctaatggtcattttttcatcatggatcaattgttcaagatcaagcacctttctgatcactcttgtccacagagaaaaaaacacattactccacagttggcttctcagatttgatgtctagttgtcaacctgagaccttccttggaagcatggcttctgcacaagtgggttacattgactgtaccacagtggctcttaaaacaaggtttttgacctaaggagcctgttctccaggctgacctgaacccctcaaagacatggcaagcaggtgacatttctgcccaggggatttgctgagagatctggaaggtacaaagccaccttaggcttcaatgggtgagtgaatttttaccacaaaccccaaagggctgatttgactttctctattatgtatatccaacagagagagcaggcttggggaaattttgtctggactcagaaaattcatcagtttcttgggaatcatcagctactacacttgaaagaccagagtatggttattccccaaccacaagttgggccttaattttcccatctgacctgtctctaacatgtgaatcagtcccaccttccctgaccacatgagtgaagtgtttctgtgatgcttggctgtagatgcagtgtgacaactgcctgaagcacatgatctcaggcaccagatggcactgctgctcagtagagccatatgctaacagccttcctagaggacactggtaacagcattctccccaactattaagctttattgttttgtttaagcaaagaccaaagaagcaacccaa

SEQ ID NO: 242462 - DNA, 1180 bp, Homo Sapiens
  misc_feature (996)..(1018): n is a, c, g, or t
ggttctgtctgagagaacccagcctaatacatcatgcagcatattatcagaataaaatttgataatgtatgtacaatgctgaacacagcatcttgtatttaaaaacatattcagcatcgagttactgtaactgctgtcattgatgcctcttcttctaaaatgagatgccatcacttgtaaaattatttttaaaagatatatttttaaatgaagaagtctttttatatgtcaaataatttactttagatgtttaaaatagtatagctcacaaaaaatgttggctcataacaacttctactgagtatgtaagaaaatggttttgaagttcaatctttttttaaaaaaaagatgaacgtattcaaaatttacatgaacactcagctatgtatactataaatattttccaaactccatgagctgattaattaaaacagatcctctagccaggaagacaagcatatgaatacaacagtctttcttttatcaattctcctgaaatatctagtgtagcacataataatttttatatatgagtgaaggtggtttctatgtccaattagcaataactgtgcctcaggtcatcttcattgactatgatactgccactctgaaaagctgtctacatccaaatattaatttaatttggcaaaaaaacaggcaggcttagaaagtgttttagaacaggacaattaaataatataatattttctataatatttcattttcttatttcttatcaagatctcacgacaatggatatagttgcctttttatcttaagaagtataaattttacaaacataaaaggtatgtctcccttcaatatttcctcttaatgctgagtgcaaaattggttcagaaagaaaattgctgacattacgctaggacgtgacttggcaactgattgcaacatatttctataggatgctgtgggatgtaccgaaaaaaggatgttttagacccagagagactgttgctctgttcccagggaaatggnnnnnnnnnnnnnnnnnnnnnnncttaatcttgagctctagttctcgacttatatagaacatggaataaagaaaaaggtttctgttcatctctatacttcaggaagtggagcaatattattggctttgcatcatttcatcaattaaggaaggtcttataatagcatacttcaactcttttgtaca

SEQ ID NO: 242463 - DNA, 149 bp, Homo Sapiens
ttggcttctttctaaagaaggctcgcggagcccggctggagaacctcaccctcgccgagcctagaaccgagagggggccaccccaggcggtcaccagcagatttgcccgcgcgttctctttctttccacccagttgcccttgcggccaa

SEQ ID NO: 242464 - DNA, 1324 bp, Homo Sapiens
  misc_feature (241)..(253): n is a, c, g, or t
  misc_feature (968)..(977): n is a, c, g, or t
  misc_feature (1075)..(1084): n is a, c, g, or t
aatttttaaaagtataaacacttccagaaggtcatacttctatcagaaaaccagtagtattcaactaggagcattaaaaaagaaaaacttatctagtataactcttagttgtatgcgactgaaaattaacattttgttaatcagtattctgtttaggaatttaacaatacataaaagtataaacacttccagaaggtcatacttctatcagaaaaccagtagtattcaactaggagcattnnnnnnnnnnnnncttatctagtataactccttagttgtatgcgactgaaaattaacattttgttaatcagtattctgtttaggaatttaacaatacatagaagatacatgcttaatacatcttaatgcaatttcaaatttcgacttgagagactatggagttccaggaaaatcagtcaagcttacaaagtactgctacagctgacagtactttgaatgaatggtttcattcaacaaacttggctaaagaatagcttctcccaggtattaggtgcaatgcatttctgaaaagtatcgaggaaaaaagcatctctcttgctgtgcttctagctctatagaacagagtttcatcaagggtgaggcaggcaaattaggggtgggatgttgagtatctagtgtcaaagaccaagaaagaaaagacagaatgagaagatcatagatgactacactgaagcatcaatattccttgacagaagggtatctgatgagagagaggacagagatatgagaaggcaagaatagcagaagtaaccagaatctagacagtggcatactgaaaatgagaagaaattttaaaaatcaatttattaattgaaaaaggcaagatacaaaatagtatttcctttaggattacattttgtaaatgtatagtcaaatgcacacacaggtgaaaaagaatatatgtaacatattaacagtggttattcctgagtggtgaaataatgacnnnnnnnnnngcttatctgtgttccatgctaacactggtataaaatgcaaaaactggtatgatgattttgcattggacagtaatgaacacccacaggattcaaagatnnnnnnnnnncagaaataataatcttgcaatgttaaccacaagttctgcttttctcagaatatgttctttagcactaatttatctctgaactaacttgcaaaggctgatttaaaccaatttatcaagtctaagagccccatcaatttcatcataataaattatcagaattctaaattatctggtctgctgggaatgaactaagggggccaaaaggactgttactgatgtgtgtagagaaaagaaagccaa

SEQ ID NO: 242465 - DNA, 918 bp, Homo Sapiens
gaggatgggacggcagaaagagaagaatgggacatgcttttgttccatttgttgttcccatcagcgcagccccagcaatgaccctaatgctggaagcactgggtcttgtgccagctttcttatggcactcctggaaccaccctcattggcagcgctctaccttggaagacccaccttctgagctcctgagttactggcaccagctgggcagcaccccatcctcacaagtgtgaggtccaattcctcagagcccctgctccacaattctctattctgataactgcagcctcttcactttttctctcaaaactagcaggagaaagctgcttccagacgttattatctctgcatcaccttggggttctctttgcctttccatttcatgaatgcctatttaaccaatactttataatcaattctttctgttgaaatgctgagtgtagtttctgatttcttactctaccttggctgatacaatgattcacaaacctctcttcctgctatgtgactcaccttttcactatctgagggctttcagaacagagacgtttcttaactgcaatgaaccagaatggattaatacatggattaataaatctttttttatattgtcttaatttgaaaatccttcttctactccaatatcataagaattttctcatattttctaaatttgttaaaaagatttttttatatttaggtcttgaatcctcttggaatttattttgtgaatgaatatctaattgtcctagcactcttttatcagagagtacaccctttcttcactggtctacaatgctgcctctctcatatatcaggtttctatctatggatagtcaatttttagaatccccattctcttcattagttttgtttgtgtacccttatgtcaatactacacggtcttataacatccaa

SEQ ID NO: 242466 - DNA, 1383 bp, Homo Sapiens
actttgtacaaaaaagttggctttggtagaaaatacacccaaagaaaattccatgaaagttcgtgaatggaataataaaggtggacactgctgcaaacttgagactcaggagctagagcctaaatttaacctgatgcagattcttcaagataatggcaatcttagcaaaatgcaggcccgaatagcattctctgcctatctccagcatgttcaaattcgcctgatgaaagacagtggcggtcagacgttcagtgccagttgggctgccaaagaggatgaacagatggagctggttgttcgtttcctcaagcgagcatcaaataacctccagcattcactgaggatggtattacccagtcgacgattggcacttctggaacgcagaagaatcctggcccaccagctgggtgactttatcattgtatacaacaaggaaacagaacaaatggctgaaaagaaatcaaagaagaaagttgaggaagaagaggaagatggggtgaatatggaaaactttcaggagttcatcagacaagcaagtgaggctgaactggaggaggtgttgactttttatacccaaaagaacaagtctgctagtgtcttcctggggactcactctaaaatttctaagaacaacaacaattattctgatagtggggcaaaaggtgatcaccctgagactataatggaagaagtgaaaataaagccacctaaacagcaacagacgacagaaattcattctgataaattatctcgatttaccacttcagcagaaaaagaggcaaaattagtttatagcaattcctcctctggtcctactgctactctgcagaaaattcccaacacccatttgtcatctgttacaacctctgacctctctccagggccttgccaccattcttctttatctcaaattccttcagctatccccagcatgcctcaccagccaacaattttactgaacacagtctctgccagtgcttctccctgcctacatcccggggcacagaacatcccaagccctactggcctgccacgctgtcgatcaggaagtcacaccattggtcccttttcttccttccaaagtgctgcacacatctatagccagaaactgtctcgtccctcttcagcaaaggcaggatcgtgctatctaaacaagcatcattcaggaatagccaaaacacaaaaagagggagaagatgcttctttatatagcaaacggtacaaccaaagtatggttacagctgaacttcagcggctagctgagaagcaggcagcgagacagtattctccatccagccacatcaacctcctcacccaacagctggaccactcagtagcttgaagaggatggatttggaggatgaggcagtgccactccttttc

SEQ ID NO: 242467 - DNA, 1815 bp, Homo Sapiens
  misc_feature (1179)..(1187): n is a, c, g, or t
  misc_feature (1568)..(1601): n is a, c, g, or t
tttaggacagattcgaaaactcagaagagatgacaaagaatgcacaaaagcatcacaaaactgttacctaatataaaacgccaagaactgagctacttgaagaagcacagctcagaatcatcagtgtaatcgcagtaacacacccagtgccacagggtgataaaaatggtattttaaaagaaaaaccactcagcaggacacaagaattaaagtaacaatttggtaagactcttagaaatcacagatgttgatagcatttctcatgataggggacatgtaaaacaagctgaccataataaatgattagttgggatacttttgtattttaaagaaaaaagataaaacagtgacacggtttcccttccagaccctttttgtaatgtcagcaacagtacatgatatagaacagtaagaaaataatgtctttgtagttgccaattgcttaaatctttacgaagaaaacatgatcatctttcagtcaactgactgatctgagtacatggcaccaaagaaagcccttcagaaaatagaagctaaatgacataaagtagtttggaaaatcttcaagcacctccctttattccaattatccttttccaaagtctggctttcttataatccatcactttgattacaaaacagctctcttctgggaatttcaaaacacttcccgttacgttaagggaaaatgggtacaccagattcatgggttacaggattgctttctctagacttggcttctctttaacatggctaaatggaaataatttagcttggttaaatgaaagctacttcacttacaggataatctcaggagacatgagtggagtttttcatatggaatttcttagtaaaatgtactgtttaggatatgagagacggaattaagataatgttttccagatgattttggcctgatcctaagaatcaacaataacaatcaatagcaaggaacattacacattcaaccctgagtgatgaagagagttcaggaagagagccccttaaactctgaattaagggctctttggtaatatcatatactataatatttcaaaccaaaacttcagaagggttcatgatcctatttcaggactttagaaaatatactttgtcctctggaagcaatttcacatatattattttgcccccagataagccacaactacctgcttaaannnnnnnnnaaactatggaattaaataaacatgcatctctagatttctagggcaacttttcatcatatctttgaagagtcatgacattaactctggtccacatacctggggcctaaaaaaatcaggtacatataataggaatcacatcatgagcctaatttcaaagccagtgtcttgcctttggactgtgtgtgtgaggcatgcctatttgtaaatgagctccactatcattggttttaggcaatagtgttttcttagcttagaaatttcttaccttaagaattcaaacaggaggggctttgtttagccttcttggtttaggcagggacaatgcaacacttgagaggcagcagtgatttctgagcaaaattctaagatatattcgatagnnnnnnnnnnnnnnnnnnnnnnnnnnnnnnnnnntgccccctaattttattttgttttccctcgttgtgatcaattttaaaagacagttctcaagcagcacaaaacggtgtaacttatgcccctcccttatgctccactaaaacaagtctcttatgtaaatattagggtcactcaattccacaccttagaaccactggggttaaaaggcaaccttctgcagataagtggtcttaacaaacaaatccaa

SEQ ID NO: 242468 - DNA, 552 bp, Homo Sapiens
  misc_feature (215)..(233): n is a, c, g, or t
atcgggggtgggtgtggggccccagagcctccaagggatggagctgttgaagggggtaggggtggcccaggaggagaagggggagggactccctggggaaggggatttggggaggagctgtctgggcttcgggagtcccgcccgctgtcgcccatcccgtcccgtccagcctcccctggctccggctccggggtttgttgttctccgcctgccannnnnnnnnnnnnnnnnnntgcgggatccagccagggccgtcgccgccgccaccgggacgcgaccccacaatgcatttcttttcgcacccccaccggcccacactgccctgcggcatgccgctgagggaggaagggcgggcgagcggcccaagacatgatccctggctgagagtagggataccgaagaggtcccagggattcccaaggattgatcggaggattagctgagcacgaggaagcccctgagagaaagactctggcctggattgggtcgaattaagcccgtcgctctgctcagtaccaaaatgacagcgccaatgtggcccatctttgccaa

SEQ ID NO: 242469 - DNA, 1266 bp, Homo Sapiens
  misc_feature (922)..(1029): n is a, c, g, or t
  misc_feature (1034)..(1065): n is a, c, g, or t
ttggcttctcactcccagtaactgacttagacctctgtattatttcctttctttacctttaggaatgcatggttatgaaacaagactgaaagcataatcttcccacccttccttatccccctccctcatttaggctttgcaggcctaattttttcatcccctttactctgccaacttaaattccacatccttaggccgagtgtggcaaaggagtacccactgcacaaatgtcatcacctgaaggctttcatttatacagatcattgatcaatttaagaacttctgaagggtgctaaacacaactctatcctgctgggtaagctggccggaagttcaggggctctcacattacaacatgaattagattaaactttaattttcccgataatggctgtgagagactgcacatctcccagttctgtgccttaattatttgactttcttgataggagtgaagatagtatctcaccttggaacggggcacagaaggcagtagatgaccacgatcgttggcaataatttgagtgtagccttcatgagaagagatgctctggggtacaagtgggagagataaaggtttgtgaggggaaaaagggaagtatttggggagcttggtcagagaaggatatgggagtttagagaatgctaaaaggagttaattgacagggagagcatgaggctatcttgtaggtgcactgaacatggaatacctcttttgttggcttagtgagagaccagttctgcagatacttgggatgagaaagccttttcatactgtgggagagaaagataagtagccctatgagacttcaaggccccaaacccaggaaatgaagactagcacaattctttagatttgaagaccaaaggcctgaccaaccatgtaggctttaagtcactatgacaagggtgtaatttgttnnnnnnnnnnnnnnnnnnnnnnnnnnnnnnnnnnnnnnnnnnnnnnnnnnnnnnnnnnnnnnnnnnnnnnnnnnnnnnnnnnnnnnnnnnnnnnnnnnnnnnnnnnnntgaannnnnnnnnnnnnnnnnnnnnnnnnnnnnnnngagataggatcttggtctgccacctgggttggagtcagtggcatgatcctagctcactgcagccttggacacctgggttcaagcgatcctcctccctcagactcacaggtagctgggactacaggtgcatgccaccatgtccagctaatttttaaatttacttgtagagacgaggtctcaccatgttgcccagggtggtct

SEQ ID NO: 242470 - DNA, 1131 bp, Homo Sapiens
  misc_feature (316)..(334): n is a, c, g, or t
  misc_feature (662)..(671): n is a, c, g, or t
gaggtgatttcaccattttaaaattatcatcaagagtgtgaaagaggaagatgacacacacgtgggaaggggtggaaatccaaagccccacatttagggagtctgtgacaaaataaacatctgccaataaagctacgagttggtgttggcatgaatgtgctttgtttattcccagcaggctttggctcgtgtcacataaggcaccaacatccttttcaaggtagtaaccatgtagaatcaactcaattgtaacctgaattcataagcttaagtcaccaaaagacatcactgggtcataattatataggttcccctnnnnnnnnnnnnnnnnnnntcaatttgtgctatgtagaaaaagaaacaaaaggtttaggtgcctttgccttgtgcaatggatatttcatatgtttattaattggtttcagttaatatgtaatatgaaggcatgataaatgtgtcaaactgttctcttgtttcagatacaattcttggcatttcaatataggttattatctcatatgtcagacttgagtccagagaatactagaaggacatttaatttcctttcctcctccttcctttcactactcaattcaaagaaaagttatgagtacacagctaggaaccatttttacgtaggcatccatctgagcccatcttgnnnnnnnnnnctaaaacaacaaaaagactaaggacaattacataatgcattcccaagccttttatggatatcagggcctggggggactatctggcctatttgggttctttcattcaccaaaattctattatacatgccaagggttaaagggaacaccatcagtcaagagacggctgggccctagaatggaatctattagcataaaatggaacagtgggacccaaagagctatcagcaaaattccctttgtaacagacgtaaaaatcatgaatttgaggggaaaaataaactagttttggtgggatgcagtggctaacaggaattacttattagaaggtaatgaagttgctaaattttccttgtttttgatccctgtgttctgttggtctcttgaagcaatctgagtgggaaaggaaagtgaaagaaatgttttatgccagctgcctcttgtattcccattaatgggccaa

SEQ ID NO: 242471 - DNA, 796 bp, Homo Sapiens
tttgtacaaaaaagttggatcatgagggagagtgcgttggagccggggcctgtgcccgaggcgccggcggggggtcccgtgcacgccgtgacggtggtgaccctgctggagaagctggcctccatgctggagactctgcgggagcggcagggaggcctggctcgaaggcagggaggcctggcagggtccgtgcgccgcatccagagcggcctgggcgctctgagtcgcagccacgacaccaccagcaacaccttggcgcagctgctggccaaggcggagcgcgtgagctcgcacgccaacgccgcccaagagcgcgcggtgcgccgcgcagcccaggtgcagcggctggaggccaaccacgggctgctggtggcgcgcgggaagctccacgttctgctcttcaaggaggagggtgaagtcccagccagcgctttccagaaggcaccagagcccttgggcccggcggaccagtccgagctgggcccagagcagccggaggccgaagttggagagagctcggacgaggagccggtggagtccagggcccagcggctgcggcgcaccggattgcagaaggtacagagcctccgaagggccctttcgggccggaaaggccctgcagcgccaccgcccaccccggtcaagccgcctcgccttgggcctggccggagcgcagaagcccagccggaagcccagcctgcgctggagcccacgctggagccagagccctccgcaggacaccgaggaagattccgggagacctgggggctgccagagaagctctgctccaaatgga

SEQ ID NO: 242472 - DNA, 1513 bp, Homo Sapiens
  misc_feature (657)..(672): n is a, c, g, or t
agaactgaaatgtctcctcacccagggtggttattgggcccaacttgggatggggttgagtacgaaggttaaaaaacatatactttggtattatattggtcattgtaatagcagttgtaaaatatggggggaaaagggatcatttgctttcctttcatggtgttaatgtgtgcctgaatctatagccgctaaaatgtaaggctgtccacctgacttatttaaatattatcagagaatagaaagtaatcactttttaagtgtacctatgtgctgccccttaaaacattcatggcatctggcaaatagacccttgtaggctggcctggcatattcagatgttgccgcatcatcacagagaaggtcaaatgaagatgtaaccattgctgctcatgtgtcttctctaagcaacaaggggagcgggatgtaagagagaagttgctaatgatactgtacaaaggatggattaaataatgaagtcaatttcattgatagaaaatgcaaattttaagattctcagtgtatgaggtctcagcctcgggagcatttattttttactttcctgctaaaaatccactggggaggtataaaattcactccaaagaagtttgcctgggccaaaagcctccaggttccttctgagaacaaaatactaatgannnnnnnnnnnnnnnnggctgcttgggagagactttcagcattctttcacgatatccagatatgtcccttcagcacacacactcaactttctcatctggttcgtttcatcctcccgaaagaacggtgctctcccactcttactctatttcaaagagctactctgtctcaaccacagcagccctgccaagaaaaggcaagatgaaaggctagagcatgtgctaccttgagatttcaagaagtgtcctacctcagctgaagatggagaaacggggagtggagaggggatcagcccagggtaccatgtgatgactaatatgccactcattaagggcttttacctcggctgtccacatccagtcatgcatttggggccaggcatgcctgcgaaatgattgacattcctgtaggtgccccatagaggtgtggcattgagaaattatgtctggaaaatacagccagtgtagtgaccagctgagttaccatatagcctgatgattccccttctgtaacagaaggtgacaacaactttgtgaactttctatatctttatctgatgccccaagtggcatcttctttatgtacatgccttagttgagaatatgagactgctctaatctttgtgaatgccttcacacttcagctgaggatgtcaccttctctgtcactccccatcctgcaacctctgcctttgctctgtctaccccagcaattttcatagtgttatccaggtactgtgctaaaaggtcagctcttctgtaaaatgccatgcttcgcagcttcaaaaagcaaaattctgtatttcatggagggagggaagggtcattctcttctaagaaaaatagactggacaggcgaa

SEQ ID NO: 242473 - DNA, 1053 bp, Homo Sapiens
ttggtgcatgattagcttctagtaccccgaaagcttagagggcaagtagaaggaggagcttgctttttggggaaactttaatcagcagaggtaggcctggggaggcctccgcaggaccatatgaaccctgagcccactgtgggagcagagcagccccctcctcacccaaggaagcttctattcttgactgtcccccttgctgactgagtgacctgtgatctgtctctagtcatttcttgctttgagccttgggcttcccagttcccacgtttcctttatgggaatgtttatggagatcaagccaaccatgcctgttaagggtgggttatttttctagagagtttgaccacctgagctaacatccttgcaccctcccacctgtccatctgtctattctactcattcatccatgtagcaaacatttatgtggcatctaatgtgtccagccctgtctgaggctctgaggatacagcagtgactcaaacaacattcttttctttcatgaaacttatgccttggggtgaagaagacaccccaatgaaacagatcaactgggacaagagggttgaaggaactacacaggatcaggagacagaataatatggtggcctctttggtggtagtctgagaagtcttcttggaggaggtgacatttgagctgaaataagaatgataacacagtcagacatgtatgtgactgtctggggtgcaaacatggtacaagtgagcttggtgagttggaagcccagcaagcagcagttgctatggattaagctggggaggcagaggtggggaggcagcagggccagaatgtagagggcaggaatgtgtgcagaaataaggggctcaggtaaggcggaaccttgaacttggggtccaccttggggtctttggggggagtggtacctcaaccggcagcatctctggtcactaacaccctgtgggacctctgctcagagaggctcagagtggaagagacaggtccgtctggaagggacagccaggacccggtgcagaggcagctgtggttatctgcaaacagctctcttcctt

SEQ ID NO: 242474 - DNA, 2447 bp, Homo Sapiens
aaagcaaatgagaaaaataatgtcaatcattctaccccaaacctagttcttaggagaaaattcgcaggaagagaggtatgagtagtttcacagaatacattttcaagaattttttaaaaactgaaactccaatgcccagaacaagataaacagtatcttagcagttagcactgttaataaatctcagatacacaaaaatcaagttccagagggcaaagcatttaattacagtccacaacgagcactgttgtgattcatataaaacatagttctctccaatttctacacaaaccgctcttttaatttatttaattagatgaacaatgaaatcgttttccttttcagcatttatctaagatgtagaaataacaaagtagttgcaataaagtgtatgaaatatttaataagaatgtacgaacatataaccaaaataaattgtgaaaaaagataaaagactttcatcttcaaacaacccatttttctaaaatgaaaatagctttccaatggagaaaatatctgtggctgaaatacaactctcaagcagtgctgaagttttttgcattgtctttggaatgagaaatgattacttaacattaacttaaattaaacagcatatacaaacgttatattgcttttgaaattgaggaggcagtatctagtgatcggtcaaagcaaatctgtattcatgaattatcaaaagacccacaacatagtcacctcttgagtctaaacaatccttctcttaaacaaaaatcctgtactgtcaatcctctaagattgtagtgataaaaagccttttcaaatcttatcaaatgaaactgttgccactcttaaattacacaaccgctgtatttcagtgttccactgactcacaacaccaaaaaggcactgtatatatatatagtttaataggaaatacttattttaaaagactgacccctttgtaactacgctgatttgtaggaaatgttggggatgtttcaaacgaagacaaaggggccatgtaaaagataaaattgggttttcatgatctctcatctatctctccttctgtattgtttataatgtgacacattttcagagcattgactagggaaagtaaccataactagagccctgtaaggccaagtttttcatcacaaggaaagtaaccataattagagccttttatgacagtgagaaaatttgtttttcatatcatctcacctatctccccttccgtattgtttataatataatgtgacacatcttcagagcactgactagggaaatcataattagagccttgtaaggcaagtgttttcatgacaaggacacttaccaaccagaactcatgtggtcctcctgccttagtgtcctgaataccaaagaaaagagtatgaaagggtcaagaatctcaattttctcctctggcggctgcacttgtactctgtatgaagacttttagtaaacaggctcctgatcgaacaactatgccaaaaagcctccaaataacaggactagcacgtatcaatctacgaaccagcatacggatcttttattctatactactactgctaacaaagataatttcaacttcagttttaaaaacctagatataacactttcttatgaatgggcccctctttgtttaaaggccaaaatttcacataatcgggacaggaggaaattgatactacaattagtccatatgaaaaggacttcaaatcaagtatcttaaacacattattaaaagtggtttctggttttcgataccatccaaacaacatgaactatttttaaactgactaacataaattgtggcggtcaaaccaaaaaggctctggtagataaaggactccatagtttatttttatggcaaaagtcttattccacacagttttaagtgtgacattagaaatcaaagtttgaggttatagcacaaacgaagtgtggacttttatatttagggaaaaaaaccaacaaaacagttctgctcatttacaaatgagtcaattagacaaacaaagcagcaacttctgaagcaggactgtctatacagcaaggacccttaagaagcaataaaggtacatacaatgaatctgtatacagaaattttattcaattttaaaagaaaatgaggactttagacaaagctttaccctataacaaagcaaatctgtccagctttaaaccaaattctgagagtagccaacttctattttcagcagttggcaagagcaccctcaatgagttctactgacatttctattttcttcatcccatatggtataaaacaaaaccaatctagactccttgataagctttatgtggtcatttgagttttacaaatggtttctttaatagtatgccaaaatcatttatgtgttctctccagatagctttactgtaacatacagcaatgtttatcctgtttgagggagtcttctgccaacttttttgtacaa

SEQ ID NO: 242475 - DNA, 511 bp, Homo Sapiens
aacattgtttttaatatatgacttgtaaggcaagttggggggcattaattccttattaagatgtactgagttgaataaaagcccctccaaccatcaaccccccaaaatatatgtccaagtactaagctccagaatttgtgaatgcaaactaatttggataaagagtatttgcatgtaattaaggaaagattcttgagattagatcactataaattacccaggtggcctttaaatccaatgaccagtgtccttctaagagacagaagaggagacacagacacagaggaaaaggtcacgtggagatggaggcagagaatgtagtgatgtggccacaagcccagggacacctggagccaccaggagctggaagaggcaggaaggatcctctcctagaacctccagggggagcgcacccctgcccacaccttgatctcagattcctggtctccaatactggaaaagagtaaacatctgttactttacaccatccaagtttttgttatttgcccaa

SEQ ID NO: 242476 - DNA, 887 bp, Homo Sapiens
aaattgatgaagcaatgctttccctaaaaaaaccaactttgtacaaaaaagttggaacttcccgtcccggcggctctggcacccagggtccggcctgcgccttcccgccaggcctggacactggttcaacacctgtgacttcatgtgtgcgcgccggccacacctgcagtcacacctgtagccccctctgccaagagatccataccgaggcagcgtcggtggctacaagccctcagtccacacctgtggacacctgtgacacctggccacacgacctgtggccgcggcctggcgtctgctgcgacaggagcccttacctcccctgttataacacctgaccgccacctaactgcccctgcagaaggagcaatggccttggctcctgagagggcagccccacgcgtgctgttcggagagtggctccttggagagatcagcagcggctgctatgaggggctgcagtggctggacgaggcccgcacctgtttccgcgtgccctggaagcacttcgcgcgcaaggacctgagcgaggccgacgcgcgcatcttcaaggcctgggctgtggcccgcggcaggtggccgcctagcagcaggggaggtggcccgccccccgaggctgagactgcggagcgcgccggctggaaaaccaacttccgctgcgcactgcgcagcacgcgtcgcttcgtgatgctgcgagataactcgggggacccggccgacccgcacaaggtgtacgcgctcagccgggagctgtgctggcgagaaggcccaggcacggaccagactgagggcagaggcccccgcagctgtccaccaccacagggtgggcccccagggccattcctggcacacacacatgctggactccaagccccaggccccctccc

SEQ ID NO: 242477 - DNA, 1676 bp, Homo Sapiens
gaataagcttatgtttgcttaatgcttggtaaaattcctggtacatggtaaccactaataagtggtagttgttggggtgatcaggcccaacacaggccgtgggggctacaaagtcgggcggggtcaaaggaatgagaaaagacaagttaagagtgcataaagtgggtccagggtgccagcactagattggaggctgcaaaggccctaagctctgggagcccacactatttattggtgatcaaacaaagaagcaggtggtgaggacgtgagggtaaacaggtgagggcatgaggacatgggggtagaaaggtagtggtgcattaagcgtagctgtgacagtttagcattttctttgacacatgtagaatatactctgctgcttgagatagtagaggacacgtttatgagtgaaaagcaaggaaccaacaagtctgtgcactttccagaggctatgaggggttttatgccctgagccctgggttccatccaagccacaaggggttttatgccctaggcttagatttgtggtgcggcagggcagccttccaccatttggcacagagcttggtgttccaaaggccacgaggggttttggaccctggaccccggacatcttccaagactcttttacattatgacagacaagccagtcctgcttcagctcttctaacaacatgtagtaataatgatatcatcaacatcatcttcgtcttaattattcaaggatgccaaggtacagaactaacctgttaatatggttaccatcctgtccaaagttcttctcccatgcaggacttccaggaatcatgagacagttgagcagaaagataccttttcccttctctactgaataaccaccaacattgagaatcagagagggaaaatgactcagctaatgtcttagcttgttattggaagaccccaggtctcatgacacatgcctagtcccatgacttttaattgtaagctcttctctttcccctcagataatgttccataagcattagtatgagataataatacactgaggaccaatatacatgaaaaatatcagactagaatcaaacaagacagaaaaaagatctgataacctaaagtgagatactgaacagtatgcagttttaaaaataaaaaatggtaataggatgttctaacaagagagttaagaaaccactgtgctactgagttaaatgttgatcagttggtctgtgacaattaaggaattcaagtattcagaaacacttcctgtgctggatgctctctgtttgttcttccaaataatccctcacttttccctgtcttgctctgtgcccaggaaggctgacatggacagattaaccaggctttccgccctctggcttggttcagccaatgggaagcaccagaggagaccatagggcacaaagaagcagccttgggagtattcagtaccccagtcccacgctatgatttggagggtctgcattcctctgcctctgggcacactctagtatagttacagctccctacacctgccacttgaggcccagaggaggtgatggctctctaactgttcctagttctgggtgcttcctgttccttgtggatttcccaactcctcacctttgtaaataccctcctttttcaaactctattcagttagcttttatcagcctgactcacagaagtttggccaa

SEQ ID NO: 242478 - DNA, 1101 bp, Homo Sapiens
aaaaagcagagcaacttggtacttccagtaaggtctgagcgttgggtgggtcccaaaaataaactgatattgctactgtagtcctagtcagaaagttcatcccatatgtactgagaggaagcatgtgtcacaggaaaagcaaaggtcctatgtgaaaatcccaattccagaccctcgttttccagccatgatggaataacaatcattggacttaacttcctgccataagaaactagaaaactgggcaaaatacatgaaacaattgctttcacacattggcaaacaggtaatgcagggctgtggcccctgagaggagggaaacaaatgagatgagcccataattgccctaactttctgcctggaggcaatttctagactgtgggtaagaggagggagaaatcacacaggagcttgttaggcttgctgaactgaggagacagagatgagaggagagcttaagcaggctaaggcagctgaagtttcagggaagatttgtgaaaaacaggatctatgctgaaaaagagttccagaaacctgcctaatggtgccctggagtctttgctgagtgctaagctgtatgtacacagagtaaaatctcacaagtttgggcaagaaatgaccagggactataagctaaatacttcccagagtgcatacaaggtcgggaaacgttcgaactgcaaccagcctgagtgaaatgtcctccctggggcacttagcagggcatgcagcagagatacctttaaggggagtctccctggcacgaatgctaccctagatctttcctaaaaaatttaagaaaggccttgaaggtgatccaaaagttacttagctgcctaccaaaccaaagcccaactttctttaactgaagacaacaaaaacaaattccactcagtaatgcaacattcacaccaattatatccaatgaaaaattactatactacttacaccaggaagcaggaaaatgcaactcttaaataggaggaaaattcatcaataaaaacagacccagaatgatgaaaataaatgaaactattaacagctactataactatatacaagtatttaaaacataaatataacatggagaaacatggacag

SEQ ID NO: 242479 - DNA, 1014 bp, Homo Sapiens
ttggttttttccttatgagcaccgtgggtttatttcattttcctacaccactgacccgaatatgcccggcgccatggggactccggctttgggagaagctgacgttgttatccccaggaatagctgtcactccggtccagatggcaggcaagaaggactaccctgcactgctttccttggatgagaatgaactcgaagagcagtttgtgaaaggacacggtccagggggccaggcaaccaacaaaaccagcaactgcgtggtgctgaagcacatcccctcaggcatcgttgtaaaggtagatcacagaaggccgctgaggggagaggccccgcccaagggttccacagcctccagagatttctcccaagtgtgaatgggatcagccgaagtgcattatttttctggcttgggccaccctctaccagccaggcagtagagagcaccgcagatctcgtcccatccctgagccgttcctccctaaggcagaacctcctacaacagcctgggaagcctgtttccaggatcttttggagccagggtatggctgccatccttgaatttggcagacagcactggtgcttggctgctgccccggaagcaacgtcttgacaaagctaagcagtggctgataaaggcaggcgcccgggcagcatggttctttcaaatctgttcccactgcaggaaggctgccgagatccccagcattgctatgggatccaagtccctgaggaggcggcaagcaggcatgggttgtctgctggcagtcccagcccttaactgtcatggctggttaacattagggtggccacatcctccacgcctctctgtcccctttggtaaatgtcggtgatacctcctcttctggacagagaggactgagggcgagatcatggaggatcatggaggccaggcattttccaacctcagaagaaaaaatgctgtgcacagctgcctataggagtcttcctttttacataaaaaaacaagtctcgggccaggcacagtggctccaa

SEQ ID NO: 242480 - DNA, 1266 bp, Homo Sapiens
  misc_feature (326)..(455): n is a, c, g, or t
gaaagaaattggagtgaaaaaagggaggaggagaggctgtgataatcccacagggatttgctgagcacttctgagaagccaggcactgttctaggtgctagggatacaggagtgtgcatgacaaagtctccactctctagcagcctagggcttagcgtttatccatccacaggtgggctggcatggggttggggagtaagagaaggagagaggtgggtagagctgtgttccgtacccccttctccatgcagatctctgcagtactcacccctcaggggtaccgagggggcagtcctggcaccaaggccatagaacatagaccctgnnnnnnnnnnnnnnnnnnnnnnnnnnnnnnnnnnnnnnnnnnnnnnnnnnnnnnnnnnnnnnnnnnnnnnnnnnnnnnnnnnnnnnnnnnnnnnnnnnnnnnnnnnnnnnnnnnnnnnnnnnnnnnnnnncaaaaaactcctggaagattgaatgagatcatctctgaaatgcttaacactgtgccctgcacaaagtaggtgctgggttatggcagctgcagttgttgtcttaccccctctccaagctgactttccttctttggaaatgaaaggaatcttgagcctccaggtgactgagagactcagaccagcggggtctgtggttaggtgtgtgagcctctgctctcacagtgtctgagaacattactggttttctctttcctgcctagattggtccctggcaggttgctgtccctcacatccctctctttccatggcaggagacagaggagctggaggaggagaagtcaggcctgcagaaggagattgctgagctgcagaaggagaaggagaagctggagttcatgttggtggctcacggcccagtgtgcaagattagccccgaggagcgccgatcgcccccagcccctgggctgcagcccatgcgcagtgggggtggctcggtgggcgctgtagtggtgaaacaggagcccctggaagaggacagcccctcgtcctcgtcggcggggctggacaaggcccagcgctctgtcatcaagcccatcatcattgctgggggcttctacggtgaggagcccctgcacacccccatcgtggtgacctccacacctgctgtcactccgggcacctcgaacctcgtcttcacctatcctagccgtcctggagcaggagtcacccgcatcttcctccgaaactgctccaaggctcaccgcaaagcagtaccagcggggacaatcaatcaaactccttggactccccc

SEQ ID NO: 242481 - DNA, 978 bp, Homo Sapiens
ttagagtggagagtctcactatgttgctcgagctggcccaaatcttactttagaaagaatcccatcttactctggagagtcccaatcttactctgagagtccactctcagtttttcagtccatataacaaccaatcaagtggcaataatagcttttaaagatatttcagactttgcaaacaaactgggtgttccctcttctgagcatccatagtaccgtgcactttccctgtcacaccttcctgtgactaagtgtctgtctagactccccgaagagcctacgagtgaatgtgaagtagctacaatgttaagcacccatagatctacatgcccagggctcagaagataatcaatgtctgctcaatatcttcaaaaatattcctttgacctagtaatgtgtagatggcttaatggaaaacaaacctgctgaaaataccattgacaatgaaaatggctgtaaaacaatttggacgcgcaaggagaataagatgggcattctctagagaaatgtaaaaccaaagtacatctctgactgcttaaaaaccaccgtaaagaatttcaattgccaccagtactgcccagagagtgtcaagaagacacacatgccaaatgggagttctggcagaaggtcaggaagaaaaggggaactccttggcctcagacccaaggcctcccttcaaacactctcagcagagttaggaaaacagccaaaggaaccctcaacatcttgaaatgggtatgagaactctaaagaaatattctcagtggagtgttgaggcccaagggagatgaacacaggcttttcacctaggttcttcatttcccccttgcccagcacaggaagccagccaagataggaaactccctgagaaccacagggaccagacagaggccaaagtgttatttcagtcctctctgatgagaggaagagtcacataatctcctctcaagagataatcaactttttaagaaatattta

SEQ ID NO: 242482 - DNA, 886 bp, Homo Sapiens
caaacaaacacaaaaccacagaagggttactaataagcagggctgagaatactcagaaaactgacaggtgaggttcaacataatataaggaaatgtatttatggaagaattatcaactgatatgcctgaacactgttagaactcaggaaagaaacaagcattgctgagggggaggagagatcaatgtgctgctgtggccaaaagcctaattgccctgtgggcatcatcaggaagggcttttggagataacagagaacagcactttatacaaaaccatggatatgtcttgatcggattatctgtgtttctagtgaccttatttacaagatatatgataaagggaggaaaggtccagagaacagccaaaattatcaggggatggaggtatatccatatgaggacacatttttaaaatatagactctatcctgcaaagatgaaagcagaggggagttagatcaaatatccaatcaagagcaaggacccggtcctgtactactagctctagggctctatctcatagccttagtaaagaaagcacttctcatagcaaatcagaaatgtaaggagctcattgtctaagaagggatgccaccagaaactatacatgggtgcaggtttatgaggaatccttgcatgacggccttctacaaggaattatagaaaagtagggctacttggtaatatacaactgagagggtaactgtgtctctcaacaaactactccttagtgcctctttcaaaggcagaatgttgatctgaatggatcactggtcaagtatggcatctctaatgttcttgaatggggaggaatgagatctggtagctggaaaatataattattccacgttaggctcacctgaattggtttaaaatcatattctgat

SEQ ID NO: 242483 - DNA, 814 bp, Homo Sapiens
  misc_feature (639)..(692): n is a, c, g, or t
acaaggtctcagtatcatttttctctctttgcccatggcaagaccagcaacttaccatcaatataggtatatatgaaacttgataaaacttttcaaaaaactcaacattaagggctctaatcagaaattctcatcaatttgaacctattccagaggttgaggggagagaagtcatactgaactatataccagtgttaagccaatgttacttttaattattttttgttatcctgaaaaatgaataatatgttgccatgtgcaggtcttgccaattctgctaagtctgttcatgtgaaatggatgctgtgatatcctcagaaagtttgtcttaggtatgttaaacatggtccctgccatcttttctactgtgtattcctatcactggcatacccaaatcctttttaatgatgcagaggcagcttagcctgtgttcaaattatatgaatcctaagttagaagggggtccacattacaaagtttaccacttacttgaaaaggacacttacttaactaggaccaatatttgacttccaaacacctttactcactcattccttggtctcagcagcagcacgtcatataggtagttactcatggaggcagaagcagggggaagaaggaggtgtctctgtgagctgnnnnnnnnnnnnnnnnnnnnnnnnnnnnnnnnnnnnnnnnnnnnnnnnnnnnnncctcagggcttaaaggaggggatcgctcctttatctcaggaggcagttcttgatacagtgtttcactagccacatgattagctggaaaataaccttcctgtccctttcctatgctgccccaa

SEQ ID NO: 242484 - DNA, 1201 bp, Homo Sapiens
tatgggttcccaccaccgccggggcctgcctggcctgggtattagacacactcctggccctcggcccctccctagtcccacccacgctcaacctttggcccagccatcgccgagattcgagggtcaactggaagtggcgttggtgctccctgtggacttgcgtcggcacccagaggccttggagggacaaggcactgggcggtgtgactggtcatggcacttgctggccttctggccagaggtcctcctggaagcccctcctttcagtgcctggctgcagcggtgctagccaggctggagtccagcacctctcgccggtgtctgtgtgagtgagcgcatgtgcgcatttatgagcatctacttgcggctgcactcagggccatttgaacccagtgcagagttatctctatgaggaggccccgggtctccagccccctccatctcccctggggtttggcatatttgacatggagccccatgccaagggatgcagctgttggtgtctgtccagtccattcaaggctagcctgcccatgcactgtggcaggggttggattggagggagagaacagagttgggaaaaacaacaggtttgagtcctataaagccataatttaactccagtagctgatgtcagacaagcttgtcctatgtcctatttgagtggcagcagcgccagcccagcaagaaggctgggggttgtcaaggttgtccccagaccttgcttgcagtggttggagaacccagggggctgccttgggccctctggccagagggaagcgggcagctctagccctggagattgtggtcacattggggcttgtttaggattggagggccaggtcacctccccagccaccctcccttctctcctctggggtccccactttagggcgactttgcccgaggcccacgcatccatccactcctttagtgccttgaatctcattcacaagcagccccctcccttcccctccccttctcactctgttgatgtaatcctcccacccccagtgtccatcctaagacaggcatcaaaagaggccctaactttacttcccaaatggtgctttttaaaaaacaccatcactacattagggggcaatttttttcacacctccctgtcttcataatgtaaaagggtggggattatgtctctgttttaatatgcagcccccctgccactgtgggggtttggggg

SEQ ID NO: 242485 - DNA, 1048 bp, Homo Sapiens
ccctcctttttctttttctccccaatacttccagccccccatcatcctgagataatgaagccggttcatttttggggcacaaaagttcgaaagggaggcctttccccgccatcccgcataagacgatgggacactgcagagcgtctggattcatacaagtgaaagtggctttcatgtagaacattaaacattcccataactaaatcgaatgagatgtaatatgcaactgcttaaaaaagaaaaccacagaaaacccatacccacaaaacccccaaaactactgggaggacatttcatctgtgatccgggggtaggttttctcaaaggacttccttcttcatgtcctgagtaaaattctcaccctcgctttcgccctgcctctttaagttcacaatggagtagaggccccaaatctacagatttcacatacactttctacatacttccttctcaaacttaacttactgtccccgccaccccgtgtcacctcaccccactaaatgagaagcgtttctccacaggctccctgcagctcacctcaagtttcctaagtggactgaagctcctgagaggctgggagactctgcccttagcagggcgccagagcaggacccaggaccaccgggagactctgcccttagcagggctgccagagcagaacccaggaccacccatccttttgatactcagtgttagcgtgatttcttctccagggaccccacatggcagtctgagccctgctgggcacacagtgctcatttccgttcccagcatgcagtgttacccacagtcaaaaacatccctgcctctctgaacatgctccgagcctccctaccttccaggctccacctgtccagccaggtggcatcgacgccccagcagagatggacgccaccatttccaacctgcacacgccctctctcaacttatctgatttctttcatacgggactctgacctagattttaggctcctaacggccgtgtttaatcacctttccatttttcctaatgtaaagcaggggcacaaaggtggttttaagaagccaa

SEQ ID NO: 242486 - DNA, 1337 bp, Homo Sapiens
ttggggagcaagggccggggtcctccacgcctcccagttctccgacacttcttgacgctctgctccagaacctttacgactttggaggtacagaaggtgaaacagaacagaagaagatcataaagaaaagggaaaacaagaagagagatgtgatggcttcagcggccttggcagcagagccatctcccctacctggttctctcataagaggccagaggaagagcgcttcgagcttcttcaaggaacttagagaagagcggcattgtgctccttctgggacccccacaggaccagagatccttgctgctgcagttcctccctcttccctaaagaacaatagggaacaagtagaagtggtagaatttcacagcaataaaaaaagaaaattgacgccagatcataacaagaacacaaagcaggctaatcctagtgttttggagagagatgtggatacacaagaatttaacctagaaaaagctcgtttagaagtgcaccggtttggtatcacgggttatggaaaaggaaaggagagaatcctggaacaggaacgtgccattatgctgggcgctaagcctcctaaaaagagttatgtgaattacaaggttttacaggagcaaattaaagaaaaaaaggcagcaaaggaagaagaaaagagactggcccaagaaacagatattttcaagaaaaagaagaggaaaggacaggaggacaggaaatccaaaaagaagtccgctcccagtattttgtcaaatggacggattggacaggttggaaaattcaaaaatggaacactgattctgagcccagttgatatcaagaaaataaattcttccagagtggccaaatgaagtactttgtcaaataaaacgaggatgggaacaactgagtcaactgcagcggccctggaccctgtgcgactctagatagatcgttcttaacacgcatttcacagactgctttttcattttagaaaaaaagtcaaacagaagtaacatttctagttgccgaagtgtctgcttcatggtgctgaacgtgtcaggcccagtgcagcatgaatgtgaagtgaacccactgaaaagtgatttttaatgttctccagcaaacttcactcctgtttcatgttcactggtatttggtgcatttgcttgtaatacagttttttataactttactgttttgtaaatgctagtagtttacattaaattgccttatatttttaatgatttaatgttatgatatcatgaaagaaccaagaatctagtaatttatcagttttgtggaaaagcagttttaaatttttaagcctaccatgtgtacaaaatctactttcataagaa

SEQ ID NO: 242487 - DNA, 1139 bp, Homo Sapiens
aaagtatattaaaatatgcctaacattaaaaaagttagtaggtgttaggtgcatgatcccttcatcaataacatggaaaaaaatcaaaataacattacaccacacacaattggcatatcctattgtgtaagcgagtgcagaggttgaacacatcacaatagtgctgaacacagaatcacaagtaatgtcaaaatgataacttccaaccaaaaaagaaacaatcacaggccaattacttatatacaaatcaaccctaaagacaattatgttccaaataaagatgtccacaaaagaaaatcaaagcaacattatacttatttacaaatgcaactagccatgtctttaacaagctataaaaatactattcacattttcaaacatacagtagtattttttgtttgtttatttcaaaaaggcagctaactttgaatgcagggatttaaataaaacattgatggcttaccagcaaggtatttttgcaccccaatcctttgaagatacttcacaagagagagggcttgttttctgcttacaagttaagaaaataaggaagtgagtacaaatgtatacaccttaagcctctgccttttcagtaaagtgactccctctctcacccaaactgatgtcagtaaattactttgatgcatgtataagatgaatgtttgagagtagatttaagatgactttttttgtgctatgaattgtcttccacattgatctcattttcatttgatcttcttgtaatggtgctcaagaaagagatgaactagtcatacaccatgggaaaatgcggtttcagcatgcagccacgcaatccctggtgctctcaacatgagaaggagacacaccagccagggagacaggcattcaaagttagctgccctcacacagctgctccgtttaataatcgacccatttaacagcagtaccagtttatgctacatatttcaaagtaccttactttaaaagaacaccttacatatctacatttagaaaataactttcgtagttgattactggagtaatcccaaaagggttcttggagtgctatggttgtagtcccctcactcccccctcccagcccctgagagatccagaaatatacaggaaaatgactctcacattaagggaaaagccaa

SEQ ID NO: 242488 - DNA, 1668 bp, Homo Sapiens
ttgggggaatttaggtgtagccagaagaaaatcaggtcctggctccccagaagcaagagagttcaaatgaaggaaggaggaggttcctggatgtggatgtcatcatttctgggaacactcttaaatggagactcagatttcttagccaaaatttagggaggatccagaagaaaccaaagacgaagcatcccagttcttgggtatttcctgaaacagaagaaaatgacaaaggcccaggaatcactgaccctggaggatgtggctgtggacttcacctgggaggagtggcagttcctgagccctgctcagaaggacctgtaccgggatgtgatgttggagaactacagcaaccttgtgtcagtggggtatcaagccggcaaacctgatgccctcaccaagttggaacaaggagaaccactatggacactagaagatgaaatccacagtccagcccacccagaaattgagaaagctgatgatcatctgcagcagcccttgcaaaaccaaaaaatactgaagaggacgggacaacgctatgaacacggaagaactttgaaatcatatttaggtttaaccaaccagagcagaagatacaacagaaaggagcctgctgagtttaatggagatggagcttttctccatgataatcatgaacaaatgcctacggaaattgaattccctgaaagtagaaaacccatcagcaccaagtcacaattccttaaacatcagcaaacacacaacatagagaaagcccatgaatgcactgactgtgggaaagctttcctcaagaagtctcagctcactgagcataagagaattcatacaggaaagaaaccccacgtgtgtagcttgtgtgggaaagccttctacaagaagtacaggctcactgaacacgagagagctcacagaggagagaaaccccacgggtgtagcttgtgtgggaaagccttctacaagaggtacaggctcactgaacacgagagagctcacaaaggagagaaaccatacgggtgcagtgaatgtgggaaagccttccccaggaaatctgagcttactgaacatcaaaggattcacacgggaattaagccccatcaatgcagcgaatgtgggagagctttctccagaaaatcactactcgttgtacatcagcgaactcatacaggagagaagcctcatacatgcagtgaatgtggaaaaggcttcattcagaagggcaatctcaacatacatcaacgaactcacactggagagaaaccttatggatgcattgactgtggcaaggccttcagccagaagtcttgccttgtagcacatcagagatatcatacaggaaagactccctttgtatgtcctgaatgtgggcaaccctgttcacagaagtcaggactcattagacatcagaaaattcactcaggagagaaaccctataaatgcagtgactgtgggaaagccttccttacaaagacaatgctcattgtacatcacagaactcacacgggagagagaccctatggctgtgatgagtgtgagaaagcttacttctatatgtcttgccttgttaaacataagagaatacactcaaaggagaaacggggggattcagtgaagtggaaaatccttccacagcaagtcacagcttaagtcctagtgaacatgtgcaggggaaaa

SEQ ID NO: 242489 - DNA, 1617 bp, Homo Sapiens
  misc_feature (415)..(423): n is a, c, g, or t
aattttcagttcacacaaccccaagggccctgtgtgcagaggcggccctcacacgcgcacagcagcatcaacagagctgggcaagggaaggggagagagagtcaaggattgaaatgaagggacttcaaaaagaaggaacaaactaaaaacccaacccacacacaatactgttaataagccagcgactctacacacacactccttaaataataaagtgacaggtcccggctggccccgcaagaccaccgcaagagggggtcccgccaccagagggggtcccgcctgccactgcacggctttcctccctctatctacaggacaaacaaaacacgggagaggggaaaaagcccacattttcttcttgataaatgctgttcaaaaacccatgaaggactcaaagtgacatggtggtttnnnnnnnnncctaaatgatcaacagatgttgctttctatatttttcctttgttctgtttgaactgggctaagtaagcacagttagaccctgctgttcacttgaccacgtcctaaacccgggacaagtgagcactcattcatgcacagcagacccggaggcatgggctggggcagcacaactgggttcccgcagcgccctgcctgcaggctcatgctggaggccacggaaccaggcggcacagggcagattctgtttgtcaagcgccccacaagccttgcccagattgtcaagctcagcagcgagaatggttttgacgaggaggatggaaacagcatctgctctggaagccgctctggcgtggggagagtggggagagggtgcgcttgctgcagctgctgccttaggaggctcctctgtggccaggcttctgcctccctgcaccctgagggaccattcgggtgcctcagggatgcccttccctcccaggggcactgacagcactggctgaaaggtctgaagagccagaggaggagccctgctggctggcccaggatggggcaaggagggagggaaagccaggggatggggagggacatgagatggagtttaaggcacacagcgagcgatggaggagggaggtgctggcctctcccctctgaattaactcccccaggagctcagctctggcctcagtttggtgaggttcagaagactcccagcaataaaaagtatttcttggatgatcaagtcctcccttactccagcctcctcttctcagctccccaggtggtgtgggaggggcccagtggcctggggtggggggtaaggggcgacgggatgacagagactgctgctgctctcaggcgggcaagggaggccctgatggcgccagtaccgcggggcagagcaccagctgcggggctgctaaggcgtcacctgcgtacctttccgggcctgctgaaaagctcacaccatcctccatgcatcagaaggggaagcggaaagtgaaaggatcctcccccgagtctactctgcattctgcccacccagctgcttgcccccattccagggcccctgcaggacaggccaccccaggaggcctccactcatttgagatttcagaagattcagggaccctggagcttagggagggggagcacccaccacttccttggtctgctcctaggtcttctcttccccaa

SEQ ID NO: 242490 - DNA, 1094 bp, Homo Sapiens
  misc_feature (274)..(282): n is a, c, g, or t
ttggcaaggcttgtggggcgcttgacaaacagaatctgccctgtgccgcctggttccgtggcctccagcatgagcctgcaggcagggcgctgcgggaacccagttgtgctgccccagcccatgcctccgggtctgctgtgcatgaatgagtgctcacttgtcccgggtttaggacgtggtcaagtgaacagcagggtctaactgtgcttacttagcccagttcaaacagaacaaaggaaaaatatagaaagcaacatctgttgatcatttaggnnnnnnnnnaaaccaccatgtcactttgagtccttcatgggtttttgaacagcatttatcaagaagaaaatgtgggctttttcccctctcccgtgttttgtttgtcctgtagatagagggaggaaagccgtgcagtggcaggcgggaccccctctggtggcgggaccccctcttgcggtggtcttgcggggccagccgggacctgtcactttattatttaaggagtgtgtgtgtagagtcgctggcttattaacagtattgtgtgtgggttgggtttttagtttgttccttctttttgaagtcccttcatttcaatccttgactctctctccccttcccttgcccagctctgttgaatgctgctgtgcgcgtgtgagggccgctctgcacacagggcccttgggttgtgtgaactgaaattctccctgtatttgtgagactcgcaggagtccccatctgtagcacaggcaatgccagtgccatgctgcagcctcagaaaccaggcctctcactccagcagcaggcagaaccgtgtctgtggtcgggtgctgtccacagctctgtctgccttgttcttgggcttgagctggatagaggtggggtctcttcaccttccctgaattcagaacagaccctgtgcctggccccagtgtgcccaggcaattccccaggccctcattgggagcccttggtgttctgagcagcagggcccaggcagcacatgagcagtgcccaggggctctctgcgtgaggacggcaaggtgcgatgtatgtctaacttattgatgggaggcagccccctgtgccccctaagcctggcc

SEQ ID NO: 242491 - DNA, 853 bp, Homo Sapiens
ttggcacagctgcccctcacccacccctgctcccacagagctgagggcaacatcccagggctcttggcggcctgggcctgcctgcccctgcccttggctagccctggatcccctgacccctgtgcccccaccccagggcgagctgaggatcagtgtcctgcctgcctacctgtcctatgatgccccatggcctgtcaggaagatcccgctgcgctgcacggcccactatgtggcttaccacgtggagtctaaggtgtatgctgtggccaccagcaccaacacgccgtgtgcccgcatcccacgcatgactggcgaggagaaggagtttgagaccatcgagagagatgagcggtacatccacccccagcaggaggccttctccatccagctcatctccccggtcagctgggaggctattcccaatgccaggatcgagctgcaggagtgggagcatgtgacctgcatgaagacagtgtctctgcgcagtgaggagaccgtgtcgggcctcaaaggctacgtggccgccgggacctgcctcatgcagggggaggaggtcacgtgccgagggcggatcttgatcatggatgtgattgaggtggtgcccgagcctggccagcccttgaccaagaacaagttcaaagtcctttacgagaaggagcagaaggggcccgtgaccgccctgtgccactgcaatggccacctggtgtcggccatcggccagaagattttcctgtggagcctgcgggccagcgagctgacgggcatggccttcatcgacacgcagctctacatacaccagatgatcagcgtcaagaacttcatcctggcagcccgacgtcatgaagagcatttc

SEQ ID NO: 242492 - DNA, 1955 bp, Homo Sapiens
ttggctggtgaagaacttccctgtggggcagcgggtccttgtggacagctcctttggacagcccactacacagggcgaggcccgcagggaggaggccacgcgccagggggagctgcccctcgtcaaggaggtgctgctggtggcgctgggcagccgccagagcaggccctacctgctggtgcatgtggaccaagagctgcttatctacgaggccttcccccacgactctcagctcggccagggcaatctcaaagtccgctttaagaaggtccctcacaacatcaacttccgtgagaagaagccaaagccatccaagaagaaagcagaaggtggcggcgcagaggagggggctggggcccggggccgcgtggcgcgtttccgctacttcgaggatatttatggctactcaggggtcttcatctgcggcccctcccctcactggctcttggtgaccggccgaggggctctgcggctacaccccatggccatggacggcccggtcgactctttcgctccattccacaatgtcaactgtccccgcggcttcctgtacttcaacagacaggtggggtccggccggttcccagcagcactggctgatgctgccccagctgggggctgagggggaggggacaggagaagggaccattggctccaccctgaggaccaggaaggagtgtccagagggcgatggggttgaggtcgaggaggtggaacctgtgacttggttgctccaaaggtctggaaaggggtggttgggagctggggctgcagcccctggggtccccaccactgctctgccggctcgccgggcaagccctcgcagggcctggcctccacacttctcaggagagctgacgtgagtgctagctctgccccttggctgctctgtgactttgggaggggacacaggctttctcatgctggttccctatttaagccaccacaccaccaggtcacttgagaccctgcctgggatgaggtgagtgcttcctgggtgcctgaggactcaggactgtccatgaaagagggcagccctggctccctctgcctggttttcagtccccagcatggcagtctgtgggctgccctttgcagcctccagtgccctcctggcctagctttcccatcccctgtggccagcacccctagccccagctgagcgtgggaaaatggacaggaggagccccagaggctgagtggcagccccttccaggacctcgccaggacacagctgcccctcacccacccctgctcccacagagctgagggcaacatcccagggctcttggcggcctgggcctgcctgcccctgcccttggctagccctggatcccctgacccctgtgcccccaccccagggcgagctgaggatcagtgtcctgcctgcctacctgtcctatgatgccccatggcctgtcaggaagatcccgctgcgctgcacggcccactatgtggcttaccacgtggagtctaaggtgtatgctgtggccaccagcaccaacacgccgtgtgcccgcatcccacgcatgactggcgaggagaaggagtttgagaccatcgagagaggtggtgacgcccacaccatactcccatcctcagccgcatcttggggaagccctactctgactgtcacccttggtccccacagatgagcggtacatccacccccagcaggaggccttctccatccagctcatctccccggtcagctgggaggctattcccaatgccaggatcgagctgcaggagtgggagcatgtgacctgcatgaagacagtgtctctgcgcagtgaggagaccgtgtcggggcctcaaaggctacgtggccgccgggacctgcctcatgcagggggaggaggtcacgtgccgagggcggatcttgatcatggatgtgattgaggtggtgcccgagcctggccagcccctgaccagaacaagttccaaagtccttt

SEQ ID NO: 242493 - DNA, 1010 bp, Homo Sapiens
  misc_feature (63)..(94): n is a, c, g, or t
  misc_feature (702)..(715): n is a, c, g, or t
aaatatcataccaaactctgtgtatttatataaagagagactgttaaaagacttcataatatnnnnnnnnnnnnnnnnnnnnnnnnnnnnnnnnctttacgcttaccattgctgcatattgttgcagtataaaacacacacttatctgggatcatgagaatacggcaagaatgtcctgcgtaaactgtaactttgacagcatttaaaaaataaaaatcaaattaagtgcctttgaggccacttcttcccagttgccagttttcttaacccggtactaaaatactgccacacacagctgcatgtctgaggatcatatttaaatatttaaaatgcatctacagtctgtcttagttttctttatatttgggaaaaattttgaatcttaagtgtgaaaatgtaatcacaaatgtctttaccaggaataaaaacacatctagggtagccagcaaatttaaagcaaataaaatattttgtagtcacagactaatactgaggtctgtaaaaagagttgaatgaataatagacagacatcaaggatatattagttccaacaccatccattattgtttctataaccaataatactttaaaaacatttgttaatcaaaataggctgacattgatataactatttatgtgtaaaaatagtgcacgatttatcttccacaaagctagtttacatcctaagagctggtaaacgcnnnnnnnnnnnnnnaatacagacagggatgagactttgaaaaaaattaaattaaggcattcaaaatgggtaaagttgcctatcatgaagcattaggaaactgatataattaactttaaacttcttgttacagtaactgcttaaacatgaacatgcaacttccatcaggtacacaggaatgagtgatataaactccaacattatggctttatacacattaatcagatatcattacttgctgcagttgcaactatgcacttgtataaagccataatgttggagtgatataaactccaccaacttttttgta

SEQ ID NO: 242494 - DNA, 1259 bp, Homo Sapiens
ttgggatcaatccaggctccaggagaaagcaggcgggcgggcggagaaaggagaggccgagcggctcaacccgggccgaggctcggggagcggagagtggcgcagcgcccggccgtccggacccgggccgcgagaccccgctcgcccggccactcgtgctcccgcacggacgggcgcgccgccaacccggtgctgactgggttacttttttaaacactaggaatggtaatttctactcttctggacttcaaactaagaagttaaagagacttctctgtaaataaacaaatctcttctgctgtccttttgcatttggagacagctttatttcaccatatccaaggagtataactagtgctgtcattatgaatgtgacaagtttattttcctttacaagtccagctgtgaagagacttcttgggtggaaacagggcgatgaagaagaaaaatgggcagagaaagctgttgatgctttggtgaaaaaactgaagaaaaagaaaggtgccatggaggaactggaaaaggccttgagctgcccagggcaaccgagtaactgtgtcaccattccccgctctctggatggcaggctgcaagtctcccaccggaagggactgcctcatgtcatttactgccgtgtgtggcgctggcccgatcttcagagccaccatgaactaaaaccactggaatgctgtgagtttccttttggttccaagcagaaggaggtctgcatcaatccctaccactataagagagtagaaagccctgtacttcctcctgtgctggttccaagacacagcgaatataatcctcagcacagcctcttagctcagttccgtaacttaggacaaaatgagcctcacatgccactcaacgccacttttccagattctttccagcaacccaacagccacccgtttcctcactctcccaatagcagttacccaaactctcctgggagcagcagcagcacctaccctcactctcccaccagctcagacccaggaagccctttccagatgccagctgatacgcccccacctgcttacctgcctcctgaagaccccatgacccaggatggctctcagccgatggacacaaacatgatggcgcctcccctgccctcagaaatcaacagaggagatgttcagcggttgcttatgagaaaccaaaacactggtgctcctattgtctactatgagctcacaatcgtgtgggtgagcgttccatgcctccttcacaagtgtgttggtggatggttt

SEQ ID NO: 242495 - DNA, 1106 bp, Homo Sapiens
tttgtacaaaaaagttgggtcggttctgccttcgctgtatcgtgtcgccggcagggaggcatagcgcctctctgatcttcctgcatggctcaggtgattctggacaaggattaagaatgtggatcaagcaggttttaaatcaagatttaacattccaacacataaaaattatttatccaacagctcctcccagatttaaaataaccaatgactgcccagaacaccttgaatcaattgatgtcatgtgtcaagtgcttactgatttgattgatgaagaagtaaaaagtggcatcaagaagaacaggatattaataggaggattctctatgggaggatgcatggcaatgcatttagcatatagaaatcatcaagatgtggcaggagtatttgctctttctagttttctgaataaagcatctgctgtttaccaggctcttcagaagagtaatggtgtacttcctgaattatttcagtgtcatggtactgcagatgagttagttcttcattcttgggcagaagagacaaactcaatgttaaaatctctaggagtgaccacgaagtttcatagttttccaaatgtttaccatgagctaagcaaaactgagttagacatattgaagttatggattcttacaaagctgccaggagaaatggaaaaacaaaaatgaatgaatcaagagtgatttgttaatgtaagtgtaatgtctttgtgaaaagtgatttttactgccaaattataatgataattaaaatattaagaaataacactttcctgacttttttattattaaaatgcttatcactgtagacagtagctaatcttattaatgaaaaacaatagacaaacatctgtgcataatttttcagacacaattctgtaaatatttggaaaccttttaagtatttaaacttttaaatttttgaaataaagtattctaaactaatataaataaggacaatgaaaaaacatgaaaggacttagcataatgttattttatcttttctacaactttgtttaaattacctttccaaagatatttgtgtttatgtaattttccacggaataacattaatactctagtttataaccgggtttcacattattt

SEQ ID NO: 242496 - DNA, 1687 bp, Homo Sapiens
ttggcccttgtccgcaccgcttggagggagtgtgctctgagttaagctggtctcttctggtcctggaaaaaaatgagtattgacaaggttgctggatctgcgcagaaaagaaagtgccacttaataaaaaatttagcccggcagtggtaccgtctgcagagcttgctgcccttggacgttagcaggaagccttcggggtgctgtaatcggcgggcagaggagagggaggccgcggaattaaaaggaacaaaagctagagcgccatgccaaacgtccccggcaagacccagttaggcaggagccgggagtgatgggaaaatgaactagaatacgatgagctgccccattacggcgggatggacggagtaggggttcccgcttccatgtacggagaccctcacgcgccgcggccgatccccccggttcaccacctgaaccacgggccgccgctccacgccacacagcactacggcgcgcacgccccgcaccccaatgtcatgccggccagtatgggatccgctgtcaacgacgccttgaagcgggacaaggacgcgatctatgggcacccgttgtttcctctgttagctctggtctttgagaagtgcgagctggcgacctgcactccccgggaacctggagtggctggcggagacgtctgctcctccgactccttcaacgaggacatcgcggtcttcgccaagcaggttcgcgccgaaaagccactttttccctcaaatccagagctggacaatttgatgatacaagcaatacaagtactaggtttcatcttttggagttagaaaaggtccacgaactgtgcgataacttctgccaccgatacattagctgtttgaaggggaaaatgcccatcgacctcgtcattgatgaaagagacggcagctccaagtcagatcatgaagaactttcaggctcctccacaaatctcgctgaccataacccttcttcttggcgagaccacgatgatgcaacctcaacccactcagcaggcaccccagggccctccagtgggggccatgcttcccagagcggagacaacagcagtgagcaaggggatggtttagacaacagtgtagcttcacctggtacaggtgacgatgatgatccggataaggacaaaaaacgccagaagaaaagaggcattttccccaaagtagcaacaaatatcatgagagcatggctcttccagcatctcacacatccgtacccttccgaagagcagaagaaacagttagcgcaagacacaggacttacaattctccaagtaaacaactggtttattaatgccagaagaagaatagtacagcccatgattgaccagtcaaatcgagcagtgagccaaggagcagcatatagtccagagggtcagcccatggggagctttgtgttggatggtcagcaacacatggggatccggcctgcaggtttgcagagcatgccaggggactacgtttcccaatgcattcatatttgccaagccatccccaccacccagccatgatgatgcacggaggaccccctacccaccctgggaatgactatgtcagcacagagccccacaatgttaaattctgtagatcccaatgttgggcggacaggttatgggacattcatgcccaatagtataaggaactcaacgggaaaaggaaacacacgcaaaaactatttt

SEQ ID NO: 242497 - DNA, 1168 bp, Homo Sapiens
ggtctttgacccctctgcaaaagtatttaaatagcatggcagcatttattgcccttccatcaatcttgcaaagaatcttacaggatccagtttatggaaaaggaaaacttggagaaatccagggacttatcttgggaatgttagatacctttaactatgaacaaaccctgctggaaacaacaaccagccttctaaaccaagatctccattggtcattgtgtaacctgagagcttcggtcaccagaggactgaatcccaaacaagattactgctctatatgtttgcagcagtacaagagacgccaagaaatggctgatgaaataattgtctttagctgtggccatttgtatcactcattctgcctacaaaacaaagaatgcactgtggaatttgagggccaaacaagatggacatgctacaaatgcagttcaagtaacaaagtaggaaaactcagtgaaaattcatctgaaattaaaaagggaaggataaccccatcacaggtaaaaatgtctccatcgtatcatcagtccaaaggggatcccactgctaaaaagggaacctcagaacctgttctggatccacagcaaacccaagcatttgatcagctttgccgtctctaccgaggaagctccaggctggctctcctcacggaactctcccagaatcgcagcagcgagagctataggccattcagtggctcgcagagtgctcctgctttcaacagcatcttccagaatgagaacttccagctgcagctcattcctccacctgtgactgaggattgatgactccatggagcctggcccaggagaaccagagatgatcccgaggcagctggggagaggccccgcctctggtgggcttggcctccaccacctcccatgcttctgagaagaggttccaaattgggctcctgtgcccagagcgtccacagcaccattcccagtgtagactcccagtcttctccacattgctgtcatggcgtcagttcaccagactcattgattttgttttgcttgttaagcaaagggaatgtcacatacctctgtccagctttttaggaaatacatttcgcctattgcgactttttccatttaccctgaagcctagaaagtaggtggaactcacacaaatggcattccagagtctgccatactccgtctcctcc

SEQ ID NO: 242498 - DNA, 936 bp, Homo Sapiens
ttgggctgaacaagctagggacggtctatcatctagaaataaccaaggtggtggcaactccagggaagccgggcgcaactccagtactctggcatcttctccctgtctctcattccataaattgagcagtgtgctagaagtcgtggtgtcgtttgtgaataattacagacccctacgcaattcgtcgagcttgtgcctcaagtgatcgcctgagggcttgcaagtagtttagaaaacagaggctacagaggaacggcttctaacagacttcccagttcccagccacgtcagctcgtaagcctgtaacagcgctactgagccgagccagcacgcaccacacggcccggggaccccccaaaaggacactgagtgaaaaagacgcaccagagggcgcccctgaagggggacctcggcccaacagacaagacggctggtaacgctcttacctaactccactccgcctccgcctcctggcgtcccgcggccccgccccgtcccgccgcggaggctcacgggacatgtagtacgccgcgcgccactcctgcacttccccacccccacgaccgaacctggcttcgctaacgccctcccagctccctcgggcctgacttccggtttcctcgcgcgtccctggcgccgagcccgcggacagcggcagccccttttccggctgagagctcatccacacttccaatcactttccggagtgcttcccctccctccggcccgtgctggtcccgacggcgggcctgggtctcgcgcgcgtattgctgggtaacgggccttctcccgcgtcggcccggcccctcctgcctcggctcgtccctccttccagaacgtcccgggctcctgccgagtcagaagaaatgggactccctccgcgacgtgcccggagcagctcccttaggctgtggaagccaacttttttgtacaaag

SEQ ID NO: 242499 - DNA, 1556 bp, Homo Sapiens
  misc_feature (383)..(415): n is a, c, g, or t
actttgtacaaaaaagttgggtaatcacgaaatcggaaaataatgggcaacagccagtgccttaagggtgaaataacatctatactattttattgagcagttaaagcacttgctatttttctaaatatttacactattactgcttatgtttacaaattctaagtatcatttccctccaaaaagtagactttccagttcttggcactaattcttagtcaaataagcctgaaaatactggcaaccttttcagtcttgcattgctctaccacaggcataataagggctcaggacgagatttctgcattctaaagaaaagtaggcaataccttaaaaatttaaaaactaagtaattgatactcacaagcaggtaacatcaactaaannnnnnnnnnnnnnnnnnnnnnnnnnnnnnnnnacaagagaataatcattaatattatactacaaaagcatgtagtctccataattaaaaaattaaatgtcagatatacaagtaatggcattttctccaataattcataatttttacaatttctgctattttggaacaaacattaaaattcccacgatttaagtatcattaaatatgaactgaaacacttagcatctcagagaattatcaggaatggtagaacttgtaattaactctataacttacatgggtgatatagttcccctttgttgttttatttcttaaatatacattctactaaggaatattttcatgtgaacagctctggtttgaaaaattaatttatactgtgaagagccttaaggttgtacaattttgttaaattatatgataaccttgaatggtaggatgcatttactcaacttagaatatggcgctattattattataaatggtggtttttaattcacattaagataggtggaatttaatccaattttgcaaaggctttgtgtttataaaaatcttaagatggaaaccttgctttgagaaccataaaactcaaaatctgtgtagtattttaagtatgaaccaattgaaattactgttgaaaaatgaagacaaaactgtattgatattctgaaataaacactttatgctgccactatattgaccagttgaagtgtaattaatgacagaagtaaattttttacctaaaggttagttattagtgaggtctacatatttagagagttattcagtagcagatagtattggtaggtaactacataaaacaatacttttatacattttgcatttagtagctaacatgtgatgtcagtacaattctcaaaaacctgtcattagtagtatgagttgctagcaagtgatcttccctgaggtaagagaccatatgcaaaagtcagtgttcatctccaatgaagatacttaaaaataatggcaataaggacctgtggccaggaattacagatgcatttcagattgatatcttaattgcaagcagtaggcttgactgtaaaaaccaaactaaaaatcactggaagacacagagccagtatcagtcaatagcatttgctaactttctcaggcctctaccctaacattttccaataaaaatatccaa

SEQ ID NO: 242500 - DNA, 220 bp, Homo Sapiens
tcctgggccgatgcccgccgcgcgcgggacgctgttacggcacggccaactgctgcctgctcgcctcccgaaggcgccgcccgcgcttcttcctcagccgccgccgaaacccgcaccacgcgccacaagcacaagccaaccgctcgcccgcgcgcccgctcgcagaaagagccgaggccggggggcgggacagaaataactggcgccgacgccgccccaa

SEQ ID NO: 242501 - DNA, 1090 bp, Homo Sapiens
  misc_feature (344)..(365): n is a, c, g, or t
  misc_feature (383)..(501): n is a, c, g, or t
  misc_feature (518)..(649): n is a, c, g, or t
tgggtataatttactgataaagaaatatatttggagttgtgtaaccattaccactacctgtttttagaatattttccttaccccaaaaagaaaccctgtacccattagcagttcttccccattttctcccctcctccaagccctgagagccactcttctgctttctgtctctatggattgcctgtggtggacatttcacataagtggaatcatacaatatgtggtcttttgtgagtggcctctttcatttagcataacgttttcaaagcttatccatgttgtagcatggatcagaacttcatttttatggctgaatactatgatattgtgtagatacaccaccnnnnnnnnnnnnnnnnnnnnnngagacaggttctcactcnnnnnnnnnnnnnnnnnnnnnnnnnnnnnnnnnnnnnnnnnnnnnnnnnnnnnnnnnnnnnnnnnnnnnnnnnnnnnnnnnnnnnnnnnnnnnnnnnnnnnnnnnnnnnnnnnnnnnnnaccatgcccagctaatnnnnnnnnnnnnnnnnnnnnnnnnnnnnnnnnnnnnnnnnnnnnnnnnnnnnnnnnnnnnnnnnnnnnnnnnnnnnnnnnnnnnnnnnnnnnnnnnnnnnnnnnnnnnnnnnnnnnnnnnnnnnnnnnnnnnccacatttttgcttatccattctcagttgatggacatttggattgtttctactttttggctgttatgattaatgctgctatgaacattcctgtacatgtttttgtggatcctgtacatggatctatgtttttatttctcttgggtgtttacctatgagtggaactgctgggtcatgtggtaactctatatttaacattttgaggagctaccagacttttccaaatggtcacaccatttaacattcccaacagcaatgtatgaaggttctaaattctctacctcctcctcatgctgttgtctgtctttttgactttaaccatcttaatggatccctgtaatcgtactagtgagctaatacagctcctactaaggctagacaccattctaagcataattttcatgctcaacaaccctgtgaggttgatatttttaattatccc

SEQ ID NO: 242502 - DNA, 1135 bp, Homo Sapiens
  misc_feature (854)..(925): n is a, c, g, or t
ctttgtacaaaaaagttgggaataaattacaaaatatgcaggcagtaaaaaatggttaatatcagtcatgaatttaattttctaatttatttttgaaagccataatcttcataaaataattctagaatttttttcttcagccaatcaacagagatcatccttttaatttgaaacttgtttttatttttaagatccctttgttgatctagcaagtggccaagttcctttgcctcctgctagaaggttaccaggtgaaaatgtcaaaactaacagaacatcacaggactatgatcagcttccttcatgttcagatggttcacaggcaccagccagaccccctaaaccacgaccgcgcaggactgcaccagaaattcaccacagaaaaccccatgggcctgaggcggcattggaaaatgtcgatgcaaaaattgcaaaactcatgggagagggttatgcctttgaagaggtgaagagagccttagagatagcccagaataatgtcgaagttgcccggagcatcctccgagaatttgccttccctcctccagtatccccacgtctaaatctatagcagccagaactgtagacaccaaaatggaaagcaatcgatgtattccaagagtgtggaaataaagagaactgagatggaattcaagagagaagtgtctcctcctcgtgtagcagcttgagaagaggcttgggagtgcagcttctcaaaggagaccgatgcttgctcaggatgtcgacagctgtggcttccttgtttttgctagccatatttttaaatcagggttgaactgacaaaaataatttaaagacgtttacttcccttgaactttgaacctgtgaaatgnnnnnnnnnnnnnnnnnnnnnnnnnnnnnnnnnnnnnnnnnnnnnnnnnnnnnnnnnnnnnnnnnnnnnnnngatacctgtactgtgttcttcacagaccctttgtagcgtggtcaggtctgctgtaacatttcccaccaactctcttgctgtccacatcaacagctaaatcatttattcatatggatctctaccatccccatgccttgcccaggtccagttccatttctctcattcacagatgctttgaaggttctgattttcaactgatcaaactaatgc

SEQ ID NO: 242503 - DNA, 944 bp, Homo Sapiens
ttggatccagatgtggagatgctggatcaacccttgccagcagagcagtgcacacaggaagacgtgtcttcagaagatgaagatgaggagatgcctgaggacacagaagacttagatcactatgaaatgaaagaggaagagccagctgagggcaagaaatctgaagatgatggcattggaaaagaaaacttggccatcctagagaaaattaaaaagaaccagaggcaagattacttaaatggtgcagtgtctggctcggtgcaggccactgaccggctgatgaaggagctcagggatatataccgatcacagagtttcaaaggcggaaactatgcagtcgaactcgtgaatgacagtctgtatgattggaatgtcaaactcctcaaagttgaccaggacagcgctttgcacaacgatctccagatcctcaaagagaaagaaggagccgacttcattctacttaacttttcctttaaagataactttccctttgacccaccatttgtcagggttgtgtctccagtcctctctggagggtatgttctgggcggaggggccatctgcatggaacttctcaccaaacagggctggagcagtgcctactccatagagtcagtgatcatgcagatcagtgccacactggtgaaggggaaagcacgagtgcagtttggagccaacaaatctcaatacagtctgacaagagcacagcagtcctacaagtccttggtgcagatccacgaaaaaaacggctggtacacacccccaaaagaagacggctaaccctggagtatcacccttcctccctccccaggcaccactggaccaattacctttgaatgctgtatttggatctcacgctgcctctgtggttccctccctcatttttcctggacgtgatagctctgcctattgcaggacaatgatggctattctaaacgctaagg

SEQ ID NO: 242504 - DNA, 1737 bp, Homo Sapiens
  misc_feature (285)..(329): n is a, c, g, or t
  misc_feature (372)..(383): n is a, c, g, or t
  misc_feature (515)..(540): n is a, c, g, or t
ttggatagaatgccacaatttctctaggtttattcaattttcaaattattcctcattttattttaaagcattaaatagaaaagctaattggttaaattttgttatataaatcagagtcatatattctgggatttgtgttactatgcatacttttctaggatgtcaccaaattagttgtttaaaatgtttttagattactgatttatattaagatgacccacactgcaattagattatgcctagtgggaagtattatataaaaagcagaattaagctgggcacatnnnnnnnnnnnnnnnnnnnnnnnnnnnnnnnnnnnnnnnnnnnnnagatactcagccagcctggcaatgtagcaaagactccatctcnnnnnnnnnnnncagaattgcacaaattttctggaatctatggacattccatgagcttaaacacttttgaggtggataacatttagttgaaaatacctaagaaagtgtgtcttctttaaagccttggctttaatcatgggaaannnnnnnnnnnnnnnnnnnnnnnnnnatcctatgtttggtattctgtatgtctgatccataatcattttagatatttgaatgatctctgtggattggtaggtttggccatttgaccattatttattatcaagttggttgtatgctaaggtaagttgacgccatagcattatacagttatcttcattgctcttgaatgatatctgttatataagcaatgtataaataaagtaaaaaggatagaatgaaaaacccattctaatgtcaccactcagagataagtaccgtatttctgtgtatccttctataaactctttacttctgtttcctttattttttaactttaataatgctactaaaagacaatacctaaaagtaattgtactaacaaagtgctaacaatgtgaaaatatatagtcccatagtcatgtccccatatttatactcccacagaagaaaaaattggaaaacaaagtctgatgtccttaatctattaacatatttaaatgatataatggttcagttttccatgaaagtaaatcattatgataggtaaatcattatgggaagtaaaatgttttaaccatatttttcttaatacacaaagcaggtgtcagctgttgtattctcacccttcttaagaaaaatcattacattattgatattttttaagtaacagaatagatttgaaagagataatatatctcttaataccaaaggaaaactaaaacataattctagtgtacttttctttgttccctcatgtctttttcaatctgtacactaacatacctagcaaatttgttttactttaacttgaaatatttaagaacattaaacaagacatttctttggctttggttgaatttttttgtctcaccaatagtaattgaaagatcaattatcaaagagtttgaatagctaatataaaccccaaagtcaccatacagtttttattccaaatatgttgataaaaagatatttgtttctttatccaccttatttttattacagctaaaaaccaatacaaaccaataaaacctagttaaagctattttctggtttttagttgcaattaatttcccctagggtagaaattaaagctgattaagtcacacacacatactttgttggggtgggggtggcaggtggagaggcagtgtacttgggttagctacaattaaaaacagtatttcaattcctcatttgacttattttatatata

SEQ ID NO: 242505 - DNA, 1761 bp, Homo Sapiens
catttcattttcttccctcccttctgcactcccttctctgctcctctcccatttacctgcgactagctctagtaatgccccattcaccctctgttatcattctcgtatattctagctctccagtgcacaccctgagagcttctcatctttctcttcagttcttaaatccccagcaaagtagtacctagcagaaaacctattagtaggtgctgaaaaatgtcttacaataagtgaataaaatatattatctatactgtagcatactacaaagagccctgggctagtagtcagaaaaactggcctgcagtctcagtaatgctatttgtggttctgtggcttcatatttaagccacttaggcactaaagtatcaatttcctcatctataagatggggcttttactgtacttactattgctgtacttactattgtatacggtttcacaaaatgagatgaagaaagcaaaaaaaagcttattgttatgctcgtttaaagcaccatggctacttctgttgaacaacagtatttgccaaccaaacttctaaatgtaagcaggaatagtacagtcatctattaggagaggcagatttaattaatatgtttatttgcctttccctaaaataaggaaaaagccaaagcagctgagctggtaaggcattcatccacattatgtcatcacaagtataatgcttacgctgtgggcaagaaacagcccatgttaattatgccatgtcttccaatcttaattataacgtagatataaagtattggggtaattcttaccaggttctggaaggtctaactttgcccgctttagttctgtcatagaaatctgaagttgctctatcacaaaatcatcttcaaagaaaaaatcctttgccagggtctcctgaaaaaattctacaagttcttccatggacaatttcattagatgttttttgtgtaattttaagatggtgtaagacatagcagtaagaactcgttctccttcaaagatgtagatatcccatattctgaggtttagtgtaaagggagtacgatcaaggaaacactgaaaaaaccatttcattgtgtaaaaacttgtgtagatttcttgagaatccaagtgttgcttaagcttggacagaaatttgttcagtattttttcatgatgttcttgaaacctcaagagtttaggaaaaccttggacaaaaaagccatgcatggcatgtttagggcctgagaagagtttgaccagggcccagaaggcatcttcctcgttcatatacatgaggagtaaagctgtgatctggctcatcccctgacaatacccgacttcctggggagcaaaggggaacacagaagctggggagttcagtcgaattacatgcatatgtacagagaaaaagctactctataaaaaccagaaaatgcctacacacatcatttaatggtccattctagagacaaatactatactctttacagtattatgccacataagagaataaaattgtgctaaaaaataaatgcacaggtacaaagtctaaattgctacatatttttattggactcggtcttcaatactgtcacactttctttaaagagtgataatatttatttcactttatgtatgattcttagctcactattcctcttctttgctcagttgctggcaaagtctccccttctacaatacccagtatgctgtcttgtctcctctagatttctgaacccttaagcagacacatcttgggatgcccatgcacagtctatgccccaa

SEQ ID NO: 242506 - DNA, 863 bp, Homo Sapiens
ggctatgtcaggcattttttctttattatttttcagtttatcttagtaatgccagaaaaataacagccgttattttcactttaaatgcaaaccaaatactgctgcacacagagtacaaagattacctatgaacatggttaggtacaaaggccatattagatgtatagaccacactttgttcttacatcaaagaccgaccgacagagcaattttttgacaattattttagcaaataaccgtgctactaaacaaaggcaaatacacatatatacacaaacacgtctcaactaaaattatacatgtcactttgacaaacaaattctctggtggtttcaccagatatttgcaccccagagttccctgcccaaatcccgaccccaaatgctgacttgatctgaagaaaaaaattagagatgttcttaattaaaggcacatttggcagctactgaaagtggcatgcatctggcacaggtgcgctctccctaagccacaccacatgtaccttccatcatctgttatgcatcttgtttctttgagtggtagtccaatgtgacccactgttagctaatttgctttataattctgcagcaattggctacttaatgcactattttcattaaaggcaaaagggaaatttgctcacagtcgacagaaaatgcactttacggtgtcaaaaatggaaaataaggcatggaatttactaaacaagttacaagtgcttttgttgtttagatttataatatagacttcatgcttcttaagtagagctcaaaatatttcattggctcatgtataagggattatgaaataatcttaaaagttagtaatgagatgtttcaaagccaacttttttgtacaaagtt

SEQ ID NO: 242507 - DNA, 823 bp, Homo Sapiens
actttgtacaaaaaagttggagagaaaatccccctttttgcccaaaaatgtctattcttgacggagagtctaaagcagttcacagaaaaaatgcagtcagatatggagaaaatccaagaattaagagaggctcagttatactcagtggacgtgactctggacccagacacggcctaccccagcctgatcctctctgataatctgcggcaagtgcggtacagttacctccaacaggacctgcctgacaaccccgagaggttcaatctgtttccctgtgtcttgggctctccatgcttcatcgccgggagacattattgggaggtagaggtgggagataaagccaagtggaccataggtgtctgtgaagactcagtgtgcagaaaaggtggagtaacctcagccccccagaatggattctgggcagtgtctttgtggtatgggaaagaatattgggctcttacctccccaatgactgccctacccctgcggaccccgctccagcgggtggggattttcttggactatgatgctggtgaggtctccttctacaacgtgacagagaggtgtcacaccttcactttctctcatgctaccttttgtgggcctgtccggccctacttcgtctgagttactcgggagggaaaagtgcagctcctctgatcatctgccccatgagtgggatagatgggttttctggccatgttgggaatcatggtcattccatggagacctccccttgaggaggtgaattctggccaaaagggctgttggctgtaatcctacgccaggcacaaggcatcttgttgccttgccacgtcctgtc

SEQ ID NO: 242508 - DNA, 2025 bp, Homo Sapiens
  misc_feature (481)..(764): n is a, c, g, or t
  misc_feature (1108)..(1254): n is a, c, g, or t
  misc_feature (1506)..(1580): n is a, c, g, or t
  misc_feature (1591)..(1610): n is a, c, g, or t
  misc_feature (1613)..(1675): n is a, c, g, or t
  misc_feature (1693)..(1742): n is a, c, g, or t
  misc_feature (1756)..(1812): n is a, c, g, or t
ttcacagacactatggtccacttggctttatctcccacatctacctcccaataatgtctcccgggcgatgaagcatggagagcccaagacacagggaaacagattgaacctctcggggttgtcaggcaggtcctgttggaggtaactgtaccgcacttgccgcagattatcagagaggatcaggctggggtaggccgtgtctgggtccagagtcacgtccactgtagagacacaaggaagacagtcagccgtgggccaggagagcctattttagaacacccagcgcctttctactacctccccaataataagaggttcccactggaggttgcacgtattttatttagaatatattctaaacttcacatttcaaaaattactgcttggattagctggttaccagaatactctgaaaatacagaattttagccccgtatcttttctttcacatctgaagccacaatatccatcatgaactgannnnnnnnnnnnnnnnnnnnnnnnnnnnnnnnnnnnnnnnnnnnnnnnnnnnnnnnnnnnnnnnnnnnnnnnnnnnnnnnnnnnnnnnnnnnnnnnnnnnnnnnnnnnnnnnnnnnnnnnnnnnnnnnnnnnnnnnnnnnnnnnnnnnnnnnnnnnnnnnnnnnnnnnnnnnnnnnnnnnnnnnnnnnnnnnnnnnnnnnnnnnnnnnnnnnnnnnnnnnnnnnnnnnnnnnnnnnnnnnnnnnnnnnnnnnnnnnnnnnnnnnnnnnnnnnnnnnnnnnnnnnagatacgctgaattgaggttttcttacacgctcatcatcccttattctgaaaattccaggggccccaagtttcatagaattcagaatattacaggttttagacaggcagcattctataatgaagtattaatagatctgctgtgagattcatgaatgtttacataatgaaggataaaggctctaaacagtaccacataaattcaggttttgatgctataattaatttcccacaaaataatgaaaaaggttttggctttcagagatttgggattttagaactgtgggtaagggactgggaacctgtatcagtatgcttactttttaaatcactcttttaaaattannnnnnnnnnnnnnnnnnnnnnnnnnnnnnnnnnnnnnnnnnnnnnnnnnnnnnnnnnnnnnnnnnnnnnnnnnnnnnnnnnnnnnnnnnnnnnnnnnnnnnnnnnnnnnnnnnnnnnnnnnnnnnnnnnnnnnnnnnnnnnnnnnncaaatcactcttttatccattctataagatctttactctgcacatcgaagctctattcatcttcttctaatgtccagtccaaaacacacatcctccaagtttttcttaatctgcccaggccattacacttactgttctgaaatctaaaactgtgtatgacccatgtcatctcctctggcatttagtattacagcatcttgctatcatcaagtgttttcctgcttcaaaaacactgataatgggctggatatnnnnnnnnnnnnnnnnnnnnnnnnnnnnnnnnnnnnnnnnnnnnnnnnnnnnnnnnnnnnnnnnnnnnnnnnnnnctgtctctacnnnnnnnnnnnnnnnnnnnnttnnnnnnnnnnnnnnnnnnnnnnnnnnnnnnnnnnnnnnnnnnnnnnnnnnnnnnnnnnnnnnncctgagcccaggagtatnnnnnnnnnnnnnnnnnnnnnnnnnnnnnnnnnnnnnnnnnnnnnnnnnngagaacctgcctcnnnnnnnnnnnnnnnnnnnnnnnnnnnnnnnnnnnnnnnnnnnnnnnnnnnnnnnnnctgatatgtattctctcatttgctcctcacatcttgttcaggaggaagagtcccaaacattacctctcagaaatttaagcccacaaatttttactcccacaaaagacaggcaactgatagaggtaaccaagaaccccagaacccttggctcctggttcaacaatctgtctacaacagctgcctaccttcttcttgtgtcatgggtatacccaa

SEQ ID NO: 242509 - DNA, 857 bp, Homo Sapiens
gccaactttgtacaaaaaagttgggttaagcaaattattttgagaccttttgctggtagacaaaaactgaggaaatgtttcactaaatatattatggtcaatgaaaaaaccggactttagagtaaatgtgataaccaagtagatttgtgaactttatttctttagtaattatttttatcttatgtgaaatgattcaacctttaatttttgcctagattatagcaatgttttgttttaccttatagggcattttaatgcttggagaaagactaagtgaatctacttcaagggattctgttcatggtggtatacagttcttggtgctcttttggaaattgtcaaacatttactgatagcagaaaaggaaccccaaaacacctgtagtgttcaccttgttataagaacagaaacatttggaacaggtttcattctgtttctagatttatgttgttgtagttgaacagcaactgtttttttccctcagtgttaacgaaaggataaagactacctgtattgttgggtatgactatcaaaggatttccggtgattcatgtttgtgaattggagtttaaatgtttgcaggattactgtacttccaaagacccactagaatgtcagctgtactctgtactctccactgagaaaatgaacaaaatcctatgtcttaacagttatgctctaactttttgaaagctttttgatgtaaataataggttagaaactaaaagccttttaatcttacaaaatacaatttgaacgatggaaggttgttcagatactggctttctgtaaaaacatcattgtgttaaattgtttgtaatgtactatcaataaaattggctgcttgggcagtttta

SEQ ID NO: 242510 - DNA, 1561 bp, Homo Sapiens
  misc_feature (993)..(1063): n is a, c, g, or t
  misc_feature (1119)..(1127): n is a, c, g, or t
tgttctttacaaggtgttcaagcatttcctcccaccttcctacacatccacacacacagacatatggcatcgcatttggaaatgtgtgcttgtccatttgatcaacgaggagcccagaagtgcttgactgggaatattcaggatcccatgatccgagggctacactgggcagcactgcctccaagtcttcctggggaaagacttaacatcaccttgctctcagcacttgacatgtgaagccaaacccacttctgcaggaagggagatctctgggtaaaaagcatgtccccaggacagtagaggagaaagtccctgaagagactagctaccaaaaaggtctctccgtgacactattaagacaactgctcttgccatctgattgacacctattctccctctgagagggccccagctgcagagcacagcctgcggcacccctgagaactaatctgctgtccatcaccccaggggcctcacaggatggcttcagtgttgcagcccactgatgagacacactttcttcaagagaaagtcatttaataatgcatgaggaatcacaattggcaattaagaagcagtcctgccacaccacgtatggatattgaaaaagactccttcatttcaaagatggctttttttaaatctctcagaatagtaagtacacaagccaaggcacggagagattaaaaggatcatccaaggatatgcagcaagtctatgacagagtccagtggcagagcaaaattgcagaaggcacgcctgacaggtgtctccactctagggcctcaacaatttcaataatgatgtgcccgagaggaaaaaagaagtggaagggcatgggatttttccttacatcctttaaagaagagtctaacttggaaaataacaaggcattcacaggtgaccaagagccattgattatcacttttctttacagtaggattacttattcaattccaccttctcagaatccccacttccactttttttttnnnnnnnnnnnnnnnnnnnnnnnnnnnnnnnnnnnnnnnnnnnnnnnnnnnnnnnnnnnnnnnnnnnnnnngggctcaagtttatggattttaaagccggatatctgtggatcccataggagatggnnnnnnnnntctgtaatcgcctatacttccatcactaccaaagggcaggaactatccatgtcttcctgacagctagttggcagcatggatgggactgtgatttggtgcatccagataccttgtgcaccccctacagttctgagctcccaaaatgatccatgcaaatttcctccacattttctaagagcttgctaatggtgagcatattttaatttctcccaaatgcaacattactgcaatccatacattttttgtttactccttaacagtactggaggaagagaatgggccataaaaataatactcccatttatataatgctacacagtttacaaagtgcttccctacacactctgtgttccaaggcttgcagtgacccagtaaggttggaaggttgaaccccatctggaggactaggaaactgaagctcagaagagggccaa

SEQ ID NO: 242511 - DNA, 663 bp, Homo Sapiens
tttgtacaaaaaagttgggccatgagtgcccacaaggaagcatggcactctggcgggcataccagcgggccctggccgctcacccgtggaaagtacaggtcctgacagctgggtccctgatgggcctgggtgacattatctcacagcagctggtggagaggcggggtctgcaggaacaccagagaggccggactctgaccatggtgtccctgggctgtggctttgtgggccctgtggtaggaggctggtacaaggttttggatcggttcatccctggcaccaccaaagtggatgcactgaagaagatgttgttggatcaggggggctttgccccgtgttttctaggctgctttctcccactggtaggggcacttaatggactgtcagcccaggacaactgggccaaactacagcgggattatcctgatgcccttatcaccaactactatctatggcctgctgtgcagttagccaacttctacctggtcccccttcattacaggttggccgttgtccaatgtgttgctgttatctggaactcctacctgtcctggaaggcacatcggctctaagcctgcctcactccatcgtttccaccttgcagtgatgcagcttgaccctggaacggtcagacaacctcctcaaagtgggcataccagtttc

SEQ ID NO: 242512 - DNA, 890 bp, Homo Sapiens
gaaattgacaacctggacatagattgctggaatgaccaaatgactgcagaggtctcaaatgcagattcccaaatgcctactgctgtagattttgctagaaagttacttttgataaatacggcattctgtgggtgcattttatgtcaacattctaaaagtgatgttcccgaaaccaaagtatcacaaatatatggacccataggtaatgatgtcagatcctgcaagaaaaagtcacacagaaggcaatcctgatacaggtctcaaaattcagtctggaccttaaggaaaacccactacttagtaaaaggaaaacaatgtcaattgtcctttgtagaactgtgcacaattccaggtcagtgggaaaatccaggcagtaagagaataagaaaagatgatgcttcctgtatttggcctcctttagtatgctatctcaatgtaccttattgtgctccataaaatcacaaataaatccagtctaactttaaaactttcttcttgatgtagaatttgtggtaggaaacaataaggggcaatgcagagacacagatttgtggtttacaaggtaatttcaaaaacacattaaaaaatctctaattgcagaatcagagctctcatgacactttagaaggtgagttctagtgattactgcacaacgtatttgaacctctgcatcagtttttaactagacctctgctgtcagcatcaatcctccccataacacctgacatttagaaaaaaatgtttgttcttgggcaatcaataggctaatgttgaagttccattatctagtgtaggaagtatcaggtttaactgcttaatagttaatggaataatctagaatttccaagacctaataaatcaatctctgggattggaaagagaatggccaa

SEQ ID NO: 242513 - DNA, 933 bp, Homo Sapiens
actatctcttccttttttctcagcttaatttcagctacaggagaaagtacactagaaactaattaacaggaagagtacaaaataatatgttagttataactatcttcaggagatgagaactgggaacatgggtgacttttgcttatttgcattttctaattatttaataattatataattatattatctctctctgtaatttgtgtagtaaaacatcagttttatatccaaatttttagtcatttataataaaaggtatattagcatatgattattttatccttagcccacaaataaaactcacaccacatttcctaacactatgggcattttggaacacagtcaatagtgtcacccaataaaataaatcttgaatggttgattttaatacactaaacattacatgaaaatatatgctatcaaaaagcagacattaatatcttcttaataatttttaaaacatcctaaatttaataccaagaattttgcctacccgagttaacattatacaattacatgtaatatacatattcaaaatggcataatcacatgaaattttaaagtaaaaataactcagagaaacttccagtttaacatttacacagcattttattatcctattagccagtgtaaatgcaaactaggaaagttgatatctttcttttatgtaaaaggaagcatatgggtttaaatacctttttatatagcactatcaaaatcggagtcaagattaaattagggaaatctaagtttcttttactagtttattcttgggaatgattataactaacacgtaatttcccctactttgtgaaattccttttctttattgtatcttagtccatgacacaggatttaagaaacttcattatttcccctcactttaaagtgtaggtacccaaatagctttgatctggtggacagttatgccaa

SEQ ID NO: 242514 - DNA, 1729 bp, Homo Sapiens
  misc_feature (1449)..(1467): n is a, c, g, or t
aaaaaaagcttcatttttttctaattagattttaggtttgtatttactctctgagagaataaaaatgaatttgaaccctagcttcccccaatgtaacacttgaaatcagcacagagcttcaagacatgcatagttcaaggctctgagttttatgatatgtgagtttacttaggaaatagattagcattcaagggtttattatatggcagcatttttatgaattattttattttttaaatgctttaagataaggtaattcatacccaatgttccatcaattatacagtcttaagacaaaattatgggtgaattctatcaggtactaatttatacatatcttaacactaaatctgattatttttaataccatatttcaagataaaaatcccataaaaattctatctcttgaaattaaaattgaatattaatgtttaagtcactgtaaaaccaacctgaagactttggaaccactgtgtgatttttctgtttattttcagcaatccagcctataaaattacaagtctctgcatttgcatttaaaatctatacctctaaagtgctggcaatttgaaagttacttgccagtgttaggcagcacttaacttttcatgtttgaactaacacaggtatatcaggatgtgaagctaagataatttatattcttttcttatttttcattgcaaatggcttttagaaatacacatgcaaatacaaatttaagaaaaagctttcaacttcagaaaatttttgcttaaaaatgttcatcagcattttaagaataactttttagttagtcttagaattctaagaattttataacctttaaaattcttttgcatgccagaggcaggcccacagccacccccaaaggctgaattcttaaccattaatataaaattatcaggttgaaattacaataaccattacagctacaaagatgtgaggaaaaattctttatagagaattagtcatgtgtaatgtgttaaaatgaaatggtacaagctctcaatgctcaaatgttatggtccaaaatgcaaacattatgggatggaaagggttaataaaggattggctattagctgctcagtttagagaagtttctatagaggatatctattcacctgtcgtccttttggttgggtagttgatggcaagtcctgtagaataaagccaacccaggagaaaaattttcatttatttttcaagagtacaaagtaatttgtgtgttctgttacaatatggttaaaaaaatgagctagatttaagttgtaaagagataatatacattattccatttatcagaaatgttgagttatcaaaaagtcaaacccaggccatttagcagcaagctgaagaaagcaggtaagtttaagcagagagaaaatgtgttcttaagaaacaactcagcatcttcaacacaaaagccactgcaagtgaaacagcctattnnnnnnnnnnnnnnnnnnnggagctgttgcccttttcaacttagtcactgcaaccatttagattttgaaaaattcaatggctatatggcttttcatcatcttaaaagtattaaatgttaactgttatgaatgaattcctttggtagcctattttaaagttgaaaataaagtcatagacaattttctttcataatttctcttacgatatacttagaatatcattccatttgagataatttctaaattatttacaattttacctgataaaaaagttgatccaa

SEQ ID NO: 242515 - DNA, 1018 bp, Homo Sapiens
atgagcaatgctttttctataatagccaactttgtacaaaaaagttggcgcagaggggcgcgggcgagcgagcgggcggccggccgctgggggtggcgggataggctgggcgcggccggcgctgcagacccgctgctgttgtccgggtctgtgcggtcccgagggccctccgtgccgccggcgccatgggcaattgccacacggtggggcccaacgaggcgctggtggtttcagggggctgttgtggttccgactataaacagtacgtgtttggcggctgggcctgggcctggtggtgtatctccgacactcagaggatttccctagagattatgacgttgcagccccgctgcgaggacgtagagacggccgagggggtagctttaactgtgacgggtgtcgcccaggtgaagatcatgacggagaaggaactcctggccgtggcttgtgagcagtttctgggtaagaatgtgcaggacatcaaaaacgtcgtcctgcagaccctggagggacatctgcgctccatcctcgggaccctgacagtggagcagatttatcaggaccgggaccagtttgccaagctggtgcgggaggtggcagcccctgatgttggccgcatgggcattgagatcctcagcttcaccatcaaggacgtgtatgacaaagtggactatctgagctccctgggcaagacgcagactgccgtggtgcagagagatgctgacattggcgtggccgaggctgaacgggacgcaggcatccgggaagctgagtgcaaaaaggagatgctggatgtgaagttcatggcagacaccaagattgctgactctaagcgagccttcgagctgcaaaagtcagccttcagtgaggaggttaacatcaagacagctgaggcccagttggcctatgagctgcaggggcccgtgaacagcagaagatccggcagaagagattgagattgagttgtgcagcgcagaaacagattgccgtggaggcacggagatcctgcgtacggaca

SEQ ID NO: 242516 - DNA, 1265 bp, Homo Sapiens
  misc_feature (154)..(172): n is a, c, g, or t
tccgggaggtgcatgagtccaatgggaatgcaacccgtgatgccgctgtcctatgcccagtgacagcacaggtcacgtaagttacagcaggggaggggtagctcaagctacagaggattattgtcatattgttaagacagcataaatccattcnnnnnnnnnnnnnnnnnnntccaaaccagggtaagtaaagaaaggaaaaccaaatctatacagcatttacaacaaataaatctctagccagctgggggtaaaatatgcatctatgtatagactatgtgtaggttaagaaagctataaatatggtttagaaagagtcctttgattagagtacaatgctaattaaggcccaatctacaggtttaccacctttgtgggctaattagcttccaatagaggagaatctcatgtttccatagctataaagtgcaccccttatccctgcgaacctcttcacaaatgtgctgttggtcataagggggacagtttgagactatggagtgctccatgaatagaaaagcagttcaaagcacgtgtctcacactcacggagtcagcactgcctccttcacatacgaggaacagtgtagtcattcttaatgtactaagtgtcacggggagcacagaattctaccagcagagcaggcagcaaggtaccaccagtaacttttcctctactttgagctcaactttcacatagctttagcttggttgtttaaaacttttccaatataatacagcaatgagaataatttctttttaaaaaaaggcaggaatctagaatgctagcactgttgcttacctgtcagtatcacacgtaagtctcaaaccctactgaatcacacaggtagggtttaaagtccaagatttaaagaaaaaggaaaacaaaacaaactgatgaaatggaaattgtcatcagtcatgcccagggaagaatcccaagggttttcaccaggtgaccaggtttccaaaggacatgacacatgttatatacatatgctttccagagagggcatgttagtgaacacggggaactatacatagagaatctaagcttgtgtccaggctgccctgcacacttcaaaaatgtacaactcaggtgcaaatgttccatcaggttgtctggtgcagaaagcacaaagcaggcaacaaggcgggctttcacatggccaaggggaagcctcagcaaagcccctctcaagctgcagtgtcttcataagttggcacggccctggctaaaggacacagtgcacagttaccaaaagg

SEQ ID NO: 242517 - DNA, 956 bp, Homo Sapiens
tttctccttttttgtttcctatttcagaatcaaatttattttacttgcaaagtcagtggaatatggtttggaaccagtagggcctctaacttaagcccagaacctgtcaaagagaagtgcagtatcattgctaagacttgaacagtttatctctcagaatcttcagttcctttgaatttctcagctcttagtgtaatctgttttatgtgtttgttgtagacttccattatggatagatttccaaaataatttgggtaatcaactggtattttagcattctggtaactaacatgtttaaaaatctaaggctctttttcatgcaaaggagactgatttttgctttcaaaagcataggcaggaaaccttaggttcaaaggtagtaaataatgatgagcaaattgctagtgatgatacagctgcagcttccgttgtgtatttgtttggctcaggtactctagaaatgagaattcttagaattacatagcagaagtgatatgttgcctggataccacactaccagaggaataaaaatgtagttagagtaaggggttttatattttacaatgagacagtgttagtgtaagaagcattccaaatacgccagttctcttaagcccatagcagacatttatatgttaattcctcaatgtctcatttcccaccttttttagaggaagaaaatactcaggctaaaactttcacccaagcataaactcctggggactttacaagaattttgttttttgcactatgtgacgacacgattgtgagaattaaatataggagtgaaaaaccagagaaatggggcaaaatcccagattagtctttcctctttaagcatctgcttcccattttagaaacatgctttcatcaccacattcagcatcaatttttttctttcctctaacctgctcttcttttaaaaagtattctgggccgggcatggtggctcacac

SEQ ID NO: 242518 - DNA, 1343 bp, Homo Sapiens
ttgggatcatggccgcagccgctctggggcagatctgggcacgaaagcttctctctgtcccttggcttctgtgtggtcccagaagatatgcctcctccagtttcaaggctgcagacctgcagctggaaatgacacagaagcctcataagaagcctggccccggcgagcccctggtgtttgggaagacatttaccgaccacatgctgatggtggaatggaatgacaagggctggggccagccccgaatccagcccttccagaacctcacgctgcacccagcctcctccagcctccactactccctgcagctgtttgagggcatgaaggcgttcaaaggcaaagaccagcaggtgcgcctcttccgcccctggctcaacatggaccggatgctgcgctcagccatgcgcctgtgcctgccgagtttcgacaagctggagttgctggagtgcatccgccggctcatcgaagtggacaaggactgggtccccgatgccgccggcaccagcctctatgtgcggcctgtgctcattgggaacgagccctcgctgggtgtcagccagcccacgcgcgcgctcctgttcgtcattctctgcccagtgggtgcctacttccctggaggctccgtgaccccggtctccctcctggccgacccagccttcatccgggcctgggtgggcggggtcggcaactacaagttaggtgggaattatgggcccaccgtgttagtgcaacaggaggcactcaagcggggctgtgaacaggtcctctggctgtatgggcccgaccaccagctcaccgaggtgggaaccatgaacatctttgtctactggacccacgaagatggggtgctggagctggtgacgcccccgctgaatggtgttatcctgcctggagtggtcagacagagtctactggacatggctcagacctggggtgagttccgggtggtggagcgcacgatcaccatgaagcagttgctgcgggccctggaggagggccgcgtgcgggaagtctttggctcgggcaccgcttgccaggtctgcccagtgcaccgaatcctgtacaaagacaggaacctccacattcccaccatggaaaatgggcctgagctgatcctccgcttccagaaggagctgaaggagatccagtacggaatcagagcccacgagtggatgttcccggtgtgaagctgcaggctgtgctccagatccaccgacccgtagcatctcgtcacgccagcactcgcctccctaccaatgactcacctgaagtgcaatactaaatataaggccagcgggcggcgtctgggtctctgggcgcccccatgtggttgcgacactccc

SEQ ID NO: 242519 - DNA, 1162 bp, Homo Sapiens
cacatgacatttaaactctctttacaaatcaacaaaaaaataacatctttttttccactttgaaagtcacagatgcaatgattttcgacgaggcagaggcttcactgcatgcaagaatggcagagatatgctctcttatagaacgagacagacatttctagcattttgaattatataattcacttgctgaaaatcagtagtatcaaagaaaagtgagagaatccatctaaatatttacaatataagagtctttcctaaacttctttaacaatggcaaggttaggatggtgtctggacagtgttaacaagcattttgatgacaaagaaataacatcacatgaaaagttttctaaaataaatcttagagcaatttaaagaggggtgatctattgcacatagatgaaaaataatctttaattgtatcagtaatatgtaaaacaggttttacatgttttagaatagaaatccttcttctaatttattggaaaaatccaaaaccagctaaaataacattttgggtgacttcataaattgtcttctgaggaattacaaataaaaatatcctttgtaatcatttcttgccacaaggctaccattcttacttatattaatcccaaaggaaaggcttttcgttacatatataataactgttaaaagtctactttcccttattaaatgttgttgagtcactgacaggtactcaaaaggacttctcaagctatattatgaaggccattcactcaaggtaaaatttcagttactcctttaagaattattttaaaatgcacacactgtgaacgtattgcgaatatgtaagaaagtctacactttttgaatagtaagaggacaccttactgcctgcccggctaaatctgtgatgatccacccagaaacagcagagctcacctgtctgtctggagctgctcatggctgctgaattgataccttcaacagctaacattcaaactcgacagcagcagccacacctgagaccagcagaagcgctgaactcccatacatactaagcctctagctaagtctctctgaaaatttcagcctcatcttggagatagagcggtattgaagacaacgagaaggtttgaggttttgcttagaatacagtactgtgcatattttgatttcggatcttatactaacccaa

SEQ ID NO: 242520 - DNA, 760 bp, Homo Sapiens
tgtctgtagctttttaaaactcatgtatctgtccccactttatcagaaattaaataaaatttatcagaaattaaattaaaaatgtaaagctagtctctaatgataaattactctgggctgtatggaacttccatgtcattttatattaaaggttatgaaccacgtgatcttcatttataaatatattcacaacccaggacatgacatataaatggtctcttaggttccatatcatgtatcacagacctgaagagagagattaatagtccttaaacaactcacacacccttcttactacttgtattactttccggtctgtgctctctctccttggccccaaaggactctcccccatatcattctttcacttcatttataaaattctggaaattgtgctctactcccctttttgctaggtatatattaacaatgcctttcaaactaggctataaaatttacagactaccagtagatgccactgtccaacaaatgatgctactgcatcacctggacagtcagaggtttccaattggctacaaagttatcacttcttaactcgacgaaaagataactgaaatgacaagcattaaaccaatttagagcaaagatacttctagtttagttccatatatgtgattaaaaacccagttcaatttttataggaactctttaggaacagggacactcttgctcaaaaaggtaaatgcatggctcctgcccaatgaggatttatatttgataaactctaaagatataccaa

SEQ ID NO: 242521 - DNA, 2131 bp, Homo Sapiens
  misc_feature (1264)..(1569): n is a, c, g, or t
tcagatttatccagatcatttccttttccagatacccattctcctcaccatatattcagagagcagaaaggccctctaaatcttacatcaggagctgtctgtgaattagtatagagataaagtatctctgatacatgtaattactttgctcagtctgatccatatacaaaagcacactgtagacagtgaagaacagaagaaaactaaagcattttctttaaaaaatttccagtttctaaaatgtataaggcaaaacaggtaatagagtcaaaatattgtttgtaatacttttcttctaaaattttctcattaaacttctccaagtagatggtagcacaaatattaatactggagtgtgcatttttgtctaaaatgtatatacattttaaagtgtataggcataggatactatggatcagatcactatttggtctccattatacattttgtgccttggggaaaaaaatccaaatattgtagtttatgaacctgtatcataagaaactagaaaaatttagttatgttgcctactcaaagtagtctttaggagtgttaagtagtgtgtctagaaacaaatagtaaaataattcagatttgattgcactttccctcttattttgataaattattattggtaaaaagaacaagacacattatgttaagactaatactttttataactattctaaaaataaaacatctttgaacatatattttcattttgaagtgaaaagatattttttttgggataacatctaattcaatatatagaaaaaaagacattcattaaataatctaatccttagtaaattatttttaaacgatgttgattaaaaaatgttaaaacacattaaaaggatattgccaccatgagcccaacttttagagcccaaacaattctttacaggcttttaatccatcatcccaaaacttaattcccttaatgggagaaaaagggatgcaaaaatccaaaccaaacaaggcttgctgcaatatctgcataagagccacggtatcttattatagtaatgatctgaagataatgaattatgaaaaatcatgctcagaaattgtaagtgagaaataataaggggtgagaaaaaattcaatgacagaaatattgatactacggcaacacttaagtgtctatcttaaacactgtaaaaaatccaacaagatagaaaaatttggctctaaaattaagttcctttggttacagatatatacttattttaggtatgtgtgaggtttttgttttaagagnnnnnnnnnnnnnnnnnnnnnnnnnnnnnnnnnnnnnnnnnnnnnnnnnnnnnnnnnnnnnnnnnnnnnnnnnnnnnnnnnnnnnnnnnnnnnnnnnnnnnnnnnnnnnnnnnnnnnnnnnnnnnnnnnnnnnnnnnnnnnnnnnnnnnnnnnnnnnnnnnnnnnnnnnnnnnnnnnnnnnnnnnnnnnnnnnnnnnnnnnnnnnnnnnnnnnnnnnnnnnnnnnnnnnnnnnnnnnnnnnnnnnnnnnnnnnnnnnnnnnnnnnnnnnnnnnnnnnnnnnnnnnnnnnnnnnnnnnnnnnnnnnnactgaaacatcacatttgggggaactgtatgatcactccactataatacataattaatatatccatggtaaagaatggtgctcaaatgaaatagtttatagtgccatatgctggtttcttttggaagctggttcttcataaatatttatctttacacaaggtcagtaaaactaaagtatttcagtttcaaagaactattctctctgttctaatgattggatccatttcacaatttaaaatataagtaaacacaggaattttctaaattaatatgtaatttaaaatcatattttaagtaactaaaaactttaaaaattcaaccattaactcaaacaatcagaatctgaaaaaatgtacctaaaacagataagaaaacctgacagaggcaaacaatgcctgatcattgctagttaccaagagctagctttcctattaagttcagctttcattaaaactgaaattaaaagatttaaatattcatacacatccctaaaactcacccgatatgctggagtgtaaaaataaacatttttatcatttgttttagttgtcttgatgccaa

SEQ ID NO: 242522 - DNA, 1542 bp, Homo Sapiens
ttggctttgattctttccagaaaaaaagaccaggccacagaaaatacctcacccttgaacactccacacacctctgccaaccttgtgatgactccgcaagggcaattgctcaccctaaaaggtcccctattctcaggaccagtggtagctgtttctcctgatctcttagaatctgatcttaagcctcaagttgccggtagtgctgtggctctaccagaaaatgacgacttatttatgatgccacgaattgttaatgtgacatcattggccacagagggaggtttggtagatatgggtggcagcaaatatcctcatgaagttcctgatagcaagccatctgaccatctgaaagacaccgtcaggaatgaagataattccttagaggataagggtagaatctcttccagaggaaacagagatggcagagtgacgttgggtccaacgcaggtttttctggcaaacaaagattctggttatccacaaatagttgacgtttccaatatgcagaaagcacaagagttcttacctaaaaagatttctggtgatatgagagggattcagtataaatggaaagagagtgaatcaagaggggagagagtgaagtcaaaggattcttcatttcataaattaaagatgaaagatctcaaggactcaagcatagagatggaactgaggaaagtaacatcagctatagaggaagcagctcttgattccagtgaactgctgactaacatggaagatgaggatgatactgatgagacactgacttcactgctcaatgaaattgcctttcttaatcaacaactaaatgatgactctgttggcctggctgaactacccagctctatggatacagagttcccaggggatgctcggcgggcttttattagtaaggttcctcctggaagcagagcaactttccaggttgagcacttgggaactggtttgaaagagttgcctgatgttcaaggggagagtgactctatcagtcccctcctcttgcacttggaagacgatgacttttctgagaatgaaaaacaacttgcagaaccagcctctgagccagatgtccttaagattgttattgactctgaaataaaggattccctcctttccaacaagaaagctattgatggagggaagaatacttctggcctccctgcagagcccgaaagtgtgtcctcaccccccaccctacacatgaagactggcttggagaacagcaacagcacagacactttgtggaggcctatgccaaagttggcccctctaggtttaaaagtagctaatccttccagtgatgcagatggtcagagtctcaaggtgatgccttgtttggcacctatagctgccaaagttgggtcagttggacacaaaatgaacttaacagggaatgaccaggaaggccgggaaagcaaggtgatgcctacattgggcacctgttgtggctaaattgggcaactcgggggcctcaccaagttctgcagggaaatgaacttacttgtccttaagcagaagccaggctgtgagggaaattgatct

SEQ ID NO: 242523 - DNA, 875 bp, Homo Sapiens
ttggggcggctcctttaggcagctgaaaggggatttaggcccggaagatccgagtccatccgcggcggggagagggcaagcgggaccggtaggggccggagcagcggcggcggcgctcggactgtcccatccgccccgtattgaggcgctgggagcggcggggcgacaggaaagcgatggtgaaagcggggccgtgaggggggcggagccgggagccggacccgcagtagcggcagcagcggcgccgcctcccagagttcagacccaggaagcggccgggagggcaggagcgaatcgggccgccgccgccatggagctgagagtcgggaacaggtaccggctgggccggaagatcggcagcggctccttcggagacatctatctcggtacggacattgctgcaggagaagaggttgccatcaagcttgaatgtgtcaaaaccaaacaccctcagctccacattgagagcaaaatctacaagatgatgcagggaggagtgggcatccccaccatcagatggtgcggggcagagggggactacaacgtcatggtgatggagctgctggggccaagcctggaggacctcttcaacttctgctccaggaaattcagcctcaaaaccgtcctgctgcttgctgaccaaatggtaaggactgtttcctgacagttggcacacacttgctgtctgatagaatcagccactcgcttgtgctgttcttgccattattatggccattaattcacagaggaaatggaaatttgctgagcctcagccttgaggctgcagtggctcagctcactggcttctcgaggctccggtggctccgctcactggcttctcgaggctccggcggcccagctcactggcttctcga

SEQ ID NO: 242524 - DNA, 276 bp, Homo Sapiens
tctaagtcagctgaaagtcttatttttccactggatataatgtattgttatcctctatctgcttttaatattttctcttcacctttggttttcaactgttggctgtgacacgcctgggtgtggttttcttggtgcttgccttgcctggggtgtcttgagcttctgcaaaagttttcagttcttatctcttcaaatatttttcctgtcttattctacccatacttccctactctaaccccaatttcatgtatgttgcccaacttggtaatatatgaa

SEQ ID NO: 242525 - DNA, 1426 bp, Homo Sapiens
  misc_feature (895)..(933): n is a, c, g, or t
ttggagaccaccaaaaagttccaccgcgcgcgcctcgacctgctgctggagacctggatctcgcgccacaaggagatgacgttcatcttcactgacggggaagatgaggccctggccaggcacacgggcaacgtggtcatcacaaactgctcggccgcccacagccgccaggcgctgtcctgcaagatggccgtggagtatgaccgcttcatcgagtccggcaggaagtggttctgccacgtggacgatgacaactacgtcaacctgcgggccctgctgcggctgctggccagctacccgcacacgcgggacgtctacgtcggcaagcccagcctggacaggcccatccaggccatggagcgggtcagcgagaacaaggtgcgtcctgtccacttctggtttgccacgggcggcgctggcttctgcatcagccgtgggctggctctgaagatgagcccgtgggccagcgggggtcacttcatgaatacggctgagcggatccggctgcctgatgactgcaccatcggctacatcgtggaggccctgctgggtgtgcccctcatccgcagcggcctcttccactcccacctggagaacctgcagcaggtgcccacctcagagctccacgagcaggtgacgctgagctacggtatgtttgaaaacaagcggaacgccgtccacgtgaaggggcccttctcggtggaggccgacccatccaggttccgctccatccactgccacctgtacccggacacaccctggtgtccccgcactgccatcttctagtggccatggctgagacccaatccctgggcgcccctggtatccaaagggcccagggaccctgttgcgctgccctggcctcggcattcgaggctcccctagggccgtgccnnnnnnnnnnnnnnnnnnnnnnnnnnnnnnnnnnnnnnnactgcatgcccacccgggtagcaggctgctgggcagttctgctctgtggaggggcgggcaccagcgccacttatgtgcctctgctccgagggccagtgggctgcagggcctgcttggaggaaggatttgtgtgtcggaggccactccgagggcaattctgttaggatttttggatctttctacagctacggggctccgggctactttgcagggatgcgatgcgtaggtgcctttctcttcctgctgaccacaagctctgtgctgggggtacctgtgccctgaagtcctggcccctgtgtcatagccccaagtacgactcactgagccatgctcattgcaggggaggctgggtctgggggtgcgtgacccaatccccttcctcctggcctgacgctgtggcttaagagtaacagcagccaccgcccagttccagtggccccacgaagcccccagtggctggctgtccagctgggcaaacagtggcacccctccc

SEQ ID NO: 242526 - DNA, 1616 bp, Homo Sapiens
  misc_feature (1455)..(1475): n is a, c, g, or t
ttggctgctggcttcagggtgccccccaggctctcccaccctggttgtgccctctgggtatgcgagctttgtcaccggctcctccgacctgagccctcgcctgttctgattatgatgccactccatatttttgacttctcctggtggatcttggtccatcttcattaccctctgtcctttcagaaatgagctgaaatccagaacaaggagggtcggtagtagaatcaaggctccatttggagaaggaaatgactcctttccttcatccttgtccccagcgtctctggtggtctcagggaaaggcctgctcactgttggggagctgggtgcggggcctggggggcaggtggagggccgctgctgttttctctcactcatttcctaggtcttcttatctcctctctgtgtggctctggtgacagggacgatccgtaaggctcagaaccttctgaaacagtattcccagcatggtctagatgggaaaaaggggggctctaacctcattcctctggaaggtaatcaccctgtgttcccctcctgtcccttcctcctccactgtgtgtccacgcacttggcagggcagagcctcccccaggagggcctcgggagaaaccctgaggggagcagggtgggaacggcaggtccccgatgccactcgggcttcagcgggcacagggacagtttcgcagccctcggcctggtcctctctggctgatggcagctctgccctccctgaggcttccctcctcccttccctgtctctgtccttgtctcctgtgtgaactcagaaaaagttatttgtcttggggcagccctttcacgctcagaccagcagtggcaggccccagctggccgaggcctcccggccttcccatctttagaaaggggagtgtgtgcagcagaggacaggcaaactggggctttccccaaatacagcgaggtggggaacccccctggggccaagcatcagctcttcagcccctccttggtccttctccgctttccctgggcctccaggctcggggaaatgagcagctaaggacggtcctgggtgctcactgaagtcaggcttgaaacggctgttcccaaggtggcttgaggtagaggaggggctcagggccctctccgatgcccccttccccatccccatctgacgtccccctcctggagatgaagggcttcttccctgtaccccaaggggcggcctgcctggcccctggataaacgctgcttgtgtttgtgcggccgacatctcgccaggtcacgagcatgatttccgagttaagcacctgtccgaggccttgaacgacaagcacgggccgctggccggtgagtaccgcagcccagcccgagggcagccgctgacactgccttcgcagcggtccccggatggcctgctcctgcctggcccagctgggcccactctgctctgaggatgggccaggcctatgcgcnnnnnnnnnnnnnnnnnnnnntttgggcctaggtctccttgcctctctccagatgggagtgcgtgcctgtctgtcacgcctgggccaacgggagaagccgctgctcctcggaaagcatgcagagagggaagtggctctcttgatgggcaggagccctgacgt

SEQ ID NO: 242527 - DNA, 1088 bp, Homo Sapiens
  misc_feature (797)..(805): n is a, c, g, or t
cactctagtttttcaatatcatatgtaacaaaaactgggcacagctatcatctagtaacaaagccttgaaatatataaaacaatattttcagaactaaaatgagaaatagacaaatccataatcataaggggagattttggcactcctcttttagtaaagaatataaatagaatgaatagaccaaaaaatagtaaaaacataagggtttgaagaacatgattaacaaacttgatctaattgatacatgcatgttgaaaactgatacccaacaagagcagactagaattttttttcaagtacatgttctatagaattttatttaaaaatttgaccatatgcttgaccataaaggaagccttaacaaagattaagaaactgaaataatatggaatatgctttctgccacatataattaaacgagcaataaataacaaaaatgccatactaaaacctcccagttttagaagttaataatgtactactaaatgattcaataggtcaaaccaaaatcacaataggaatgagaagacattttatatttaatatattaaaaatgtaacatatcaaaatgggtgggctgaatccgagtctatgattcaagggaaatttataggcttaaataaagcattagggaaatagaatcatgtaagtatccatttcaagaagtttgaaaaagaaaagcaaattttaactcaaaaaaagtaaattaggtaaattataaacaacaaactagaaaccaatggaaaaaatacaaatacatgtataatgaggtttaacaaatccaaaggttgtatcnnnnnnnnnaagagccttaaattgacaaacatctggccagtttgatcaagaagagagagtgagaatgtgcaaataaataatttcaagaatgaaaactcatttaaaaaaatcctaagaggtctatgtgacttttatgtcagtaattttgaaaatttagataaaatagacaaattcatagagaatctcaatgtgccaaaatcagagtgttggaaatagaaggatttgaatagttttatatctattaaagaaattgagtccataactaaaaattttcccatcctagatgctccaa

SEQ ID NO: 242528 - DNA, 1922 bp, Homo Sapiens
  misc_feature (357)..(375): n is a, c, g, or t
  misc_feature (379)..(650): n is a, c, g, or t
ggaccatgggagtcagcatttttcaagcatccaggcacgctgggcctggtatttcaattagagtttctcattctcacagtctcaggcaggttgcattacctccacttcacagctaagtaaatgcggatctaccagattgaataatctcccccaaataaattcactaatgaggaacagaaggaatccaacgtcagagttagtgctcttctcagagtaataatctgcaaagtgtggtcctgggaccagcagctggggcattacctggacgcttgttagaaaggcaaattaccaggcccaccatccccaccgccagacctactgaatcagaaactctagggtggcccccagcaatcaagnnnnnnnnnnnnnnnnnnnaacnnnnnnnnnnnnnnnnnnnnnnnnnnnnnnnnnnnnnnnnnnnnnnnnnnnnnnnnnnnnnnnnnnnnnnnnnnnnnnnnnnnnnnnnnnnnnnnnnnnnnnnnnnnnnnnnnnnnnnnnnnnnnnnnnnnnnnnnnnnnnnnnnnnnnnnnnnnnnnnnnnnnnnnnnnnnnnnnnnnnnnnnnnnnnnnnnnnnnnnnnnnnnnnnnnnnnnnnnnnnnnnnnnnnnnnnnnnnnnnnnnnnnnnnnnnnnnnnnnnnnnnnnnnnnnnntgtgttctcccctctcttccaataatgtgtattcaacaaggccttcaggtgatgctgatgctgtctgaaagccactgctctccagcatgtggtctctgaaactttacttaggagtatgcatattaaaatatatatataacttaacactatgctactacaaagggcaaaataattcactttattgtactttattttagaataattaagacaaggataggcttcaatgaaattttgctttgatgttacatggtctgactgacactggatttcttcataagaaaaataaatgtgaaaactattccaagtaagcaaatggtggcaaaaacaatctaaagaattggttttagccaggcatttactgttaaggctgcctcatttttcagctttgttgtagttgagattctgatgttcacctaacaaagtccctgacaaaacagacttccttcaatccaggtcataatttgaaacgttatacaataatgagatttaagtgatgaatggaaagaaaagaaggagactgaaaagatatcagaaatttctatttgtttttagattcagaaaaatataattacaggccaacatgggtctgacagagaggaaggacgtcagcagttacttgaatgtaaccccttcccagcatttccaaagacctgcaatgtgctcattgtgatccaagggccttgttacctagtttctaggtgatctacagaattgaaacaacccagcacaactttatttcttgagaagatgaacccttaactatgaaggtgcagaaaggaagtcttcaactgctcactcaccatggctacagtattcaaatgcaacaatcattcagataaataaaacctgtgagaaaaagcaaacaggtgggcaagcaaagcggcagtgattcatactttcagttaaccaattgaacagtggtgcttccttctaaagaagttgttcattgatttttgttttttaagaaacagaaaagcagcagtataatgaaagaagattggctgaagatctatccagcctgttaactacggcttagtacttccagaatcctgagtaacaacacatgacctgtgtgatgataagagcacagaacacatgaacaaccaaaagattctaagctcagcctctttccctatagtatttacagaataattttaaatttcagtttcacctccactacttcaacgattttaccctgtaaattgctgaaggtctttgtgaactgtcgaacagcaaaaacaaaaagtagaggtatctagattataaacccaa

SEQ ID NO: 242529 - DNA, 869 bp, Homo Sapiens
aactttgtacaaaaaagttggctcattctgaagaggctgacgattttactatctcatttttttcctttctccagaatgggttctgggtgggtcccctgggtggtggctctgctagtgaatctgacccgactggattcctccatgactcaaggcacagactctccagaagattttgtgattcaggcaaaggctgactgttacttcaccaacgggacagaaaaggtgcagtttgtggtcagattcatctttaacttggaggagtatgtacgtttcgacagtgatgtggggatgtttgtggcattgaccaagctggggcagccagatgctgagcagtggaacagccggctggatctcttggagaggagcagacaggccgtggatggggtctgtagacacaactacaggctgggcgcacccttcactgtggggagaaaagtgcaaccagaggtgacagtgtacccagagaggaccccactcctgcaccagcataatctgctgcactgctctgtgacaggcttctatccaggggatatcaagatcaagtggttcctgaatgggcaggaggagagagctggggtcatgtccactggccctatcaggaatggagactggacctttcagactgtggtgatgctagaaatgactcctgaacttggacatgtctacacctgccttgtcgatcactccagcctgctgagccctgtttctgtggagtggagagctcagtctgaatattcttggagaaagatgctgagtggcattgcagccttcctacttgggctaatcttccttctggtgggaatcgtcatccagctaagggctcagaaaggatatgtgaggacgcagatgtctggtaatgagtctcaaga

SEQ ID NO: 242530 - DNA, 2277 bp, Homo Sapiens
  misc_feature (1490)..(1554): n is a, c, g, or t
ttggctggatagtgcatacaaagaacttactgatcttcacaaagccaatgctgcaaaggatagtgaggcacaggaagctgctctgagccgtgaaatgaaagctaaagaagaactttctgcagcattagagaaggcccaagaagaagcccgtcagcagcaagaaacattagccattcaagtgggggaccttaggcttgcattgcagcgtacagaacaagcggctgccagaaaggaggattatttacgccatgagatcggtgaacttcagcagagactccaggaagcagagaatcgaaaccaggaactgagtcaaagtgtttcatcaacaacaagaccattgcttcgacaaatagaaaatttgcaagcaaccctgggatcccagacatcgtcgtgggagaaattagagaagaatctttctgataggcttggtgaatcccagaccttgctggcagcagcagttgagagagaacgtgcagctacagaagaactccttgctaacaaaattcagatgtcttccatggagtcacagaattctcttttaagacaggaaaacagtagatttcaagcccagctagaatcagagaaaaataggctgtgtaaactggaggatgagaacaataggtaccaggttgaattggaaaacctaaaagatgaatatgtaagaacacttgaagagacgaggaaagaaaagacattgttgaatagtcagttagaaatggaaagaatgaaagttgaacaagaaaggaagaaagccatttttactcaagaaacaataaaagaaaaggaacgcaagccattttctgtttctagcactcccaccatgtcacgctcaagttcaataagtggtgttgatatggcaggactacagacatcttttctgtctcaggatgagtctcatgatcactcatttggaccaatgcctatatcagcaaatggaagcaatctttatgatgctgtaaggatgggagcaggatcaagcataattgaaaacctacagtctcagctaaagctaagggaaggggaaatcactcatttacagctagaaattggcaatctagaaaaaactcgatcaataatggctgaagaactagttaaattaacaaatcaaaatgatgaacttgaagagaaggtgaaggagatacccaaacttagaactcagctaagagatttggatcaaaggtacaacactattctgcagatgtatggagaaaaagcagaagaggcagaagaacttcgattagatctcgaagatgtaaaaaatatgtacaaaactcaaatagatgaacttttaagacaaagtctcagttaacttgtgaaaattgaattcccatcaaactgaatgtaagcatttaatatctaaacatttaatgtggacttccaataaattcttttatagaattagaaagtgggatttactgtagagtgtaaaaatttttttaaaattgttttacactatgtagtaatatttacagttaaattattttgtgcannnnnnnnnnnnnnnnnnnnnnnnnnnnnnnnnnnnnnnnnnnnnnnnnnnnnnnnnnnnnnnnnccttgaatagcacagagatttattactttatcctcatataaatatggctagagaagaagaatggtgttcatatatgtattgtagatatacaactagttgtatctataatttgtaagtgtttatatatatattaagaacatttgaagagtaatgttaacatactgaaactttgaaatctttcacatttaaaatttcaacatatcttaattactgctcatgaaaatgtacattaagtgttaaagtaaaaaattattaaatctgtggctattaaattttaaactaatttttttcctttaaaagtaagagtcacactgacactgtctgaaatttaaagagtgaatgatttaaacttaaaaaaaattttgatctgaaaatttatttcacccagctttcacaattaagtctgtataaaatgtggtaccttttggtacctatccagagaaacctgtacatattcaatgttatctagatgtgattggataatggagaaaatttatttataatgattttgcaatggcatcaataacatttaaatgattttgaagaagtattattttactaccctataaaatgaatcgaaaataataaagttcttaacataatttactctttaaaaattacctgttcatattttgtaaacccatatttttagcacattaaaaatgaatgtttgatattacagaatattcataacaaaatggaagaattataggaattaacttg
